United States Patent Application Publication US 2013/0332133 A1 - sequence listing, part 51

SEQ ID NO: 311314 - DNA, 539 bp, Unknown
  Bacterial polypeptide expressing nucleotide sequence isolated from the Sargasso Sea
aatgaacaaatctttattttatttagtagaggatttaatagagccaaaatacaactacaaaaatattaacatatctggaataaagactgactcaaataaagtcctccctggtgatttatttatagcagtacctggaatccaatttgatggacatgattttattagtcaggctataagaaacggtgcaagtgctgttattacaaatggtagagaagtagatattgatcctatacctcaaataaaagtagctaaccccaggagagcagtttcttttgtttcatcaaaattttttgatagcccttcaagagatattatagtgatcggaattacaggtacaaatggaaaaactacaacagcatatttaatagcaaatgctttgaataaagcaggctataaaacagcacaaatagggaccactggcgttattgcggaaggttttgatcagaaaaaaacactcaccaccccagatgctgtaagactccaggaattattttttgaatttaaaaactcaaaatttactcatgttgtaatggaagttt

SEQ ID NO: 311315 - DNA, 620 bp, Unknown
  Bacterial polypeptide expressing nucleotide sequence isolated from the Sargasso Sea
aatgcttgatttaaaagaaaattttaataacaaaaaaattttaatttatgggtatggaataagtggcaaggcttgctttcattatcttaaaaaaaaaaataaggtttttatttacgatgataataaaaaaattatcccttctgtaacaaaaaaaaaaattactaaagaaaaaattttaaaaaccaaatttgatataattataattagcccgggaatagataaaaaaaaatgtggattatcaaaattcataaaaaaaaatgatcgcaaaaccgttactgaattagatattttttatctaaataacttaaaaaataaaaaaattacaattaccggtacaaacggtaagtcaacaactgccaagttgatttatgaaattataaaaaaaaataataaggatgttaggttggtaggtaatattggaaagccgcttctgtttgagaaaaatattaacaaaaatacgttattcgttatagaagcatcatcataccaaatcgaatatagcaaatattttagatcggacatagctgcaattttaaatatatctccagaccatcttgagagacatcaaacgtttagtaaatatataagtgctaaactaaagttaattaaaaatcaaaata

SEQ ID NO: 311316 - DNA, 861 bp, Unknown
  Bacterial polypeptide expressing nucleotide sequence isolated from the Sargasso Sea
tgttagtgatttaagtaaagataaagaggtaataaataatagagataccataattgataagggtattgattgcgagataggaaagcatacaaatagaatttatgatgcagattattggattgtttcaccaggtgtaccaagtgatatagatataataaaaaaagctaaaaaattaaaaattccaattattggagaaattgaatttgcaagtagactaacaaatattccgattatcgctgttacaggatcgaatggtaaatcaacaactgtaagtataatacataatatgctaaaaacaaaaaacctaagtcctatactcgccggtaatattggaataccattatcaaaaataatcttagaagaaataaagaacccagatattggcaacattttaatattagaaatatccagttttcagctagaatttatagatcaattcagaccaataattagtgtctttttgaatatttccccagatcatttagaccgccataaaaatatggacgaatacatacaaatgaagttgaagatgattgctaattcaagagaagatgataaaattgtttataatgaagatgatgatacttttagaaaacaatttagtggacgccgaccaaatgaaattccgttcagcataaaaagaaagacacaattttttagtgtatgcaaaacaaaaatttatggtgaaaaaaatgacctattttgttctttagatgatatacttttaaaaggggaacataatttgtcaaatctaattgcctcagcaactgttgctaaaatactaaatgtagataatcaaaccataaaaaatactatgcaaaattacagtgggattgatcacaggcttcagactattagaaa

SEQ ID NO: 311317 - DNA, 400 bp, Unknown
  Bacterial polypeptide expressing nucleotide sequence isolated from the Sargasso Sea
aattgtgctaacatccctattttgcagtgcgataacccacgccatataatggcactaatggccgcacgggtttggccatcacaacccggcatggttgatgcggttactggtacgaatggcaaaacatcaacaactgaatttttacgccagctttggcagcgcgctacctggcaagccgttgcgattggtacgttgggtgtcactggcactgatatgatcaaggctgatgggacaatccttagcctaccacctctaaccacgcccgatagtattagcctccatggtgcaattgccccgctggccaaggcaggcgttacgcaccttgcaatggaagccagcagccacggcctctcgcaacaccgacttgatggtatcaatattcatctcgccgcttttacta

SEQ ID NO: 311318 - DNA, 838 bp, Unknown
  Bacterial polypeptide expressing nucleotide sequence isolated from the Sargasso Sea
tatggtagatgaaaagaatccaatatttgcattatcaacaccaaaggcaaggggggcaattggtgtttttagaatttctggaaaaaactgtcacaacataataaaaaaaatatcttctaaaaaaagatggaaaaaaaacaccacatcaatcaactatcttttagatgaagaaaaaagaaaaatagataaaacaattactgttttttttaactcgcctaacacttatactggagaaaacatggtcgaaatatcatgtcatggcggacttgctataataaataaaatttcccaaaccttaataaattcaggattaaggcctgcaaatccaggagagtttacaaaacgatctctttttaacgataaattagatctaactcaagttgagggagtttcagacttggttaacgcagaaacagaacagcaaagaattatagcttttaaaaatctagaaggacacacatcatccgcaattaagagactaaatctcaaaataactaaaatgctcgcagacacagaggctttaattgatttttcagatgaagacttgcccaaaaacaccctaactaaccttaaagaacaaaataagaacataattaaacttattaaaaaagatgttaaaaggtcgggtttatcgaggcctataagagatggttttttaataggaattttaggaaaaccaaatactggaaaatcttctttcttaaactatatttctggaagagaggttgctattgtaactaacataccaggaacaacaacagattcacttgaggtgccaattgatattgatggttataagtttaggtttattgatacagctgggcataagaaaacacaa

SEQ ID NO: 311319 - DNA, 901 bp, Unknown
  Bacterial polypeptide expressing nucleotide sequence isolated from the Sargasso Sea
atgatagataatcattcaagtaaaagaaatattaatcttgtaattggattaggtaaatctggattttgggctgccaagtttttgagaagcatcaataagagagtaattgtttgggaaagtaaagatgggatagaattcttagaaagaaaaacagcattagaagatcttaatatcatagtttctctaaataaagaatttgtatttgaagaaattcaaccttttttgaaagagatcgaatcagttgttgtaagtccatcaataccttatgaccatataactattattgaattaaaaaaaaaggaaattaaagtaattggagaaattaatgttgcatgggaaattttaaaagacacaaattggataggtattactggcactaatggcaagactactgttactcatctactaagccatatactctgtgatactggattatatgctccttttgctggaaatattggtacacctttatgtaagtatgctcactccaaaaaacatgaaaaaattgattgggttgtcgctgaattaagcagttatcaaatagaaatatctccagaagtaaaacctaatattggaatatggacaaccttcacagaagatcatcttgaaagacataaaacacttgaaaattatttcaacataaaaaaaagcttgttagaaaaatctgattttagaatttataattatgacgataaaaacctaagaaatcactacagttcgctatcaagaggggtttggataacaactagtttcgataaatcaaattttattcattgcgattattggatagatgaacaagcgtacattgttgagagagggaagaaattattcaaacttgaacatttttctttaaaaggaatgcataatcttcaaaatcttttattggtaatgcagcagcaag

SEQ ID NO: 311320 - DNA, 418 bp, Unknown
  Bacterial polypeptide expressing nucleotide sequence isolated from the Sargasso Sea
aatgcagctaaaaaaattaattaaaaatcttgcttttgaaaaaaaaaatatcctcataagaggtctttctgcaaatagtaaatttgtaaaaaagggattcattttttttgcaataaaaggttttaaagttgacggtgaaaaatttatcaacgaggcaataaaaaaaggtgcaagtgtaattgtctgctcaaaaagatctaattataataacaaaaaaatcttagtaattaaaacctcgaatgtgagaaaattgctcagcaaagttgcttcaaaattttatttacctaaaccaaaaaatattatagccgtaacaggcaccaatggcaaaacttcagtagctgatttattttatcaaatattaaatttgaataaaattcctgtagcatgtatcggaacactcggaattaaatctaaagga

SEQ ID NO: 311321 - DNA, 784 bp, Unknown
  Bacterial polypeptide expressing nucleotide sequence isolated from the Sargasso Sea
agtcaaataataaacagcacacttgatatcacagacaattcggttttatttataaatcatcaatctaaagaaaaattagaaaaatatattagcgaagctcttgataaaaatttacaaacaattgtaacaagtgagaattgttctatttcaaacgaaaaaataataaaggttaaaaattatgaagaaaaatataatgaagtactcataaaattatgtccaggataccaaggcaaaaatttttatggtattactggcacaaatggtaaaactactacaggtttctatttaaaccagcttattaacaaaccctctctttttattggtactactgaagaagatatatttaaaaaagttacgaatgaagaacatttaactactccaaagttatttaatattttgaagttactaggtttaaatgaaaataaagatattaataatgtgataattgaggtttcatctcatgccttagaacaagaaaggctaaaaggactaaaatttaaaatatcaggatttacaaatctatcacaagatcattttgattatcataaaaatattgaaaactacttcaattctaaattaaaactgttttctaataatgtatctgaaaagttagtatatattgactcagattggggcaataaaataaattcattatcgaagataccatcttttagtatcggaagaagtaagaaaaataatttgtatattaaaaaaataaatattgataaagaaaaatatgatttaacttttgaaatagaaggaaaaagtttgaaattacagttcc

SEQ ID NO: 311322 - DNA, 802 bp, Unknown
  Bacterial polypeptide expressing nucleotide sequence isolated from the Sargasso Sea
atgaaaaaaaacttaaatattttttttaataaaaaaatattaatttatggtttaggaaaaagtggcatttcgacctttaattttttgaaaaataaaagtgatgtttttctatatgatgatttttataaaaattcgaaaaaaattttatcttataattcagtcaataatactaattttgattatataattataagtccaggtattgatataaataaatgcaggttatcgaaatatttaaaaaaaaattttaaaaaaatttattcagatttagatgttttttactcagtgtataaaaatgattgtattacaattaccggaacaaatggtaaatctacaacatgtcaacttttatttgaaatcttaaaaaaacaaaattgtgacgttaaattagtaggaaatattggtaatccaatattatcagcaaaaaaaataaagtctaaaacgatttttgtagtggaggcatcctcatatcaattggaatatagcaaaatctttaaatcaaaatatgctgctatattgaatatatctccagatcatattgaaagacacaaaactatagaaagatatgttaatgcaaaatttagtatattaaataatcaatctaaaaaatcttttggttttgttaaagaaaatgataattttataaagaaaaagttaagaagagaaagatttaattgtaaaataataagagttaattcttttaaaaaaaatcacattgtaaataaaattaaaaacgaatatttttctactgaagctaataaagaaaatcttttatttgcgttaaaaatatcagaaaaatgaa

SEQ ID NO: 311323 - DNA, 805 bp, Unknown
  Bacterial polypeptide expressing nucleotide sequence isolated from the Sargasso Sea
aatgaatactttaaataacgatgagctttctttaattaaaaaactcaactcaaatcaaataataaacagcacacttgatattacagacaattcggttttatttataaatcatgaatctaaagaaaaattagaaaaatatattagtgaagctcttgataaaaatttacaaacaattgtaacaagtgagaattgttctatttcaaacgaaaaaataataaaggttaaaaattatgaagaaaaatataatgaagttctaataaaattatgtccaggataccaagacaaaaatttttatggtattactggcacaaatggtaaaactactacgggtttctatttaaaccagcttattaatgacccttctctttttattggcactactgaagaagatatatttaaaaaagtaacgaatgaagaacatttaactactccaaagttatttaatattttgaagctactaggtttaagtgaaaataaagatattaataatgtgataattgaggtttcatctcatgccttagaacaagaaaggctaaaaggactaaaatttaaaatatcaggatttacaaatctatcacaagatcattttgattatcataaaaatattgaaaactacttcaattctaaattaaaactgttttctaataatgtatctgaaaagttagtatacattgactcagattggggcaataaaataaattcattatcgaagataccatcttttagtatcggaagaagtaagaaaaataatttgtatattaaaaaaataaatattgaaaaagataaatatgatttaactttttga

SEQ ID NO: 311324 - DNA, 850 bp, Unknown
  Bacterial polypeptide expressing nucleotide sequence isolated from the Sargasso Sea
tgatattaattcatgtaagcttaaaagatatttaaaaaagaatttaaaaaaaattaatactgatttagatatttttttttgtaaatattataaaaataaaattattactataactggaactaatggtaagtcgactacagcaaaaatattatatgaagttttaaaaaaacaaaaaaaagatgtaagattggtaggcaatataggtaatccaattttacttgaaaaaaatataacaaataaaactatttttgtaattgaagcctcttcttatcaattagaatacagtaagatttttaagtcaaatatatctgcaatacttaatatttcaccagatcatttagaaagacataaaactttaaaaaattatattaaggcaaagtttaaattaataaataatcaaacaaaaaaagacattgccatcttaaatataaataacggttatattaaaaaatatataaaaaataaaaaatatcttcctaaaattattaaagttaatggcaatgtaaaatcaacaatcttaaacaaaataaataatccttattttaaaaccgaagcaaatatagaaaatttatcttttatattaaaaattataaaaatactaaaaattaaagaaaaaaatatattaaatattttaaaaaattttaaaggtttaaattataggcagcaaattatttttaaatctaaagatttaacaattatcaatgactcaaagtctacaagtttttcgtcatcaagtggtattttaaaatcattatctaatgcttattggatagttggaggtttaaaaaaaagaggtgataaatttttattatccaaaaatgattgtaaaaattttaaggcatatatcttt

SEQ ID NO: 311325 - DNA, 396 bp, Unknown
  Bacterial polypeptide expressing nucleotide sequence isolated from the Sargasso Sea
tatgagatctataaaattacataaacttttagatttggtaggaattattccttcattagatttaatcgatcatgaaataaataatatttcttttaactctaaagaagtacaaaaaggaactttatttttaggtatgcctggtttaaatgttgatggaggaaaatattgtattgaggcaattgcaaatggtgcagaggctgccattattgggtctactgcaaaagagaaaattggatttattgatcgaaaaaggattttagttatagaggataatttagattatatttttggtcaaatagtctctgagttttggaataggccttcaagaaagcttaaacttattggtgttacgggtacaaatggaaaaacgacaattacttttttattggaatatct

SEQ ID NO: 311326 - DNA, 589 bp, Unknown
  Bacterial polypeptide expressing nucleotide sequence isolated from the Sargasso Sea
atgataaatataaataaaagcacgaaaatcaatattcgagataaaaaaataactgtgatcggattaggagtaagtggtaaagcagcatccatcctagctaatcatctaggcgcaatagtttttgctagcgatttaaattcgaatgatgaagtcaatttaaatgcaatggaattgatacatgatcatcatatttcaactgaaacaggacttcatagtcaaaaaatatataattcagacttatgggttctttctccaggtatttctatagattcaaaaatagttaagattgcatataaaaaaaatatacctatcgtaagtgaaattgaatttgcaagttggtataccaaatcaccaataattggcattacaggatctaatggtaaaactacaacaacgcacattttgcataaaatatttcaaactagcgaaatcaaaggtgttatggctggtaacgttggaattccattttcagaatgtgtcttaaatgaaattttaaaaccaactaaaaaattgctttacttattagaagtttccagttttcaattagagttcatatgtactttaagaccatataatagctattttcaca

SEQ ID NO: 311327 - DNA, 571 bp, Unknown
  Bacterial polypeptide expressing nucleotide sequence isolated from the Sargasso Sea
tttgataaaaagtatttccacagatactagatctattgttaaaaaatcaatgtttattgcattaaaggggaataactttaatggtaatgattatgttgaagaagctcttaaaaaaggtgctgtaattgctcttacggacgataaaagatttttaaattcaaaaaataaaaaaattatatatgttaaaaatactattcttgctctaggaaaaatatctagaaacattattaaagaatttaatggaacggttatcgcagttactggaagcaacggcaaaacaacaacaacaaacattatcgccagcactttaaaagaatcgtctagcaccatagaaaactttaataatgaaattggaatgccattaagtctaattaacgcttcttttaaatcaaaacaattagttttagaaataggagcgtcaaagtttaaagatatagattacttaagcaagattttaaatcctcacattggaattatcactaatattggaaactctcatcttgaaaagctacaaaatataaaaggtgtcttgaaagtaaaatctgaaattattaaaaatattagaaagtaa

SEQ ID NO: 311328 - DNA, 762 bp, Unknown
  Bacterial polypeptide expressing nucleotide sequence isolated from the Sargasso Sea
gatgatttggaaatcttccggatcaaatcaaatagctgtaaataatgtatcgaataactcaaaaaaaattaaatctggtgatatatatatagcaattaaaggttcaaattttgatggtcatgattttattgatgatgcaattaaagaaggagctgtttgtgtcatttgtgaagtttatccacttaacagattagaaaacataacatatataattactaaatcttcaaaagaaacatattctagaatttgttcaaattattttgataatcctagtcacaagttaaaactaattggtgttactggtacaaatggtaaaacatcttgtacaagtcttatgcaccaaatgttcaatttaaatggattaaagtgtggccttatctccactaataaaataattgttggttcaaaagaatatgatacaaatttaacaactcctgactcatatgatttgaattattatttaaatgaaatgattaaaacagatattaaatattgttttatggaagtatcatcacattctatagatcagagaagaatttcgggtttaaagtatgaattagcaatatttacaaatatcactcatgatcacttgaattatcacaaaaactttaaaaattatttaaatgttaaaaagaaattttttgatgatttggataataatgcccattctttgattaactctgatgataaaaactcaaaatatattattcaaaatactaaatcaaaagtttatacttattctatttccaaaaatgcagactt

SEQ ID NO: 311329 - DNA, 835 bp, Unknown
  Bacterial polypeptide expressing nucleotide sequence isolated from the Sargasso Sea
atgagaataaccctcccaaattcaagaacattttcaaagatatttcaaaaagctactggaaaatctattagtgaaaaaattaatggtatcgcaactgacagtagagaggttcaagagggcgatctatacatagcaatcaaaggagaaaaagttgacggtagcgattttttgggacaggtttttgaaaatggtgcatcttatgctatggtatcaaaaaaacaaaactacactaagggtgaacaaattgaagttggtgatactattaaaactataggaaaaatagcaactgaatggagattacaatttagcatacctgtcataggaattactggtacaaacggaaaaacttcaacgaaagagttgttaaaacatatactctcatcaaaatttgatgttcatgcgactgaaggaaattataatacatcaattggactccctcttaccttattacagctaacaaaatttcacggcgcttcaattttagaaatgggagccaatcaaatcggtgacatagatattttagcaaaaatcgccaaacctaacattggggtcattacaaacatagctccagcccatcttgagggttttggaagtatagaagctgtagcaaaaaccaaagcagctatttttgaaaatttaccaaatggtactgcatttataaattatgcagatgagagagtaaaaaaaatcaaagtaaatggaaaatctgtatcttttggcataaatccagactgtgactatcctgcagatttacactacgaagacgatggttccataactttaaccattaacgctgaagaaatacctactttttcgtcaaatctttcttttgcta

SEQ ID NO: 311330 - DNA, 347 bp, Unknown
  Bacterial polypeptide expressing nucleotide sequence isolated from the Sargasso Sea
catgttgttaaaaaatcttattagcaatctcaagcccaatgttgctgcaaccaaaattaggggtatttcatttgatagcagaaatatcaagaagggagatctttttgtttcaattaaaggcaacaagtttaatggaaatgattatataaatcaggctatttcaaaaggagctaaagcaatagttcactctcaaacaataaaaaaaaataaaaaaatagtatacataaaggtaaaggacacaagagatgcgttcgccaggctaagcacaaattactacaagaataaaccaaaaaatataatcgctgtaacaggcacaaatggtaaaacgtcaatatcagatttttttt

SEQ ID NO: 311331 - DNA, 928 bp, Unknown
  Bacterial polypeptide expressing nucleotide sequence isolated from the Sargasso Sea
atgcatctctctgacttaaataatcctgagattttacttccaaaaaatgcggacaaaattcctattaagtctataacatctgacagcagaaaattaactaaagactgcatgtttgtagccattaaaggttatgaaaaagatgggcacgattttattgatgaagcaatatcaggtggtgcaagcaatattttagtagattataattataaagatacaaaacaactacctttatctaaatctaagaatgttagaaaagcattagctcttgttgcctcaatatatttcaataaacagcctaatattattgctgctgtcaccggcacaaatggcaagacttcagtatgtacttttttgaagcaaatatgggatttaaataatttcaaatcagcttccttaggaacattaggattaaatactagtaaagaaataaagcataaagaaacacaaaatgaaaatttgacaactttagatccattaaaacttcatgaatgtatttctcaaattaaacaattaggtgttgatagacttgctttagaagcatcttcccatggtctggaacaacataggcttgatggtgttaaggtttcattggcttgttttacaaatttatcacatgatcatatagattttcataagtctttagataactacaaaaaacaaaaatttaggctttttacagaaattcttcaagacagtggtaccgctgtcataaatattgatgatatcaacagtaaagagcttctagacaaacttcataaccgcaacattaatattatcacttttggaaaatcatctaatgcaaattggaaaataaaaaaaatttttgaaataggtgaccataaaactttcgaattacttgtaaataaaaaaagattcattattcctactgcattaaattctaactttcaaatttacaacgctgtagctg

SEQ ID NO: 311332 - DNA, 370 bp, Unknown
  Bacterial polypeptide expressing nucleotide sequence isolated from the Sargasso Sea
aatgcttcttaaagaattaataaaggaaattgaaaatttagatattaggggaagtaccaatattaaagttaataatgtctcaaaaaactccaatgaaattaagcccggagatttatttgttgcaataaaaggttctaaatctgatggtcatgattttataaatgatgctataattaaaggagctaaatgtatattgtctgaaaaaattattgatattgaagatgataacttaacctttgttattacaaaatgctctaaagaaacctactctagggtctgctccaaattttttggtaatccaagtaataaactaaaactaattggtataactggaactaatggaaagacaacttcctcaaaccttttatac

SEQ ID NO: 311333 - DNA, 610 bp, Unknown
  Bacterial polypeptide expressing nucleotide sequence isolated from the Sargasso Sea
ttggtcgcggcaggtctagatggacagtcgtctgtctcatggcctggggcggaaaccgaggatcccgagatagttcgggtgtctcacgattctcggagcgtggcttccggggacttgttctgctgtgtcgctggtggaacgcatgatgggcaccgtttcgctgccgatgcggtggccactggtgcagtagggctgctggtcgaacattcggttattgacgcatcggttccggtcgtccgggtgtcgtcagtccgtcaggtcatagggccgctggctgccgctcttcatagttggccctcgcgatctttggatctggtgggggtgacgggaaccaacggcaagaccagtgttgttcatctactccgatctattctcaaagcgtcgggccgacgggcggagtcgtggggcacgttgtccggtgaacgcacgactcccgaggggaccgatctccaggcgacgatcgctagctgggtcgccggcggagttgatgccgcggccctcgaggtttcctcccacgccttggctcagcatcgggtagacggcaccacgttcgctgccgtggcatttacgacccttggtcgggaccaccttacttccacggctccatgga

SEQ ID NO: 311334 - DNA, 624 bp, Unknown
  Bacterial polypeptide expressing nucleotide sequence isolated from the Sargasso Sea
aatgaaattcactaatgatctatatttcaaaaaaaaaatcttaatttatggccttggtatttcaggaatatcttgcttaaattatttaaaaaaaaataatttagttaagtgctttgacgataataaatcaaatctaaaacataaaaaatttaaaaaatatttaatttcaaaaaaaaaaattactaaatttaattttgatcatataataatgagtccaggtattaatagtttacagtgttcattaaagaactatattaaaaaaaataaatcaaaggtttgtacagatttagatgttttttactcagaatattataataattttataatagcaattacgggaaccaatggtaaatcaaccgtgtccaaattactaaacgacatattaaaaaaagataaatatgactcgagacttgtaggaaatataggaaatgctattttaaacgaaaaaaaaatttataagaaaacaatttttgttgtagaaatttcttcatatcaaatcctttatagtaaaatttttaaacccaattatggtattttattaaatatttctcctgatcatttggaaagacacaaaacatttaataattattgtaaaactaaatttaaattaatgttttcaattaa

SEQ ID NO: 311335 - DNA, 901 bp, Unknown
  Bacterial polypeptide expressing nucleotide sequence isolated from the Sargasso Sea
tacatacaagagtcaatcagtaatggagcatgtgcaatattgtgtaacgatcgatttgacgtatcgaaaataaatgttccatatatagtttgtcaagacacattgaaatctctagcaagtcttgctgcgggctacagaaaaattattggatcacctttaacaatagggataacaggaacaaacggcaaaacgacagtaactcaactgacaactgcgatactaaaacaatgcttttctgtaagtactactctaggtaactataataatgacattggtttgccattgtctatcttaaggtcttccgacgaaaattgtcaaaggtgtgtatatgaacttggagctagtaagaaaaacgatattagttatttagtaaatatttgtgaaccaaaaatgaccgctttattaaatgtttctgaggcacacatggagtcttttggtagttttgaaaccctaattaacacaaaagaggaaatattctctcatacaaacacagatcaagttgtattgaacaaagatgatgagcgttttgttagatggaaaaaaatgaacaaatataaaaaaattactactatatcaatattcagtgatgcagattattttattgaaaaaatagatgacgaatttttatatatttccacaccaaaaggcaaatttgaattaattaagaaaaatagcactgagatattagctattaatttattatttagcatagctttagcaatggaggcgggcgccgacattcaatctgttaaggatggtatttatagcttttcgggtgtacaaggtagattttttagttttgtttcatcaaacaagtctatagtaatcgatgattcatataacgcaaatcctgaatccatgaaatcatctttaaatcaaataaagcattcaaaaaaacaaa

SEQ ID NO: 311336 - DNA, 406 bp, Unknown
  Bacterial polypeptide expressing nucleotide sequence isolated from the Sargasso Sea
atgatagataattattcaagtaaaagaaatattaatcttgtaattggattaggtaaatctggattttgggctgccaagtatttgagaagcatcaataagagagtaattgtttgggaaagtaaagatgggatagaattcttagaaagaaaaacagcattagaagagcttaatataatagtttctcttaataaagaatttgtatttgaagaaattcaaccttttgtgaaagagatcgaatctgttgttgtaagtccatcaataccttatgaccatataactattattgaattaaaaaaaaagggaattaaagtaattggagaaattaatattgcatgggaaattttaaaagacacaaattggataggtattactggtactaatggcaagactactgttactcatctac

SEQ ID NO: 311337 - DNA, 397 bp, Unknown
  Bacterial polypeptide expressing nucleotide sequence isolated from the Sargasso Sea
tttgaaaaatttaaaagaaatattatttaaggttactgttgatgctatatatggagatacttcaacattagtaaaagatatatgctttagttcaaaaaaagtagataaggattctctatttgtagcaattaatggttataatactgatggtcataattttattcatgaagcaattaataacggggcttcaactgttatatgtgaagttcttccaaaagattttaaaaaattaaaatcagtttttgttaaggttacatgttcaaaatctgccttatcaattatttcatcaaatttttatgacaatccatcttctaagattgatctaattggtattacaggaaccaatggtaaaacaactatctcatcattattatttgatctgtttaatagattttca

SEQ ID NO: 311338 - DNA, 932 bp, Unknown
  Bacterial polypeptide expressing nucleotide sequence isolated from the Sargasso Sea
ggtttacaggaatttccgttgcaaagcatttagaagtttaaaagcaaaagtattttgttgggacgataataaaaatataagaaaaaaaataaaaaaactaaattttaaagtaaataaattttggttagataaaaaaccagttgataatatagttataagcccaggaattgatataagaaagtgtaaaataaaaaattatttaaaaaagaatttaaataaaattattacagatttagatttatttttcgaattaaataagaattcaacaattatttctattacagggactaatggaaaatcaacaacttgcaaaataatagaaaaaattattaaaactgcaaaactaaatgttaaaacagtcggaaatatcgggaatcctattttatctattgggaaaaaaactaaaaaatgtatttttatattagaagcatcatcataccaactagaatattctaaattatttagatctaaacatgcggctattttaaatatttctccagatcatttagaaagacataaaaatataaaaaattatataaaagttaaatcaaaaatattttttgcccaaaaaaaatcagattatttatatataaataaaggcaataaatattttaaagttatagaaaagatatataaaagaaagaaaatacgctcaaaattaaaactaattaaaaaagctaactataaaattttactaaaaaaaataaataacaagtattttaaaagtgatggcaatatagaaaatttaggttttgcatatgaaatcgctaaaaatttaagaataaaagataaaataataattaaggctttaaatagatttaaaggtttgccacaccgacaagaaattgttttttctaaaaaaaatattacctgtattaatgattctaaagcaactagttttgatgcaagtttacagtctttattaaatacaa

SEQ ID NO: 311339 - DNA, 699 bp, Unknown
  Bacterial polypeptide expressing nucleotide sequence isolated from the Sargasso Sea
aatgatagataatcattcaagtaaaagaaatattaatcttgtaatcggattaggtaaatctggattttgggctgccaagtatttgagaagcatcaataagagagtaattgtttgggaaagtaaagttgggatagaattcttagaaagaaaaacagaattagaagagcttaatatactagtttctctgaataaagaatttgtatttgaagaaattcaaccttttgtgaaagagatcgaatctgttgttgtaagtccatcaataccttatgaccatataactattattgaattaaaaaaaaagggaattaaagtaattggagaaataaatgttgcatgggaaattttaaaagacataaattggataggtattactggcactaatggcaagactactgttactcatctactaagccatatactctgcgataatggattatatgctccttttgctggaaatattggtacacctttatgtaaatatgctcactccaaaaaacatgaaaaaattgattgggttgtagctgaattaagcagttatcaaatagaaatatctccagaagtaaaacctaatattggaatatggacaaccttcacagaggatcatcttgaaagacataaaacacttgaaaactatttcaacataaaaaaaagcttgttagaaaaatctgattttagaatttataattatgacgataaaaa

SEQ ID NO: 311340 - DNA, 571 bp, Unknown
  Bacterial polypeptide expressing nucleotide sequence isolated from the Sargasso Sea
atggacgtaccatcattaattttagataacgatgaaaattctttttgtatatatggattaggaaaaacaggatcgtctgttgttaattattttaatcgaaaaggttttacagaatacaaagtttgggatgatgacaaaattttaagatcaacttatggatttagaaatagtagccaaaaagaagaagagctattttcacaacatcttgactcaacacaatacatagtccttagccccgggataaatatcaaaaaggctaaactaaaaaaaaaattaataaaaaacaaacataaaattatttcagatcttgaccttttttatcttcttaatccaaagataagaactattcttataactggaactaatggaaaatccacaatatgcaaaattcttgaacatgttttcaaagaaaataagattaacgttaaacttggcggtaatatagggaaaccaatattagatttagatataaaaggtgatccaatgtttataattgaagcatcatcttttcaattagcttattctaagtttatcaaacccaaaagtgccagtaatattaaatgtaatcaaa

SEQ ID NO: 311341 - DNA, 649 bp, Unknown
  Bacterial polypeptide expressing nucleotide sequence isolated from the Sargasso Sea
aatgttactttctgaactaggaaatataataaattataagcatataatcaatttatcaaaaaataaagaatttaatagagttagctcgtcttctaaagaagtaaataaaaaaacaattttttttataaataacaaaaaaaaaattaaaacagaatatttattagaagcattaaataaaaaaacacctgcaattatttcaaataaaattttttctaatttattaattcctcagtttattgttaaagatgttgataaagagataaataaaatattaaaaaaattaaaacctaacaaacctttaacttcaatcgcgataacaggtacaaatggaaaaacttctgttgcgtggtatattgcacaaatatgtaaaattaataatattaaaaataaaatgcagggaactttaggttttttcattgacaataaaaaatttaaaaatgaagcactgacaactccgtcatatgaaactttatatcaaaatgcctttacaaagaaaaataacaaatataattttatttttgaagcttcgagtcatgcgttacaacaagatagaataaaaaattttcctataaatatagcagctataacaaatatttcacatgatcatttagataatcataaatcttttttaaattataaaaaagctaaa

SEQ ID NO: 311342 - DNA, 925 bp, Unknown
  Bacterial polypeptide expressing nucleotide sequence isolated from the Sargasso Sea
attttaataacgggaacaaatggaaaaacttccgtaactagaatgacagaatttttacttagtaagttctatggagaagaaaaggttgctttaggaggaaatataggtgaaccggcattagaccttttatcgaaagatattgaatattcggtcatagaggtttctagttttcagttggagtatatacaacaaattcggtctgaaataagtgtgttcttaaatttaggacaagaccatctagatagacacaaaaccttagaagaatatagaaggataaaagaaagaatttttctaaatagtaatttcttaatcttccaagactcaacgtcaccgcttcaaagcaatgagcaggtttctttaaacttcttgtctgaattcaaagaagttaatgaggatataaaatctctcttgcctaaaggctggccagagtatgagaccatgaatctaaaggcatctatatcaatctatatggcattggagatgcttaaacataactccgtaaacttttctaaaatagattttattaaagaaaatttagaaaagatcatgcgtttctataatgatttttcaaggagccctcatagatttgatgttttaggtactatcaatagtgctttgtatattgatgattctaagtctacaaacgtatcttcaatgattaatgctttagattccgcaagacaaataaaggatggaaaagaagttattcttattttaggtggagatgctaaaggccaagattttcaatctataaacaaatcaagcttaaggggagtaaagagtgccatcatttttggaaaagattcaaaccttatttgcgattccataaattctaaatgtaattgtgatgtagttgaaaacttagaagatgcagtaaatctatctaaaaatattgccaagaaggatgacataatcctgctttcgc

SEQ ID NO: 311343 - DNA, 431 bp, Unknown
  Bacterial polypeptide expressing nucleotide sequence isolated from the Sargasso Sea
tatgacaaccatgttgttaaaaaatctgattaataaccttgatccaaaaattgctggcgaaagagttaagggtattgcatcggatagcaggaacgttaaaaagggagatctatttatttctattaaaggaaataaactagacggaaatagttttataaaagacgctatttctagaggagcgaaagctatcgtttattctggctcaattaaaaaaaaatattcaaatatcattttaataaaagtaacagacccaagaagtaaacttgctgaaatttcatctaaattttaccagaaaaaaccaaaaaatatagttgctgtaactggtacaaacggaaagacatctgtatcagatttcttttaccaaatacttaaactttttaaaatgccggtaggtatgattggtactttaggatttaaaaaaaaatataatt

SEQ ID NO: 311344 - DNA, 293 bp, Unknown
  Bacterial polypeptide expressing nucleotide sequence isolated from the Sargasso Sea
gcagaaagcagaaaaattaaaaaaggggacttgtttgtttctataaagggaaacaaattcgatggtaataaatttattgatcaagcgattttaaaaggggcaaaagttgtcatttatccggggcctctaaagaaaaaaaataacaatatcatttccatcaaaacaaaaaatacaagagagagacttgcagaaatttcatcaaagtattttaaaaaaaaacctaaaaatattattgctgtcacaggtacaaatggaaagacatctgtatcagaattttttcaccaaattttaag

SEQ ID NO: 311345 - DNA, 912 bp, Unknown
  Bacterial polypeptide expressing nucleotide sequence isolated from the Sargasso Sea
gatgcatctggaaccaacggttggaggatctagggatgtcggttcggcgatcatcagtacgcttttcgaaaccggtgaagatggtcggattcctgtggcagcggtgaccggtacaaatggaaaaacgacagttacccgtttgttagctcatgtagcctcgacagggggagcaacggttggcattgcctgtaccgaaggcgtgtgggtaggcgacagacagcttgattctggtgattgtagtgggccagcaagtgcacggcgaattttagcgcaaccgaacgtaacgacggctgtgctcgaaacggcaaggggaggaattctccgtgaagggtgtgggtttgatgcctgtgatgtagccgttgtcactaatatttcctcaggtgaccaccttggtttgcatgaaatagatactccagaacaacttgcttgggtgaaaggcgcaattgttgcagctgtgcggacaagcggcgcagctgtcctcaatgcagcagatccattagttgtcgatatgaagaaatggtgtcagggtcgggtaatttatttttcactcaatccagaatttcctgtcctcacagaacacttggcctccggaggtcttggcgcaaccatccgtgacggatggatcgtattgtgtgatggaccgcgtgaaactcgattagccaatttagataaagttcccctggttcatcagggtttggtttcgtttcaagttgaaaatgcacttgctgcttctgccgctgcatggagcatgggcgttccgcttgaattggttcgactcggactcgagagcttttcaagtggtgcactcggtagtcccgggcgattcaatatgcttgagttagacggagctactgtggttgttgactacggacataacgtgccgtctttagagcaggtctgtttaacgcttga

SEQ ID NO: 311346 - DNA, 460 bp, Unknown
  Bacterial polypeptide expressing nucleotide sequence isolated from the Sargasso Sea
aatgctattaggaaaagtacttaaaaaaataaacaaaaaatataaatcaattagatttaaaaatataaaatgtaatagcaaagattgtaaaccaaatgatatttttttcgcaataaaaggaaataagtcaaatggcaataattttatcagtgaagcaattaaaaatggagcaaaaataatagtatcaaatttaaaatttagaggttttgataaagatgggaatttatttatctatgaaaaagagcccagacaattattatctgaagctgcaaatctattttatcaaaaaaaaccaagaaatcttattgctgtaactggaaccaacggaaaaacttcaattgcaaattttttctatcaaattttaaattataataataaagctgtcgcaactattggtacgctaggtgttatatcaaaaaaattaaaacttaaaactgcaaatacaactattgacccaaat

SEQ ID NO: 311347 - DNA, 937 bp, Unknown
  Bacterial polypeptide expressing nucleotide sequence isolated from the Sargasso Sea
ttcaggtatatctagcttaaattatttaaagaaaaataattatattaggtgttttgatgataatttaaaaaattttaaaaataaggtttttaaaagttatttcatctcaaaaaaagaaattaataaagctaaatttgaccacataattattagcccaggaatcgatagtttaaagtgcttattaaaaaaatatttgataaggaataaaacaaaaatttgcaccgatttagatgttttttatgcaaaacattctgagaatttgatcataggtattactggaacaaatggaaaatcaacaacagctaaactgttatgcgatattttgaaaaaaaataggtcagatgcaagactagttggcaacataggaaatgcaattcttaaagaaaacaaaatatctcctaaaactatttttgttgtagaaatttcatcatatcaaatctcttatagtaaaatatttaaaccaaattatggtgttttactaaatatttctcctgatcatttagaaagacataaaacgattaataattacataaaaacaaagtttaaattaatattgtcactaaaaaaaaatgattatggatatataaataaaaatgatttaattcaaaaaaattttattaaaaataaaaaatttaattgtaaaattataaaagtagaaaataaactatcagaacaagacaaaagtcttttaaaaaataattattttaaaactttgaataatcagcaaaatttatcttttgttctaaaaatatgttcaacacttcgtattaagaagagtattatttttaaagttgtgaatgattttaaagctttaaattttagacaacaaataatttacaattccaataaattgagaattattaatgactctaaatcaacaagcttttcgtcctcaattaatttattagataatatggattgtattttttggatatta

SEQ ID NO: 311348 - DNA, 625 bp, Unknown
  Bacterial polypeptide expressing nucleotide sequence isolated from the Sargasso Sea
aatgaatctatctaaactagcagaaatatcagaaggtcagctttttggagaagtaactagtattgacagttttagtattgacagtagaacaatcaagcaaaatgacatttatattgctctaaaaggaaagaattatgatggggcgcaatttattcctgaggctataaacaaaggtgcagtaggtattatctctaataatcagatcgaacaggacataccaaatatagttgttgcaagtacctacgaattcatgaatagagtcgcgaactataatcgcagtaaattctcaggtaaggtaattggcatcactggaactaacggcaaaacttcgacaaaacaaatactctctaatcttttaaatgatggaaagtcttgtcataaaactttaggcaataaaaataatcagataggagttccttatactctccttagtttgaaaaatgtatatgatttttcagtaattgaaatgggcactagtgagtcaggagagattgcaattttgaataatcaggtaaaaccagatatagctgcaataactaatgtttctattggacatctcgatggtctaagagatacagagtcaattgcaagagaaaaagggaatattcttaatttttataatgat

SEQ ID NO: 311349 - DNA, 417 bp, Unknown
  Bacterial polypeptide expressing nucleotide sequence isolated from the Sargasso Sea
tttgcctgttgagaatatcactggcgatccagatatttcgggaatcaccgaggatagtcgaagggttgagtcaggattcctatttgtcgctatttcgggggttcggtttgatggaatcaattatctcgaggaagcagtccggcgtggagcctcagccgttttaattgaggaaggaaaaacttgcaaagccccaggggtgactgtggtaagtacgtctagagaccttcgccatagttattctttattggccgcccaattgtacgatatgcaacctaaatctgtcgttgctgtaacggggaccaatggtaaaacgtctgtcgtttcgtttttgcggcaaatatggagttttaacggcattcaagcagcaagccttggaacgttagggttggaggctcctgctattaaacatcatgattg

SEQ ID NO: 311350 - DNA, 715 bp, Unknown
  Bacterial polypeptide expressing nucleotide sequence isolated from the Sargasso Sea
ctggattattacatttatgcttgtcttacttggtttagctctactcagactaagataaatcaagtgcggaaaaggatacctttagtccttggctttggaattacaggtcaatcaatcttaaattatctctcaaaaaaatataatgagatttatctaatagaagattgggaggaaaatccaagccttcgtgagattgatagatttggaattaaaattcatgttaatcctcaattaaacagagatttatttagtaaagtatctgatatttattctagtccaggcgtacctattcatcataaggccttatctcttgcttctgagcataaaattaatattttttcagatattgaagagtttataaaaataaataagagtataaaaatactaattacaggtacaaatggtaaaacttctacctgtcagattttagagactttactaaagtcagttttttcggatttaaaaatagtttccataggaaacataggacggcctgtccttaattatattgataatgacattgacgtttcaatcatagaagtttcgagcttccaattagagcttttaaatgaagtaaagtttgatataggtttattattgaacatagaagaggatcatttagatagacattcagatattgaagattataggaacgtaaaaaactctgtattaaaaaatgctgatataaatatttcttacaatgatagaaatattt

SEQ ID NO: 311351 - DNA, 346 bp, Unknown
  Bacterial polypeptide expressing nucleotide sequence isolated from the Sargasso Sea
atgacaatattacagcgtcttaattgtggtgactctatattaattattggtttaggaaaaactggtttttgcagtgctcgtttttttgctaatttaggtttaaaagtgagggtgatggatcaaagttcgtcacctaaatatttatctgaaattgagttattatttccacaaattgagttatgctgtggcacaataaatataagctggttacaacaagcaactactattgttttaagccctgggattagtccatataaaagttcatggttacatccttatcttactaaggtagtcagtgatgtcgaattattttgtcgttgtgttgactctaaatattatagcagta

SEQ ID NO: 311352 - DNA, 556 bp, Unknown
  Bacterial polypeptide expressing nucleotide sequence isolated from the Sargasso Sea
catgttgttaaaaaaactaattaaaaatctaagtccaaaaactagtgcccttaaaattactggcatctcacaagatagcaggaaggtaaaaaaaggatatttatttgttgctttaaagggagaaaaatatgatgggaacaaatatattcctcaggctatttcaaaaggagctagagctgtaatttattcaggtaaaattaaaaaaaataaaaaaactgagtttattaggtttaaagatactagaaatattttcgctagtttaagtgcaaattactacaaaaataaaccaaaaaacatagtcgctgtaaccgggacgaatggcaaaacttcagtagctgatttttattatcaaatttttaaattacaaaatattaagtctggttttattggtacccttggttttagaaaaaataaactattaaaaaaaagaaacctcacaactttagattcttttacacttaacaaagatttgaatgaaatgagtagaagaaatataaataatgtaattattgaggcctcaagtcacggtttaaaacaaaaaagggttaatttttta

SEQ ID NO: 311353 - DNA, 484 bp, Unknown
  Bacterial polypeptide expressing nucleotide sequence isolated from the Sargasso Sea
ttgcatctttctgagttatgccctccatatgtgggaaaaatatccggcggctcaaaccccattattaccggtattaccgatgactctcgcgaagtaattccaggctttctcttcgtcgcacttttagggtcaaaaaatgatggcgcggtattcatttctgacgcagccgcaaaaggagcttcagctatcctggctttagatggaataacactgccagacagcgcggcaactataccccttgtctcttcacccaatcctcgtcggtcgctcgcgatatgcgcatccagatattttaaaactcaaccgcaaactgtagcagccgttaccggcaccaatggcaaaacgtcagtagcgtggttcacgaaacagctttggtcgagattggaaaaaaaatcagcctcgataggtacccttggcatgcacacagatcaagaaccccaaagtttaggtaaaggtctaacgactgaagacccggattacgctc

SEQ ID NO: 311354 - DNA, 446 bp, Unknown
  Bacterial polypeptide expressing nucleotide sequence isolated from the Sargasso Sea
tatgagatctataaaattacataaacttttagatttggtagggattattccttcattagatttaatcgatcatgaaatcaataatatttcttttaactctaaagaagttcaaaaaggaactttatttttaggtatgccaggtttaaatgttgatggaggaaaatattgtattgaggcaattgaaaatggcgcagaggctgccattattggatctgctgcaaaagagaaaattggatctattgatcgagaaaggattttggttatagaggataatttagattatatttttggtcaaatagtcgctgagttttggaataggccttcaagaaaacttaaacttattggtgttacgggtacaaatggaaaaacgacaattacttttttattggaatatcttttaaaaaaattaggaaaaaagactgcattatttgggaccttgctcaata

SEQ ID NO: 311355 - DNA, 892 bp, Unknown
  Bacterial polypeptide expressing nucleotide sequence isolated from the Sargasso Sea
aatggaattaaaagatcttgctctagtttcaaatggtttgttacatggagattctttagaaatatcagaatttagtattgatactaggtccgtaaaggagggggacgtttatattgcaattaaaggtaataattttgatgggcatgactttattgaagaagctgaaaataaaaaagcgaaagcactaatagtaaataaagttgttagatctaatttaccctttgtagttgttagcaatacgcttaattttatggaagccatagctgcgcataatcgatcttctttcaaagggaatgttattggaataactggaaccaatggaaaaacaacatctaagcaaattatttcaaatttattatcgcaaatacataaaactcataagacagtaggaaataagaacaatcacataggtgttcctttatctatgttaaatatggtgaatgaatatttaagctctgtgattgaaataggtactagtcaagttggagaaatcaagagccttaccagcctcgttaggcctaatatagcagctataacaaatgtttctgctggacatctagaaggtctaagagatacagattcaattgcaaaagaaaaaggagatattcttcaattttctgattctgaaggagtggcagttttacctcgagattctagtttttttaattcttggattaatagtacaaatgcaaagaagatagttagttttggtttccataaggattctgattttagggttatgagtcctacaattgatgtagtaaataatttaacaagttttcagttgatacatagcggttatagagaagaatgttcaataaacggcattggtattcataattctttaaatgccgctatggggttagcaatttgttctgttctaggtttaaat

SEQ ID NO: 311356 - DNA, 650 bp, Unknown
  Bacterial polypeptide expressing nucleotide sequence isolated from the Sargasso Sea
gatgaaatttataactaatacttcagatttagcaaaatttcttaataagaaaataaaatttaatgcattaataaaatcaatttcaattgatacaagatcattaaaaaagaattcattatttatagctataaaaggtgaaaattttgatggaaatgattttgttgatgaggcgctctcaaaaggttcaaatattattattgctgataataaacgttttaaaaacagtaaagataaaagaattatatgggtgaatgattcaataaaagcacttaaaacaatatcaaataacatcatcgaagattatggtggtaacgtaattgcgattactggcagcaatggaaaaactacaacaacaaatataattggtaaaactctaaagaataactcaaaaactttaaaaaattttaataacgaaatcggtatgcctctgagcttgatgaatgcttctcttaaatcaaagaatttaatttttgaaataggtgcctctaaattaaatgacattgattatctcagtaaaatcttacaacctaatgttggactaataacaaatattggaaattcacatttagagtccctaaagaatattgatggtgtttttaaagtaaagtctgaaatagttaaaaatatcaagaaaaatggctttttagttg

SEQ ID NO: 311357 - DNA, 364 bp, Unknown
  Bacterial polypeptide expressing nucleotide sequence isolated from the Sargasso Sea
atgttgttaaaaaatctgattgataacttaaattctaaaattggtaatttaaaaattagaaagatatcagcagatagcagaaaaattaaaaaaggtgacttgtttgtttctataaagggaaacaaattcgatggtaataaatttattgatcaagcgattttaaaaggggcaaaagttgtcatttattcggggcctctaaagaaaaaaaataacaatatcattttcatcaaaacaaaaaatacaagagagagacttgcagaaatttcatcaaagtattttaaaaaaaaacctaaaaatattattgctgtcacaggtacaaatggaaagacatctgtatcagatttttttcaccaaaatttttaga

SEQ ID NO: 311358 - DNA, 529 bp, Unknown
  Bacterial polypeptide expressing nucleotide sequence isolated from the Sargasso Sea
atgagatctataaaattacataaacttttagatttggtaggaattattccttcgttaggtttaatcgatcatgaaatcaataatatttcttttaactctaaagaagtacaaaaaggaactttatttttaggtatgactggtttaaatgttgatggaggaaaatattgtattgaggcaattgaaaatggcgcggaggctgccattattggccctgctgcaaaacagaaaattggatctattgatcgagaaaggattttggttatagaggataatttagattatatttttggtcaaatagtcgcggagttttggaataggcctgcaagaaaacttaaacttattggtgttacgggtacaaatggaaaaacgacaattacttttttattggaatatcttttaaaaaaattagggaaaaagactgcattatttgggaccttgctaaatagatggcctggcttctcagaagtggcttctcatacaactgatttcgccgataaacttcaaaagaaattaaatgctgctgttgagg

SEQ ID NO: 311359 - DNA, 706 bp, Unknown
  Bacterial polypeptide expressing nucleotide sequence isolated from the Sargasso Sea
tttaaaagaaggggaagtttatatagcaattaaaggtgaaaattttgatggtcatgattttttagatgaagcagaaaagaataaagctaaagcacttatagtaagtagggaagttaactctaaactaccctttattgttgttaaggatactttagactttatgcagactatagcacttcataatagatctgttttcaaaggaaatgttattggaatcacaggaactaatggaaagacaacctctaagcaaattctttcaaatttattatcttattcacatgaaacacataagactgttggaaataaaaacaaccacataggtgttcctttttctatgctcaatatggacaatcgatacaagagttctgtcattgaaatggggaccagtcaattaggtgaaataaagaacttaaccagtcttgttaaacctgaaatagctgcaataactaatgtttctgctggtcatttagaaggtcttaaagatactgaatctatagcaaatgaaaaaggtgacatactaaaattttatggttccgaaggagtagctgttctacctagagattcagttttttttaattattggtgtgacaaaactaatgctaagaagatagttagttttggttttcataaaaattcagaatttaaagttataagtcctactattgatattgaaaacaatttaacaagttttcaattagaacataga

SEQ ID NO: 311360 - DNA, 455 bp, Unknown
  Bacterial polypeptide expressing nucleotide sequence isolated from the Sargasso Sea
gctggttccgaacttagaaatttcgggaatctcggaaatgtctaaagatgtgcaagctggagatctatttttggcggtgggcgattcagcacttcaaaagactcacataactgaggctaaacatcgtggtgccgtttgtgtgctaaccgatcaaactacttcttttggaggagatctttctggggttccactgatatgtattggcgatcttgcaacgcgaaggggtgcattagcttccacgttttattcgaatcctagtcgtgaattggagtgtgtcggcatcaccggcactaatggtaagacatcaatagcatactgggttgccgatctgagttcgaggattggttttaaaacaggctattctggtactttgggttgggggactttagaaagccttagacctgcgattttaactacgccgaatgcagtcgaaattcagaaaaggttgtttcatt

SEQ ID NO: 311361 - DNA, 620 bp, Unknown
  Bacterial polypeptide expressing nucleotide sequence isolated from the Sargasso Sea
tatgagatctataaaattacataaacttttagatttggtaggaattatcccttcatcaaattttatcgatcaagaaatcaataatatttcttttaactctaaagaagtaaaaaaaggaactttatttttaggaatgcctggtttaaatgttgatggaggaaaattttgtattgaggcaattgaaaatggcgcagaggctgccattattgggcctactgcaaaacagaaaattggatcttttgatcgaaaaaggattttggttattgaggataatttagattatatttttggtcaaatagtcgctgagttttggaataggccttcaagaaaacttaaacttattggtgttacgggtacaaatggaaaaacgactattacttttttattggaatatcttttaaaaaaattaggaaaaaaaactgcattgtttgggaccttattcaatagatggcccggtttctctgaattagcttctcatacaactgatttcgctgataaacttcaaaataaattaaatgctgctgttgaggcagaatctgaattcgcgatattagaggtaagttctcattctattgctcaaaacaggatatcaggatgcgaatttgaggcggctattttta

SEQ ID NO: 311362 - DNA, 388 bp, Unknown
  Bacterial polypeptide expressing nucleotide sequence isolated from the Sargasso Sea
atggcccaaaccgtcgtcgtcggacttgggcgctcgggtcaaggtgctgcccgcctcctgcaagccacgggccatcccgttgctgtgatcgactccgggcagagtgagcagctcgagaagaaggcagaggggctacgccaacagggtattgaggttcaacttcaggcaccgcttgcgatcgacagcttccgtccctggctggaccaactgcagcgggtggtgatcagcccgggcattccctgggatcacccgacgctcaaagacttacgccagcacggtgttgccgtggatggagagatggcggtggcctgggatgccttgaagcacatcccctgggtgggcatcaccggaaccaacggcaaaaccaccgtcacccacctgctgagcc

SEQ ID NO: 311363 - DNA, 709 bp, Unknown
  Bacterial polypeptide expressing nucleotide sequence isolated from the Sargasso Sea
aatgcatctctctgatttaaataatcctgagattttacttccaaaaaatgcggacaaaattcccattaagtctataacatctgacagcagaaaattaactaaagactgtatgtttgtagccataaaaggttatgaaaaagatggacacgattttattgatgaagcaatatctggtggcgcaagcaatattctagtagactataattataaagttacaaagcaactacctttatctaaatctaagaatgttagaaaagcattagctcttatagcctcaatatatttcaataaacagcctaatattattgcagctgtcaccggtacaaatggcaagacttcagtatgtacttttttgaagcaaatatgggatttaaataatttcaaatcagcttccttaggaacattaggattaaatgctagtaaagaagtaaagcataaagaaacacaaaatgaaaatttaacaactttagagccaatagagcttcatgaatgtatttctaaaattaaacgattaggtgttgatcgtcttgctttagaagcatcttcccacggtctagaacaacataggcttgacggtgttaaggtttcattagcttgttttacaaatttatcacatgatcatatagattttcataagtctttaaataactacaaaaaacaaaaatttaggctttttacagaaattcttcaagacagtggtacggctgtc

SEQ ID NO: 311364 - DNA, 460 bp, Unknown
  Bacterial polypeptide expressing nucleotide sequence isolated from the Sargasso Sea
atgaaactttataagaaatatttatcaaaatttttaaatcaatacaatggaatattatctaatgaaataaatataaagtatgaagagcttggagagatttgcactgatactagaaaattaaaaaaaaacgatatttttattgcattaagtggagagaacttcaatgggaacacctttgttccaatagcatttgaaaacggagcagctttttgtatttccgaggagatcaattcaaactcaatccatgtaaagtccacactagatttcattcaaaaattctctgcattcattctgcaagaggaagatagaatatttaaaataggaataacaggaacaaatggtaaaacatcaacaaaagaaattatggcaagtgttcttgggcaaaaatttgtggttcataaaactcaaggaaataacaataacaatattggcttacctttaactattctagatttaaatg

SEQ ID NO: 311365 - DNA, 505 bp, Unknown
  Bacterial polypeptide expressing nucleotide sequence isolated from the Sargasso Sea
atgctactgtctaatttatcaaaagttataagaataaataaaacgtacaactttaataaaaataaatatttctctgcaattacctctaactcaaaatttactaataacaaaacgttgtttatttatgacaaaaatacaaaggtaaaaaagatttatttagatgaagtacttaagaataaaactcctgctataatttcaaataaatatataaaaaacttacaaattcctcaatttgttgtatctaatattaattttgagacctgctctttattaactaagcttcatagcaatcttccttttaaaacactagcagttacaggtaccaatggaaagacatcagttgtttggtatatttcaaaaattcttaattcactaaaatataataatacaatagttggtactttaggacattttgtaaacggaaaaaaaataaatgatataaatttaacaacacctgcctatgaagaattatttagatatggatcttcgaataaaaaagaaaaaa

SEQ ID NO: 311366 - DNA, 400 bp, Unknown
  Bacterial polypeptide expressing nucleotide sequence isolated from the Sargasso Sea
atgagatctataaaattatttaaacttttagatttggtaggaattattccttcgttaaatcttatcgatcaagaaatcaataatatttcttttaactctaaagaagtacaaaaaggaactttatttttaggaatgcctggtttaaatgttgatggaggaaaattttgcattgaggcaattaaaaatggtgcggaggctgccattattgggtctgctgcaaaagagaaaattggatctattgatcgagaaaggattttggttattgaggataatttagattatatttttggtcaaattgtagctgagttttggaataggccctcaagaaaacttaaacttattggtgttactggtaccaatgggaaaacgacaattactttcttattggaacatctttaaa

SEQ ID NO: 311367 - DNA, 589 bp, Unknown
  Bacterial polypeptide expressing nucleotide sequence isolated from the Sargasso Sea
atgttgttaaaaaatctaattagtaatctgaaaccacaaattgctgataccaaaattaatggtatttcttttgatagtagaaaaattaaaaaaggaaatttattcgtttctattaaaggaaataaatttaatggaaatgattacataaaagaagcaatttctaaaggtgcaaaagtagtaattagttctcaaaaaataaaagaaaatactaaggcattatttataaaatctaaagatacaagaaatatccttgccaaaataagttcaaggttttttaaaaataaaccaaaaaatattattgctgtaactggaacaaatggcaaaacctcaatagcggattttttttgccaaatttttattttacaaaagaaaaaaactggttttatcggaactctgggtttaagaacaaataagatactaaaacaaagaaatttaacaacattagactctttaacacttaacaaagatctgaatgaaatttggaaaagaggaattaataatattattgttgaggcttctagtcacggattaaaacagaaaagattaaattatttgaatatcaaagccaggtatttttaccaaacttaag

SEQ ID NO: 311368 - DNA, 421 bp, Unknown
  Bacterial polypeptide expressing nucleotide sequence isolated from the Sargasso Sea
atgttgttaaaaaatcttattagcaatcttaagcctgatatttctgctctcaaaattagaggaatttcatttgatagcagaagcataaaaagaggcgacttatttgtttctataaaaggggacaaatttgacggcaatgattacattaaccaagctacttccaagggagctagcgcggtagttcactctcagccagtaaaaaaaaacaaaaaaacaatatatataagggtcaaagacacaagacacgctctcgcaaggctaagcacaaaatattacaaaaacaaaccaaaaaatataattgctgtaacgggaacaaatggcaaaacttcagtgtcagatttttttcaccaaatctttgtgctgcaaaacaagaaggttggttttataggaacacttggttttaagaaaaatcaatattaag

SEQ ID NO: 311369 - DNA, 445 bp, Unknown
  Bacterial polypeptide expressing nucleotide sequence isolated from the Sargasso Sea
atgagatctataaaattacataaacttttagatttggtaggaattattccttcattagatttaatcgatcatgaaatcaataatatttcttttaactctaaagaagtacaaaaaggaactttatttttaggtatgccgggtttaaaagttgatggaggaaaatattgtattgaggcaattaaaaatggagctgaggctgccattattgggtctgctgcaaaacagaaaattggatctattgatcgagaaaggattttggttatagaggataatttagattatatttttggtcaaatagtcgctgagttttggaataggccttcaagaaaacttaaacttattggtgttacgggtacaaatggaaaaacgacaattacttttttattggaatatcttttaaaaaaattagggaaaaagactgcattatttgggacgtgctcaatag

SEQ ID NO: 311370 - DNA, 538 bp, Unknown
  Bacterial polypeptide expressing nucleotide sequence isolated from the Sargasso Sea
atgattaaactttctgaattaaatgttaaatggataagaaaagagggtaattggtcccaacgggatccaaatatttcaggtattgagacaaattcttcaaaaataaagagaggagagatcttttttgccctgaaaggaattagcagtcacggtgctgattttgcagatgacgccatcaagagaggagcctcattaattattactgactacgatggaagccaaattattaaaagaaataccaatgaatttcaaatacctgttttgatttgtgaaaacacaagtgaaatcttaaccaaaatgtgttttaaattctttccatctcttccatctaatttaatggcagttactggaaccaatggaaaaacctctgttgtaaattttatacaacagctccttgaactgaatgatttatcgtgcgttaccgtaggcactttaggggtcaagggggttatgaatatttcgactaacactacaacgccaactcaagttgagctatataaaattcttaaaaatgccagagaattaggaacagattatg

SEQ ID NO: 311371 - DNA, 445 bp, Unknown
  Bacterial polypeptide expressing nucleotide sequence isolated from the Sargasso Sea
gatgagccagctgcgcctttccgaactgctgcgccgcgacgtggcctcggatcctgagatcaccgccgtcaccgccgacagccgtcaggtcgtgcccggcgccctgttcgtcgccctgccggggacgcaggccgacggccgcgccttcattccgcaggccctggcgaaaggcgcggcggccgtgctggccccgtcggacacgcccgcaggcgcggcgccgcttctggtcggatcaggcgatgtgcatcgggcctacgccatcgccgcgcgggccttctacggcgcccagccgcgcacctgcgtcgccgtgaccggcaccaacggcaagacctcggtcgccaacttctgccgccagatctgggccggcatgggcctgaagtcggccagcatgggcaccctgggcgtcgtcggccagaagggcgacaagacctacgccctgaccggc

SEQ ID NO: 311372 - DNA, 504 bp, Unknown
  Bacterial polypeptide expressing nucleotide sequence isolated from the Sargasso Sea
aatgctactgtctaatttatcaaaagttataagagtaaataaaacgtacaactttaataaaaataaatatttctctgcaattacctctaactcaaaatttactaataacaaaacgttgtttgtgtatgacaaaaatacaaaggtaaaaaagatttatttagatgaagtacttaagaataaaactcctgctataatttcaaataaatatattaaaaacttaaaaattcctcaatttgttgtatctaatattaactttgagatacattatttattaactaagcttcatagcaatcttccctttaaaacactagcagttacaggtaccaatggaaagacatcagttgtttggtatatttcaaaaattcttaattcactaaaatataataatacaatggttggtactttaggacattttgtaaatggaaaaaaaataaatgatataaatttaacaacacctgcctatgaagaattatttagatatggatcttcgaataaaaaagaaaa

SEQ ID NO: 311373 - DNA, 337 bp, Unknown
  Bacterial polypeptide expressing nucleotide sequence isolated from the Sargasso Sea
atgcttctatctaatttatcaaaaattattaaaattaataaaacttacaattttaaaaaaaataaatcattttttgaaataacagcgaattcaaagttaacaaataaaaaaacattatacatttttgacaaaaattctaaggctaacactgcttatattaaagaagctattaaaaataatgtaccagcaattatatcaaataagtattataagtttatacctattccacaatttatagtctcagatatctatgaagaaactaatttattgttaaaaaaaatacacaagaattatcctaaaaaaacaattgctataactggaacaaatggaaaaactt

SEQ ID NO: 311374 - DNA, 1076 bp, Unknown
  Bacterial polypeptide expressing nucleotide sequence isolated from the Sargasso Sea
aattttcaatgaagaagtagatgctttaatgctctttgcctttataattgagtcattaattaaaaaaactaaaagattaaagctagttgaagtagtttttttattaaaagaaatcaccagcctagagatggatttgagatttgaagccgctgcagccaacgaatacgcagaaaacaccaaaaatgatgtgggttttgaggttcctaaaatctattgggattatacaagtgaaaatataatgactcttgattggattaatggtgtatctataagagaaacagaagcgttagaaaaacgatcaattgacacaaaaaaaattgccactgatataatacaacatttcctacgacatgctgtcagggatggtttttttcatgcagatatgcatcaaggaaatattttcataaatgagagtggtcaaattgttcccatagattttggtattatgggaaggttagataacgttagtaaaagatttttagctgagattttatttggttttatacaaagagattataaaaaagttgcagaggtacatcttgcagcagggttagttccaaacaacgtacctgtaaatgatcttgctcaggcactaaggtctattggtgagccaatttttggacactccataaaaaatatttctggtggtaagttactaaaacaactttttgatgttacagaaaaatttaatatgcaaacccaacctcagttacttatgttacaaaagacaatggtagtagttgaaggagttgcaagaagattaaatccagaaacaaatatatgggagacatcaaaacctgttctagaaaaatggctaaaagaaactaaagatcctataaattcaattaatgagacattaaaagactctgtggaagtattaaagcgtcttccaaatttacctgaggtaatggataaagcaaaccaggcacttaattaccttgctagtggtcaaatacctcaaaattcaaactcgtataatgagttaaacactaaaaaagaggaaatgaaatcatttagaaaccaatcaattattggcttattatctcttgtaattttaactctattggtattttaat

SEQ ID NO: 311375 - DNA, 684 bp, Unknown
  Bacterial polypeptide expressing nucleotide sequence isolated from the Sargasso Sea
aatgatagataatcattcaagtaaaggaaatattaatcttgtaattggattaggtaaatctggattttgggctgccaagtatttgagaagcatcaataagagagtaattgtttgggaaagtaaagatgggatagaattcttagaaagaaaaacagaattggaagaacttaatatcatagtttctctaaataaagaatttgtatttgaagaaattgatccttttgtggaagagattgaatctgttgttgtaagtccatcaataccttatgaccatataactattattaaattaaaaaaaaaaggaattaaagttattggagaaattaatgttgcatgggaaattttaaaagacacaaattggataggtattactggcactaatggcaaaactactgttactcatctactaagccatatactctgcgagactgaattatatgctccttatgctggaaatattggcacacctttatgtaaatatgcatactccaaaaaacgtgaaaaaattgattggattgtagctgaattaagcagttatcaaatagaaatatctccagaagtaaaacctaatattggaatctggacaaccttcacagaagatcatcttgaaagacataaaacacttgaaaactatttcaacataaaaaaaagcttgctagaaaaatcagattttagaatttataa

SEQ ID NO: 311376 - DNA, 1329 bp, Unknown
  Bacterial polypeptide expressing nucleotide sequence isolated from the Sargasso Sea
ctaattctagaacgttttcaaagattttcaaaaaagctattggtgcggatatagttgaaaatatcaatggcattacaactgacagtagagaaattcaaaaaggcgacctatatgtagctatcaaaggcgagaatgttgatggtaatatatttttaaatgatgtttttaaaaaaggtgcgttatgcgcaattgtttcagagcttatgcctgatgtaaatggagatcaaattgaagtttcagatacaattaaggctataggtagagttgccactgaatggagatcgcaattcgatatacccgtgattggaattactggtacgaatggaaaaacatcaacaaaggaacttctaaagcacatactttcttcaaaatttgatattcatgctacagaaggaaattataatacatctatcggtctccctctaaccttactacagctaactagttttcatggagcatcaatccttgaaatgggtgccaatcaaattggcgatattaatacactagcaaaaatagccaaaccaaatattggacttattacaaatatagctcccgcgcatcttgaagggtttggaagcattgaagctgttgcaaaaaccaaggctgccatttttgaaaatctgcaacatggcattgcatttgtaaattatgctgatgataaagtgcgcaagattaaggtgcctagtaaatcaatttcttttggaataaatcctgattgcgattatcctgcggacattcattatgaggaagatgggacaattactttgactataaacgccgaagaaatacccaccctctcctcaaatctatcttttgcaaaaaatataattgcctgcagtgcaatagcaagagaactcggtgttgaatgggacgctatcaaagatagagtacaaacatttactcccccaaatggaagatgcgaggttaaaaataatggatcttatgtagttatagatgatacatataatgcaaatcttgaatcaaccgtagcagctattgattatttaaacgcattttcaggtgaaggaaaaaagatttttatttttggcgatatgcttgaacttggagatctttcagttaatcaacatatggctgtaggtaagaagtgtgatgaaataaatctagaagcagttttaacatatggaaatcatacatattcaactaatgaagcaataaaaaaagttaaaatcaaccatcattttaagaccaaaacagagctagctgaattcgctagcgaaataatatcaccacatgataaagttcttgtgaaagggtcaagaggaatggaaatggaaacaatagtaaaaaaattattagagataaaatgat

SEQ ID NO: 311377 - DNA, 1342 bp, Unknown
  Bacterial polypeptide expressing nucleotide sequence isolated from the Sargasso Sea
atgaaatttataactaatacatctaacttgagtaaatatctttctattccaatcaaggggaattcagtcattaaatctatttcaacagatacaagatctattaaaaaagattcaatgttcattgctattaaaggtaagcattttgacggtaatgattttgttgatgaagctctagagaaaggagcagttattattattgccgatcacaaaagataccaggaaaagaaaaacaaaaaaattatctatgtaaagaatacaatttcttctcttaaaaaaatctctgaaaacattattaaggagtttgaaggaaatgtgattgcaattactggtagcaatggcaaaacaaccacaacaaatttagtatataaaactttaaaaaatagttccaaaactcttaaaaacttcaataatgaaataggaatgcctctaagcattatgaacgcgtcttctagatctaaaaatcttgttttagaaataggtgcatcaaaatttagagatattaactatttaagtaaaattctaaagcctaatgttggagtgataacaaatataggtcattcccatcttgagaaattaggaaatattgaaggcgtatttaaagttaagtcagaattagtggacaacattcaaaaagatggtttcttaatcgtaccaaatgataatcaagatcatcttaaaaaatggaaaaaattaagaagtgacataaaagttatctcatttggattaagtagcgatgctgatttttatgcttctaaaattaaaataaaagaaagcggattatcatttgtcatttcatcaaagttaatcaaaaaatctattttgataaagacttcaattgaaggtgagcataatattaaaaatattcttgcaagttctgcagttcatttttgcttgaatgaggatttagaaaattttgctaatgctcttaaaacagataactttaatgagctaagacaaataaaatcaaaatggattaatggatccactttaattgatgatacatataatgcaaatccagattctacaaaaaaatctatagacttattaagtaattataaaaaaaatactgtcttagtattaggcgacatgttagagcttggcagatataaaaagaagcttcacaaagagattggcatttacgccaaaaaaaagggaatcaatactattttaggatatggagatttgacaaaatatactattgagggctttggaaaaggagctagattctttaaagatgaaaagaatctaaaattttatttaaaagaaaacataacctcaaaagatgttatcttaatgaaaggttccagaggaatgaaaatggagagatttaaaaatgtttgaa

SEQ ID NO: 311378 - DNA, 618 bp, Unknown
  Bacterial polypeptide expressing nucleotide sequence isolated from the Sargasso Sea
aatgggcatggggataacagggaggtctatatcaagttatcttagtaatcaatcaattcatcatcttgttatggattcatgcccaaaaaataatgccaatttatcttcttatgtggatgagtttctcatatctgaagatacatccattctgaaagaaataagtaaaatttttgtcagcccaggaatagataataataatatattcttaaatgaagcaattaaaagagaaataccaatatcaacagatatggatctctatttaagtcaaacaaaatcaaaaccgattttaataacaggaactaatggaaagacttccgtaactagaatgacagaatttttgcttggtaaagtttatggagtagataaagttgctttaggaggaaatataggtgagccagtgatagaacttctatcagaagacattgaatactcggttatagaaatttctagttttcaactagagtatatgcaggaaattcgttctgaaataagtgttttcttaaatttaggtcaagatcatctagatagacataaaaccatagaggaatatagaagaataaaagaaagagtttttttaaatagcaattttttaatctttcaagactcaacatctccact

SEQ ID NO: 311379 - DNA, 326 bp, Unknown
  Bacterial polypeptide expressing nucleotide sequence isolated from the Sargasso Sea
tttggaaaattttagagatatcaacattagaagtatccacttagatagcagagaggtaaaagagggaggtctattctttgcaataaagggtcatgatagggatggtagcgattttatttcctcagctatttcaaatggagcctcgcttgtcatttcggatacataccaaaaatataaggaaagagttatttattttgaagatcttaaaaaatatgttggtatttttgcttcaaggttttataactctccaagttcaaagataaaatccatatgtgttactggtacaaacggaaaaactacttctgttgaaacatttgcaagtatga

SEQ ID NO: 311380 - DNA, 412 bp, Unknown
  Bacterial polypeptide expressing nucleotide sequence isolated from the Sargasso Sea
aatggacttatctttaaatttaagtaaaaaaagttttgcaatttatggtcttgggaaaaccggaagatcaataattaaatactttaataaaataggtttcaaaaattatattacatgggacgataataaatcattaaaaagaaaatggaatttaaatgaaagaagaaagaaaagatttaaaagtttattaagcacagtcgactatatagttgttagtcctggtataagtctcaaatcagctaaactaaaaaaaattttaataaagaacaagtctaagataattactgaccttgatctcttttacatttttaatccaaaaataagatcaattgttataaccggaacaaatggtaaatcaacaacttgcaaaattttacatcatgttcttaaaaaaaatgggaataaatgttca

SEQ ID NO: 311381 - DNA, 385 bp, Unknown
  Bacterial polypeptide expressing nucleotide sequence isolated from the Sargasso Sea
ttgaaagaattaaaagaaatattgtttggtgtaaatattgattcagtttatggtgatacaaatcttagtatctcaggaatttcttttgattcaagacagattaaacaaaataatatattcattgccattaaaggatatgacttagatggtcataattatatagatcaatcaataaataatggagcaatagtagttgtctgtgaatcgcttccaaaaacaatcaataaatatgaaattgtattcattaaggttaaatgttcgaaaatagcactttatacaatttcttctaatttatatggtaatccttcttcaaaaatagacttaataggagtcacaggaactaacggtaaaactactataacttcactgctatacaagcttttca

SEQ ID NO: 311382 - DNA, 418 bp, Unknown
  Bacterial polypeptide expressing nucleotide sequence isolated from the Sargasso Sea
atgcttttctctgatattcaaaaaatattaattaatgctaaaattataggaaacctaaataacaaaaaaataaaattcattactgatcactcaaaagatgttaactcaaacactcttttagtagttgataaaaataaaaaaattaagcaaatgtatttgcaagatgcaattacaaatggtttaaagataataattactaatactttcttcagaaatttacaaattacacaagtagttgttaaagatcttaacaaggacgtatataaattgctaaatctaatacaaccttataaaccaaataaatctattgctataactggtaccaatggaaaaacatccacagcttggtatcttgctcaaatttgtaagctaaataacatatcaacaaaattatcaggaactttgggttattataaaa

SEQ ID NO: 311383 - DNA, 697 bp, Unknown
  Bacterial polypeptide expressing nucleotide sequence isolated from the Sargasso Sea
actgaatagattaaaaatatgcacaagctttattctaaaaaactctgatcgaggcgaatgcttatcagatagaatcagtatagactctcgtcgaataaatcaaaatcaggtatttatttctcttgaacctgatgtagccaaaaatatcacaaatataaaacatgctatcgctaacggagcttcaggattcatttcgccattttatatatcaagacaaaaaattaaaacatcacttccatttctgattgagaggggtattgataaaatatatgttgacctattcaaagctgactttaaggataaagaacttaagccagttataattggtatcacaggtacaaatggaaaaacttcaacagcattattacttgcacaagcattaagacatcaaaataaaaaaattggcgttatatcaagtgaaggcgcaggagtctatcctaatctagctgaaaatgaatatacaacaccaccattagatattaactataaatatcttagatctttttgtaaaaaaaaatgtgattatgtaattatagagtgctcatcacaaggacttcatcaagggaggttagagggtatacactttacttattctataattacgaatattgatcaagatcacattgaatatcacaaaagcataaagaattatattaatagtaaattgaaaattatgcatcaaagcagaacatcaatt

SEQ ID NO: 311384 - DNA, 1339 bp, Unknown
  Bacterial polypeptide expressing nucleotide sequence isolated from the Sargasso Sea
atgaaactttccactgaagatatagctaaagcactaggcgtatcgccaataaataccaatgcaaatctctcattaaataatatttcaatagattctcgcgaccctcaaaaagataatatttttatcgcaatcaaaggagagcatcacaatggacatgatttcattgatgatgcatttgaaaaaggcgctagtatagccataactgaacaacatcatcatagtcatcctgtatttgtagttgataacactatcaaggcattaggaaagatagcaaattattattccttattaattaatccaattacgattggtataactggtaccaatggaaagactacagtgacaaatcttgttgcaaatattcttaaaaaaaataataaaactatacaaactcttggtaattacaataattccattggattaccattgtctattatgaaagcagaagatgatactgagtattttgttttggaaatgggagctaggaaaattggcgatatcagagaacttacagctatagctaaaccaaatatagttgcattactgaatgtttcatcggctcatcttgatacatttcatacaatagaaaatattttaaaaacaaaagaagaaatatttgaagatcaaggatataaaaaaattgttatacttaataaagatgatataaattttaataggtggcataagaagtcaagtagacatgaaattaggacaatatctagaacaaaagatgctgattataaagtgactgcagtaagtccagataaattattattaaaaacatatcgaggtgatatgctatcaataaatatcaaaaatactgaagactattatattgataatattttattttctgtagcattagccactgaagctggagcatctatatcagatgtaaaaaacggaatagagtcgtttgagataccttctggaagatttaataaaataaaagggattaatgattgtactattatagatagtacttataatgcaaaccccgcttcgtttaaggcatcaattgattctttagtttctattcccggagaccacctaatgattatgggagaaatgggagaacttggcaatgattcttttaatcatcatttagatgtaatttcttatgcaatcaataagggaaccagtaagatttttttaaaatgttcattttcagacaagatcaaggaaagatatgataaaaatataattatatttgacaacattgatgaattaaaaaatttaatttatcctgtcttaaattcaaattcagttatattagtaaaagcatcaagatttatgagatttgaagagataaccaaaatattggaatttaggaattaaa

SEQ ID NO: 311385 - DNA, 592 bp, Unknown
  Bacterial polypeptide expressing nucleotide sequence isolated from the Sargasso Sea
atgaatcttagagtgtcagatgtagctaactatttgtcgtcttcttttgagggaactgacagagaaatcaagaaaatagttattgacagtagaaatgttaagaagggagatcttttcttagctattccaggaatcaaaaatgatggacatgaatttataaaagatgctatagataatggagcagcttgtatagtatgtgaaaagcctcatgactttggctctccgtctatttcaacttttattgtcaatagttctattcacgcactaggcaacatagctagagaatataaaataaatataggtcaaccatatacgattggcattacaggcactaatggtaaaactacggtaacaaaactatgtacagctatactaagtagttcatttaaaacaagttcaacaataggcaactataataacgaattagggcttccattatctattctcaaggctacccaagaaacggaaaaatgcatctacgaacatggagcaagaaaacaaaatgatataagctatttaactcaaatttctcaaccagattttacaactttgttgaatgtctcagaggctcatatggagtcatttaaaagta

SEQ ID NO: 311386 - DNA, 1318 bp, Unknown
  Bacterial polypeptide expressing nucleotide sequence isolated from the Sargasso Sea
atgttgaagtcaaaatgtttttcaaagaaaagctatgtagtcattggcatgggaaaaacaggatgttcaatttataaatctcttacaaatagtggagccgtagtatatttttgggaagataatcccaaacattcaaaaaaaatattaaataaaggatataaaaagtattcttctaaaataagtcaaatagactatgttatacctagtcctggaattgctacaaaaggaaagtcagcacataaactgataaaaaaattaacttcaaaaaatactaaactgataagtgaattagatttatttcaaatatacctggataatttaaatacaagaaacctgattaaaataattgcggttacaggcacaaatggaaaatcaacaacagtatcgcttattcatcatattcttaaaaaaaataaatttaatacagagcttgcggggaatataggtaacccgattttcgaaacaaagatgattaaaaaaggtttttatgttttagaattatcatcttatcaattagagagctccaagatatttcaacctgatattgcctgtatacttaatttaactccagatcatttggcgagacataatacaatgtccaattatggtaatgctaaattaaatatttttaaaaatataaatagctcacaaaaaggtttttttaataatgattcaattattaaaaaattaataaaaaagaataatcatttgaataaaatgaaaaatttaaagcagattaataaaaataaaaaaaactccattaaaaaattaaatgaaaatcaatataatttactgagtaacgaccaaaactaccacttctcatatgaaattttgaaagaagtgggcctaagcagcaataaaatcttcaatgcttttaaatcatttagagggcttgagtttagacaacaaataattttttcagacaaaaggaaacttattataaatgattccaaatcaacaaattatcattctctaattgctgcgctaaaaaaatataaagatatcatcttgatatgcggtggtcagataaaaagcaataatatcagtatattagatgacagtcttagcaatattaaaaaagtaataattattggagaggaatctaatacttttcacaaatactttcagagtaaagttaccacagtttatgttcaaagcttagataaagcagtggtcgaaatgagtaaatttatgaagaccaatacagatttcaatacttttttatttagtccaggcgctgcttcatttgaccaatataataactttgaagaacgtggaagacactttaataaacttataagcaaacttagcaaataat

SEQ ID NO: 311387 - DNA, 400 bp, Unknown
  Bacterial polypeptide expressing nucleotide sequence isolated from the Sargasso Sea
atgcatctctctgatttaaataatcctgagattttacttccaaaaaatgcggacaaaattcccattaagtctataacatctgacagcagaaaattaactaaagactgtatgtttgtagccataaaaggttatgaaaaagatggacacgattttattgatgaagcaatatctggtggcgcaagcaatattttagtagactataattataaagttacaaagcaactacctttatctaaatctaagaatgttagaaaagcattagctcttgtagcctcaatatatttcaataaacagcctaatattattgcagctgtcaccggtacaaatggcaagacttcagtatgtactttttttgagcaaatatgggatttaaataatttcaaatcagcttcctttagga

SEQ ID NO: 311388 - DNA, 1345 bp, Unknown
  Bacterial polypeptide expressing nucleotide sequence isolated from the Sargasso Sea
aatgataaacgaacttcctatagctatcttaggatttgggaaaaccggggtatcagtcgctgaatatctgcataaaaaaaataagcatttttatgtatttgaaaataatgagaccgtagaaaagcttaatcaatttaattcactgtcagatgctagtaaaaacaaaattttctttggtaattttgatcgtacggaattatataaagtacaatacatagtacaaagtcctggtatagctttaagtaaaaaaattaaagataaaatatcaaaaaataatatcaagatcgtctcagatattgatatatttatgaaaaattataagtcaaaagtaattgcaattactggttctaatggcaaaactacagtgacagaattattaaattatgtcttaaataaattaaactataaaagtgtttcatgtgggaataatggcatccctattttaagtattgaacattgtaaatatgattatatttgcttagaagtttcaagctatcaattagaaatttccggtaatataaattctgatgttgcatttataacaaatattacacctgatcacattgagaggcatgggtcatttgaaatttataaaaaaataaaatacaagatttttgaaaaggcaaaacaaataataattgacaaaagtaatttaaatattgattattctggatcaggtaaattaataagctttggtattagttcgtcaaattcatatacaattaatcttattgataaaaataatgatttcattatttattatttgtcaaaagaaattttaaaactcagcgacataaatttaacaggatatcacaatcttaaaaatgtggcatttgtattatgctctataatagcattaggactggacgttaataaagcagcaaagattatttcaaaatttaaaccactacctcatagaatggaatatttttataaaaataataattttcattttataaacgactcaaaatcaacaaatattgaatcaaccctagcagcacttagatcgtttgaaagtcctatagtattaatattaggcggaaggtcaaaaacagataatttttcagatataattaattttattaaagaaaaagatattaagcttattgtatacggtgatgcaggaaaacatttcgaaaattataatgaaagctatactaactttactattataaaaaatctaagcgacgttgttaataaactcaaaattattcttggtaaatttgatcaagaaaaaaaaataaatattttgttttctcctgcttgctcaagttttgaccaatttgaaaattatgaaaaaagaggagaattttttaaaaagataattaaaaataattttaaatga

SEQ ID NO: 311389 - DNA, 1303 bp, Unknown
  Bacterial polypeptide expressing nucleotide sequence isolated from the Sargasso Sea
aatgaatgaaaattcaaatatttttattaataaaaaaattctaatttatggtcttgggaaaagtggtatttcatcttttaaatttttaaaaaaaaagaatcaggtttttttatttgatgataataataagataaaattaaatagttataccaaaaaaaatttaatttcattaagccttattaaaaaaattaaatttgatttgattgtaataagtccgggcataaataataaaaaatgtaaattaaataaatttttaaaaaaaaattcaaaaatcatttatacagatttagatgtattttattctttttataaaaatctgtgtattactattacaggaacaaatggcaaatcaactacctgccagttattacatcaagtgttaaaaaaacagaagtatgacgttagattggctggtaatattggttatccaattttatctatcaaaaaaattaaagaagatactatttttgttattgaagcttcatcatatcaattagaatatagcaaattatttaaatctaaatacgctgcaatacttaatatttctccagaccatttagaaagacatgaaacaatcaacaattatatttcagcaaaatttaaacttataaaaaatcaaaataaaaactcaatagtattaataaacaaatttgataaatatattcaaaatagagttaaaaaaattaaatacaaaagtaaaattatcaaagttgatacaaaacttaaaaaaaaatttattaatatatttcataatgaatatttcttatcagcatcaaatattgaaaatctgtcattcgtaattgaattagcaaaaaaatttaatgttaaaaaaagtaatttgattcaagcagttaaaaaatttaagggtttgaattatcgtcagcagataatttttaaaaataaaaaaatttcaattatcaatgattcaaaatctaccagttattcatcttcaattgaaatgttgaaaagaaagaataatatttattggttaatggggggtataccaaaaattggtgataaatttaatttatctaaaaattattgcagcaatgttcgaggttatatttttggagttaaccaaaaaaaattctctttagatctaaaaaaaaagattaaaattaaaaaattttttaatttatcaaaagctttaaatgaattgtttaaagatgttaaaaaagataattcttctaaaaaaactattctttttagccctgctgctgcatcttttgataattttaaaaattttgaagatagaggaaaatattttaataaattaataaaaaagtatattaatgttagataa

SEQ ID NO: 311390 - DNA, 451 bp, Unknown
  Bacterial polypeptide expressing nucleotide sequence isolated from the Sargasso Sea
atgttactaggcaaagttttaaaaaatataaatacaaaatataaatcaataaaatttaaaaatattagatttaatagtaaagaatgtaagccaaatgatattttttttgcaataagtggaaatgaagtaaacggaaataattatattaaaaatgcaattaataaaggtgcaaaaattattgtttctgatttaaagtttgagggttttgataataataaagttttatttgtaagaagtaaaaacacaagaaattcgttagcagaagcagctagtaaaatttattacaaaaaacctaaaaatattattgcaataaccggcacaaatggaaaaacctcagttgcgaatttttattatcaaattttaacattaaacaataaaaaagcagcaaccataggtactttgggagtttatcaaaaaaaattcattataaaacaaataatacaactataga

SEQ ID NO: 311391 - DNA, 643 bp, Unknown
  Bacterial polypeptide expressing nucleotide sequence isolated from the Sargasso Sea
atgaaatttataactaatacttcagatttagcaaaatttcttaataagaaaataaaatttaatgcattaataaaatcaatttcaactgatacaagatcattaaaaaagaattcattatttatagctataaaaggtgaaaattttgatggaaatgattttgttgatgaggcactctcaaaaggttcaaatattattattgctgataataaacgttttaaaaacaataaagataaaagaattatatgggtgaatgattcgataaaagcacttaaaacaatatcaaataacatcatcaaagattatggtggtaacgtaattgcgattactggcagcaatggaaaaacaacaacaacaaatataattggtaaaaccctaaagaataactcaaaaactttaaaaaattttaataacgaaatcggtatgcctctgagcttgatgaatgcttcttctaaatcaaagaatttaatttttgaaatcggtgcctctaaattaaatgacattgattatcttagtaaaatcttacaacctaatgttggactaataacaaatattggaaattcacatttagagtccctaaagaatattagtggtgtttttaaagtaaagtctgaaatagttaaaaatattaagaaaaatggctttt

SEQ ID NO: 311392 - DNA, 418 bp, Unknown
  Bacterial polypeptide expressing nucleotide sequence isolated from the Sargasso Sea
gctgaaaaagttaattaaaaatattccattagataaagaaaaaattgtaattaatggattagctgtcagtagtaaagaagtaaaaaaaggatatattttttttgcaataaaaggtcataatgataatggtgaaaaatttattaaagaagcaattaaaaaaggcgcctctgtaatagtatgttcaaaaagctgtaagtactttaataaaagtatcgtcataattaagacatcaaatgtaagatctttgttaagtgaaatagtatcaaaattttttaatctaaaacctaaaaatataatagctgtgactggcactaatggcaaaacttcagtagcagatttattttatcaaattttgaagataaacaatgtacctgtagcatcaatcggcacacttgggagtaagttaaaaaaaaaataa

SEQ ID NO: 311393 - DNA, 382 bp, Unknown
  Bacterial polypeptide expressing nucleotide sequence isolated from the Sargasso Sea
aatgaataaattatctattattaaaccttttattaatacaaataagtttgacagtctttttatttcatccattactgatgattcaaaagatgttcaagagaattcattatttatcgcaaggcagggagtggattcacatggaaatgaatttattagagatgctgttcagaagggagcatcctgcattattacagatcagaaattagataaagaggcggatataccaattcattacttagataatttggaagacaagatcttagaaatcctttttagcttttatgatttatctgaagacaattttatctttcatggtgtaacagggactaacgggaaaacaacaacagcattcatggctcataatattatcagggctcttaac

SEQ ID NO: 311394 - DNA, 532 bp, Unknown
  Bacterial polypeptide expressing nucleotide sequence isolated from the Sargasso Sea
ctgggccagtcgggcctggccatggcgcgctggctggcgcgttccggcagcgatgtgctggttttcgatgatcgcgcccagccgccgggcctggatgccctgcacgcacaggttctgggagcaaccttccacagccgcacgctggatgccggcgtgcttgatgcggccggccagatcgatctgctggcctggagcccgggcgtctcatgcgagacgggcgccggtgccgcgctgcatgcagccgcccgcgaacggggcattcctgtgcacggcgagctggatttcttcatggatgccattgccacgctgcgcgcgcagggggccaggaccgatgtggtggccattaccggcaccaacggcaagaccaccgtcacgcggctctgcgccttcctggccaacgaagcgggcctggaggccgtggctgccggcaacatcagcccctccatgctggatgcgctgatggatcgtctgggcgacctgcccatcgagcccgtgccggctcctctgcaggaatcggcgccacgaggacgat

SEQ ID NO: 311395 - DNA, 415 bp, Unknown
  Bacterial polypeptide expressing nucleotide sequence isolated from the Sargasso Sea
tttgaaaaagttaaaagaaatattatttaaagtaaatattgattcagtatatggagacacaaacataaatgtttctaaaattacttttgattcaagagaggttaaagatcaggcactatttgtagcaattaaagggcataattttgatggtcataactatattaatcaagctacaaagaatggtgcctcagttgttgtctgtgagaatttacctgtcaattttgaaaaaagtagtgcagtttatatctgtgttaaatcttcaaaagaggcactttcaattatagcatcaaattttttcgataacccatcttcgagaattgacctgattggtgtaactggaacaaatggaaaaacaacaatttcttctttgttaaacaatttatttgatgaattgaaatttgaatcaggattaatc

SEQ ID NO: 311396 - DNA, 1417 bp, Unknown
  Bacterial polypeptide expressing nucleotide sequence isolated from the Sargasso Sea
atgaatactttaaataacgacgaactttctttaattaaagaactcaactcaaatcaaataataaacagcacacttgatattacagacaattcggttttatttataaatcatgaatctaaagaaaaattagaaaaatatattagtgaagctcttgataaaaatttacaaacaattgtaacaagtgataattgttctatttcaaacgaaaaaataataaaagttaaaaattatgaagaacaatataatgaagtactcataaaattatgtccaggataccaaggcaaaaatttttatggtattactggcacaaatggtaaaactactacaggtttctatttaaaccagcttattaatgacccctctctttttgttggtactactgaagaagatatatttaaaaaagttacgaatgaagaacatttaactactccaaagttatttaatattttgaagttactaggtttaaatgaaaataaagatattaataatgtgataattgaggtttcatctcatgccttagaacaagaaaggctaaaaggactaaaatttaaaatatcaggatttacaaatctatcacaagatcattttgattatcataaaaatattgaaaactacttcaattccaaattaaaacttttttctaataatgtatctgaaaagttagtatatattgactcagattggggcaataaaataaattcattatcgaagataccatcttttagtatcggaaatagtaagaaaaataatttgtatattaaaaaaataaatattgataaagaaaaatatgatttaacttttgaaatagaaggaaaaagttatgaaattacagttcctttatctggtcctgagtctcatttgaattatctattagctctttcaatggcatatttttcagaaatatctaatttagaaaacatattagaagcatcaacatctttaatgaatccaataggaagatttgaaataattaaatataaaaaaaataatgatgtaatcattgactttgcacatacacctgaatcaattactcaagtaattaattttgtaaaaaataaatatcgtaaagttattgttatttttggagctggtggaaatagagataaagaaaagaggatactgatgggtaaatcagtaaatctggcagatcaaataataattactaatgataatcctagaaacgaaaatgaagaagacattgctaaggatattttaaaagggattaaattaaataaagaaacaaaagtaattcttgatcggaaagaagcaataatagagggaattaataatcttgacaaagattctgtattattaatcttaggaaaaggtcatgaaaaaattcaagaatttgaaagttcttcaattaaatttagtgatcaagacgtagtaaataaatatattagggaaaactcatgat

SEQ ID NO: 311397 - DNA, 385 bp, Unknown
  Bacterial polypeptide expressing nucleotide sequence isolated from the Sargasso Sea
aatgaataaactatctcttattaagccctttattaaaacaaatatatttgataaatgctttatttcatcaattgctgatgattccagagatgttaaaaaaaattctctatttgtagctaggcaaggtataaattctcatggattaaagtttgcaaaacaagctattaaaaacggcgcgtcttgtattattagtgatcaaaatttagaagaggaattagaggtaccattttatttttttaataatttagaagaaaaggttacagagattctatataaattttatggacttaatgaggataatttcatttttcatggtgtgacaggcactaatggcaaaactacaacagcattcatggctcacaatattattagagagcttaatagg

SEQ ID NO: 311398 - DNA, 460 bp, Unknown
  Bacterial polypeptide expressing nucleotide sequence isolated from the Sargasso Sea
atgaatatacatcaagactcctttctcatactcgggaaaggcatgacttatcaaagctgcaaagagttttttgataacgaatcagttacttatcaggttttagagacaagagaaatccttgaaataaaagatcgccgattaattcttgaaaataatataataaatttaaataatattgatcatattattattagccctggaatttcaaaaaaaaattctatagttaaaaagcttataatgctcaattgtagcataactacagatatagaaattcttcaaactatcacaaaattaaactacatatgtattactggcacaaatggcaaaacatcaactgtaaacttaatatcagatatcctgaatagtaaccatattaaatctttagcatgtggtaataatggtgtatccgtttttaaatcacttgaggataattatgactttatagttctggaaatatcaa

SEQ ID NO: 311399 - DNA, 523 bp, Unknown
  Bacterial polypeptide expressing nucleotide sequence isolated from the Sargasso Sea
aatgatagatactcattcaagtaaaagaaatattaatcttgtaattggattaggtaaatctggattttgggctgccaagtatttgagaagcatcaataagagagtaattgtttgggaaagtaaagatgggatagaattcttagaaagaaaaacagcattagaagagcttaatatcatagtttctctaaataaagaatttgtatttgaagaaattcaaccttttttgaaagagatcgaatctgttgttgtaagtccatcactaccttatgaccatataactattattgaattaaaaaaaaagggaattaaagtaattggagaaattaatgttgcatgggaaattttaaaagacacaaattggataggtattactggcactaatggcaagactactgttactcatctactaagccatatactctgtgatactggattatatgctccttttgctggaaatattggtacacctttatgtaagtatgctcactccaaaaaacatgaaaaaattgattgggttgtagct

SEQ ID NO: 311400 - DNA, 637 bp, Unknown
  Bacterial polypeptide expressing nucleotide sequence isolated from the Sargasso Sea
ctgactagattaaaaatatgtactaactttattcttaaaaactctgatggagccagatacttatcagatagattctgcttagattctcgtcgtattaataataatcagatatttatttctctagaacctgacatggaaaagagtattacaaatataaatcatgccatctccaaaggagcatctggctttattaccccattgtgtataacaagacaaaaaattagatcatcaattccatttttgattgagcggggtattaaaaaaatatatgttgagctgttcaaagctgattttgaggaaaacgaacgtaagcctgtcataattggtattacaggtacaaatggaaaaacatcaaccacactattactggcacaatcattaacacaccagaataaaaaagttggtgttatatccagtgagggctcaggaatttaccctaaactagaagaaaatgaatatacaacaccgccaatagatatttgttacaaataccaaagatttttttctaaaaagaagtgtgattatgtaattatagagtgttcatcccaaggacttcatcaaggaagattagatggtatacactttacttattctataattacaaatattgatcaagatcatatcgaatatcacaaaa

SEQ ID NO: 311401 - DNA, 601 bp, Unknown
  Bacterial polypeptide expressing nucleotide sequence isolated from the Sargasso Sea
atgaatactttaaataacgatgagctttctttaattaaaaaactcaactcaaatcaaataataaacagcacacttgatattacagacaattcggttttatttataaatcatgaatctaaagaaaaattagaaaaatatattagtgaagctcttgataaaaatttacaaacaattgtaacaagtgagaattgttctatttcaaacgaaaaaataataaaggttaaaaattatgaagaaaaatataatgaagttctaataaaattatgtccaggataccaagacaaaaatttttatggtattactggcacaaatggtaaaactactacgggtttttatttaaaccagcttattaatgacccttctctttttattggcactactgaagaagatatatttaaaaaagtaacgaatgaagaacatttaactactccaaagttatttaatattttgaagctactaggtttaaatgaaaataaagatattaataatgtgataattgaggtttcatctcatgccttagaacaagaaaggctaaaaggactaaaatttaaaatatcaggattttacaatctatcacaagatcattttgattatcataaaa

SEQ ID NO: 311402 - DNA, 454 bp, Unknown
  Bacterial polypeptide expressing nucleotide sequence isolated from the Sargasso Sea
aatgaaatttatagctaatacatctgatctaaacagatacctaggtgttgatatagcaggtaatattccaatcaaaagcatttcaacagatactaggtcaattaaaaaaaattcattatttattgcaataaagggtgaaaattttgatggtaatgattttgttgaagatgccataactaaaggtgcgttgtatgctatagcagacaaaaaaaaatatgagaatcaaaaaaataaaaagataatttatgtaaaaaatactgttaaggcattaaaaaaaatatctggaaatattattaatgaatataaaggaaaagttatagcagttactggcagcaatggtaagacaacaacgacaaatattatttctaaaacattaaaaaataattcaaaaactttaaaaaattttaataatgaaattggaatgcctctaagcattatgaatgcatcatctaaa

SEQ ID NO: 311403 - DNA, 610 bp, Unknown
  Bacterial polypeptide expressing nucleotide sequence isolated from the Sargasso Sea
aaaataaaagaacaaaataagaacataataaaaaaaatagaaactgagctaagacatgcaaggctttcagaacccatcagaaacggtgttagtgtagcaattattggaaagcccaatactggcaagtcatcatttattaattttatatcaaaaaaagatgtagcaattgttacaaacattcctgggaccacaacagacgcaataacctcatcaattgacattaaaggatttaagtttacgtttattgatactgctggcttaagaaaacacaagaacaagatagaaaaaatagggattcaaaaaacaaaagatattattaaaaaatcagacctcaaccttgtttttctggaaaaaaatgaaaaaaacaaatataagaaagttcaaaacaagctttttgtaaggtcaaaatcagacataagaaaaaaaatagtcagtaaagcgtcacaccacaatatatcatcaattacaggagagggtgttgaccttcttcttaaggaaatttcaaaaaaaacaacaaaaacaggaaaaatcaccccggttctttcacgtgaaagacatataagatataatggagcgtgtattaaaaacattaaagtctataaagtttaat

SEQ ID NO: 311404 - DNA, 520 bp, Unknown
  Bacterial polypeptide expressing nucleotide sequence isolated from the Sargasso Sea
catgaaaaagatattaatttatggaatgggaaagactggaattgagctaaaaaagttttgtaaaagaaactctattaacttttgtacttttgatgataaaaccgataatcaatcagactttatcaaactttcagagaaatgtagctatatagtggttagccctggtataggtctcagaaataaaaacttaaaaattgctataaaaaagaaaataaaaattattagtgaaatagagtttgcatcaaagtttctagacaaaccaataatagcaataacgggtactaatggaaaaacaacaactgcgatgcttaccgaaaagctgttaacgagtgctggcataaaggtgtttctaggtggaaatattggaacaccccttattaatgccgtcaattcaaaagaaaaatttgacttaatattagtagaagtcagtagctttcaattacagtttattgatctatcattcaaaccattcgtttcagcccttcttaatatttccgaaaccatcttgaccatcatttaa

SEQ ID NO: 311405 - DNA, 711 bp, Unknown
  Bacterial polypeptide expressing nucleotide sequence isolated from the Sargasso Sea
gatgaaatttataactaatacttcagatttagcaaaatttcttaataagaaaataaaatttaatgcattaataaaatcaatttcaactgacacaagatcattaaaaaaaaattcattatttatagctataaaaggtgaaaattttgatggaaatgattttgttgatgaggcactctcaaaaggttcaaatattattattgctgacaataaacgttttaaaaaaaataaaaataaaagaattatatgggtgaatgattcgataaaagcactcaaaacaatatcacataacatcatcaaagattatagtggtaacgtaattgcgattactggtagcaatggaaaaacaacaacaacaaatataattgctaaaaccctaaagaataactcaaaaactttaaaaaattttaataacgaaatcggtatgcctctgagcttgatggatgcttcttctaaatcaaagaatttaatttttgaaattggtgcctctaaattaaatgacattgattatcttagtaaaatcttacgacctaatgttggactaataacaaatattggaaattcacatttagagtccttaaagaatattgatggtgtttttaaagtaaagtctgaaatagttaaaaatatcaagaaaaatggctttttagttgtaccaaatgataataagaagcatcttaataaatggaaaaaaatgagatcagacataacaat

SEQ ID NO: 311406 - DNA, 555 bp, Unknown
  Bacterial polypeptide expressing nucleotide sequence isolated from the Sargasso Sea
tttgtacggaataacagatgctccaccgatcaaatacaataatatttgtgatgacagtagatatgtaaataaaggtactgttttctttgcagttaagggtttaagttctgatggttgtgattttatagagcctgctattaactctggtgcatgtgcagtcgtctatgagccaccttatgatctgagcaatattgagacatcaatcccaatcatcgctgtagaagatttaaaattggaaatttctaatatagtttcgagacattatgagagtagcatcaatgagatgagcatcattggtgttacaggaacaaatgggaaaacaactgtatcctggttaattcatcaaggttttaaaaaaattggatataaatcaggttacattggtacattggggcatggtctagaaaatctaaatctcaatgagttaaccacaccatcatgcatgaaattgcataagatactgagtgaatttcaaaattctggtgttgaatatgttgtaatggaaatttcgtctcatgcaattgatcagaggagaatagagggtataaatttcaa

SEQ ID NO: 311407 - DNA, 547 bp, Unknown
  Bacterial polypeptide expressing nucleotide sequence isolated from the Sargasso Sea
atgatttcattaaaagatataaaagatgatttctcttcagatgttatcattaaaggggtgacatgcgatagtagaaaagttgagcctgggtatatttttgtagctattcaaggagaaataaatcgaggtgaagattttattgatgaagcaattagaaaaggtgcgagtgttattgtaacttctttagattctgatttaaaattagatattccactcattaaagatgaaaatccaaggagatatttatcctatatctcatcaattgtttttaataactctcctgaaacagtttgtgcgattacgggaactaatggaaaaacatctacaacaaattttttacaacaaatttggaatttgatgggattgaaatcttctagtattggcaccttaggtattataggaaatgaagaaatacaagatacaaatattactactccagaccccgttttactacataagacattagaaaaattatctaatcagagctttacacatttagctttagaggcatcaagccatggcttatcacaatatcgaattgataatg

SEQ ID NO: 311408 - DNA, 1309 bp, Unknown
  Bacterial polypeptide expressing nucleotide sequence isolated from the Sargasso Sea
atgttagaaaaaactctaattcttggttttggtactacaggaaaatcatttgttgattatttactctctcaagatcaacagataaaaatttatgatggtaaacttcaaaaaataccaaacattattctcaaaaataaaaatatcgaattttttcaagatatagttccagataatatacttgatgatgtttttcaagtgtttatcagtcctggttttaatccacaacatcagattatgaaaatgataaatgataagaagttagatatttctacagatatagatttatttaaaaaacaaacatcatcgaaaattatatcggtaactggtacaaacggaaagacaacaatagtctcaatgattgaacatgttttgagaaaattaaaaatttcatgtatagcatgtggtaacaatggtttgcctcccttaacaataactcaatcaaactatgaatatataattttagaaatatcaagctaccaattagaatatatgaataactttaagagttttattagtcttttaacaaacgttactcctgatcatttagaaagacatgatacttttacaaattatttaatgattaagaaaaagatatttaatgattcagatcattgtattgcaaatattaaattaaaaaatcaattggatattaaaaaaatgtcatattatggatatgaacctaaatcaaaaaaatattatattaataataaaattcaaaaaaaattactgattacagataatttaattaaatgtaatagcacgaaattaaattataagggtggtcatatcttagaaaacattttatctgttatatcagtaattgataatttaaatataaatatagatttagagaatatactagactctataaaatcttttaaatctcttcctcaccgtattgaaaagatagcaagtttggataatgttgattggtataatgattcaaaatccacaaattgcgaatctacgatagctgccttgaatacgctagagaaggatattattttgattattggtggctctcataagattattgattataaatatttatcagaagagattaaccaaagggtaaaaaaaataattttcgttggtcaaaataaagaaatacttaaaagtaaacttagcttaaaaattgattcctatgatgcttatgattatgaagatgctgtaaatctaataatgtcacttgtaagtcctggcgataaagttttactgtcaccagcaagtccaagctttgatatgtttaataactttgaacatagaggcgacacttttaaaaaagtggtaaaaaaatatgttagttgat

SEQ ID NO: 311409 - DNA, 793 bp, Unknown
  Bacterial polypeptide expressing nucleotide sequence isolated from the Sargasso Sea
gatggcccaaaccgtcgtcgtcggacttgggcgatcgggtcaaggtgctgcccgcctcctgcaagccacgggccatcccgtttccgtgatcgactccggccaaggtgagcagttggagaagaaggcagaggggctacgccagcagggtgtcgaggttcaacttcaggcaccgcttgcgatcgacagcttccgtccctggctggaccaactgcagcgggtggtgatcagcccgggcgtgccctgggatcaccccacgctcgacgacttacgccaacgcggtgttgccgtggatggagagatggcggtggcctgggatgccttgaagcacatcccctgggtgggcatcaccggaaccaacggcaaaaccaccgtcacccacctgctgagccacgtgctctgccaagccggattggccgctcccatgggcggaaacatgggggtgtccgccgccgaaatggccctcaacctccagcaggagcacaccaccgcccccgactggctggtgatggaactcagcagctatcagatcgaagccgccaaccgcatccgcccccgaatcggcatttggaccaccctcaccccggaccatctggaacggcacggcacggtggaggcctatcgagcgatcaagcgcggcctgctcgaacgctcggaccacgccatcttaaacgccgacgatccagacctgcgacagcagcgtcaaagctggaccggtggcacctgggtcagcgccgagtcggcgcaactcgatggtcaccccgccgacctctggatcaacgccgagggttggggt

SEQ ID NO: 311410 - DNA, 1063 bp, Unknown
  Bacterial polypeptide expressing nucleotide sequence isolated from the Sargasso Sea
tttgctaccctcagacttaggtagccaagtgtcaaaaaatacttctcgatcacttattttaggacttggtcagacaggcttatctctttttaattacttaataaaatttgaacaagagccaattatttttgataccagaagtgatcctccttgcaaaaaagaattacttaaaaaaagtaaaaatcctctaataatttctaatctaaaggagatggcttttgatgaaattcgatcgtgctatgtgagtcctggatttgatatcagtcatgaaatagtcacaaagttgaatactcataacattgaaatcctttcagatttagatctctttttgagagttcatgctaaaaaatcaattcttgttacaggaacaaacggaaaaacatctgtagtatctttgcttcaacacatcatgaaatccttggaacttaaggttaaaagtataggaaataatggttttcctgtgcttaatcatattgaagatcaactggattattttgtaatcgaagtatcttctttccagatagaaaggacaaagtcattatcaagcttagtttctgtattattaaatatatctcctgatcatttagatgttcacgattcttttcaacagtacacaaaaataaaaaaaagaatatttgaaaactcaaactttaaaattggacctgagggcataggattagatttagatttcattatgcctgagatcacagatcatgaaatttataatcaagaagctgtaaaaaggattcttttacacataggcctcaaaaaaaaatccattgaggagaaaatactttcctttaagccgccgccccatcgccttgaagatatttctttaaataaatacctcaccatcataaatgactctaaatctaccaatccacattcacttaatgctgcaataaataaatataaaaataaaaaaattattttaattatgggggggttaaaaaagaatctaagttttagaccacttaaggaggttcttaagaaaaaaactaagaaagtttttgtttatggtgcggacagagaaaagatttcaaatgaaatagaagagttaaat

SEQ ID NO: 311411 - DNA, 790 bp, Unknown
  Bacterial polypeptide expressing nucleotide sequence isolated from the Sargasso Sea
catagattatggattctttgctcttgcaggttctaaaactcatggtgcactttatgtaaaagatgcaattacgaaaggtgcaaatttaattattactgatactcaaggcttaaaaataattgaagaaatgcaattaaatgctgcaatcataattttttcagaaccacgaaaactaatttctgaaatagctacctacttttttacaaaaatccctcaaaatattgtcgggattactggaactaatggcaaaacatctgtagcacactatataaggcaattttgggaaaatttaggttataactcagcaagcattggaactacaggtgttaatggtttgattaatttcaaaactcaacatactactcctgatgcaattacattaagatggtatttaaacaaattagtaaaaaaaggtgttgataaaattgctttggaagcttcatctcatggtttagtacaggacagattaaatggaataaaaatgtctataggggtttttactaatcttagtagagatcattatgattatcacggtaatattaattcatattttgatgctaaagctattctatttaaggaattggttgaagaaaatggaggtgcggctattgctattgatggcccaaagagtgatttaatgcttaaaatagcacaatccagaattccaaaaataataacagttgggaaaaaaaaagaagctaaattaagaattatatctcaaattcttactgataaaggacaaaaattaaaatttagctggaatgaaaatgaatatgttattgatctaaaa

SEQ ID NO: 311412 - DNA, 383 bp, Unknown
  Bacterial polypeptide expressing nucleotide sequence isolated from the Sargasso Sea
aatggtaaaagaaagaattttaatttatggaatgggtatcactggaaaagcagtgaaaaacttttgtaaatacaaaaaaataccgtatgcaatatatgatgacactaaaagcaaagacaattttaaaaaaatattaaaaaatatttcaactattgttttaagcccagggataaaaaaaagtaatttaaatattaaatttgctttagaaaataagataaaagtaataagtgaaatagaatttgctgcaaaatttacagaaaaaccaattattgcagttacaggtactaatggaaaaacaactactacattattaactcatgaaattttaaaaaatcatgggctaaaagtatttattggtggcaacattggcacacctttcataa

SEQ ID NO: 311413 - DNA, 682 bp, Unknown
  Bacterial polypeptide expressing nucleotide sequence isolated from the Sargasso Sea
aatgaatggaatttcaaatatttttataaacaaaaaaatcctaatatatgggcttggcaaaactggcctttcatcttctaattttttaaaaaaacaaaatactatttttttgtatgatgattatagaaaaaattctatttctaaaaaaaaaattgaaaagttaaagtttgatgcaatagtaataagccctggaatagatataaataaatgcaaactgagtaaatttttaaaaaaaaatttaaaaattatttatacagatttagatattttttattctttttttaataatatctgcattactattactggaactaatggtaagtcaactacgtgccaattactttatgaagttttaaaaaaagaaagaaaagatgtaagactagcaggaaatattggatatccaattttatcaattaaaaactttaataaaaaaactatatttgtaattgaggcatcatcctatcaattagaatacagtaaattatttaagtcaaaatatgcagcaatattaaatatatcaccagatcatttggagagacataaaactcttcaaaaatatgtttctgctaaatttaagttaatagaaaatcaaaaaaaaaattctttagcgttaataaataaaaataatactttaatgatgtctaaaattaaaaaaaaaaaatatcaaagtaaaataattaaa

SEQ ID NO: 311414 - DNA, 832 bp, Unknown
  Bacterial polypeptide expressing nucleotide sequence isolated from the Sargasso Sea
atgaatgctaattcaaatatttttattaataaaaaaattttaatttatggtttaggaaaaactggtatttcaactttccaatttttaaaagggaaaaatgaagtttttttatttgacgataataacaagataaatctagttagtaattctaaaaaaaatttaattcctctaaataaattaaaaaaactaaaatttgatttgataatattaagcccaggcattaataaagcgaaatgtaaattaaataaatttttaaaaaaaaattcaaaaattatctacacagatttagatgtttttaattcatattataaaaacttatctataactattacagggactaatggtaaatcaactacatgccaactattttatcaaattcttaaaaaacaaaaatatgatgtaagacttgctggtaatattggctatccaattctatccataaaaaaaattagaaaaaacacaatttttgtaatcgaagcctcatcttatcaattagattatagtaaattattcaaatctaaatacgcagtaatacttaatatttccccagatcatctggagagacataaaacaattaataattatatttcagcaaagttcaaaattataaaaaaccaaaataaagattcaatagctttcataaataaatatgacaaatacattcaaaataaaattaaaaagacaagatgtaaaagtaaaattatcaaagtaaatacaaaaccaaaaaaaaatttttataaaatatttaataatgaatatttctcatcagcatcaaatttagaaaatctatcgtttataattgaattagcaaaaagatttaatataaaaaaaa

SEQ ID NO: 311415 - DNA, 814 bp, Unknown
  Bacterial polypeptide expressing nucleotide sequence isolated from the Sargasso Sea
ttgcctgggcaaaaaattccaaatatagaaataaccggtattacaactgattcaaaaacagttaataaaggagatgtttttatagctattcctggtaaaaaccatgatggtcatgattatataaaagaagctatacttgcaggagctaaagcgattatatcaaatggaagagatttgggacaattatccgtgcctcaaattaaagtaactaatccgcgtttagccacttccattatagcagctgaattttataaaaacccatcaaaggatttaataataataggaataacagggacaaatggaaaaacgacaacagcttccctgataaattcaattttaaaaaatgctggatataaaactgcccagattgggaccctaggactaattgctgatggtattaatcatataaatacattaacaactcctgacgcgataactttacaaagaattttatcaaatctgcgagaaaaaaaattttcacacgttatcatggaagtatcatctcactctcttgatcaatttcgagttgctgatattcaatttgacattgctgtttttacaaatttgactcctgagcaccttgattatcatttaacaatggaagattacttcaaagctaaacttagattattcactacactatcattcgaatcaacttcaattgttaatacttctaactcatatggtgagcgaattaaaaaaatgtcaaatgctccagttatatctttttctacaaatagtaactcatcaacgcactttgaaaatcttaaagtttcaacttctggaatcaaaggaaacattaaaactgaagatc

SEQ ID NO: 311416 - DNA, 685 bp, Unknown
  Bacterial polypeptide expressing nucleotide sequence isolated from the Sargasso Sea
aatgtttaaaaataaaaattttttttttaaaaaaaaaattttaatctatggcctaggcaaaactggtctatctagctactattttttaaagaaatataatgatctaattttatttgatgacaataaaataacaaacaaaaaatatccaaaaaaattttttttgagtattaataaaattaaaaaagtaaaatttgattatattttaattagcccaggtataaatattaataaatgtaaattaagaaaatttttaaaaaaaaatttactaaaaattattacagatttagatgttttttattgtatgaattataataataaaattattgcgattacaggcactaatggaaaatctacaacggctcatcttacttacttgattttaaaaaaacaaaataaagatgcgaggttgtgtgggaatataggcaatccaattttatttgaaaaaaaaatatcaaaaaaaacaatttttgtagtagaggtgtcttcttatcaaattgaatatagtaaattttttaaagctgattttgcaataattttaaatatttcacctgatcatcttgaaaggcacaactcaatgaaaaattatattgatgctaaatttaaattgataaaaaatcaatcaaaagatggatttgcatttataaatgaaaaagataaatatttaaaaagtagaataaaaaacaaa

SEQ ID NO: 311417 - DNA, 343 bp, Unknown
  Bacterial polypeptide expressing nucleotide sequence isolated from the Sargasso Sea
ttgatcggggaacgggagaccgatgtgacgggtctctcgacgaacacccagacgctcgaacccggtgaagcctacgtagcgctgaagcgtgcaagggatggacatgagttcgttcggcacgcgttggatgttggcgctgccgcagtggtcgttgaccacgccatggaagtagatgcgtcgcaggtggtcgtccagtcgaccgatgcgggtttgtcgtcgctcgccagaaccttttacggtcggcctgccgattcgctcaaggtgattggtgtaacgggtacaaacggaaagacgacgacgacttatctgatccaagccgcgctcaacgcggccggtttgtcga

SEQ ID NO: 311418 - DNA, 668 bp, Unknown
  Bacterial polypeptide expressing nucleotide sequence isolated from the Sargasso Sea
aatgcttccacataaaaaaattttttttaaaaaaaaaattttaatctatggtctgggcaaaactggtttatccagctattattttttaaaaaaatataatgatctaattttatttgacgacaacaaaataagaaataacaaatattcaaaaaaaattatttcaaatataaataaaattaaaaaatcaaaatttgattatattataattagcccaggtataaatattaataaatgtaaattaaaaaaatatttaaaaaaaaatttacaaaaaattattacagatttggatattttttattgtaagaattttaaaaataaaattattgcgattacaggtactaacggaaaatccacaactgctcatcttgtttacttgattttaaaaaaccaaaagaaagatgtaaggttatgtgggaatataggcaatcctattttacttgaaaaaaaaatatctaaaaaaacaatttttgtagtagaagtatcttcatatcaaattgagtatagtaaattttttaaagctaattttgcaataattttaaatatttcacctgatcatcttgaaaggcacaactcaatgaaaaattatattgatgctaaatttaagttgataaaaaatcaatcgaaaaacagttttgcatttataaatgcaaaagataagtatttaaaaa

SEQ ID NO: 311419 - DNA, 1405 bp, Unknown
  Bacterial polypeptide expressing nucleotide sequence isolated from the Sargasso Sea
aatgagtgaacttaatttgtcagaattaaaatttactgaaattgatattaaaaattttgttaacagctcattagatgttgaggaagggtcagtactatttattaatcatgacgataaagataagttagacaaatatgtagatgagtccttaaagaagaaagtgaagctagtcattacatctttaaattgcagttcgaatgatgataaagtaattaaagcaaaaaattacagtgaagtttttctcgactcttacaattatctgtgtaatgactatgaatcaaaaaaatactttggcattacaggaacaaatggtaaaacaacaacaggatcttatcttaaagaattactaggatcggaaagtttatttattggaactaatgaaaacgaattattttctgaaataacaaatgaaaaacacttaacctcacctaaattatttaatattcttaaattacttggcaagtcagattttaaaaaatacaataatataattctcgaagcttcatcacatgctctagatcaagatagatttaatggaattagatttaatacctcaggttttacaaatctatctcaagatcattttgattaccatacaaatattgaaaattactttaattcaaaattaaagttattctcaaaccagctatcagataagtatgtatatatagataatgaatggggtaataaagttgcccaaaattcatctttgccatcttttaaaataagctcagacactcaagctgatttacaaatattagaaaaaaagacatatccaaaaactaatttgaaaatagaaattaataaaaaaatatacgattttgaattagatatcgttggtccaaatttttatcaaaattttttacttgctttttctatggcatattattcaaaaataaaaaatgtagaccaaatcatagaaaatatttcgaatctgaaaaacccaaaaggaagatttgatttgattaatttcaaaactaataaaataattgtagattacgcgcacactcctgaatcaatttcccaagttattaaatatgtgaatccttatttttcagaggttgttgttttgtttggggctggaggtaatagagataaagaaaaaagaaaacttatgggaactgcttcccagttagcagatagtgtaatagtaacgaatgataatccaagaaatgaagatcctattcagatatcaaatgatattttaaaaggatgcgatttatctaaaactaatgtaattcttgatagaaaagaagcaataacatctgcaattaatgagctcagggaaaactcggttttattagtattaggtaaagggcatgaaatgtatcaagaaataaacaattcacatattccttttaatgataacgatttcattaatgagaccattggaggcttaatttga

SEQ ID NO: 311420 - DNA, 798 bp, Unknown
  Bacterial polypeptide expressing nucleotide sequence isolated from the Sargasso Sea
gatgaaaaatacattaaaaaaattattaaaaggaattaatggaattaagaacattccagaaattccaatatcaggaatatcaacaaattcagcgcttattaagcctgggaatctttatatagcaattaaaggtaatagatatgatggaaataaatttattcctgaagcaataaacaatggtgcttctgcagtcattacagaatatgactattcaaataaattatcaacgccaataataaaagtgaccaattctcgaaaagtagtatcccgtgcagctgcagaatattatgatcatccaacaaaaaaaatgagcgtagtgggtatcacaggaaccaatggtaagacttctacagcttcccttttaacatccatacttaaatctgcggggaaaaaaacagcccagataggcacattaggtattattgctcagggtttatcaaaagaaaaaggattgactactcctgattctattactcttcatcaaaatttatctgaactatataatgatggttatactcatattgtaatggaagcaagctctcatgccctagatcagtatcgtgtaaatgatattgattttaattatacagtttttacaaacctatacccagagcacttagattatcatggtacaatagaaaaatattttgaagcaaaaactaaattatttacctcatatccaaactcaacagctgcagtaattaacatagataatgaatatggtaaaataatttctaatagatgtaccgtacctattatcaatacatcaatgatatcaaatactgatatatcttctta

SEQ ID NO: 311421 - DNA, 1321 bp, Unknown
  Bacterial polypeptide expressing nucleotide sequence isolated from the Sargasso Sea
tcaaagattgctagtcttttatcacttgatctaaacgggcctgatacggacatatgtaattttactattgacagtagagaagttaaaactggtgatttttttgtagcaatagagggtaaaaattatgatggtcacgactacatacaagaatcaattgataatggagcattggcaatattgtgtaatgagagatttgatacgtcaaaaataactgtcccatatataatatgtcaagacacattaaaatctctcggagtacttgctacaggctataaaagtattattggatcaccatttacgatcggtatcacgggaacaaatggtaaaacgacagtaactcaattgacgactgagatacttaagcaatgcttttctgtaagcactactctaggtaactataataatgacataggtttaccattatctatattgcaatcacccgaagagaattatcaaaggtgtatatacgaacttggagctagcaagagagatgatattagttatttggtaaatatttgtgaaccagatatgactgcattattaaatgtttctgaagcacatatggagtcatttggtagctttgaaaatctcatgaggactaaagaggaaattttttctcatacaaatacaagtcaagttgtattgaataaagatgataagaactttgccagatgggaagaaatgaataagcataaaaaaattactactatatccatatcaagtgatgcagattattttatcgaaaaaatagatgacgatgttttatatatatcgacaccaaaaggtaaatttgagttaagtaagaaaaattgctcggggatattagctattaatttattatttagtatagccctatcaatggaggcaggtgcagacattcaatatgttacggatggtattgataatttctctggtgtaaaaggtaggttctatagttatatatcatcgaacaagtctatagttatcgatgattcatacaatgcaaatccagagtctatgaaatcatctttgaaccagctaaagaacttcaaagaaaataaaattttcataatgggtgacatgggtgagcttggagataaatctctggatcatcatttatcggttttcaagctagctaaagatattgatgtaaaatatcttctttacatgggtaaatacaaaaatgaggcaaaatcaatatttggagatagttgcagaacttttgatgatattataaagttgattggctatgctcgaagtatctctgatgagagtactgttgtgcttataaaagcttctagatttatgaattttgacataattgcaaagggtttgaagtaga

SEQ ID NO: 311422 - DNA, 685 bp, Unknown
  Bacterial polypeptide expressing nucleotide sequence isolated from the Sargasso Sea
ctggttgtttcaatttatgtcaatcccactcaatttaatgataagaaagattttgaaagttatcctcaaaatagcattgaagacatcaaaaaattgaatcaatcagattgtgatatcttattttttccaaaaaccagtgatttatatcctgatggtttaaaaaaaaataaattgatttttgattatcgagatattttatgtgacaaatttagaccaggacattttgatggagtaacaacagttgttaatagtttatttgatttaattaaacctaattttgctttctttggggaaaaagattttcaacaattaaaaataattcaaaaactttctttaacaaataattttcaaactattattaaatcatgtccttcaataagattgcctaacggaatgagttattcttcaagatattataatttttcttttgatcaaaaaaaaatttttaataaaattgctttagaaattaaaaaacatttaaattttattaaagaaaataataatcagaataccctaaataatttaaataacagcatattgcttgctggtgctaacaaaattgaatatttagaaattagagaagaaaataatttaaatatttcaaaaaaaaataaaaattcacgcttatttattgcattttatatagatacaataagagtaatagacaattttattttatattaag

SEQ ID NO: 311423 - DNA, 541 bp, Unknown
  Bacterial polypeptide expressing nucleotide sequence isolated from the Sargasso Sea
aatggaaatatttaaatcaaaatctgatttaataaatactctaaaaaaacttgaaggaccattaggtttggttccaacaatggggggaatacatgaaggacacctgtctcttattcaaaaggccttcagagaaaacgcctctgtaattgtaagtatttttgtaaatcctatacaatttgacaatatagatgatctaaaaaattacccaaggaatttgaaaaaagacgctctagtaatatctgaaataagtgatgatataaaaatatatgctcctactcaaaaagatgtttatgggaaaaaatttaaaaaaaataaatatgactttgataaactagataaagtgatggaaggaataaaaaggaaaaatcatttcaatggagtagcaaatattattgagtttctatttaaaacttttaatcctcaaaatgcttattttggcgaaaaagattatcaacaattacagataattagaaatttaaataaaaggcttggcgattcaattaatgtaattcaatgtccaaccataagaaacaaaaatggt

SEQ ID NO: 311424 - DNA, 486 bp, Unknown
  Bacterial polypeptide expressing nucleotide sequence isolated from the Sargasso Sea
tatgcgataaatttcgacctggtcattttgatggagttactactgttgtggatcttttctttaatatgataaaaccaacgaacagttattttggtgagaaggattttcagcaagtaaaaataatacaagatttagtaaaaataaatcatcacaatattaaaataattcaatgttcatctgtacgagataaaataggtatgagtttatcttcaaggaactctaaattttctaatgatcaattaaaaattttcaatgtgttaggaaataaaattaaagaatatattaatttattaaagcaaaatgaaattaataatttagatcaattaaaaatagagcttcttaagaataatataaaaaaaattgactatttagagattagaaatgaaaataatttagaaataacaaaaaattattccaaagctagattatttattgctttatatattggcgatataagagttattgacaattttaagttatattaag

SEQ ID NO: 311425 - DNA, 697 bp, Unknown
  Bacterial polypeptide expressing nucleotide sequence isolated from the Sargasso Sea
aaaaagaataaaaatattcttgtaagtatctttgtaaatcctaaacaatttaactcaaaaaatgattttaaatcttatcctagaaattttaaaaaggacgttcagatattaaaaaaacttaaagttaaatacttattttatcctaattataatgatgtttttttgtttaagactaaaaataagatttacttgcaccctttctctaaaaaattatgtggcaaatatagacctggacattttagaggtgttttggatgtagtgaatagattacttgaaatattgaaaccaaaatatatgattcttggtgaaaaagattttcaacaactatttttaataagaaaacatatcattaaaaataatattaaaacttcaattatcgctcataagacagttcgaaatcaaaattttataccctactcttcgagaaacctaaatttaagtaagtatgataaaattttagcttcaaaagtttttaaaacattgagaaatgaaaaattcttaattaaaagaaaaaaaataaagaaaattaatttattaagcgtaaaaaacaaaattttaaaaatgggtattaaaaaggtggattatatcgaggctttaaatttaaaaagtttaaaaaaggcaaaaaaattcaatgaaaactttaatatcttttcagctttttatattggtaacgtaaggctaattgataatttttaat

SEQ ID NO: 311426 - DNA, 691 bp, Unknown
  Bacterial polypeptide expressing nucleotide sequence isolated from the Sargasso Sea
tatgaaaataattacaagtatttttgatttaaataaagagattaaaaactataaaaatattggatttgtcccaacgatgggtgggatacatgctggtcatgaatctttaataaaagcttcacaaaggaaaaaaagtaagacaattgtaagtattttcataaatcctactcaatttaataaaaagaacgattttaaaaaatatcccagaaatataaataaagatattgcaatattaaaaaaattaaatgttgattatttattcagaccaagcgtcaaagatgtttatagatttaaatctaagaaatttaatttaaaaaaaagtgacaagatattatgtgcaaaatctagaaatggtcattttgaaggtgttcttgatgttatgaatagattaatgagtattatcaaatcaaaagatttgtatatgggagaaaaggattatcaacaattatatctaataaaaaaatttctttcaaaaaagtttagggtacgaattaattcatgtcctaccataagaattaaaaataatattgcactatctacacgaaacaaattattaactaagaaacacctaaaaatagcatcggaaattgcactaattcttcgtagattaaagcgtaaatctaaatttcaaccattaaaaacagctcttgatttacctaattataaaattttgatggagacaaaagtataa

SEQ ID NO: 311427 - DNA, 564 bp, Unknown
  Bacterial polypeptide expressing nucleotide sequence isolated from the Sargasso Sea
acttatatattccaacgtttaaagacatttacgggtttagaactaagaataaagtttttttagataaatcttcaaaagaattgtgtggtaaatttagaaaaggtcattttcagggtgttttaaatgtagtaaacagatttatagaaataattaaaccaagatatatctttttaggaaaaaaagattatcagcaactatttctaattaaaaaacacgtcgaaaaaagaaaaattaaatctaaaataattgaatgtaaaactataagagaatataatggtgtagcttgttcttcaagaaatttaaatcttagcagaagtcaaatgaaaattgcatctaatatttttcattatctcagtagcctgaaaaaaaagataaaaaaaaattatagtttgttcaagattaataaaataaaaaaagagctaacaaaactaggtgcaagtaaaatagactacttagaaaattataatacaaaaagttttaaaaaaatcaaaaaaactaataaagaatataatttgttttttgcttactacattaaaaaagtaagattaattgataatatctaat

SEQ ID NO: 311428 - DNA, 721 bp, Unknown
  Bacterial polypeptide expressing nucleotide sequence isolated from the Sargasso Sea
attgttagtattttttgttaacccaaaacagttttcagccaatgaggattttgatacatatccgcgcaatctagaaaaggatctagatgacctagatggggttggggtcgatgtggtgtttatacctaagcatgaagatatatataataaaaatattcaagagttttcttttgaacatcctctggcaaaaattttagaaggaagggctcggcctcatttttttcctggtgttattaatgttgtttccaggctgtttaatattgttaacccaaatgtcgcttattttggaaaaaaagatgctcagcaattgttgcttatagaaaaaatggtccaattgggggggtatcctattaaagttgtgcgtggagaaactgttcgtgagcccaatgggttggccatgagttctcgaaatcaatatttatctgctagtgccaaagaacgcgctgcgtgccttaatcttagcttagttacagcagaaaacatgttggatggcggagaaacaagggttgaaaaaattaaaaaagaaatgtttgaagtaataaataaggatgagagtatttctattggttatgtgtcaatattgtgtcttaacactttggtagaggttaataatagagttaatggaccgatattgatttctgttgctgctgtattggggggggttcgtttaatagataatattttctatgattcaatatctaagccaatgtcgacgctttga

SEQ ID NO: 311429 - DNA, 184 bp, Unknown
  Bacterial polypeptide expressing nucleotide sequence isolated from the Sargasso Sea
gtcgctaaactgttattcaactcgatgcctgatttcgctttatttggagaaaaagattttcaacaagtcttagtgattagacgaatggttattgatatgttgttgcctgtccaaatagtgtcgatgccgacgtgcagggaaaccgatggacttgccatgagttccagaaatcggtctttgagtc

SEQ ID NO: 311430 - DNA, 813 bp, Unknown
  Bacterial polypeptide expressing nucleotide sequence isolated from the Sargasso Sea
aatgaaaataacgaaaaaaatcagtgaattaaaggatatcatacttacattaaaaaattccaacaaaaaaattggattggtgcctactatgggcaatatacatgaaggccatctctcacttataagtaaagccaaaaaaaatgatgattatgtaattacaacaatatttgttaatccaacacagtttaataacaaagatgattacttaacatatccaaatacttttgaagaagatgtttttaaacttaagtcacaaaattgtaatttattatttatgccttcaacaaaagatttatatccaaaaggattattcaaagaaaatacagttaaaaaataccgcaatattctttgtgatttatatcgaccaaaacattttgatggagtcacaacaattgtaaatattttatttgatattataaaaccagataatgcttatttcggtgaaaaagattatcagcaattaaaaattatacaagaacttgtaaaaataaaaaaatttaaaacaaaaataatacagtgcccatcaataagagataaatttggtatgagtttatcttcaagaaattcaaaacttaattattcacagaaattaatttttcaagatgttgctaaaaaaatacaaaatttaaaatttttactaaaagaaaacagggacgaaactctattaaataattttacagaagaacttgtggctttaaatataaataaagttgattatattgaaattcgtagcgaagatgatctagagattgcaaaagattacgtaaaagccagaatatttattgctctttatattgatgatattagagtcat

SEQ ID NO: 311431 - DNA, 759 bp, Unknown
  Bacterial polypeptide expressing nucleotide sequence isolated from the Sargasso Sea
aatgataatttttaaaagtattaataaattaaaagaaaaggttaatattatggcaaatattggctttgtgccaacaatgggatcacttcataagggtcatgttgctttaataagaatctcgaaaaaaagatgtaataaaacacttgttagtatttttgtaaatccatcacaatttaataaaaaagcagattatcagaagtatccacgaaacttaaataatgaccttaaaatcttaaaaaaattaaaagttgattatgtattagtacctaaaataaaggacatttatcaaactaaaaagcaaatgaaaattaaactaaaaaaaaaggataaaattctttgctcaaaatataggcctggtcattttgaaggcgttttaggagtaatttcaatctttttaaaaaatattagagcaaaatttatgtttttaggtgataaagactttcagcaagtttatctaattaaaaaatatttaggaaaaaaatttaaaacaaaaataattaattgtaaaactattagatttaaaaattcacttgcctactcttcaagaaataaattgcttacaaaaaaatacttaaataatggtattgttatatcaaaaataattaaaaattttcataataaaataattaaggatttttctaaagtaaaagaaatcaaaaatattagatataaaatttcaaatatttgctctcgaattgaatacttcgaaattagaaataaaaataatcttacaactaatataaataaaaaaaattttaa

SEQ ID NO: 311432 - DNA, 640 bp, Unknown
  Bacterial polypeptide expressing nucleotide sequence isolated from the Sargasso Sea
aacgattataattcgtatcccaaaacattagatgaagatatagagaaattaaaatactcaaattgcgatttactatatttacctactgttgatgatatttatccggaaggattagtgaaagaaaaatctatttcaaaatacagaaatattctctgtgatatatttaggcctggtcactttgatggagtaaccactgttgtaaataccttttttaatattattaaacctaacaatagttattttggtgaaaaagattatcaacaattgaaattaattaacgaaatggttggattgaaaaaacttaatataaatattattgcctgtacttctgttagagataaaaatggcatgagcttatcatctagaaactctaattttaattcatttcaatcagaaatttttcaaagtctggcaaaaaaaataaatttattaacagaatctataaaacaaaaagatactaaaataaattatgatgaatttaaaaacgaactttcaaaaatcaatattaataaaattgattatcttgagatacgtgatgaacgtaatttagaaattacaaatgattatacttcagctagattatttgttgctgtttatattgatgatataagaattattgataactttaaattatattaag

SEQ ID NO: 311433 - DNA, 631 bp, Unknown
  Bacterial polypeptide expressing nucleotide sequence isolated from the Sargasso Sea
aatgcagattgtctacaacagagagtctctctcagataagatcagagaatataagtctaaaggtaataagatcacgttgataccaacaatgggaaatcttcatccaggtcatcaagcattattttctaaagctcctcataatacaattagagtagcaacaatatatgtaaatccgcttcagtttaacaatattgatgactataagaattatccaaggagcttgcaaactgatttacaagtgtgtagacagaataatattagccttgtttacgttcctgatgaggatatatctgatgagattgtgcctgaaaaaagtattgatttgccaaagttcacacgttatctctgtggtcaaaaaagagaaggccattttttaggcgtatatagagtagtaaaacatctctttagcatagttaatccagattttgcatgttttggaaaaaaagattatcaacaacttctattaactaagtatctagcgagcacttacttccctaaaacaaatatcattgatgttgaaactgtcagagactcaaataatactgcattaagctccaggctggctagactctcgaatgaatcatcgagctcgacatttagaatttatgagaccttacaaaatatgaaatta

SEQ ID NO: 311434 - DNA, 171 bp, Unknown
  Bacterial polypeptide expressing nucleotide sequence isolated from the Sargasso Sea
aagaattaataaatgagttggaagcttttgggatgaaagtcgaatattttgagttgcgaagagccacagatttagccttgccgaaaaatgatgaaaaaagttttgtaattttaattgccgtatggttggggaaggcgcggttaattgataatatagcgattgatttatgat

SEQ ID NO: 311435 - DNA, 244 bp, Unknown
  Bacterial polypeptide expressing nucleotide sequence isolated from the Sargasso Sea
aatgaaaattgcatctaacatctattattatttaaacaacttaaagaaaagaataaaaaaaaattataatttatttaatataaataaaataaaaaaagatttaataaatctaggcgcaaataaaatcgattacttagaaaatattaatattaaaagtcttaaaaaaataaaaaaatcaaataaaaagtttaatttattttttgcttaccatatcaaaaacacaagattgattgataatatttaa

SEQ ID NO: 311436 - DNA, 556 bp, Unknown
  Bacterial polypeptide expressing nucleotide sequence isolated from the Sargasso Sea
caaccggacgcatccaccacagtcgtcatttccaaactaactgactgcctttgcgccacttctaggccaggcttttttgatggggttgggacagttgtcacgaaattactgatacaagcgttaccagatctagccatatttggtgaaaaggattaccaacaactcctcgttataaagagactaactcgcgatcttgatattcctgtggagatcatcggtgcacccacgattagagaagcagacgggttggctgtttcttctagaaatgtgtttctttcgcaaacgaaccgcgaaaccgcatctaaagtttttgaaatcttgaaaaaaaccgctacagctatcgctctagggaatgacgtattggccgcctgcaaagaagcccgcacagaattaatactcgctggtttctctgagatagattacttcgaggcacgacattccgaaaccttagaattgatacaaaactttgaaaacaacggccgtttgtttgcagcagtttggctagggtcaactcgcctcatagataatctagagataaaagaatataccgattaac

SEQ ID NO: 311437 - DNA, 373 bp, Unknown
  Bacterial polypeptide expressing nucleotide sequence isolated from the Sargasso Sea
aatgataatttttaaaagtataaatacattaaataaagaagttaattttaaggcaaatattggttttgttcccacaatgggagcactccataaaggtcatatttcattaatcaaatcatcaaaaaaagtatgtaaaaaaacattagttagtattttcataaatccttcacaattcaataatactaatgacttcaaaaattatccaaaaaatttaaagaaagatattgcgattcttaaaaagttaaaagttgactacttattggctccaaaagttaaggaaatttatagaaataaaaaaattagtaaaattaaactaaaaaaaaaggataaagtaatgtgtgctctatttagacctggtcattttgaaggtgtt

SEQ ID NO: 311438 - DNA, 802 bp, Unknown
  Bacterial polypeptide expressing nucleotide sequence isolated from the Sargasso Sea
aatgaaaatatttaaaagtaaatataaattacaaaaagagatttcaaatatcaaaaatatatcttttgtgcctacaatgggtggtttacacagaggtcatatttctttaatcaaaaaatcacaactatttaaaggcaaaacactagtgtcaatctttgttaatcctacgcaatttaatgataaaaaagattttcttaattatccacgtaatctaaaaaatgatctaaaaatcttaaagcatttaaacgtagatttagtttatcttccgaccacaaaagatatattttcttttcatgttcaaaataaaatttttttagataaattttccaaaaaactttgtggaaaaacaagaaaaggacactttaagggagttataaatattgttaatagatttttggagctaataaaacctaaatatatacttcttggaattaaagattttcaacaatcatatttaataactaaacatatattaaaaagaaaaattgatacaatagtaattaattgtaagacaataagggaaaaaaatggaataccctgctctactagaaataatcatttaaataaaaaacaacttaaaattgcttcaaacgttgttaaatacttaaaaaataaaaaaaaacttattaataagaaattatcgaactttaagcttattgatctagagaaagatttaataaacttaggagttacaaaaattgattacatcaaattgtataatttgaatactttaaaaaaacctcgaaataaaagagaaaaatttaaaatttttattgctttttatcttaataaactaggctaa

SEQ ID NO: 311439 - DNA, 754 bp, Unknown
  Bacterial polypeptide expressing nucleotide sequence isolated from the Sargasso Sea
ttgttcctactatggggtgcaatacacaaaggtcatttgtcacttataaataaatcagataaacattgtaaaaaaacaattgtaagtatttttgtaaatccaaaacaatttaataataaaacagatttaaaatcttatccacgtaatatcaaaaaagatttagaaattcttaaagaaactaaaaaagttgattttatttatcttccaaaatttaacgacatatacaaagataaaaaaaaatcaaaaataaaactacttaaaaaagagaaaatattatgtgctaaatttagaaaaggtcattttgaaggtgttttagatgtgatgaataaactaactaaaattgtaaaacctcagaaaatatttatgggcgaaaaggattttcagcaattatatttagtaaaaaagaagttaagcagaaaatataatgctaaggttattccttgcaaaacaattcgtgataagaataatgtggcactgtcgtcaagaaattcacttttaaataaaactaatttaaataaagcagcaaatatttataaaaatttggtaaatattaaaaagaatattaaaaacaacaaaaatattttaaactttttaaaacttcgaaaaaaagaactaataaacaattataaaattaaaattgattatttagaattacgaaataaaaataatttaaaaaattcaaacacaaataaaaattcaagattatttattgcttactatttaaataatgttcgattaattgataatatttaat

SEQ ID NO: 311440 - DNA, 206 bp, Unknown
  Bacterial polypeptide expressing nucleotide sequence isolated from the Sargasso Sea
tatgaaaattattaaaagctttaaaactttaaaatatagaattaatcatattaaaaagattggttttgttccgacaatgggatctttgcataatggtcatttatccttaataaaaaaagctaaaaaaaaatcccaaaaagttttggttagtatttttgttaatccatcacaatttaacgagagaaaagattttattaaatatccta

SEQ ID NO: 311441 - DNA, 811 bp, Unknown
  Bacterial polypeptide expressing nucleotide sequence isolated from the Sargasso Sea
aatgataatttttaaaagcattaataaattaaataaagaagttaattttaaggcaaatattggctttgttccaactatgggagcacttcataaagggcatatttctttaattaattcatcaaaaaaaaaatgtaaaaaaacattggtaagtatttttataaatccatcacaatttaacaaaaaaaaagatctaaaaaaatatccgaaaaaattacgtaaagatataaaaattttaaaaaaactaaaagttgattacttgttattaccaaaaattaaagaaatttataaaaataaaaaaactatgaaaattaatataattaaaaaggataaagttttatgtgcaaaatatagacctggccattttgaaggtgttttagctgtaattaatcaatttttaataaatataaaacctaagtttatattttttggagagaaagattatcagcaaataattttaataaaaaagtttattaaaaaaaaattcaagactaaaattgttgaatgtaaaactgttagattgaataatttagtaccttattcatcaagaaactttcatctcacaaaaaatgaaattgccaatgcttcttttgtgtctaaatctattaaaaaattatattcatcaattaaaaaaaattttaacaatagattcaatattaatttagttaaaaaaaaaattgaatccaaaaaaatttggaccgattattttgaaataagaaataaaacaaacttatctaaaaattttaataaaaaaaacttcaaaatttttattgcttattatttaaatgatgtgagattaatagacaatttctaa

SEQ ID NO: 311442 - DNA, 385 bp, Unknown
  Bacterial polypeptide expressing nucleotide sequence isolated from the Sargasso Sea
caacaacaaattttaataaaaaaaatggctaaatcattacatcctcaaatatctcttataaaagctcccataataagatcaaaaaatggtattgccctttcttcgagaaataattatttgtctgaaaaagaattggaaattgcagctaatttatttaagtgtcttcaaaatagtgtgaactcttatcagaaaagacaaaagttgaatgaaatattagataacgccaattcatttttagtgtctaaagatctagttcctgattattttgaattgagagacagcgaacttaatattatctcaaaagataattatgaaggtaataaagtatttctaggatctgttacaataaataatactagattaattgataatattgaattttaaa

SEQ ID NO: 311443 - DNA, 499 bp, Unknown
  Bacterial polypeptide expressing nucleotide sequence isolated from the Sargasso Sea
catgcaaatagtcaaaaaaatatcagaaattaaagaaatattgtctgatttagagaaaaataattcaaaaattaatcttattcccacaatgggtaacattcatgaggggcatttatctcttttgaaagaggcaaataaatttgagggtataaatgtggttagtgtatttattaacccaacccaatttaatgatattaaagattttgaaaattatcctgatacctttgatcaagacgtaaaattgttatcaaaaaataattgtcaaattatttttactccaaacataaatgaaatctatcccaatggtcttgaaacaaaaaaaactatttttgaatacagagatattttgtgtgacgcgtttaggccaggtcattttgatggtgtaactacagttgtcaatttgttgctagacattataaaaccatcaaatgttttttttggagaaaaagattttcagcaattaaaaatagtagagaaactaatttatcaaataaactaa

SEQ ID NO: 311444 - DNA, 601 bp, Unknown
  Bacterial polypeptide expressing nucleotide sequence isolated from the Sargasso Sea
caacgattacctgcgttctaagtggcgccaggaatttgaagtcatcaaggctggccaagagtggaaattgccctacagcatcattcgcccaacgacggtttatggacctcgcggattctatggtggcggacagctgctcatgggagcggcgcagtcaccggttcacgccattcctgccagctttacggcacgtattccttttgtgcatgttgttgatgtttgtaaggcagcgctctttttggccaagaagccgaaggctaaggggcaagtgttcaacgtgaatgacgatagccgtatcaccaatgttgagttcatgaagtacatggccgcactggaaggtaagtcagcagtgattctgccttcggtaccagttcctcaggttcgcacggctgctctcggctttgcgcgtttgattgacaatatcgcaatgctcttcggcaagcgttcgccgcttgaagttgacagcctcaactatgttggccgcgatttggttattgctaacgataagctcaaagaccttgggtatgagttcgaatatgcagatgcacgtgatggtatccgtgacactgtgaagtggttctatcaggaagggtggatgtaa

SEQ ID NO: 311445 - DNA, 489 bp, Unknown
  Bacterial polypeptide expressing nucleotide sequence isolated from the Sargasso Sea
aatatagaaatattttatgtgataattttcgaccaggtcattttgatggagtaacaactgtagttaagagacttttttttatcattaaaccagattttgctttttttggtgaaaaagattttcaacaattaatgatcattaagaaaatggttactatattaaatttaccaataaaaataataggttgtgaatcagttagaaataaaaatggcctctcattttcctctagatttaatttatttaagaaagatcaaaaaattattttaaaaaaaattggagatactattaatagaaatttaaaaaagaattctaaaaatttcaatattaacctcttacttaaagagttaaaaaaaataaaaattaataaaattgaatatattgaaataagaaatgataaaacattacatatttcaagaaataatcccagactttttattagtttatatattgataacgtgagaataatagataattttaaattatattaaa

SEQ ID NO: 311446 - DNA, 214 bp, Unknown
  Bacterial polypeptide expressing nucleotide sequence isolated from the Sargasso Sea
atgaaaattttattaaataataatgatttaaataaggcgttaataagagtcaataatttaggatttgtacctactatgggaagtctacataaaggacatatatccctaattaatagatcaaaaaaagatagtagcaaaacattagtaagtatatttgtaaatcctactcaatttaataataaaaaagatttcaaaagatatcctagaaatataa

SEQ ID NO: 311447 - DNA, 736 bp, Unknown
  Bacterial polypeptide expressing nucleotide sequence isolated from the Sargasso Sea
tatgaaaataattacaagtatttttgatttaaataaagagattaaaaactataaaaatattggatttgtcccaacgatgggtgggatacatgcaggtcatgaatctttaataaaagcttcacaaaagaaaaaaagtaagacaattgttagtattttcataaatcctactcaatttaataaaaagaacgattttaaaaaatatcccagaaatataaagaaagatattgcaatattaagaaaattaaatgttgattatttgttcagaccgaatgtcaaagatgtttatggatttaaatccaagaaatttaatttaaaaaaaagtgaaaagatattatgcgcaaaatctagaaatggtcattttgagggagttcttaatgttatgaatagattaatgactattataaaatcaaaagatttgtatatgggtgaaaaggattatcagcaattatatctaataaaaaaatttctttcaaagaagtttagggtacgaataaattcatgtccaacaataagaataaataataatattgctatatctacacgaaacaaattattaaataataaacatctaaaaataggatcagaaattgcattaattcttcgtaaattaaagcgtaaatctaaatttcaaccatcaaaaatagctcttgatttacctaactatagagtttttatggagacaaaatataatattaaaattgattatttagaatttagagacgaaaaaaatcttgaa

SEQ ID NO: 311448 - DNA, 391 bp, Unknown
  Bacterial polypeptide expressing nucleotide sequence isolated from the Sargasso Sea
aatgaaaattttaaaaaatgtttttgaactaaataaggcagtaaaaaattacaaaaatgttggatttgtacctacaatgggtggaattcataaaggccacgtatctttaataaaaaattcacaaaaaaataataaagaaacaatagtgagtatttttgtcaatccaacacaatttgaccaaaaaaaggattttaagaattatcctaggaatataagaaaggatatttcaatattaaaaaaactcaaagttaattatttgtttttaccagaggtcaatgaaatatataaaaataaaataaaaaattttaaacttaataaatctgataaaattttatgtgctaaatatagaataggtcattttgagggtgtattaaacgtgatgaatagattg

SEQ ID NO: 311449 - DNA, 682 bp, Unknown
  Bacterial polypeptide expressing nucleotide sequence isolated from the Sargasso Sea
catggcctctttaataaaaatttcacaaaaaaagaaagaaaaaactattgtaagtatttttgttaatccaacacaatttaacgagaaaaaagattttaaaaaatatcctagaaatattaagagagatatatcaatactaaaaaaacttaaagttagttatttatttttacccgaagttgaagaaatatataaaaagaaaatgaaaaattttactctaaataaatctgataaaatactatgtgccaaacatagaaagggtcattttgaaggtgtcttaaatgtaatgaatagattgctatcattaattaaatctaagtatgtatttatgggggaaaaagattttcaacaatacgctcttattaaaagaattttgggtaaaaaatataatattaaaattattggctgtcctactataagagaaaagagtaaaattgcttcatcgacaagaaacaaattgctgagtaattctgctactaaaaaagcttctaaaatagcaaataaactcataaaattaaaagaaatatcaagaactaataaattgacaaatttaataaaacttaaaaaagaatttgaaaaaaaatataaaattaaaattgattatcttgaatttagagatgaaaaaaaatttaaattaaataattttaaatcgaaatatagattatttgttgcttattatattaat

SEQ ID NO: 311450 - DNA, 781 bp, Unknown
  Bacterial polypeptide expressing nucleotide sequence isolated from the Sargasso Sea
attgactaaatcattaaggcattttagtgacattgggtttgttcctacaatgggctcaatacataatggacatttatcgcttattagtaaatcgaatcaaatttgtcataaaacaatagttagtatttttgttaatccaaaacaattcaacaataaaaaagattttaaaacataccctaaaaatattaagaaagatttaaagacattaagtcaaactaaaaaagttgattttgtctatattccaaaatttaaagatatatttaaaaataaaaagaaacctagaattagactcgataaaaaagataaaattttatgcgctaaatatagagagggtcattttgagggtgttttagatgtaatggataaactaacaaatattgtcaagccaagtaaaatttttatgggtaataaagattttcagcagatgtttttggttaaaaattatttaaaaaataaatataatactgaagttgtgggatgcgcaaccattcgtgacgataataaagttgcactatcatctagaaactaccttctttcaaaaaaaaatcttaaattggcaagtaaaatagtaggaaaattaattaatttgaaaaaaaatattaaaaataaaaaaaataaaaataaatatctattaactttaaaagatgattttcaaaaaaaatttgaaattaaaattgattacttggaattaagaaatatagataacttaaaattatcaaatgttattaaaagatctagactttttgtggcttactatttgaatggagtaaggttgatagat

SEQ ID NO: 311451 - DNA, 328 bp, Unknown
  Bacterial polypeptide expressing nucleotide sequence isolated from the Sargasso Sea
atgaaaatatttaaaaacaaacatacacttcaaaaagagattttaaaaacaaatggcatatcatttgtacctacaatgggtgggttgcataaagggcatatttcattgatcaaaaaatcaaagaaatctaagtttaaaactttagtctcaatttttgtaaatcctactcaattcaataaaaaaagtgattttagatcttatccaagaagtacaaaaaaagatttaaaaaagctaaaaaaattgaaagttaattacttgtatattccaacttttaaagacatatacggatttaaaacaaaagaaaaagttttcttagataaatttcgaa

SEQ ID NO: 311452 - DNA, 294 bp, Unknown
  Bacterial polypeptide expressing nucleotide sequence isolated from the Sargasso Sea
aatgattatttttaaaagcataaataaattaaacaaagaagttaattttaaggcaaaaattggttttgtgcctacaatgggctcattacataatggtcatatttcgcttatcaaaacatcaaaaaaaaactgcaaaaagaccttggtaagtattttcgtaaatccctcacaattcaataaaaaaagtgatcttaaaaattatccaaaaaatttaaaaaaagatataaatattcttaaaaaacttaaaatagattatttattaattccctcaataaaagaaatttacaaaaacaa

SEQ ID NO: 311453 - DNA, 814 bp, Unknown
  Bacterial polypeptide expressing nucleotide sequence isolated from the Sargasso Sea
atgataatttttaaaagtataaataaattaaacaaagaagttaattttaaggcaaacttaggttttgtgcctacaatgggctcattacatcaaggacatatttcacttattaaatcatcaaaaagaaactgtaaaaagaccctggtaagtatttttgtaaatccttcacaattcaataaaaaaagtgatttacaaaattatccaaaaaatttgaaaaaagatattaagattcttaaaaaccataaagtagattatttattgcttccaaggataaaagaaatttacaaaagcaacaatgataagaaaattaaattaagtaaaaaagataaaataatgtgtgcaaaatatagaccgggacattttgaaggagttttagcagtaattagccaatttttaaaaaatattaaacctaaaaatatttttttaggtgataaagactatcagcaactatatttaatcaaaaaacttataaaaaaaaattttaatacaagagttttttcttgcaaaatgatacgagataaaaataaagttgcactatcatcgagaaataatttattaagtaaaaatgatctaaaaaaatcatcatatatagctaatttattatttaatttaagaaataaactaaaaaataatgtcacttttaaatatgaaatcaaaaatataattaaacagattaataatctaaaaaatattaaaattgaatatttagaaataagaaataaaaaaaatctatcaaaaaaatacaacaagaataattttaagatatttttagcttattataacaaaaatataagattaattgataactattaat

SEQ ID NO: 311454 - DNA, 259 bp, Unknown
  Bacterial polypeptide expressing nucleotide sequence isolated from the Sargasso Sea
atgaaaattttaaaaaacgtttttgagctaaataaagcagttaaaaattacgaaaatgttggatttgtgcctacaatgggaggaattcataaaggacatgtgtctttaataaaaatttctcaaaaaaataacaaagaaacaatagtaagtatttttgtcaatccaacacaatttaatcagaaaaaagatttcaagaattatccaagaaatattaaaaaagacatttcaatattaaaaaaacttaaggttaattatctat

SEQ ID NO: 311455 - DNA, 199 bp, Unknown
  Bacterial polypeptide expressing nucleotide sequence isolated from the Sargasso Sea
ttgaacacattcagctcctatagaaatcttaataatgcgcttagaaacagaaaggggagccttggtcttgtcccaacaatgggctcattacataatgggcatctttcattagttgaaaaggcagtaaaagaaaattcaagcgtaattgtttcaatttttgttaatccaactcaatttgacaacaagtctgaccttgaaa

SEQ ID NO: 311456 - DNA, 525 bp, Unknown
  Bacterial polypeptide expressing nucleotide sequence isolated from the Sargasso Sea
cagatagaccaaataaaaaaattaaaatacatccatttaaaaaaaaattatgtggaaaatttagatcaggtcacttcgaagctgttgttgatgtaattgataggtttataaaaattattatgccaaaaaatgtttatctaggagaaaaggatatgcaacaattaaaacttattgatcactatattacaaggaaatataaaaatattaatgttgttccttgtaaaacaatacgtgaaaaaaatggggtggcatgctcctcaagaaattatttactatcatttaaagaaaaatctattgcttcaaaaatatatcaattgttaaaaagaacaaaaaataatttaattaagagaaaaattaatttaaatttgataaaaaataaaattaaaaatataggtgtaagtaaaattgattatatagaaattttagatataaataaaattatcaagccttacttaaaaaaatcaaaatacaaaatatttattgcgtattatcttagaaaaacaagactgatcgataatatttaac

SEQ ID NO: 311457 - DNA, 697 bp, Unknown
  Bacterial polypeptide expressing nucleotide sequence isolated from the Sargasso Sea
atgttaatttttaaaagcataaataaattaaataaagaagttaattttaaggcaaaaattgggtttgtcccaacaatgggatgcttacataaaggacatgtatctctaattaaatcatcaaaaaaaatatgtaaaaaaaccttagttagtatttttataaatccgtcacaatttaacaagtatagcgatctaagaaattacccaaaaaatttaaaaaaagacttagaaattttaaaaaagcacaaagtagattacttgctattaccaaatacaaaagaaatttataaaaagaaaaaagacagaaaaatcaagttaagtaaaaatgataaaatattatgtgcaaaatttagaccaggacattttgaaggagttttggcagttattaatcaatttttatataattttaaaccaaaatatattttttttggtgaaaaagattatcaacagttatttttaattaaaaattttgttaaaaaaaaatttaaaactaaagtagtttcatgttcaactgtgcgtgataataataaagtagcattatcatctagaaacattttattatcaaaaaatgatattaaaaaatcctcatttattgctaaattattattaaaatttaaaatagatttaaaaaaaaatatattagttaaaaaaaaaattaaaaaccttttttttaaaataaataatattaaaaatattaaag

SEQ ID NO: 311458 - DNA, 603 bp, Unknown
  Bacterial polypeptide expressing nucleotide sequence isolated from the Sargasso Sea
atgatatttctaaattagaaaatattggttgtaatttactgttcttacctaaagttcaagagatataccctaaaggattggcaaagaaaaaaattgtaaataattttagaaatattttatgcgataaatttcgacctggtcattttgatggagttactactgttgttgatcttttttttaatatgattaaaccaacgaacagctattttggtgagaaagattttcagcaagtaaaaataatacaagatttagtaaaaattaatcatcacaatattaaaataattcaatgtccatctgtacgagataaaatgggtatgagtttatcttcaaggaactctaaattttctaatgatcaattaaaaattttcaatgtattaggaaataaaattaaagaacatattaatctattaacgcaaaatgaaattaataatttagatcaattaaaaatagagcttcttcaaaataatataaataaaattgactatttagagataagaaatgaaaataatttagaattaacaaaaaattattctaaagctagattatttattgctttatatattgatggtataagaattatagacaattttaagttatattaag

SEQ ID NO: 311459 - DNA, 400 bp, Unknown
  Bacterial polypeptide expressing nucleotide sequence isolated from the Sargasso Sea
ggggaaaaagattatcaacaattattaattataacctccttagttaaagacttggatattccgtgtcaaattgttccaattaatactgtaagagataataatgggttagcaatatcctcaagaaatcaatatttaagccctaaacaaataaatatagctaataatattaatataattatgactgaagcagctaaaaatttttataatgttgatattaatgaaacaatatcttttgttagaaaaagcatagaaaaagttgggataaataaaatagactatatagaaattagagataatcataatttagaaaatataagtaataataataaatctaatgcaagattattcatagccatatatattgatgaagtaagattgatagataatatcaaactataaa

SEQ ID NO: 311460 - DNA, 676 bp, Unknown
  Bacterial polypeptide expressing nucleotide sequence isolated from the Sargasso Sea
ctgctccatatttataatcccacacaatttaataatgaatatgatttcagttcttatccaaaaacaattgatgatgatatttctaaattagaggaaatcggctgtaatttactttttttaccctcaactaaagacatttaccctaaaggattagaaaagaaaaaaattgtaaataattttagagatatattatgtgataaatttcgacctggtcattttgatggagttactaccgtagtagatcttttttttaatattattaaaccaacaaacagttattttggtgagaaggattttcagcaagtaaaaataattcaggagttagcaaagattaataatcacaatattaatataattcaatgcccatctatacgagatatatcaggtatgagtttatcttcaaggaactctaaattttcaaatgatgaattaaaaatttttaaaatattaggagataaagttaatgaatatatttacttattaaagcaaaatgaaattaacaatttagatcaattaaaaaaagagcttctacaaaataatataaataaaattgattatttagagataagagatgaaaataatttacaaataacaaaaaattattctgaggctagattatttattgctttatatattggtgatataagaattattgataattttaagttatattaag

SEQ ID NO: 311461 - DNA, 552 bp, Unknown
  Bacterial polypeptide expressing nucleotide sequence isolated from the Sargasso Sea
aatgaaaattataagaaaaactgatgaattacagaatattttgcattcagtaaaagactcaagaaaatcaattgggcttgtgcttactatgggaaatattcataacggtcatttatcactcatcaaaaaagctcaaacagataatgattttgttatagctacaatttttattaatccaactcaatttaacaacaaaaaagattataattcctatccacaaacacttgaaaatgatgttgaaaaattaaaatcttttaattgtgatttattatacttacctgaagttaaagatatctatccaaaaggtttgattagagaaaaatctattacaaaatatagagatatactttgtgataaatttagacccggtcattttgatggagtcactacagttgttgatactttctttaatattataaaaccaaataatagttattttggtgagaaagattttcaacaaataaaatatattaatgagctagtaaaaattaaaaatcataaaatcaatgttatttcatgcctatctgtaagagataatcttgggatgagttt

SEQ ID NO: 311462 - DNA, 788 bp, Unknown
  Bacterial polypeptide expressing nucleotide sequence isolated from the Sargasso Sea
aatgaaaattttattaagtaataatgatttaaatgaggcattaaataatgtttcaaatttaggctttgtacctacgatgggcagccttcacaaggggcatatttcacttataaaaaaatctttaaaagaatgtaagaaaactattgttagtatattcgtaaatcctacccaatttaataataaaaatgattttaaaaattatccaagaaataataagaaagatctctcaattttaaagaaattgaatataaattttttgtatataccaaaaacaaaagatgtttattatcttaaaagaaaatcttcaatcaaactcaaaaaaagagacaaaatactttgtgcaaaatttagaaaaggtcattttgagggagttattgatgttatggaacgactaaccaagataattaagccacaaaaaatttatttaggtgagaaagattttcagcaactttacttagttaagaaatatatttcaaaaaaatataatacgaaaattgtttcgtgtaaaactatcagaaatgataaaaaacttgcattttcatcaagaaacaaacttttaagtaaggatgaattaaaacaagcaggaaatatatcaaaagaaatttttttatttaagaaaaaactttctaaaaatagaaatattaaaaggcttatatctcaaaaaaaagatgaactaattgattcatttaatataaagtttgattacttggagttaagagatatatttaatcttagaatttcaaataaaactaaaaattcaaaactatttattgcttattatattaata

SEQ ID NO: 311463 - DNA, 832 bp, Unknown
  Bacterial polypeptide expressing nucleotide sequence isolated from the Sargasso Sea
ttctcatcattgagagtattctcatcccataaagagcttataaagtcaattgattcaaccaagctagttggtcttgttcctacaatgggctctctgcatgaaggtcatatttatttgatcaacagagctataaatgataatgaacaggttatagtgacaatatatgttaatccaactcaatttaataataaaagcgatttaaataaatatccaagaaacttaaaaaaagatttgagaaaacttgaatgttttgaaagtatatttgtatatacaccatcagataatgacctctataaagaggttgtttctaaaaattatgacttggatgatttagacaaagtccttgaaggcaaatttagaccaggtcactttaatggagttgcaactatagttgagaaactattcaatttatttaccccaaacaatgcttattttggagaaaaagattatcagcaactaactataattaagttaatggttgagaaactgaagcttaatgtaaatattgttccgtgtgatactgtaagagagcccgatggattagctatgagttcaagaaataaattaatgaataaagaagagagattgtatgctggaaaaattcatagtttgatgataaaagcaaaagagatatacttagacaataaaatcgataatattgaaaatattttaaaaaacgagctaaataatttaaaacattgtagggtagaatatattaaaattgataatttatctaaatatagcgactggataaaagatgaaggttacagattatttattgcatgttggattggtaaaacaagaataatagataacatattactaagataat

SEQ ID NO: 311464 - DNA, 433 bp, Unknown
  Bacterial polypeptide expressing nucleotide sequence isolated from the Sargasso Sea
aatggttattactcgtacaagagatgaactatataaaaccctcgaagaattttctaaacgtccaggtaaattagcattaattcctactatgggtaatttacatgatggacatttatccttaataaaattagctaaactaaaagcatcaaaaacaattacaacaatatttataaatcccctccaatttggtagaaatgaagactttaaaaaatatccaagaactgaaaaattagatatagaaaaattaaaaaaagaacattgtgatattttatttattcctaaaaatattgaagaagtattttcaaaaattgaaaaattaaaaactttagattctggaagtcttggatctgagctttgtggtaaaattagaccaggtcattttgatggagtattgactgtagttaatagattatttgaactaattaatccagat

SEQ ID NO: 311465 - DNA, 749 bp, Unknown
  Bacterial polypeptide expressing nucleotide sequence isolated from the Sargasso Sea
aatgaaaatatttaaagacaaacatacccttaaaaaagagatttcaaaaactaaaggtatatcatttgtgccaacaatgggtgggttacataaagggcacatttcattaatcaaacaatcaaagaaatctaagcttaaaaccttagtatcaatttttgtaaatccaaaacaattcaataaaaaaagcgattttaaatcttatccaagaaacacagaaaaagacttaaaacagttgaaaaaattgaaaattaattacttatatatgccaacatttaaagacatatatgggtttaaacctaagaagaaagtttttttagataaattctccaaaaaattgtgtggtagatacagaaaaggccattttgagggtgttttaaatgtagtgaatagattcatagaaataattaaacctagatatatctttctaggaaaaaaggattatcagcaactgtatctaataaaaaaacatatcgaaaaaagaaagattaaatgtaaaataattgaatgtaaaacaataagagaaattaatggcatagcttgttcttcaagaaattcaaatcttaataaaaatgaaatgaaaattgcatctaatatttatttttatttattttacttaaaaaaaaaaattaaaaaaaattataatttgtttaatatgaataaaataaaaaaagacctgatcgatttaggtgcaagtaaaatagattatttagagaattataatataaaaagttttaaaaaagttaaaaaga

SEQ ID NO: 311466 - DNA, 301 bp, Unknown
  Bacterial polypeptide expressing nucleotide sequence isolated from the Sargasso Sea
aatgtcctcgaggaataattatctgactgaaaacgaaaagatgcaggcagcaaaaatatattcaacgcttgtagatacgaaaaatcttatttttaagaacggttttaagagaaaagacttaaaaaataaaataaattaccttaaaaaaaataatatcaatgtaatttattttgatctatttgatgcagagtctttggaatcaataaatgaaagtcctcgccttaagggtgattttgttttagctactgctgcaaaaattggaaatacaagactaatagataatattgttttttcaatatag

SEQ ID NO: 311467 - DNA, 403 bp, Unknown
  Bacterial polypeptide expressing nucleotide sequence isolated from the Sargasso Sea
ttgagaatttttaactccatacaagaatttaatgaagctagagatgagttaggcaaattatcttttgtgcctacaatgggcaatctgcaccagggtcattcatctcttgttgatattgcaaagcagtttaaaaataaaattatagctagtatatatgtaaacaaacttcagtttaatgatgataatgattacttgaattacccaaaaacactaaattcagatattgaacttctagaaaaacacggctgcgattatgttttgatacctgatgattctattctagataatattcaatcgatgcaagccccacctaaatcaaaaaagttatgcggtcaaagcaggccaggacactttgagggagtgttaactatattaaacaaattttttagaattattgatccaa

SEQ ID NO: 311468 - DNA, 454 bp, Unknown
  Bacterial polypeptide expressing nucleotide sequence isolated from the Sargasso Sea
tgaaggtgttttaaatgtagtaaatagatttttagaaataattaaacctaaatatatttttttaggaaaaaaagattatcaacaattgtatctaataaaaaaacatatcgaaaaaagaaagattaaatctaagattattgaatgcaaaactataagagataataatggagtagctctctcaacaagaaattcaaatcttgacaaaaatcagatgaagattgcatctaacatttataattatttaaataacttaaagaaaaaaattaaaaaaaattataatttattcaatctaaataaagtaaaaaaagacttgaaagatttaggtgtcagtaaaatagattatttagaaaattataatactaaaaattttaaaaaaattaaaaaacaaagtgaaaaattcaatctatttattgcctactatattaaaaaaattagattaattgataatatttaa

SEQ ID NO: 311469 - DNA, 886 bp, Unknown
  Bacterial polypeptide expressing nucleotide sequence isolated from the Sargasso Sea
tatggccgccctactatactcatccggcacaacaggaaagcccaaaggtatcatgctatcccataagaatttgagcagcaatgcagaagcacttgccaaggtttggggatttagcaatgaagatcgcttgcttcatgtgttacccatttatcacgttcacggcttattcattgcacttgggcccgtgctactaacaggggcgagcatgagctggcataatcgctttgatgtcgattcggtcatgaaaactcttactgaatgtaccgtaatgatgggtgtcccaacctactacactcgcctattagataatccaaaacttgatccagaatattgcaaaaatatgcgtgtattcatctgcggctccgcaccactactcccagaaacattcaaagaattcgagctcaaaactggccacacaatcctggaacgatatggaatgacagagacaggaataaatgcttctaatccattggctggaaagcgaatagctggttctgttggtcaggcgttaccaggtacgaaagcgcaaatagtcgacgatgcagggaaagtcgtgcgccctggagaaacaggaaacctgcaggttaagggtgacaacgtattttctggatactggaagatgcctgagaaaactgctgaagatttcacctccgatggattttttaacacgggagataaagcagtcataaacaaccaaggatatatctcgatcgtaggccgctctaaagacatgattattagcggtggcctcaacatctatcctcgtgaaattgaattagtaattgatcaaatcccagggataattgagtcggctgttattgggacgacggatcatgatttcggtgagaaagtagttgcagtagttgcgtgcacagacaagtcgata

SEQ ID NO: 311470 - DNA, 193 bp, Unknown
  Bacterial polypeptide expressing nucleotide sequence isolated from the Sargasso Sea
aatgaaaatttttaaaagtattaataaattatgtaaagaggttaattttaaggcaaatattggttttgtgcctactatgggatctttgcataaagggcacatggcattgatcaaaaactctaaaaaaaaatgcaaaaaaaccttagtaagtatatttgttaatcctacaccatttaataaaaaaatgatttaa

SEQ ID NO: 311471 - DNA, 640 bp, Unknown
  Bacterial polypeptide expressing nucleotide sequence isolated from the Sargasso Sea
tatgaaaataattacaagtatttttgatttaaataaagaaattaaaaactacaaaaatattggatttgtcccaacgatgggtgggatacatgctggacacgaatctttaataaaagcttcacaaaagaaaaaaagtaagacaattgttagtattttcataaatcctactcaatttaataaaaagaacgattttaaaaaatatcccagaaatataaagaaagatattgcaatattaaaaaaattaaatgttgattatttattcagaccgagtgtcaaagatgtttatagttttaaatccaagaaatttaatttaaaaaaaagtgacaagatactatgcgcaaaatccagaaagggtcattttgaaggtgttcttgatgttatgaatagattaatgactattataaaatcaaaaaatttgtatatgggagaaaaggattatcaacaactatatctaataaaaaaatttctttcaaaaaagtttagtgtacaaataaattcatgtccaaccataagaattaaaaataatattgctctatctacacgaaacaaattattaaataaaaaacacctaaagatagcatcagaaattgcattaattcttcgtaaattaaagcgtaaatgtaaatttcagccatcaaaa

SEQ ID NO: 311472 - DNA, 344 bp, Unknown
  Bacterial polypeptide expressing nucleotide sequence isolated from the Sargasso Sea
aatgaaaattttattaaataataatgatctaaataaggctttaactagtgtctcaaatttaggctttgttcctactatgggtgcgttacataagggacacatatcacttatcaaaaattcaaaaaaaaaatcaaataaaacacttgtaagtatttttgttaatcccaagcaatttaacaactctaaggatttcaaatcatatcccaaaaatactaaaaaggatctatctgtattaaaaaaattgaaggttgactacgtatttttgccttctcaagatgacatctacaagtttaaaaaattcaaaaaaatcaaactttctcaaaaacaaaaaataatgtgtgcga

SEQ ID NO: 311473 - DNA, 442 bp, Unknown
  Bacterial polypeptide expressing nucleotide sequence isolated from the Sargasso Sea
aatgaaaattttaaaaaatatttttgaactaaataaggcagtaaaaaattacaaaaatgttggatttgtacctacaatgggtggaattcataaaggccacatatctttaataaaaatttcacaaaaaaataacaaggaaacaatagttagtatttttgtcaatccaactcaattcaatcaaaaaaaagattttaagaattatcctaggaatataagaaaagatatttcgatattaaaaaaacttaaagttaattatttgtttttaccagaggtcaatgaaatatataaaaataaaatgaaaaattttaaacttaataaatctgataaaattttatgtgctaagtatagaaaaggtcattttgagggtgtattaaacgtgatgaatagattgctatctgttgttaaatctaagcatgtttatatgggtgaaaaagattttcaa

SEQ ID NO: 311474 - DNA, 439 bp, Unknown
  Bacterial polypeptide expressing nucleotide sequence isolated from the Sargasso Sea
aatgataatttttaaaagcataaataaattaaataaagaagttaattttaaggcaaatattggttttgttcctactatgggttcgttgcatatgggtcacatttctctaattaaatcatcaaataaagtctgcaaaaaaacactggtaagcattttcgtaaatccttcacaatttaataaaaaggctgatcttaaaaattatccaaaaaatttgaaacgggacatagagatacttaaaaaattaaaggttgattatttattggtaccaaatgttagtgatatttataaaaaacaaaaagataaaaaaattaaaataaacaaaaatgataaaataatgtgtgcattgtatagaccggggcattttgaaggcgttttagcggtaataaatcagtttttacaaagatttaaaccaaagtatattttttttggagaaaaagat

SEQ ID NO: 311475 - DNA, 700 bp, Unknown
  Bacterial polypeptide expressing nucleotide sequence isolated from the Sargasso Sea
atgataatttttaaaagcattaataaattaaataaagaagttaattttaaggcaaatgttggctttgtaccaacaatgggtgctttacataaggggcatatttctctaattaaatcatcaaaaaaaatgtgtaaaaaaactttggtgagtatatttgtcaatcctttacaatttaataaaaaaaaagatctaaaaagatatccaaaaaatttgaataaagatttaaaattattaaaaaaattaagagtggactatctatttttaccgaaaataagcgaaatatacaaaaataagagaaatattaaaattaaacttaataaaaaagataaagtattatgtgccaaatatcgacctggacatttcgaaggagtcttggctgttattaataaatttttgttaaattttaaacctaaagctatgtttttaggtgaaaaagactaccagcaaattattttaattaaaaaatttgttaaaaataaatttaaaataaaaattataaaatgcaaaacagttagatcaaacaatttattaccttattcatcaagaaattctcttctatctaatgaagatataaaaaaagcctcttttgtatctaatactatttgtaattattttgtatctataaaaagaaattttaataatattttaaaaattaatgaagttaaaaaaaatatagagtctaaaagaattaaaaccgatt

SEQ ID NO: 311476 - DNA, 423 bp, Unknown
  Bacterial polypeptide expressing nucleotide sequence isolated from the Sargasso Sea
aatgataatttttaaaagtataaataaattaaaaaatgaggttaattttaaggcaaatattggttttgtaccaacaatgggttctctacataatggacatatttcattaatcaaattatctaaaaaaaaatgtgataagaccctagttagtatctttgttaatccatcacagtttaataaaaaaaatgattatgatacttatccaagaaatataaaagctgatatcaaaattttaaaaaaattgagagttgactatgttttaattccaaatgtaaaagatatatatagaacaaaaaaagagatgagaataaatttaaaaaatagtgataaaatactatgttcaaaataccgacctggccattttgaaggagtattaggaattatttcgattttttttaaaaatattaaagcaaaaatcatgtt

SEQ ID NO: 311477 - DNA, 646 bp, Unknown
  Bacterial polypeptide expressing nucleotide sequence isolated from the Sargasso Sea
tatgttgataatcaaagatatttacaaccttaacacttatttaaaagcctttagggataaaggttactccattgggtatgttcccacaatgggagctcttcatgagggccatggatctcttatagaaaaatctcataatgataatcaaaaaactatcatatctatttttataaatgaaaagcaatttaatgacactcaagattttgaagcttatccaagaaacaaaggagatgattataatttttgtcagaaacacaatgtcgatataatttttgagccaagcgccgaagaagtttatcctaaagaatataaatcaattcaaaattcttatttccaaaatattttatgtgacgaataccgacctggccattttaatggagtcgttactgttctcagtcgattatttaccataattaaaagtgacaaagtttactttggtgaaaaagattttcagcaacttaagattgttgaaaaattaattaaagaaaattttcttaatctaaaattagtacccgtatctactgtcagatcagatgaagggatcgccttatcatctagaaataaaaagctcagcaaaaagcagatgacagactatatattatttcaaaaagaggttgtaaaatttattgctaatttagataaaaag

SEQ ID NO: 311478 - DNA, 796 bp, Unknown
  Bacterial polypeptide expressing nucleotide sequence isolated from the Sargasso Sea
atgaaaataatcaaaaaaatatcagaaattaaagaaatagtatctaatttaaagaaaaacaaaaaagaaattaatcttattccaactatgggtagtatacatgctggccatttatcattgctatctgaggctaataaatatgatggaataaatattgttactatttttgtcaatccagcacaatttaatgatctaaatgattttaacaattatcccaatacattagaagcagatattaaaatattatcaaaaacaaactgcaaaatcatttttgcccctagtaaaaaagaaatatatcctttaggtatcataacggaaaaagtagtattcaaatatagagatattttatgtgatctttttagattaggacattttgacggagtcacaacaattgttaaaattcttttagatttaatagaaccttcaaaaatcttttttggtgagaaagattttcagcaattaaagattattgagcaactgatttttcaaaataatttaaaaataaatttaattagatgtccatcaatacgagactcttatggcatgagtttgtcatctcgttattcaacattcagtaaagatgaaagatcaaaatttaaaaaatgtgcacaaataattgatgcaaatttattaaaattaaaaaaagattttaattataaaattttagataacattaaaaaagaattaagaggttatggaatttcaaaaattgattattttgaagtaaggaatgaagaagatttaagccttagtataaaaaatgaaagaagaagattgtttattgcattctattgaa

SEQ ID NO: 311479 - DNA, 479 bp, Unknown
  Bacterial polypeptide expressing nucleotide sequence isolated from the Sargasso Sea
tttttttccaggggttatcaatgttgtatcaaggctctttaatattgtcaacccctcattatctttttttggtaaaaaagatgctcaacaattaattttaattagtaagatggtagatgttggtggttttcctgtaaaaataattccagtagaaaccgtacgagaaccctctggtcttgcgatgagctcaagaaatatatatttatcaaaaactcaaacaatatctgcgtctaaaatttataaaagtttgttgttagctaaaaacctcctcagtggtggcgagcaagagtctaaaacaattaaaaatgaaattaaaaaatctttattggctgactcaactatttcaattgattatatttctgttttatgtttagatgaccttaaggagttttcggggtcggttagtgcgccggctttaatatctattgctgtttatattggcggagtaaggttaattgataatattttttatgaatgaa

SEQ ID NO: 311480 - DNA, 583 bp, Unknown
  Bacterial polypeptide expressing nucleotide sequence isolated from the Sargasso Sea
aatgaaattatttacaaataaaaagcagttacaaacagaaataaggaaattcaataatatcaattttgttccaacaatgggcgccttacacaagggtcatgagagtataataagaaaatctgtaaaaggatcgggaaaaacacttgtaagtatttttgtaaatcccaaacagtttaataataaaagagatctaaatacttatccaagaaataatagtgaagacgttaaaatattaaaaaagctcaaagttcattatttatataaaccatcttacgatgacatatacaaatttaaaacggaaaataaaattcatttagataaattttcaaaagaattatgcggacaatttagaaaggaccattttaagggtgtaattgatgtagtaaatagattccttgaaattataaaaccaaaatcaattttattaggtaagaaagatttccaacaactttatttaataaaaaaacacattaaaaaaaataaaattaaaacaagggtattttcatgtaaaactattagaaataaatatttcatagcatattcctcaagattaaataaattaaattataatgaaaaaataaag

SEQ ID NO: 311481 - DNA, 561 bp, Unknown
  Bacterial polypeptide expressing nucleotide sequence isolated from the Sargasso Sea
ctatcctcgaaccattgaagaggacaaagaaaagctccttgcgtgtggttgtgactttttgtttacgccaaccactcaagaattctatccaaaaaccctctatccccatactcaagtaaaagtaccgggcctgtcagatatattatgtggtttagagagaccaggtcactttgaaggggtttgtacagtagtcataaaactaatcaacatagtaagtcctaataacgcatattttggattgaaggattaccagcagtacctaatcatcaagaaaatgaccaaagacttaaagattgatactcgaatcgtcggcttggagatagtcagagatgctgacggcctagctctcagctccagaaatggttttctatctgatcacgaactccacaaagcacgacaaatttatcgttctttgcaaaaaactgctaaacgtatataccttcgcgaagcaaagtttcaggaccttgaaaagcttgctcaccaagaattgcttgagactggactaactcccgaatattttgttattcgcaactcggaatcgcttaaatctgccaccacaga

SEQ ID NO: 311482 - DNA, 700 bp, Unknown
  Bacterial polypeptide expressing nucleotide sequence isolated from the Sargasso Sea
ccaaattattcttgtcagtatttttgtaaatccattgcaattttgcaaaggtgaagacttcaaaaaatatcccagaaatataaacagagatgctgaattagcatttagtgcaggagcagatggaatttgggttccagattattttgaggtttttcctggaggagaagattcgcatttcaaaattcaagttcctgaaacattacacaatcaattatgtggtgttgaaaggaaaggacattttgatggagtcgcaaccgttattattcgcctgatcaaaatcatccaaccagagaaactaattctaggagaaaaagattggcaacaattaattatcattagaaaactatttcaagaactctctataccaataagaattgaatcctttgcgacacaaagagatcaaagtggatttgcttatagttcaagaaatacttatctaagcgattctgaaagagtgaatgctcaggctttacccaatgtaattcaagatgctaaagatattttttctaaagaaaagataatcagtctcaaaaagatcgagtccaagcttaaacacagcaatttagaaatcgaatacatcaaaattgtagatgcattttcattggaagaaaaagagaatataaaaggtatatgtcttttagccgcagcggtaagatgtggctctacaagactcattgatcacacttttcttatgcatcgg

SEQ ID NO: 311483 - DNA, 814 bp, Unknown
  Bacterial polypeptide expressing nucleotide sequence isolated from the Sargasso Sea
atgattatttttaaaagcataaataaattaaataaagaagttaattttaaggcaaatattggttttgtgccaacaatgggatccttgcacaatggtcatatttatttaataaaatcatgcaaaaaatactgtaaaaagactttagtcagtattttcataaatccttcacaattcaataaaaaaaaggatttaaaaaactatccaagaaatcttcaaaaagatattaaaattcttaaaaaactcaaagttgattatttactgacgccagtcacaagtgagatttatcaaaaatcaaaaaataagaaaattcaactgattaaaaaagataaaattatgtgctcattatttagacctggtcactttgaaggagttttagctgtaattaatcaatttttaaaaagatttaagccaaaaaagatttttttaggtgaaaaagattatcaacaattatttttgattaaaaaacttataaagcagaaattcaatgtaaaagtaattcaatgtaaaaatattcgtgataaaaataatgttgctttatcgtctcgtaacattttattgagtaaaaaagatcttaaaaaatcagcttttatagctacattattgttaaattatcagaaaaaattaaaaaaaaattttaatttgcaaaatgaaatttcaaaaattaaaagaataattaatagtattaagggtatcaaattagagtatttagaaataagaaatagaaaaaatttaacaacaaaaattactaaaaataactttaaaatatttatttcttactataataaaaaaataagattaattgataattattaat

SEQ ID NO: 311484 - DNA, 736 bp, Unknown
  Bacterial polypeptide expressing nucleotide sequence isolated from the Sargasso Sea
aatgaaaatatttaaagataaacataccctacagaaagagatttcaaaaactaatggtgtatcatttgtgcctacaatgggtgggttgcataaaggacatatttcattgatcaaacaatctaagaaatctaagttaaaaactttagtatcaattttcgtaaatccaaaacaattcaataaaaaaagcgattttagatcttatccaagaaacatgaaaaaagacctaaaacagcttaaaaaattgaacattaattacttatatattccatcatataaagacatatacggatttaaacctaaagaaaaagtttttttagataaattttcaaaaaaattatgtggtcaattcaggagaggtcattttgaaggtgttttaaatgtaataaatagatttatagaaataattaaacctaaatatatctttttaggaaaaaaagattatcaacaattatatctaataaaaaaacatatcgaaaaaagaaagattaaatgtaagataattgaatgtaaaactataagagaaaataatggcgtagctctctcaacaagaaattcaaatcttaatgaaaatcaaataaggattgcatctaatgtttattattatctatataaactaaagaaaaaaataaaaaaaaattataatgtatttaatctaaataaaataaaaaaagacttaagagatttgggtgctagtaaaatagattatctagaaaattataatattaaaaaattttaa

SEQ ID NO: 311485 - DNA, 277 bp, Unknown
  Bacterial polypeptide expressing nucleotide sequence isolated from the Sargasso Sea
atgaaaataattacaagtatttttgaattaaataaagagattaaagactataaaaatgtaggatttgtgcctacaatgggtggaatacatgctggtcataaatctttaataaaagcttcacaaaataaaaaaagtaaaactattgtaagtattttcgtaaatcctactcaatttaacaaaagaaatgatttcaaaaaatatccaagaaatattaggaaagatatcactatattaaaaaaaatgaatggtagaatatttattcaaaccaagtgctaga

SEQ ID NO: 311486 - DNA, 499 bp, Unknown
  Bacterial polypeptide expressing nucleotide sequence isolated from the Sargasso Sea
aatggagggaaaatctagagtaaatcactttaatggagttgccactatagtagaaaagctttttaaaatatttaaacctaattttgcttactttggcgaaaaggattttcagcaattaattataattaaatcacttcttaagcaaaagagtttaaaagtaaaaataatttcatgtccaactgtaagagaaaatgatggacttgcgatgagctcaagaaataaattactaaacaaaaaagagagaaaaactgcaacagtgctttatcgtacattgcttgaagctaaaggattaatgaattcttctgagcctacagaaatagaaaaaactatttctacaaaatttagcaatattaaggatgtagacctgctatattttaaaatattaactgagggctcatttgcagatctaaaaaatttgaaggataaagaaaatttcagagcgtttatagcttgcaatattggaaatattaggttaatagataatatgatattagaataa

SEQ ID NO: 311487 - DNA, 610 bp, Unknown
  Bacterial polypeptide expressing nucleotide sequence isolated from the Sargasso Sea
catgcctgatgtaaaggaagtattgcatgaaagacaagcatttttagtgaatcctccaccatcgttaggcaccattttagaaggtgaatttagaaaagattttttcgtaggggtatcaacaatagttttgaaattatttcactgcgttaatccgaaagtggctgtttttggaaagaaagattatcaacaagcacttataattaggagtatgtgcaatcaatttaatctacccgtcaagatagttcttgcagaaacagtcagagagattgacggactggctatgtcgagcagaaataatagattgtcgcctaccgagcgaacagaaagttgtttcttataccaaaaactaaaggaattatcagctcagattttggaattgaaccgtcaaaaaaagttaaattccactaaaatatctcagcttgaagatgcagcatttcaggaatttaaattgaagaaatggcaaccagattatttctcagttagaagaaagattgacttagatattccatcttttgaatatggagaaggcaaactcaacgagttgattatcctagcagcagcttcgttaggtaaaaataggttaatagataatttagaaataaaaagctga

SEQ ID NO: 311488 - DNA, 805 bp, Unknown
  Bacterial polypeptide expressing nucleotide sequence isolated from the Sargasso Sea
atgaaaattttaaaaaatgtttttgaactaaataaggcagtaaaaaattataaaaatgttggatttgtacctacaatggggggaattcataaaggccacgaatctttaataaaaatttcacaaaaaaataataaagaaacaatagttagtatttttgtcaatccaactcaatttaatcaaaaaaaagattttaagaattatcctagaaacataagaaaagatatttcgatattaaaaaaactcaaagttaattatttgtttttaccagaagtcaatgaaatatataaaaaaaaaatgaagaattttaaacttaataaatctgataaaattttatgtgctaaatatagaaaaggtcattttgaaggtgtattaaacgtaatgaatagattgttatctattgttaaatctaagtgtgtttatatgggtgaaaaagattttcaacaatacatgttaattaaaagaatattaggtaaaaaatataaaataaatattgttggttgtcctacaattcgagaaaataataaaattgctttatccacaagaaacaaattgttaaataaatcatctataaaaaaagcatcaaaaatagctatgaagttagataaattaaaaagattatcaaaaacaaataaatatgtggatttgtcaaaatataaatatgagcttgaaaataaatttaaaattaaaattgattatcttgaatttagagatgaaaaaaaaatgaaattaaataattttaaatctaattttagactatttattgcctatcatattaatggagtaagattgattgataatttttgat

SEQ ID NO: 311489 - DNA, 835 bp, Unknown
  Bacterial polypeptide expressing nucleotide sequence isolated from the Sargasso Sea
tatgaaaattgttaaaaaaattgatgaattggagaatgctttaaaaccaatcaaaagtactaataagtctataggtcttgttctcacaatgggcaatattcataaaggacatctatctctggtagatagagccttttctgaaaataattttattgtggtaacaatatttatcaatcctacacaatttaataacaaagatgattataaattgtatccaaagactttagcaaaagatgttgagaaattacattctgcaaattgtcatttattgtatttaccagacgttaattcaatttatcctaaaggattaattaaagaaaagacagttacaaaatatagagatattttatgtgataaatatagacctgggcattttgatggagtaaccactgtagtagatagattttttgaattgattaagccaaatagaagttattttggcgaaaaagattatcaacaattacaatttgtcaaagaattagtaaaaattaaagaacataatattaacattattccttgttcatcaattcgagatgaaacaggtatgagttatgcttctagaaattcaaactttacaaaggaccaatatattctttttaaaaaattatctgaaaaaatctataaatttataaacttatcaaaaaacaaaaaaacaaaaatagacactgaaaatttaaaaacagatcttctcacaattaatataactaaaatagactatttagaagttcgtaatgaaaaagatttggaaatttcaaataattataaagatgctagactttttattgccttatacattgaccaaataagaattattgataactttagactgaattaa

SEQ ID NO: 311490 - DNA, 736 bp, Unknown
  Bacterial polypeptide expressing nucleotide sequence isolated from the Sargasso Sea
tatgggtagtcttcaccaaggtcatatttctttgattaaaagatctttaaaagtatgtaacaagacaatagtaagtatatttgtcaatcctacacaatttaacaataagaatgattataaaaattatccaagaaataccaaaaaagatttgcttattttaaaaaagttaaaagttgattttgtttatttaccacaaagtaaagacatctttaattattttaagcgaaaaattattttacgtaaaaaggataaaatattatgtgctaaatttaggaaaggtcattttgagggagtaattgatgtaatgcaacgtttaacaaaaaaaattaatcctaacaaaatattcttgggtgaaaaagactttcagcaattatacttaattaagaaatacgtcaaaaaaaataataatttaagtataatcgggtgcaaaacaattcgtgatagaaataaattagctttatcatcaagaaataatctattaaataaaacaagactaaaatatgcaagaagtatagcaaaaaatctgattttatttaaaaaaaaaataataaacaaaaagaagttaaaaagtcttttagagaataaaaaaaaagaactaattgaattgtataatataaaaattgattatcttgaattaagaaacaaaacaaatcttgctatatctaataaaacaaaaaattctaaaatttttattgcctattacttaaatagtgtacgattaatagataattattaa

SEQ ID NO: 311491 - DNA, 820 bp, Unknown
  Bacterial polypeptide expressing nucleotide sequence isolated from the Sargasso Sea
atgaaaataattaggcaaaaaaaagaccttaagaacttaataagtaagataaattgcttatcttttataccaacaatgggtggcctgcataaaggtcacgaattcctaataaaaaaagcaaaaaaaaaaagtaaatttactattgtaagcatttttgtgaatcctaaacaatttaattcaaaaaaggattttatcacttatcctagaaactataaaagagatttaaagattttaaaaaagctaaatgtaaaatatctttatatgccaaattccagagatatcttctcatttaaaacatccaataagatttatcttcaccctttttcgaacaaattatgtggtaagtatagaccgggtcattttaaaggagtgattgatgtagttaatagatttttagaacttttaacaccaaaatatatatttcttggtaaaaaagattatcaacaactttttttaattaaaaaacatatagacaagaataaaattaaaacttttgttatttcatgcaatacaataagggagaacaaatttttaccctactcttcaagaaattttaatttaaataaatacgataaagttttagctttaaaagtttataaacttttaagaaaagaaaagaatattattaaaaaaaataaaatacaaaaaataaatttttctaatattaaaaagaaaattttaaaaattggcatcaaaaaaatagattatatcgaagctataaatttagataattttaaaaaggcaaaaaaatttaatgaaaactttaatatattttctgctttctatgttaataaagtaaggcttattgataatttttagt

SEQ ID NO: 311492 - DNA, 348 bp, Unknown
  Bacterial polypeptide expressing nucleotide sequence isolated from the Sargasso Sea
aatgaagtcaaaaaaaataagttcccttaaaataattagctctattaaagagatgcagaaaatctctttgaatattagaaagaagggtacccataaaatttctgtaatccccacaatgggtgcacttcatgaagggcacttaagtctaattaaaaaagctcaagaaaaaaaaattatcacaattgttacaatttttgtaaaccctatacaatttgacgataaaaaggatttaacgaattatcccagtaatttaaaaaacgatattcataaattaaaaagtattggtgtcaactatctatttactccaaatatcaaagatatatatccagagggatataaaactaaagt

SEQ ID NO: 311493 - DNA, 400 bp, Unknown
  Bacterial polypeptide expressing nucleotide sequence isolated from the Sargasso Sea
atgaaaataattacaagtatttttgatttaaataaagatattaaaaactttaaaattgtcggatttgtgccaactatgggtgggattcacaaaggtcatatatccttaataaaagcttcacaaaagaaaaaaaacaagactattgtgagtatttttgtaaatcctactcaatttaacagggcaagtgactttaagaaatatcccaagaatataaaaaaagatataattttgttaaaaaaattaaaagtagattatttattcttaccaacaacaaaagaaatttataaatttaaggctaaagtgtttattttaaaaaaaaaagagaaaatattgtgtgcaaaatttagaaaaggtcattttgaaggtgtactaaatgttatgaacaggttaatgagtattg

SEQ ID NO: 311494 - DNA, 277 bp, Unknown
  Bacterial polypeptide expressing nucleotide sequence isolated from the Sargasso Sea
ctaaatcctgatcagcgctcaaaagcggtatatttatatgagtcacttgttagagcaagcaaaaaaatttataaaaattccggggattacatgtcaattctagatacggaaatagagagactcaataaagatgatttaaatgttgattatttagaactcagaaaaaccgataatctaagtaatgttgaagattataaaaatataagtggtcaatatatattacttggcgcaataaggcttggggcaacaagattgattgataatattattttatgat

SEQ ID NO: 311495 - DNA, 642 bp, Unknown
  Bacterial polypeptide expressing nucleotide sequence isolated from the Sargasso Sea
acataaattatccaaacaatataaattctgatattgaaaaactaaaaaatttaaaagtagatgctatatttattccagaaattagagaaatttatccattaggctttagcactaatgtagatgtgggacaaattagcaaagttttagaaggtaaatttagaccagcacattttactggggtagctacaataattactaaattattttctataattaaaccagatcatgcatatttcggccaaaaagatgctcagcaatgtttggttataaaaaaattaaatgatgagttaaatctaggtgttaaaatctttatcaatccaacagttagagaccaaaatggaatagctattagtagtagaaataaaaatttaaataaaatccatttaaaagcagcagaaagtttatttaaatcactttgtctaagcaaacaattatttgaaaaaggtattgataatacaaaatatattaaagatgaaatgaaaaaagtaattatgcaatcttatccaacaaaaattgattatataagtattgctaactctaacactctagaagaacttgataaaatagctataccaacattaatatctctggcagtttggtttggtgaaacgagattaattgataatatattattaaaataaa

SEQ ID NO: 311496 - DNA, 673 bp, Unknown
  Bacterial polypeptide expressing nucleotide sequence isolated from the Sargasso Sea
tatgaaaataattacaagtatttttgatttaaataaagagattaaaaactataaaaatattggatttgtcccaacaatgggtgggatacatgctggtcatgaatctttaataaaagcttcacaaaagaaaaaaagtaagacaattgttagtattttcataaatcctactcaatttaataaaaagaacgattttaaaaaatatccaagaaatataaagaaagatattgcaatattaaaaaaattaaatgttgattatttattcagaccgagtgtcaaagatgtttatagatttaaatccaggaaatttaatttaaaaaaaagtgacaagatattatgtgcaaaatctagaaatggtcattttgagggtgttcttaatgttatgaatagattaatgagtattatcaaatcaaaagatttgtttatgggagaaaaggattatcaacaactatatctaataaaaaaatttctttcaaaaaagtttagggtacgaattaattcatgtcctaccataagaattaaaaataatgtcgcactatctaccagaaataaattattaaataaaaaatacttgaaaaaagcatcagaaatcgcattaattcttcgtaatttaaagcgtaaatctaaatttcaaccatcaaaaacatctctagatttacctaattataaaattttg

SEQ ID NO: 311497 - DNA, 241 bp, Unknown
  Bacterial polypeptide expressing nucleotide sequence isolated from the Sargasso Sea
atgcaaaccgctcattccgtcgcccaggtgcgcgaacatgtgcgcggctggcaccgcaaaggccagtccgtaggctttgtccccactatgggcaacctgcacgatggccatatcagcctggttcgagaagcccgaacccgctgtgatgtggtcgtggtatcgatttttgtccatcccacccagttcgggcctaacgaagatttcgaccgctacccgcgcaccctggatgcggacgccgcgg

SEQ ID NO: 311498 - DNA, 663 bp, Unknown
  Bacterial polypeptide expressing nucleotide sequence isolated from the Sargasso Sea
tttgcaaatcattcgttcagtcaaagatttagaggcagtacttcagcaatatgaagaaattaattttgttccaacgatgggcaaccttcatgctggtcatctgagccttgtatctgaggcaaataaatatgatgggattactcttgtatctatatttattaatcctcttcaatttgctccaaatgaagatctggatatctatcccagaacagaaaaacaagatttaaaagaattagaaaaaataaattgcgatgtggttttttgtcctgagcccaattttgctgaaggagccaaacaattacatgcaaatgcagacctatctaaaaaattatgcggaatttcgagaccacatttttttcatggcgttatttcaatcttgaatcacttttttcaattaataaaaccaaaaaatgttttttttggattgaaagattaccagcaatatttgattgtgaaagactttttaactcaatcaacattgaaagcttctattcatgggatcccaattgttagggagccagatggacttgctatgtcctccagaaacaatttattaacacctgatcaaagactgattgcttcgaaattatcggtaattttaaaagacacagcccagcaagcaaagattaaaaatttagaacatttaagagttgaaggtattaa

SEQ ID NO: 311499 - DNA, 856 bp, Unknown
  Bacterial polypeptide expressing nucleotide sequence isolated from the Sargasso Sea
atgtcaaaaaaagaaaattcccttaagattttaaaaagtataaagtctacaaaaaaatacttaatggagttagataagccaaaagtattaatacctactatgggtgctttacatgatggccacttatcattaatagaaattgcaaaaaaactgaatatccatactatagtcagtatctttattaatccaattcagtttaatgataaaaaagatttagaaaaatatcccagaacattaattcaggatattcaaaaactcaaagccttaaatgttaatacattatttacacctaatgttgaaaatatttatgataaaaatttccaaactagcatttctgttaaaaatcttcaaaagaatctttgtgggacgaacagaccgggtcactttgatggaatggctacaattgttttaaaactttttaatattattaaaccagattatgcgatatttggtaagaaagattttcaacaattagaaattattaaaagaatgtgcttggacttaaatttgaatattaaaattatcgagggaaaaattattagagagaaaagtggtcttgccatgagctcaagaaacagtttattaacaaaaaataatttaattcttgctccaaaaatttatgaaggattaaagttggttaaaaaaatttttacaagttctaataaactcgaatcacaatcagtgataaaaaaattgagagatttctatttaaagaatggtttaaaaaaaattgattatatagaaattgttgacaaagaaacattagttaaaacaaaaaaaattaagaaaggagatacaattgcagttgcaatcaaattgggaaaaataagactgatagacaatttacaattttaat

SEQ ID NO: 311500 - DNA, 245 bp, Unknown
  Bacterial polypeptide expressing nucleotide sequence isolated from the Sargasso Sea
aatgaaaattttaaaaaatgtttttgaactaaataaggcagtaaaaaattacaaaaatgttggatttgtacctacaatggggggaatccataaaggccacgtatctttaataaaaatttcacaaaaaaataacaaagaaacaatagtaagtatttttgtcaatccaacacaatttaatcaaaaaaaagattttaagaattatcctagaaattttagaaaagatatttcgatattaaaaaaactca

SEQ ID NO: 311501 - DNA, 376 bp, Unknown
  Bacterial polypeptide expressing nucleotide sequence isolated from the Sargasso Sea
atgaaattatttacaaataaaaagcagttacaaacagaaataaggaaattcaataatatcaattttgttccaacaatgggcgccttacacaagggtcatgagagtataataagaaaatctgtaaaaggatcgggaaaaacaattgtaagtatttttgtaaatcccaaacagtttaataataaaagagatctaaatacttatccaagaaataataatgaagacgttaaaatattaaaaaagcttaaagttcattatttatacaaaccatcttacgatgatatatacaaatttaaaacggaaaataaaattcatttagataaattttcaaaagaattatgcggacaatttagaaagggtcattttaaaggtgtaattg

SEQ ID NO: 311502 - DNA, 817 bp, Unknown
  Bacterial polypeptide expressing nucleotide sequence isolated from the Sargasso Sea
aatgaaaattttattaaataagacatcattgacaaaatcattagggccttttaatgacattgggtttgttcctactatgggctctatacataaaggtcatttgtcacttattaataaatcgaatcaagtttgcaacaaaacaattgttagtatttttgtaaatccaaaacagttcaataacaaaaaagattttaaaacttatcctaaaaatatgaagaaagacttacaattattgaataaaacaaaacaagttgactttatctatattccaaaatttaaagatatctttaacaataataagaaacctaaaattaaaattaataaaaaagataagattctatgtgctaaatttagaaagggccattttgaaggtgttttagatgtaatggagaggttaacaaatatagtaaaaccgaataaaatttttatgggtgaaaaggattttcagcaattatttttagttaaaaaatttttaaaaaataaatatggcacagaagttataggatgcaaaactatccgtgaaaaaaataaagttgctctatcctcaagaaattatttactatctaaagaaaatgttgctttagcaagtgtaataataagaaaattaattaatttgaaaaaaaatattaaattaaaaaaaaataaaaatagatacttaaaaacggtgaaaaatgaacttgagaaaaaatttaatattaatattgagtacttagaattaaggaatatatacaatctaaaattatcgagtgttataaataaatctaggttatttgtagcgtattatttaaatggcgtaagattaatagataatttataa

SEQ ID NO: 311503 - DNA, 817 bp, Unknown
  Bacterial polypeptide expressing nucleotide sequence isolated from the Sargasso Sea
aatgaaaattatattaaataataattcattatttaaatctttaaggccttttagtgatattggctttgttcctacaatgggtagtatccatagaggtcatttgtcacttattgataggtcaaatcgagcttgtaaaaaaacaatagtaagtatctttgttaaccctaaacaatttaacaatagaaaagattttaagaattatcccaaaaatattaacaatgatattaaaatcttaaaaaaaactaaaaaggttgattttttatacatcccaaaattcaaagatgtttttaataataataaaaaatcaaacataaaaattattaaaaaagataaagttttatgtgccaaatatagaaaaggccattttgaaggagtgctggatgtgatgggaagattaactaatttagtaaatccaaaaaaaatatttatgggcaaaaaagattatcaacaatacttcttaataaaaaattatctaaaaaataaatataaaacttctattattccatgcaaaacgattagagataaaagcaaaatagctttgtcttcgagaaataatcatttggatttaaatagaattaaaaaggcaagttttctaagtaaaagtttaattaaattaaaaagaaatttagtaaatagtaaaaaaataaaacaaaatttaagaattcaaatgaaatattttgagaaattattaaaaattaaaattgaatacttagaattaagatcaattaaaaatcttaaaatgtctaatacggtcagagaatcacgtttatttattgcatattatattgataaagtaagattgattgataatttttaa

SEQ ID NO: 311504 - DNA, 320 bp, Unknown
  Bacterial polypeptide expressing nucleotide sequence isolated from the Sargasso Sea
tttgcaaattattagttcagccaacgatttagaaacatatcttcagcaatttgaagaaattaattttgtgccaacaatgggtaacctacatgctggtcatctgaggcttgtatcagaggcaaaaaaatatgatgggataactcttgtatctatatttgttaatcctcttcaatttgcaccaaatgaagatctggaaatctatcccagaacagaaaaacaagatttaaaagaattaaaaaaaataaattgcgacgctgttttttgtccaggacctgattttgctgagggcgccaaaaaacttcttgcaaatgcagacctat

SEQ ID NO: 311505 - DNA, 610 bp, Unknown
  Bacterial polypeptide expressing nucleotide sequence isolated from the Sargasso Sea
atgaaattatttacaaataaaaagcagttacaaacagaaatagggaaatccaataatatcagttttgtaccaacgatgggtgccttacacaaaggtcatgagagtataatcagaaaatctgttaaaaagtcaggaaaaacgcttgtaagtatttttgtaaatccaaaacagtttaataataaaaaagatctaaatacctatccaaaaaataataaaaatgaccttaaaatattaaaaagacttaaagtaaattatttatacaaaccgtcttactatgatatttataaattcaaagcagaaaaaaaaatttatttagatagtttttcaaaagaattatgcggaaaatttagaaaaggtcattttaagggtgtaattgatgttgtcaatcgatttcttgaaattataaaaccaaaaacaattctattaggcaacaaagatttccaacaactttatttaattaaaaaacacataaaaaaaaataaaattaaaacaaaggttttgtcatgtaaaactataagagataaaaacttcatcgcttactcttcaagattaaataaattaaattataatgaaaaaataatacttgtaagtgttatagggtttttaaaaa

SEQ ID NO: 311506 - DNA, 379 bp, Unknown
  Bacterial polypeptide expressing nucleotide sequence isolated from the Sargasso Sea
tatgaaaatagtcaaaaaaatatcagaaattaaagaaatagtatctaattttaagaaaaacaaaaaagaaattaatcttattccaacgatgggcaatatacatgctggacatttatcattgttatccaaggcgaataaatttgatggaataaacattgttagtatttttgttaatcctactcaatttaatgatgaggatgattttaataattatcccaatacatttgaggcagatatggaaatattatcaaaagctaactgcaacattatttttgcaccttgcagaaatcaagtgtatcctgatggtatcaaatctgaaaaaacggtattcaaatatagagatattttatgtgatctttatagattggggcattttgat

SEQ ID NO: 311507 - DNA, 748 bp, Unknown
  Bacterial polypeptide expressing nucleotide sequence isolated from the Sargasso Sea
aatgaaaattttaaagacaaaagatgatctaaaagaggcaattctagattgcaaacatttaggttttgttccaactatgggtagtttgcacaaaggtcatatttcgttaatcaaaaattctcaaaaaaaatctagcaaaacaattgtaagtatatttgtaaatccaacacaatttaatgataagaacgattataaaacatacccaaaaaatattaatcaggatattaaaatattaaaaaagttaagagttaattttgtttttataccaaaagttaaagatatctataataataaaataaattcaaaatttaggcttaagaaaagtgaaaaaatattgtgtgctgataaaagaaagggtcattttgaaggagttttagaggtaatggatcgacttttaaatttaataaaacctaagtttttatatttgggagaaaaggattttcaacaacaatatttaataaacaaatatttacataaaaaacataagttcaagctcataatttgtaagacgataagacataacaaaatggcattatcttcaagaaatcttaaacttaaaaaaaaatcattgaagacagtacaactaattgctgaagagctgtctcgaattaaaaataaatataaaaattataattttagaataaaaaacaataatttttttttaattaaatatttagaaaataaatatttaatcaaagtagagtatttggactttagaaacataaacaatctaaatagttcgaaattt

SEQ ID NO: 311508 - DNA, 455 bp, Unknown
  Bacterial polypeptide expressing nucleotide sequence isolated from the Sargasso Sea
tatgggcgcattacatgctggacacatccaactcataaaagaaggaaaaaaattgaaacttcctttaattgtttcaatttttgttaatccgattcaatttaacgacaaagatgatttcgctaactaccccaaaacaatagataaagatattgagattttgaataatttacaagttgattatctattcattcctgatagtgaatatatttatccttccaatggttttgaaagcattgactctggtgagttaggaagaaaatatgaaggagaatcgagacaaggtcattttgatggagtcctaacagtcgttaatagattatttgagttaattgaaccaaaagctgtaatatttggaaaaaaagacgctcaacaattatttttaattaagaaattagttttagataaaaaatataagatccaaataattgaatgcaaaacagtaagagatagcaacg

SEQ ID NO: 311509 - DNA, 430 bp, Unknown
  Bacterial polypeptide expressing nucleotide sequence isolated from the Sargasso Sea
ttggatattgttcaagctgataattctttctttggagaaaaagattatcaacaattagttgttataaaaaaaatgaggaatgagttgaactttaatactaacattattcctattaaaactgtaagaaataaaaatggattaccactttcatcaagaaacaaatatttagaaattaatgaaattgaaatagccaataaaatcaataagatatgcaaatatttgatacctaaagttaaaaataaacttaatacgacaaagattttagctcatgctaagcgcgaacttcgtaagaacgggatagataaaattgattacttaacaatccttactgataatttagaaaaaagaaaatctttaaaatcaaaatcaagaatttttattgctgcaaatgttggaagtactcgattaattgataattttccaatttaga

SEQ ID NO: 311510 - DNA, 235 bp, Unknown
  Bacterial polypeptide expressing nucleotide sequence isolated from the Sargasso Sea
aatgaaaattttatttaataaaaatgatttaaatgaggcactaaataatgtcaaaaatttaggctttgttcccactatgggtagtcttcataatggacacatatctttgataagaaaatccaaaaaagtatgtaaaaaaactatagtcagtatatttgtaaatccaactcaatttaataataaaaaggattttgaaaaatacccaagaaattacaaaaaagacttaaaaatttga

SEQ ID NO: 311511 - DNA, 835 bp, Unknown
  Bacterial polypeptide expressing nucleotide sequence isolated from the Sargasso Sea
catgcaaataattcaaaaaacatcagaaattaaagaaatattatctgatttagagaaaaataatttaaaaattaatcttattcccacaatgggtaacatacatgagggtcatttgtctcttttgaaagaggcaaataaatttgagggcacaaatgtggttagtatatttattaaccccacccaatttaatgatattaaagattttgaaaattatcctaatacctttgaccaagacgtaaacttgttatcaaaaaataattgtgaaattatttttgcccccaatataagtgaaatgtatcccaatggtcttgaaacaaaaaaaactatttttgaatacagagaaattttgtgtgatgcgtttagaccaggtcattttgatggtgtaactacaattgttaatttgttgctagacattttaaagccatcaaatgttttttttggagaaaaagattttcagcaattaaaaatagtagagaaactaattattcaaaataaactaaaagtaaatttggttaaatgttcatcaattagaggtttgaatgggatgagcttatcgtcacgatacaataaattaaatacaaaagaaaaaactcaattcgatgagtgtgctcaaatcattgataagaatttatcagatttaataaattcatttgatactaaaattttagaaaatattaaaaaagaattacaaagcattggaatttctaaaattgattattgtgaagtaagagaggagagtaatttagaaatttctaaaacaaatttacaatctagattattcgtagcattctatgtgaataaaataagaattattgataactttgttttgtactaa

SEQ ID NO: 311512 - DNA, 623 bp, Unknown
  Bacterial polypeptide expressing nucleotide sequence isolated from the Sargasso Sea
atcttatccaagaaatacaaaaacagacttaaaaaagctaaaaaagttaaaaattaatttcttatatattccaacatttaaagacatatacggatttaaaccaaaggaaaaagtttatttagataaattttcaaaaaaattatgcggtagatttagaaagggacattttgaaggtgttttaaatgtagtaaatagatttttagaaataattaaacctaaatatatttttttagggaaaaaagattatcaacaattgtatctaataaaaaaacatatagaaaaaagaaagattaaatctaagattattgaatgcaaaactataagagaaaataatggagtagctctctcaacaagaaattcaagtcttgatgaaaaacaaatgaagattgcatctaacatttattattatttatataacttaaagaaaaaaattaaaaaaaattataatttatttaatctaaataaaataaaaaaagacctgaaagacttaggtgtcagtaaaatagattatttggaaaattataatactaaaaattttaaaaaaattaaaaaacaaagcaaaaaattcaatttatttattgcctactatattaaagacgttagattaattgataatatttaat

SEQ ID NO: 311513 - DNA, 811 bp, Unknown
  Bacterial polypeptide expressing nucleotide sequence isolated from the Sargasso Sea
atgataatttttaaaagcataaaagtgttaaataataatgtcaatttcaataataatattggatttgttccaactatgggggcccttcacgaagggcatatttcgttgataaaggcatcaaaaagaaaatgccaaaagactatagttagtatatttatcaataagccacaatttaacaaaaaaaaagattttaaaaattatccaagaaatattaaaaaagatttaaaaatattaagaaaactaaaagtagattatctattgatgccaaatgaaaaagatatttatagctccaataaacagaaaaaaattaaaataaacaaaaaggatcttataatgtgtgctaaatttagatctggtcactttgagggagttttagctgttattaaccagtttttgattaaaataaagccaagtgtaatgtttttaggtgagaaagattttcaacaaatttatcttatcaaaaggtttatttcgggtaaatttaaaaccaaaatagttcaatgtaagaccataagaaataaaaatggtttaccttattcatcacggaatgttttgttaaacaaaaaaaactttcaaactgctgtaaatgttagtcaaataattaaaaaattttatagtgcacttaaattaaactttaaaaaaactagagatatttacctgattaaaaataaaataattaataaaaatgttaaacttgaatatcttgaaataagaaataaattaaatttatccaaaaaaattaataagaaaaattttaaaatatttattgcttaccatgttaatggtataaggctaattgataattattaat

SEQ ID NO: 311514 - DNA, 277 bp, Unknown
  Bacterial polypeptide expressing nucleotide sequence isolated from the Sargasso Sea
agaaataactatttaagtggccaggaatttaaaattgctattaaaatcaataaattacttaaaaaattacctccattgattagaaccaagttaaagattaataaaatacttaatcatgcaaaaaaagtcctgatagatcatggtgttgataaaattgattatctgactgtattaaatgatgatctctctgttcgaaaaaaaataagtgataaatcaagaatatttattgcggctaaaataggaaatactagattaattgacaatataaaaatctaaa

SEQ ID NO: 311515 - DNA, 394 bp, Unknown
  Bacterial polypeptide expressing nucleotide sequence isolated from the Sargasso Sea
ggataccagcagctcatggtgatccgccacatggtgcggcagtttgcgctgcccatcgacatcgtggcgggcgaaacctgccgcgcggccgatgggctggccctgagttcgcgcaatggctacctcagcctggaagaacgccaggaggccgtggccctgtcgcaggccctgaagcggctggcgcagcagtggctggatgccagcgaccgcagcgcgctggaggcccaggcgcaagatgccttgcgcgcgcggggctgggcgcccgactacctcacggtgcgccgccgcgccgacttgctgcccgccacggccgaggatgcggcaggcacgctggtggcgctgggtgctgcgcggctgggcagcacgcggttgattgacaacctggagttttgat

SEQ ID NO: 311516 - DNA, 214 bp, Unknown
  Bacterial polypeptide expressing nucleotide sequence isolated from the Sargasso Sea
tatggatgagtcaataaaattactaagaaaaaactctgaaacaatatcattagttcctactatgggtaatttacatgaaggacatatctcactaattgagttagcaaaaaaacaatcttcaaaagttatagtatcaatttttgtcaatcctttacagtttggagaaaatgaagatttcgaaaaatatccaaggacatggaacaagataaggcta

SEQ ID NO: 311517 - DNA, 835 bp, Unknown
  Bacterial polypeptide expressing nucleotide sequence isolated from the Sargasso Sea
atgaaaatagtcaaaaaaatatcagaaattaaagaaatagtatctaattttaagaaaatcaaaaaagaaattaatcttattccaactatgggcaatatacatgctggacatttatcattgttatcaaaggctaataaatttgatggaataaatattgttagtatttttgttaatcctgcgcaatttaatgatgaggatgattttaataattatcccaatacatttgaagcagatattgaaatattagcaaaatcaaactgcaacattatttttgcacctagcaacaatcaaatatatccagatggtatcaaatatgaaaaaacagtgttcaaatatagagatattttatgtgacctttatagattaggacattttgatggagtcacaacaattgttaaaattctcttcaaattaatagaaccctccaaagtcttttttggtgagaaagattttcagcaattaaagattattgagcagcttatttttcaaaataatttaaaaataaatttaattaaatgtccctcaatacgagactctcatggcatgagtttttcatcgcgctattcaaaattcagtaaagatgaaaaatcaaaatttaaaaaatgtgcacaaataattaatgctaatttattaaaattaaaaagagattttgatcacaaaattttagataacataaaaaaagaattaagaagttatggaatttcaaaaattgattattttgaagtaaggaatgaagaaaatttaagccttagtgtaaaaaatgaaagttcaagattgtttattgcattctatctaaataaagtaagagtaattgataactttcttttatactaag

SEQ ID NO: 311518 - DNA, 316 bp, Unknown
  Bacterial polypeptide expressing nucleotide sequence isolated from the Sargasso Sea
ctgacagttgatacgattggcgggcttcgcgcgctagtggcccgagctcgtggtaaaaacaagaaagtagccctagtaccaacaatgggtaacttgcatgacggccatatcgccctgattcatggtgcaatgcagcgagtcgatttcgtggttgcgagtattttcgtcaacccgctccagttcggagcaaatgaagatttggctagctatccccggactcccgacgctgaccgcgaaaagctggtcaaggccggatgtgatgtgctgtttgctcctgctgttgaagagatctatccgaatggaatgctcaaccaaa

SEQ ID NO: 311519 - DNA, 424 bp, Unknown
  Bacterial polypeptide expressing nucleotide sequence isolated from the Sargasso Sea
tatagaaataataaatcctaaatacatttatttcggcaaaaaagattaccaacaactttatctgattaaaaaacatataaaaaaaagaaaaataaaaactaaagtaatacaatgtaaaactgttagagaaaaaaacggagtagcctattcatcaagaaatgtaagactaaattataaacaaataaagatagcttctaacattatttattatcttttaaaattaaagaaaaaaattaagaaaaactataatttgtttaagattaataaaataaaaaaagatataattagcttaggcgctacaaaaatagattatattgaaatttataatttaaaaaattttaaaaaaattaaaaaacccaataaaaggtcaaatctatttattgcttattatatcaaaaatacaaggttgattgataatatttaa

SEQ ID NO: 311520 - DNA, 288 bp, Unknown
  Bacterial polypeptide expressing nucleotide sequence isolated from the Sargasso Sea
gctgattattgaatccctgccgctgctgcgccagcatatccgccgtttgcgccaggaaggtaagcgtatcgcgctggttcccactatgggcaacctgcacgacggtcatatgcagctggtggataccgcaaaagccagcgccgatgtcgtggtggtcagtattttcgtcaacccgatgcagttcgatcgtcctgacgatctgtcgcgctatccgcgtacgctgcaggatgattgcgaaaagctgaacaaacgtaaggtggattttgttttcgctcccgcgccggcaga

SEQ ID NO: 311521 - DNA, 673 bp, Unknown
  Bacterial polypeptide expressing nucleotide sequence isolated from the Sargasso Sea
aatgaaaatatttgaaaaaaagaaggatctggaccaagcattggccaaaattagagaagaagggcaaaaaataggccttattccaactatgggtagtattcataaaggtcatctctcattggtaaaaaaatcaaaaaaaatgaatttttattcaatagtaagcatttttgttaatcctactcaatttgaagataaaaaagattttaaagattatcccgataataaagatatcgatattaaggaactaaaaaaaattaattgtgatgcaatatattttccgtcaataaatgaaatttaccctaaggaaataaaaagtaagaaaacaatttatgattttagaaatattttgtgtgatcgttttagagcaggtcatttcgatggtgttaccacagttgttgattcattatttaatattataaaaccggattatgcattttttggagaaaaagattttcaacaattaaaaataataattaaattagtagaaatattaaatcataaaattactatagaatcatgtccatcagttcgatatgaaaatggtatgagttattcgtctagatataaaaattttagtaaagaacaaaaaaatatatttaatgaaatagcagttataataaataattatgtaaaaaatttaaaagtaaaaatagaatctaatactttagaaaaa

SEQ ID NO: 311522 - DNA, 739 bp, Unknown
  Bacterial polypeptide expressing nucleotide sequence isolated from the Sargasso Sea
atgaactctacgggtaacattaacgaactcaaaacgagtcttgagctcctcaaaaaagctggtaaaacgattggtttagtgccaacaatgggaaatctgcatgatggtcatataaatcttgttaaagaatctctagaaaagaatgattacacagttgtttcaatttttgttaaccctctgcaattcaatcctaatgaagatttagaaacctatcctcgaaccattgaagaggataaagaaaaactccttgcgtgtggttgtgactttttgtttataccaaccactcaagaattctatcctgagaccctttatcctcatactcaagttaaaataccgggcctatcagatatattatgtggtttagaaaggccaggtcactttgaaggggtatgcatagtagtcacaaaactactcaacatagtaaatcctgataacgcatattttggattgaaggattatcagcagtacttaatcgtcaagaaaatggccaaagacttaatgattgatactcgaatcgttggcttggagatagtcagagatgcgggcggcctggctctcagctccagaaatggttttctatctgatcacgaactacaaaaagcacgacaaatttatcattctttgcaaaaaactgcgaaacgtatataccgtagcgaagcaaagtttcgggaccttgaaacgcttgctcatcaagaattgcttgacgctggactaactcccgaatattttgtaattcgca

SEQ ID NO: 311523 - DNA, 712 bp, Unknown
  Bacterial polypeptide expressing nucleotide sequence isolated from the Sargasso Sea
atgctgataatcaaagacatttctaatttaaagtcatatttgactgcttatcaaaatcgaaaatactcaattggttttgtccctactatgggcgctcttcataaaggacatggggaactgataaaaaaatcaaaaaatgataatcacaaaactattgtaagtatttttgtaaatgaaaaacaatttaacagcaaagaagattttaactcttatcctaggaataagggccttgactacgaattttgctctaacaacgatgtagatctattatttgaaccatcggcagaagaaatttacaacaatgatggaactattttaaaaaatgtaaattttaaaaatattctttgtgataaatttagaaaaggacattttgatggtgtaatcacagtactagataaattcttcacaattataaaaagtaataaagtttactttggagaaaaagattaccagcaactcaagataattgaaaaatttattctaaaaaaatataaatctttacaattagtatctgttccaacaaagagaagtgaagaaggtattgcctattcatcgagaaatgaaaaattaagtaaaaaacaattacaagattttgttagttttcatcaaaaagtagaaaattttttaaaatcattagaaaaaacatttgatattgaaattgcaaaccaaaaagctaaagatttcattttgaacaagatattgaagaattaga

SEQ ID NO: 311524 - DNA, 736 bp, Unknown
  Bacterial polypeptide expressing nucleotide sequence isolated from the Sargasso Sea
ggtggaatacatgagggtcacaaatccttaataaaagcctcacaaaataaaaaaagaatgactattgtaagcatttttgtaaatcctactcaattcaataaaaaagatgattttaagaaatatccaagaaatattcagaatgatattgctatattaaaaaaattaaatgtagaatatttattcacacctaatgctaaagagatgtacaaattcaaagctaagaaatttaatttaaaaaaaaaagataagattttgtgtgcgaaatttagagctggtcattttgagggtgttctaaatgttatgaatagattgctgaccattataaaatcaaaagatttgtatatgggtgaaaaagattatcagcagttatatctaataaaaaaattcctatcaaaaaaatttaaggtacgtattaattcatgcccaactatcagaataaataacaaaattgcgttatcaactcgaaataaattattaaataagagatcctttaaaaaagcttcagaaattgcatcatttttgaaaaaaattaagtatagatcaaaatcacaagcttctgagttagcttttaaattacctgattacaaaaaagaattagaaaaaaaatacaaaattaaaatagattatttagaatttagagacgaaaaaaatttaaagcttaataatttcaaaaataaatataggctttttgtggcttataaaatagacaatgttagattaattgataattattagt

SEQ ID NO: 311525 - DNA, 607 bp, Unknown
  Bacterial polypeptide expressing nucleotide sequence isolated from the Sargasso Sea
aatgaaaataattacaagtatttttgatttaaataaagaaattaaaaactataaaaatgtcggatttgtaccaactatgggtggtatacataatggtcatatatccttaataaaagcttcacaaaagaaaaaaagtaagactattgtaagtatttttgttaatccaactcaatttaataagacagttgactttaaaaaatatcctaggaatataaaaaaagacattatctctttaaaaaaactaaacgtaaactacttattccttccaacaacaaaagatatttataaattcaaggctaaaaaatttgttttaagaaaaaaagataaaattttatgtgcaaaatttagaaaaggtcattttgaaggagtgcttaatgttatgaatagattgatgtcaattgttaaatcaaaagatttgtttatgggtgaaaaagactatcaacaattatacttaattaaaaaatttttatcaaaaaaattcaatgttcgagtaaatgcatgtccaacaataaggacaactgataaaattgcattatctacaaggaataaattgttaaataaaaaatcattagaaaaagcgtctaatattgcaaaattattaatcaaa

SEQ ID NO: 311526 - DNA, 340 bp, Unknown
  Bacterial polypeptide expressing nucleotide sequence isolated from the Sargasso Sea
atgcgaacgtttaaaaaatctaaaaaaatcaatgcctttctcatgaagaaacaagaggcaggaatgcatataggttttgttcccacgatgggtgctttgcatgaaggacatctttcattaattgaacaagcgaagaaatattcagatttggtggtatgttcaatatttgtaaatccactacagtttaaccgtaaggaggacctggtaaattatcctaaacgtatagtagaagatactaaattgcttgagggtgcaggatgtaattgtttgtttatccctgaagttgaggaagtatatccacaaccaccaaaaataaagtttgactttggttctattggag

SEQ ID NO: 311527 - DNA, 814 bp, Unknown
  Bacterial polypeptide expressing nucleotide sequence isolated from the Sargasso Sea
atgaaaataattacaagcatttttgatttaaataaagagattaaaaactataaaaatatcggatttgtgcctaccatgggaggaatacacgaaggtcataaatccttaataaaagcttcacaaaataaaaaaagaaagactattgttagtatttttgtaaatcctactcaattcaataaaaaagatgatttcaagaaatatccaagaaatattcagaaagatattgtaatattagaaaaattgaatgtagaatatttattcacacctaatgtcaaggatatattcaaatttaaaggtaagaaatttaatttaaaaaaaagagacaaaattttgtgtgccaaatttagaagtggtcattttgaaggtgttctaaatattatgaatagattgatgactataataaaatcaaaagatttgtttatgggtgaaaaagattatcagcagttgtatctaataaaaaaatttctatcaaaaaaatttaaggtccaaattaattcctgtcctactatcagattaaaaaataatattgccttatctacacgaaacaaattattaaaaaagagatctattaaaaaagcttcagaaattgcttcatttttgaaaaaagttaagtataaatcaaaatcgcaaggttctagattagcttttcatttgcctgattacaaaaaaaaattagaaaaaaaatataatattaaaatagattatttagaatttagagacgaaaaaaatttaaagcttagcaatttcaaaaacaaatatagactttttgtagcttataatatcgacaatgttagattgattgataattattagt

SEQ ID NO: 311528 - DNA, 796 bp, Unknown
  Bacterial polypeptide expressing nucleotide sequence isolated from the Sargasso Sea
atgaaaataattacaagtatttttgaattaaataaagagattaaaaactataaaaatattggatttgtgcctaccatgggtggaatacatgagggtcataaatccttaataaaagcttcaaaaaataaaaaaagaatgactattgtaagtatctttgtaaatcctactcaattcaataaaaaagatgattttaagaaatatccaagaaatattcagaatgatattgctatattaaaaaaattgaatgtagaatatttattcacaccaaatgttaaagaaatgtatcaatttaaggctaagaaattcaatttaagaaaaaaagacaagattttatgtgcgaaatttagagttggtcattttgagggtgttctaaatgttatgaatagattactgacaattataaaatcaaaagatttgtatatgggtgaaaaagattatcagcagttatatctaataaaaaaattcttatcaaaaaaatttaaggtacgtattaattcatgccctactatcagaatagataataaaattgcgttatcaacacgaaacaagttattaaaaaaaaaatcctttaataaagcttcagaaatcgcattatttttaaaaaaaataaagtataaatcaaaattacaaggttctaaattagcttttaatttacctgattacaaaaaagaattagaaaaaaaatacaatattaatatagattatttagaatttagagatgaaaaaaatttaaagcttaataatttcaaaaataaatataggctttttgtggcttatgaaatagacaatgttaggt

SEQ ID NO: 311529 - DNA, 835 bp, Unknown
  Bacterial polypeptide expressing nucleotide sequence isolated from the Sargasso Sea
atgaaaatacttaataatttaaacgattttaatcaaattctatcagaattattgaaaaatagagaaaaaataggccttgttccaactatgggcagtattcacaaaggccatttatcactattgaaaaaatcaaaaaaattaaattattattcaattgtaacaatattcgtaaaccctactcagtttaatgatttggaggattataataattatccaaaaaatgaagatagagatattaaagtcttaaaagataataaatgtgatttattatttttacccaatgtaaaagatatttatcctgagaaagttgaaattaacaaaaacatagatgattttagagatatactttgtgatagatttcgtcctggacattttgatggagtagtaacagttgtggatttgctctttaaattaataaagcccaacgcagttttttttggagaaaaagactttcaacagttaaagattatagaaagatatataaaaaataataatttaccaatattgttttattcatgttcttctataaggatgagtaatggaatgagttactcttcaagatacaatcaatttacaaatgatgataaaaaaatttttgataaaacttctcaattgatttatcagcacattagaattctaaataaaaattttaatcctaaagttattgataatttagttggtgaagtttcaaagttaggaatcaaaaaaatagattactttgaggtgagagaagaaagcaatttaaagatttcaaaaaataaaaataactcaagactttttgtagcattttatattaataaagttcgggttattgataattttattttatactagg

SEQ ID NO: 311530 - DNA, 742 bp, Unknown
  Bacterial polypeptide expressing nucleotide sequence isolated from the Sargasso Sea
tatgggtaatctacacgaaggtcatctcaagcttgttgaacaagcaggtaaagtttctaaatttgtatgcgtttcaatttttgtgaaccctttacagtttggaccggaagaggattttagttcttatcctagaaccttaagtgaagatctttcaaaattagaaaaaactaactgctctcttgtatttgctccaaagattgatgatatgacttttgagataaggaaacagaaagcagacccttttcttagctctatcttgtgcgggaggacaagacagaatcattttgatggtgttgttactattgttaataggttatttgagttatttcaaccaaaaataactttctttggagaaaaggattaccaacaactcatgataataaaggagtttgtagaaagaaaaaaactgaaaattgctgtcgaaggagtacctacagaaagagaattatctggattagcaaaaagtagcagaaataattatttaagtcgcgatgaaataaataaggctgctttgattcataaaaccttgattaatttagggcaattaatacgggattttaatgaaatagatactgttattaaacaggctgcagagtttttggaggaaaaagattttaatgttgattatcttgaggcaagagatcgtcacactttaaaagagtcctcgaaccctaacaatattattctcctttgtgcagctactctaaataaagtcagattgatagataatttaaaattgtag

SEQ ID NO: 311531 - DNA, 751 bp, Unknown
  Bacterial polypeptide expressing nucleotide sequence isolated from the Sargasso Sea
tttgcgcggaaacttgtctgctggatcaaaattaggattggttcccaccatgggagccttgcatgaagggcatgtgtcgttgatctcagaaagcataaaggcgaacgatcgaacaatattgagcatatttgttaacccaacacaattcaacgatcctaaggatttacagtcttacccctccaatctaaagcaagatatagaaattgccgaaaaagccggggttgatttcgtctttttacctcggcacgaagatgtatatagagataagttcgaatatcaaattcacgagactcgactaagcaaggagctttgcggtgcggaccgaccaggacactttacgggcgtgctgaccgtcgtaatgaagctattaaacttgattgctcccgatcgagcttattttggccttaaagattttcagcagtacgaattaattagaggcatgtgcgaggcattttttttaaacgtggagatctgcgctgtagaaaccatcagagactctaagggtttggctatctcatcaagaaacagattactaaaccatgaatcaaaagaaatggcttgcaaatttaataaaactctctcattagatacgcacgatgaagccattcacgaattgctggaggagctaggattcacagtcaactacgtggagacaaggaaaggaagaaggtttggtagtgtcactatctcctccaatgaaaacaaaatacgcttaatagataatattaagttggaggattcttaccaatga

SEQ ID NO: 311532 - DNA, 436 bp, Unknown
  Bacterial polypeptide expressing nucleotide sequence isolated from the Sargasso Sea
atttgctcagatcctcccagattacgcgttttttggtgaaaaggattttcagcaattattagtaataaagcagatggcaaaggatttggatttttccgttgaaattattaactgtccaacaatacgtgaaaatgatggtttagctctttcttcaaggaattcatatttgagtcatgaagaacgcaaaatagccccgctattgtatcaaatattaaataatattttgaaagaaactttatcgggtaagccaataacagaaactgtaaaatcagcaaaaatacaactactaaagggaggtttcacgaaggtagactatattaccatttgtgattccgccgatttgagggaaatcggtaagttagagatgggaggtcgtattttaggagccgctcatcttggaaatacacgcctgattgataatatagaaataacgtga

SEQ ID NO: 311533 - DNA, 190 bp, Unknown
  Bacterial polypeptide expressing nucleotide sequence isolated from the Sargasso Sea
atgaagattattcgagagattgagggatggatgactttacgaaatagcttaaaaggtaaggtggggttcgtgcctacaatgggagcgttgcactcgggtcatgcggaattaataaaaagaagtctccaagaaaatgatttctgtgtggttagtattttcgttaatcctacgcagtttaatgatagtacag

SEQ ID NO: 311534 - DNA, 640 bp, Unknown
  Bacterial polypeptide expressing nucleotide sequence isolated from the Sargasso Sea
atatccgcgtaatttgacaagagatgcttcattgatatctgaaataagtgataaaataaaaatatatgctccaaatcaagaggatgtttatggcaaaaaaattaagccaaaaaagtatagttttaaaaaattagataaggtaatggagggtataaaaagggaaaatcactttaatggagtagcaaatatcattgaatttttatttaaaacctttaatcctgaaaatgtatattttggagaaaaagattaccagcaacttcaaatagttagaagcttaaataaaattctcagaatgtcaattaatattatccagtgtccaactattagaagtaaaaatggtctagctttaagctcaagaaatcaaaacttaacttcaaatgaacaaagtattgctccagaaatatataaatgcctattggatgtgaaaaaaatggcaaaagttaattcttatgaagaaattcagaatgaagtaagttccagatttttaaagataaaacaatgtaatttagaatatttcacaatttcaaatccaaagacattagaagaaataaactctacggattcaattttaggaaatagagcatttattgcagttaaaataggagatacccgattaattgataatattgaattatcttaa

SEQ ID NO: 311535 - DNA, 734 bp, Unknown
  Bacterial polypeptide expressing nucleotide sequence isolated from the Sargasso Sea
gccaaatttagtttcaatcaaagacaagggactttctattggtttagttttaacaatgggaaacttacacgatggacatttatctctcattagagaagcacaattacataacgaatttgtgatctgttcaatatttattaatcctactcaatttaacaatgaaaatgatttcaattcttatccaaagacaattgatgaagatatttctaaattagaaaatattggttgtaatttactcttcttacctgaagttcaagagatataccctaaagaattggcaaagaaaaaaattgtaaacaattttagaaatattttatgtgataaatttcgacccggccattttgatggagttactactgttgttgatcttttttttaatatgattaaaccaacgaatagttattttggtgagaaggattttcagcaagtaaaaataatacaagatttagtaaaaattaatcatcacaatattaaaataattcaatgtccatcagtacgagataaaatgggtatgagtttatcttcacggaactctaaattttctaatgatcaattaaaaattttcaatgtattaggaaataaaattaaagagcatattaatctattaacacaaaatgaaattaataatttagatcaattaaaaatagagcttcttcaaaataatataaataaaattgactatttagagataagaaatgaaaataatttagaaataacaaaaaattattctgaag

SEQ ID NO: 311536 - DNA, 370 bp, Unknown
  Bacterial polypeptide expressing nucleotide sequence isolated from the Sargasso Sea
atgaggattattaaaagtattaataaattaaacaaagaagttaattttaaggcaaacattgggtttgttcctacaatgggtgctttacacaaagggcacttatctttgatcgattcatgtaaaaaaaaatgtgataaaactttagcaagtatttttgtaaatccgtcacaatttaataaaaaaaatgattataaaaaatatcctagaaatttatctcgtgacattaaaatattaaaaaaaaaaggtgtagattatgtttttattccgaatgttagacatatttataaaaataaaaaaaaaaggagaattaaaattattaataaagataaagttttatgtgcaaaatttagaagaggccatttcgaaggag

SEQ ID NO: 311537 - DNA, 504 bp, Unknown
  Bacterial polypeptide expressing nucleotide sequence isolated from the Sargasso Sea
tatgataattttaaaagataacgaacatatatttaataataaaaacctttgtctcgttccaacgatgggagctctgcatgaaggccacattgcattaattaatgccgcaaaaaaaacagaacaagaagtaatagtttctatatttgtaaacagacttcagttcaatgatgatttagattttaaaaattatccaagagatttagaaaaagatatttcaatacttaatcgattaaatatagaatatgcttttttccctgatgaggagtatatgtttcctgaatcaggttttgataaaattgatgcaggtaatttaggaaaaaaatatgaaggaaattctagacctggtcatttcgatggagtaataacagtcgtaaatagattatttgaattgattactccaaaaactgcagtgtttggagcaaaagattttcaacaattgtttttaattaacaagttgattttagaaaagaaatacaatataaaacttattgaaaataagacagt

SEQ ID NO: 311538 - DNA, 778 bp, Unknown
  Bacterial polypeptide expressing nucleotide sequence isolated from the Sargasso Sea
atgggaagccttcatgcgggacacacttcattagttgatcaagcagttgctgaatgtgacgacgttgtgacctcaatttttgtgaatccaagtcaattcggaccacaggaagattttgagaaatacccgagagattttgatgctgacttcaatctgttagctcggcataacgttcgctggattttcgcgcctgatgttcatgaaatgtatccacctggtgattcaacccgtattgagatcggcggaccagctgagccttacgagggaacgatacggccaggccatttctctggcgtcgctacgatagttttccgccttcttcaggctgcaccatcgcatgctgtctattttggtgccaaagattggcagcaggttcttgttgtacggaaaatggtgcatgacctccaactcgacgtggaggttatgacatgtccaacagtccgagacacagacggcctggcgctgagttctcgaaacacctacctgagtgagtctgaaagaaatcgagcccagactatttacgctgctctcaaacaagcagaacaaaactggtgccgtgggttggcaatcgatacgatagagcagaagttaagagatatgctttctgcaaaagagatccagattgactacgcggatattgttcatgctgaatctttgaaaaagatttctgaagtgagtcaagatacacctgcaatttttctcattgcttgccgcctcggctcaacacgattgattgataacattctcctgccatcacaggctttatcttcgtgctaac

SEQ ID NO: 311539 - DNA, 796 bp, Unknown
  Bacterial polypeptide expressing nucleotide sequence isolated from the Sargasso Sea
tatttttgatttaaataaagagattaaagactataaaaatataggatttgtacccactatgggtggaatacatgccggtcataaatctttaataaaagcttcacaagatagaaaaagtaaaacaattgtaagtatttttgtaaatcctactcaattcaacaaaaaagatgattttaaaaaatacccaagaaatattaagcaagatattgctatattaaaaaaattgaatgtcgaatatttgtttacaccaaatagcaaggatatatacaaatttaaaaataaaaaatttaatctaaaaaaaaaagataagatattgtgtgctaaattcagaggtggacatttcgagggtgttttaaatgtaatgaatagactaatgactattataaaatctaaagatttgtatatgggtgaaaaagattttcagcagctatatttaataaaaaaatacctgtcaaaaaagtttaaggttagagttaattcatgccctactatcagagtaaagagaaatttagcattatcgtcacgtaataaattattaaaagtaaattcacttaaaaaagcttcagaaattgcatcttttttaaaaaaaataaagaataaatcaaaattacaaggttcaagactagcttttaatttacctgtttataaaaaaaaattagaaaaaaaatataatattaaaatagattatttagaatttagagacgaaaaaagtttaaagcttagtaatttcaaaagcaaatataggctttttgtggcttatgaaatagacaatgttagattaattgataattattag

SEQ ID NO: 311540 - DNA, 469 bp, Unknown
  Bacterial polypeptide expressing nucleotide sequence isolated from the Sargasso Sea
aatgaagatttttaaaagtattaataaattaaacaaacaagttgattttaaggcaaacattggatttgtccctactatgggagctttgcataaaggtcatatgtcgttgattgattcatctaaaaaaaaatgtaaaaaaacattggtaagtatcttcgtaaacccttcacaatttaataaaaaaagtgactacaacaagtatccaaaaaatttaaataaggaccttaatattttaaaaaaaatgaaagttgactatgtgtttatccctaaaataagagaaatttacaaaaataaaaaaaaaatgaaaataacaattagttcaagagataaaattttatgtgcaaaatatagaaaaggacattttgaaggagtattagcagtaataaatcaattattaaatacaattaaagcgagatatatgtttttaggaaataaagattatcagcaggtttatttaataaaaaaattt

SEQ ID NO: 311541 - DNA, 709 bp, Unknown
  Bacterial polypeptide expressing nucleotide sequence isolated from the Sargasso Sea
ttgagagcttactcttcctataaagacattattaaattaattaataaagttgattctgttggtctagttccaacaatgggatctcttcatgaaggacatttatctttaataagaagtgcattgagtgagaatgaaaaagtaattgtttcaatatatgttaatccattgcagtttaataacagtgatgacttaaaaaagtacccccgagacattagaaatgatcttcaaaaattagaggctttaagtgatattatagcttacgttccaaatgataaagagatatataaaaaaggcgaaaagaaaaaaaaatacaattttggtcatttcactaaaataatggaaggtaaaatgagacctggtcactttagtggtgttgcaactattattgagaaacttttaaggatgtttaaaccaactaacgcatattttggggaaaaagattttcagcagttaattttaattaaagcactagtgagagagcaaaaactaaaagttaatataatcggatgtaaaacaattagagaagatgatggtcttgctatgagctcaagaaataaattacttaacaacactgaaagagagagcgcaagtcatattataagattactaaaaaaagcaagacagctttataaaagttcaaccttagaggaaacaaaaagaaatatattaaaagagaatttaatgattaagaatttgaatttagagtatt

SEQ ID NO: 311542 - DNA, 808 bp, Unknown
  Bacterial polypeptide expressing nucleotide sequence isolated from the Sargasso Sea
gaaattatttacaaataaaaaaaaattacaatcagaaatagggaaaatccataatatcggttttgtaccgacaatgggcgctctacataaaggtcatgaaagtattataagaaaatctattaaagaatcagaaaaaacaattgttagtatttttgtaaaccccaaacagtttaatagtaaaaaggatttaaataattacccaaaaaatataaagaatgatttaaaaatattaaaaagacttaaagtcgattatttatacatgccatcgtataatgatatatacaagtttaaaacaaaaaataaaatatacttagataaattctctagagaactatgcggacaatttagaaaagggcattttataggtgtaattgatgtagttaatagactccttgaaataatcaaaccccaaaaaattctacttggtaataaagattttcaacaactttatttaataaaaaaacatattaagaaaaacaaaattaaaactaaagttttttcatgtaaaactgttagaaataaaaattttatagcatattcttcaagattaaaaaaattaaatctttctgaaaaaatcaaacttatcagaataattaatgttttaaaaaaatataaaaatgatttagtttcaaaaaaacaaatatataatttttataaaataaaaaaaataattatgactatgggtgcaaaaaaagttgattatataaaacttatcgatttaaaaacaatgcagaaaccaaaaaaaaataaatttaatttattttacgcattttatttaggaaaggtgaggataattgataatttttaa

SEQ ID NO: 311543 - DNA, 642 bp, Unknown
  Bacterial polypeptide expressing nucleotide sequence isolated from the Sargasso Sea
tttgagtcactttattcaaaataataaagtaataaattttgttcctacaatgggaaatctgcatgaaggacatttaagtttggttgatgcatctaacaaatttacaggagtcactttaacatctatttttgtcaatccgcttcaatttgcccctaatgaggatctggaaatatatcctagaagccttgaagaagacataaaaaaattacgaataagatcctgcgatgcagttttttgtcccgagttaaatctttcaaaaaatattgttaagttatctgcaaatcccttacttgcaaaaaagctatgcggaatttcccgaccacatttttttgatggagtaatatcaatcttaaattatttctttagattaattcatcctgctaatacattttttggtttaaaagactatcaacagtatttaatagtaaaagattttcttcaaaactcagatattcaaaccataattcatggagtacccataattagagagattgatggtttggcaatgtcttcaagaaataatctacttagcatggatcaaaggaagatagcaaaaaatatttacttaactttaaatgatattgctttgggtataaggacagatacatttgagaatctaaggatcaagagtataaaaaaatt

SEQ ID NO: 311544 - DNA, 622 bp, Unknown
  Bacterial polypeptide expressing nucleotide sequence isolated from the Sargasso Sea
tatgaaaataattaaaagtatttttaatttaaataaagagattaaagacttcaaaaatattggatttgtaccaactatgggtggtttgcacgatggtcacatatctttaataaaaacatcacaaaaaaagaatatcaaaacaattgtcagtatttttgtaaatcccactcaatttaataatattaacgattttagaaattatccaagaaatatcaaaaatgatatatcaactttaaaaaaaatgaatgtagattatttattttatcctaatgtcaaagaaatttataaattaaaatcaaaaaaatttattttaaaaaagactgaccaaattctgtgtgcaaagcatagacctggtcattttgaaggcgtccttgatgtaatgaatagattgatgactgtaattaaatctaaaaatatttatatgggtgaaaaagactatcaacaaatatttttaataaataaatttttatcaaaaaaattcaatgttaatataaaatcttgcccaacaattagaataaaaaatacttttgctttatctacacgtaacatattattaaataaaaaatcgataaataaagtattgcaaatagcaataacattaaaaaaattaaaaaaaaaatcg

SEQ ID NO: 311545 - DNA, 475 bp, Unknown
  Bacterial polypeptide expressing nucleotide sequence isolated from the Sargasso Sea
gtttaggaggtctcactttttaggtgtagttaatgtagtaaatagactgcttgaaataataaaacctagattcatttattttggaaaaaaggattatcaacaactttttataataaaaaaacacattaaaaagagaaatattaagactaagcttatatcttgtaaaactataagatctaataatggtgtggccttatcgtctaggaataaaaatttaaataacaattcgatcttaattgcttcaaaagtttttaaattattaaaaacagaaaaaagaaatttaaagaaaggatcttttatcaaattaaataaaagttcaattataaaaaaacttaataaactaggagttaaaaaaatagattatatagaatgtataaatttaaatactttaaaaaaaccattaaatacaaactctaaattcaatatttttattgcttactacttgaatggtacaagacttattgacaatgtttag

SEQ ID NO: 311546 - DNA, 802 bp, Unknown
  Bacterial polypeptide expressing nucleotide sequence isolated from the Sargasso Sea
taaaagtattttagatttaaataaagaaattaaaaactataaaaatgttggatttgtgccaactatgggtggaatacataatggtcatatatccttaataaaagcttcacaaaagaaaaaaagtaagactattgtaagtatttttgttaatccaactcaatttaacaagacaattgactttaaaaattatcctagaaatattagaaaagatattatcactttaaaaaaattaaacgtaaactacttattcctacccacaaaaaaagatatctataaatttaaagctagaaaatttgttttaagaaaaaaagataagatattatgtgcaaaatttagagaaggtcattttgaaggggtgcttaatgtgatgaatagattgatgtctattgttaaatcaaaagatttgtttatgggtgaaaaagactatcaacaattacatttaattaggaaatttttatcaaaaaaatttgatgcacgaataaatgcatgtccaacaataagaacagctaacaaaattgcgttatctacacggaataaattgctgcataaaaaatcattagaaaaagtctcaaatattgcaaaattattaatcgaaataaaaaaaagatctaaattacgttcatcaaaattcaaattagatctatctgattataaaaaaaaacttgagaaaaaatttaatgtaaaaatagaatatttagagtttagagatgaaaaaaatcttaaacttaacaactttaaaaataaatttagacttttcattgcttacaatatcaacaaaataagattaattgataatttttaa

SEQ ID NO: 311547 - DNA, 724 bp, Unknown
  Bacterial polypeptide expressing nucleotide sequence isolated from the Sargasso Sea
taaagggcatgaatatttaataaaacagtcacagaagagatgtaaacaaacccttgtaagtattttcgtaaatccaactcaatttaataataaaaaagattatttgtcatacccaaagaatttaaaaaaagaccttaatatcttaaaaaagttaaaagttaattttgtttatatcccgaataaaaaagacatctattcatttaaaagaaaaaaaacaatagttttaaaaaaagaaaacaaaatactttgtgcaaaatctagaaaaggtcattttgagggtgtgattgacataatggatagattaacaaatattattaaaccaaataaaatatttatgggtgaaaaagactatcaacagcttcttttagttaaaaagtttattgaaaaaaaatacgaaacaaaaattgtcccatgcaaaacagtaagaaataaaaataaacttgctttatcttcaagaaatcaactactaaataaaaaagatctaattaaagcaggtaaaatagctagagatttattacattttaaaatatttcttaaaaataagaaaaaaacaaaaaatcttttacaaaaaaaaattgaattattaaaagaaaattttgatattaagattgattacttagaaattagaaagaaaaataatcttaaatcttctttaaatataagaaattcaaaaatttttattgcttattttattaataaagtaagattaatagataatttctaa

SEQ ID NO: 311548 - DNA, 430 bp, Unknown
  Bacterial polypeptide expressing nucleotide sequence isolated from the Sargasso Sea
cctgatgcggcggtgtttggccagaaggacgctcagcaggcagcagtaatccgtcggctgacggccgacttgaaccttggcgtcgacatacttatgatcccttcggtcagggaggcggatggactggcgaagagttctcgcaacgtttatctgactgaggaagagagacgcggggcaccggtcctgttccacgccctacaacagggcaagtctttggctgtgtcggggatacgtagccgtgacaggctgatccgtacggtgacctcgatcatcgaaactgtctcgtgtgctcgtatcgagtatgtggaggccgtaaaggctggggatctgcgcgaagagcccgatctgaagggaccgattcttcttgcagtcgctgttcgattcgggaaggcccggttgatcgacaatgttctggttccggccacgtgaa

SEQ ID NO: 311549 - DNA, 682 bp, Unknown
  Bacterial polypeptide expressing nucleotide sequence isolated from the Sargasso Sea
ttaataaaagcttcacaaaagaaaaaaagagagactattgtaagtatttttgttaatccaacccaatttaataatacaattgactttagaaaatatcctagggatataaaaaaagatattgtttgtttaaaaaaattaaacgttaactacttattattgccctcaacaaaagacatttataaatttaaggctagaaaatttgttttaagaaaaaaagataaaatattatgtgcaaaatttagaaaaggtcattttgaaggagtacttaatgtaatgaatagattgatgtctattgttaaatcaaaagatttgtttatgggggaaaaagattatcaacaattatacttaattagaaaatatttatcaaaaaaatttgatgtaagaataaactcttgtcaaacaataagaacagctgacaaaattgcattatctacaagaaataaattgctaaataaaaaatctttagaaaaagcctcacatattgcaaaattattaatcaaaataaaaaaatctaaattacaatcatcaaaattcaaattagatttatctgattataaaatagaacttgagaaaaagtttaatataaaagtagactatttagaatttagagatgaaaaaaatcttaaacttaataatcttaaagataaatttaggcttttcatagcttacaatattaataaaa

SEQ ID NO: 311550 - DNA, 819 bp, Unknown
  Bacterial polypeptide expressing nucleotide sequence isolated from the Sargasso Sea
tatggcatccgatatcggatacccgatcatcatcaaggcgaccgccggtggaggcggaaaagggatgcgcgtagtgcatacagaagccgctctgcttaatgcctggcaattgactcgcagcgaagcacaggcggccttcggcaacgacaccgtatacatggagcgctatctcgagaagccgagacacgtggagttccaggtgctcgcggacacccagggagaagtggtgattctgggcgaccgggactgctccatgcaacgacgccaccagaaagtgctggaagaagcgccagccccgggtatcacggatgccttgcgtgcggaaatgggtgaacgctgcgccaacgcctgtcggcagatcggataccggggagcgggaacctttgaattcctttatgaaaacggggagttcttcttcatcgaaatgaacacccgccttcaggtagagcacccgattaccgaagcaatcaccggcatcgacatcgtgcgtgagcagatcaagattgccgcaggcgaacccttgagtgttactcagaaagatatccggctgcaggggcacgcagtagagtgtcggatcaacgcggaaaacgcaacgacattcatgccgtcaccgggaaccatcacccgatatcaccaaccggggggtccgggggtccgggtcgactctcacatctttaacaattatcgggtgcccccctactacgactcgctgattgcaaaggtcatcacccatggtgaggatcgcgaacaggcgctgcagagaatgagcggcgcgctgcgcgagatggtcgtggacggaattgataccaacatcgcgct

SEQ ID NO: 311551 - DNA, 814 bp, Unknown
  Bacterial polypeptide expressing nucleotide sequence isolated from the Sargasso Sea
atgaaaatatttaaagataaacattctcttcagagagagatttttaaaactaaaggggtatcatttgtacctacaatgggcggattacataagggacatatctcattgatcaaacaatcaaaaaaatctaagtttaaaactttagtctctatttttgtcaatcctaaacaatttaataaaaaaagcgattttaggtcttatcctagaaatgcaaaaaaggacataaaactgcttaagaaattaaagattgattacttatatattccaacgtttaaagacatttatgggtttagacctaaagacaaagtatttttagataaatcttcaaaagaattatgcggtaaatttagaaaaggtcattttgagggtgttttaaatgtagtaaacagatttatagaaataattaaaccaaaatatatctttttagggaagaaagactatcaacaactgtatctaattaaaaaacacatcgaaaaaagaaagattaattctaaaataattgaatgcaaaactataagagaaaataatggcgtagcttgctcttctagaaatttaaatcttaataaaagtcaaatgaaaattgcatcaaatatttttcattatctcaataatttaaaaaaaaaaataaataaaaattatagtttatttaagataaatagaataaaaaaagaattaataaaactaggtgcaaataagatagactacttagaaaattatgatacgaaaagttttaaaaaaataaaaaaaaataataaaaaatgtaatttgttctttgcttactacattaataaagtaagattaattgataatatct

SEQ ID NO: 311552 - DNA, 404 bp, Unknown
  Bacterial polypeptide expressing nucleotide sequence isolated from the Sargasso Sea
tatgataattttaaaagataacgaacatatatttaataataaaaacctttgtctcgttccaacgatgggagctctgcatgaaggccacattgcattaattaatgccgcaaaaaaaacagaacaagaagtaatagtttctatatttgtaaacagacttcagttcaatgatgatttagattttaaaaattatccaagagatttagaaaaagatatttcaatacttaatcgattaaatatagaatatgcttttttccctgatgaggagtatatgtttcctgaatcaggttttgataaaattgatgcaggtaatttaggaaaaaaatatgaaggaaattctagacctggtcatttcgatggagtaataacagtcgtaaatagattatttgaattgattactccaaaaa

SEQ ID NO: 311553 - DNA, 745 bp, Unknown
  Bacterial polypeptide expressing nucleotide sequence isolated from the Sargasso Sea
tatgggcaatcttcatagaggtcatatatcactaatagatactgcaaaacaatacaaaaataaggttattgcttctatatatataaataaacttcaatttaatgataaaaatgattatttaaattatccaaaaacaattgaaaatgacattaatattcttgataaacatggttgtgattatgtattaattccagatgattcaatcgtagaaaatattttaaatataaaggcaccaccaaaatcaaataagttatgtggccaaggtcgacctgggcactttgatggagttttgaccattttaaataaattttttcaaattataaatcctgaaattgttttctttggtaaaaaagactatcaacaatttgttttggtaagagattttattcgagacaataatttaaatatcgaaattgtaggagttgacacagtaagaaatgattctggtttagccttatcttcaagaaataatctcttatcaaatcaagaaaagataattgcaacagagttatataaggcccttaaagatattgcttataataaaaccatcttagactcaaatctaattgatttaaaaaaagattatttaaaatctcttggtattaatgttgattatttaatttcgtgtgattgtgatacgtttgaggagagctataaaataagtgaaaaagatatattagttgcagtagcagcatatattggaaagattagacttattgataatataaaactcataaaactttaa

SEQ ID NO: 311554 - DNA, 579 bp, Unknown
  Bacterial polypeptide expressing nucleotide sequence isolated from the Sargasso Sea
tatgctgataattaaagatatttctaatttgcagtcctatttgagcgcttatcaaaatcgaaaatattcaattggttatgtgccaacaatgggagctcttcacaaaggacatggtgaattaatcaagcaatcaaaaaaaggtaatcacaaaactattgtcagtatttttgttaatgaaaaacaatttagtagtaaagaggattttgaaacctatccaaggaataaaggttttgactatgatttctgcatagacaacgaagtagacatactatttgaaccctcatctgaagaaatatttaaaaatgatcaaacactactgaataataaaaattttaaagatattctttgtgataaatttagaagaggacactttgatggtgttatcactgttcttgataaatttttttcaattataaaaagtaataaagtttattttggcgaaaaagattatcagcaactaaagatcatagagaaatttattgaagaaaaatataaatctttagacttagtttctgtcccaacacaaagacacgaagagggaatagcttattcatcaagaaatgaaaaactaagtaaaaa

SEQ ID NO: 311555 - DNA, 784 bp, Unknown
  Bacterial polypeptide expressing nucleotide sequence isolated from the Sargasso Sea
gcagaaattcgtaataaaggttcaaaaattggtttaattccgacaatgggcagcattcacaatggtcatttatcattagtcagaagatctaaaaaagaaggctttttttccattgtctccatttttgttaatccaacacaatttgaagatttaaaagattttgaaaactatcctcgaaatgaggagagtgatcttaaaaaattaattaaaggaaattgtgatgctttgtattttcctctagctatagatctttatcctaatggaattaaaagcaaaaaaacaatatttgaataccgagatattttatgtgataaatttagaacgggtcattttgatggagtaacaaccgttgttcattctttatttaatattgttcaacctagtgctgttttttttggagaaaaggattttcaacaattaaaaataattaatcaacttattgagcaaaacaacataccacttaagcttaaaaattgtacatcaattcgtttaaaaaatggaatgagtctttcatcaagatataataactttacctctgaacaaaaaaatttgtttaatcatatagctattaaaattaatgaatatgttgagatattaagacaaaaaattgatattgataatttaaaaagattaagccaacatctgttaaattacaagtctattaaaattgattatattgaaattcgagatgaagataatttaaaactcacacaagttaataatagggctagattatttatagcattttatattgataatattaggataatagataattttaaat

SEQ ID NO: 311556 - DNA, 327 bp, Unknown
  Bacterial polypeptide expressing nucleotide sequence isolated from the Sargasso Sea
catgaagatcctaaaaaccattgatgccatacagcaatatacagcgcaacgcccctcaggcacatgggcgctcgtccccacgatgggcaacctgcacccaggccaccgctccttgattaaacgcgctcaacaggcagccgatcatgtgatggtcagcttatttgtcaaccccatgcaatttgccccacacgaagactttgacgcatacccacgcaccccgaaagaagatcttcaagcactcgaggctgacgctgttgatgcggtctttatgcccaccaatgccgaactctatccccacggcatgcgtgaacatacccacattgacat

SEQ ID NO: 311557 - DNA, 632 bp, Unknown
  Bacterial polypeptide expressing nucleotide sequence isolated from the Sargasso Sea
cccaagaacaatgaatcaggatataagtaaattaaaacaactaaattgcgatattctctttgcgcctaaaactaaaaatgaagtctttaataatattgataatctaaaaaatttagaagccggtccaaaaggaaatattttatgtggaaaaattaggcctggacattttgatggagtattgaaagttatttatatgctttttcaattaacacaaccagacctttcagtatttggcctaaaagactttcagcaactttatctaataaagcaaatggcaaaaatgtattttccaaaattaaaaattatttccgcaccaactataagaacaaaaaatggacttgcactttcctcaagaaactcatatttagataaaagatcaatgaagattgcacctgttttttacaaaatattattagacggagttattaatctaaagaactcaaatgatgttgaaaaaacagttaattacataaaaacgaacttagaaaaaaatagcttcctagtcaattatgtgtcttttttgactacaaaactagaaaaaataaaattaaatacacctgataaaaaaatacttttaagttctgttaaacttggacaaactagactaatcgataatgtagaatttagttaat

SEQ ID NO: 311558 - DNA, 198 bp, Unknown
  Bacterial polypeptide expressing nucleotide sequence isolated from the Sargasso Sea
gatgaaaattttcagaaaagctagtgaattagagccaaatttagtttcaatcaaagagcagggtcagtctattggtttagttttaacaatgggaaacttacatgatggacatttatctctcattagagaagcacaattacataatgaatttgttatctgttcaatatttgttaatcctactcaatttaacaatgaaga

SEQ ID NO: 311559 - DNA, 713 bp, Unknown
  Bacterial polypeptide expressing nucleotide sequence isolated from the Sargasso Sea
agagtttgggctctcaacaatggttacaatttttatcaatgagctgcaatttgatagcaaagaagattttaataattacccatcaaaaattgaagatgatattaagactttagataatttagatattgattatttatttattccagaaaataattatatttatccagatagcaagtttgagaaaattgactcaggagctataggaaaaaaatttgaaggcaaatcacggccaggccactttgatggaatgctaaccgttgttaacaggctatttcaattgactcttccaaagattgcaatttttgggaaaaaagatgcccaacaattgtttttaattaaagaaatggtaaatagaaaaaaatatccaataaaaatatttgaagggttgactgtaagagataatttaggactagctttaagtagccggaatttattattaagtaaacacggagaagaaaaagcaagactaattaaccaaatactcaacaattcaaaaaaagaattttgtgaaacaaaaaatctaaatatttttaaaaagttaaaatcttattattcagatggagatatagaaatagattacttagcaatagtagattcagaaacatttggggagcctttagaggaaacagagaattatataataatcattgcagcctatattgaaaatattcgattaattgacaatattgaatttaaattggagagagtatgaa

SEQ ID NO: 311560 - DNA, 451 bp, Unknown
  Bacterial polypeptide expressing nucleotide sequence isolated from the Sargasso Sea
atgataattttaaaagataatgaacatatatttaataataaaaacctttgtttcgttccaacgatgggagctctgcatgaaggccacattgcattaattaatgccgcaaaaaaaacagaacaagaagtaatagtgtctatatttgtaaacagacttcagttcaatgatgatttagattttaaaaattatccaagagattttgaaaaagatatttcaatacttaatcgattaaatatagaatatgctttttttcctgatgaggagtatatgtttcctgaatcaggttttgataaacttgatgcaggtaatttaggaaaaaaatatgaaggaaattctagacctggtcatttcgatggagtaataacagtcgtaaatagattatttgaattgattgctccaaaaactgcagtgtttggagcaaaagattttcaactaattgtttttaattaac

SEQ ID NO: 311561 - DNA, 616 bp, Unknown
  Bacterial polypeptide expressing nucleotide sequence isolated from the Sargasso Sea
ttgagaatttttaactccatacaagaatttaatgaagctagagatggtttaggtaaattatcttttgtgcctacaatgggcaatcttcaccagggtcattcatctcttgttgatattgcaaagcagtttaaaaataaaattatagctagtatatatgtaaacaaacttcaatttaatgatgataatgattacttgaattacccaaaaacactaaattcagatattgaacttctacaaaaacacggctgcgattatgttttgatacctgatgattctattctagataatattcaatcgatccaagccccacctaagtcaaaaaagttatgcggtcaaagcaggccaggacactttgagggagtgctaactatattaaacaaattttttaaaattattgatccaaatattgttatttttggtaaaaaagattatcaacaatttattatggtaagagattttattaagaataataatttgaatattaagataataggaggaaatactgttagagaatcttcaggtttagctttatcttcaagaaacaatatcttatcaactcaaaaaaagttaattgcatcaaaactatatgaagttcttaacgatattgagtctaaaa

SEQ ID NO: 311562 - DNA, 748 bp, Unknown
  Bacterial polypeptide expressing nucleotide sequence isolated from the Sargasso Sea
cgaaaatattcaattggttatgtgccaacaatgggagctcttcacaaaggacatggtgaattaatcaagcaatcaaaaaaagataatcacaaaactattgttagtatttttgttaatgaaaaacaatttagtagtaaagaggattttgaaacctatccaaggaataaaggttttgactatgatttctgcacagacaatgaggtagacatactatttgaaccctcatctgaagaaatttttaaaaatgatgaaacactactaaataataattattttaaagatattctttgtgataaatttagaaaaggacactttgacggtgttattactgttcttgataaatttttttcaattataaaaagtaataaagtttattttggcgaaaaagattatcagcaactaaagataatcgaaaaatttactgaagaaaactataaatcattagatcttgtttctgtcccaacacaaagacacgaagagggaatagcttattcatcaagaaatgaaaaactaagtaaaaagcaaactcaagattttgtagattttcataaaaaagttaaaaattttataggctctcttgaaggatatttagacattgaaacagctaaccaaaaagcaaatgattttatgaaattacaagatattgataagtttgattattttgaatttagaaatgatactgacttaagttttgtaggtactgtgcctcaagccagacttttttatgcaatctataaaggtaaagaaa

SEQ ID NO: 311563 - DNA, 811 bp, Unknown
  Bacterial polypeptide expressing nucleotide sequence isolated from the Sargasso Sea
tatgaaaataattacaagtatttttgatttaaataaagagattaaagactataaaaatattgggtttgtgcctactatgggtggaatacatgctggccatatatctttaataaaaacatcacaaaataaaaaaagtaggacaattgtcagtatttttgtaaatcctactcaatttaataaagctgatgattttaaaaaatatccaagaaatattcagaaagatattgctatactaaaaaaattaaatgtagaatatttgttcacacctaatgctaaagatatatacaaatttaaggctaagaaatttaatttgaaaaaaaaagacaaaattatgtgtgcaaaatatagaattggtcattttgaaggtgttctaaacgttatgaacagacttatgaccataataaaatcaaaagatttgtatatgggtgaaaaagactatcagcagttatatctaataagaaaattcttatcgaaaaagtttaaggttcgtatcaattcgtgtcctactgttagaataaataatattgcattatctacacgaaacaaattactaaaaaagagatccattaaaaaagcttcagaaattgcattatttttaaagaatgttaagtataaatcaaaatttaaagatactaaattagcctttgatttacataattataaaataaaattagaaaaaaaatataatattaaaattgattatttagaatttagagatgaaaaaaatttaaggcttaacaatttcaaaagtaaatacaggctttttgtggcttataaaatagacaatgttagattgattgataattattag

SEQ ID NO: 311564 - DNA, 709 bp, Unknown
  Bacterial polypeptide expressing nucleotide sequence isolated from the Sargasso Sea
atgggaaatcttcatcaaggacatatctcccttatagaacttgcaaaacaatatgaaaatgaaattatttcatctatttttataaatagacttcaatttaatgagaaaaatgattatgaaaaatatcctaaatcacttgaaagtgatatcgagttattagaaaagaatggttgtgattatcttcttattcctgatgaatcaatattagataatatcaaattaataaaagctccttcaaaatcaaaaaaactttgtggaaaaaatagaccaggtcattttgatggcgttttaacaatattaaataaattttttaaaataattaatccagaaatatcaatatttggaaaaaaagactatcagcaatttttgttagttaaggaatttgttattaaaaattgcttaaatattaagattattggcggagatacaataagagaagattctggattggccttatcttcaagaaataaccttctttcagaaaaggaaaaacatattgcgtcatctatatataaagttctgtgtgatatagagtcatcaaaaaatttattaaataaagaacttttggagaataaaaaaaaatatttaaaaaaattagggttcgaggttgattatttaacaatatgtgatgctttaactcttgaagatagtttttctattgatacaaatgatcttttagttgctgttgcagcaaaactggagaagtaag

SEQ ID NO: 311565 - DNA, 706 bp, Unknown
  Bacterial polypeptide expressing nucleotide sequence isolated from the Sargasso Sea
gaaacaaatttaaaaactttggtgtccatatttctaaatagaaaacaattcaacaatgatgacgatttcaaaaattatcctatcgagcttgaacaagatattcattttttgaaaagtagaggtgttgattttatttttctccctcaggaaagctacatttatcctagtgaaggagtcccttctattgctcctggtaaagtgggatctattcttgagggagcttcaaggcctggccatttcgagggagttttaactgttgtaaatagactgtttgatttaataaagcctagccatgctgtgtttgggaaaaaagatgcgcaacaattatttttaattaaggacatggttaatcggcttgatttagatattgaaataatagaaggcgaaatatttcgagatataaatggccttgctttgagtagccgaaataagcatttatcacaagatgctaaattaattgcagcaaatatttttaaatctttacaaaaagtggctaaagaaataaatttaggtaaaagttttgaagaatctgttgaactaggtattaattcacttaatcaaaatgaaatagatttggactatcttgaaatagtggatgaagaaaattttaattatccaaataaatactcaaagaaattaaagttattaactgcagcttatgttgaaaatgtaaggctgatagacaacattgatatagaaatatgaa

SEQ ID NO: 311566 - DNA, 398 bp, Unknown
  Bacterial polypeptide expressing nucleotide sequence isolated from the Sargasso Sea
aaaagactttcaacagtatattattgtaaaaaaaatgatatctgatttatttatagatacctcagtcgagtcatttccaaccattcgagaaagtaatggcctagcacttagttctagaaactcatacttaactaaaagcgaaaaaaatcaagctagtcacatatataaaatgctaagattaggtaaaaatgagtttcaaaaagacatgttaaaaagtgaagacctaatcaatattatgacaaattacttaaccaaaaacacaacaataacgatagagtatttaaacattgtaaatcataaaaatttaaagaaagtaaaagaagcttcttcaaataatagaatattatttgcagggcatctaaatacaactcgattaattgacaatattaatttatagt

SEQ ID NO: 311567 - DNA, 484 bp, Unknown
  Bacterial polypeptide expressing nucleotide sequence isolated from the Sargasso Sea
atgataatttttaaaagcataaataaattaaataaagaagttaattttaaggcaaacatcggttttgttcctaccatgggagctttgcataaaggtcatatttctcttataaaatcatcaaaaaaaatatgtaaaaaaactttggtaagcatatttataaatccatcacaatttaatagaaaagctgatcttaataagtacccaaaaaatttaaaaaaggacatcaagattcttaaaaaaataaaagttgattacttattaattccaaaggtaaacgatttatataaactaaaaaaagataaaaaaataaaattaaaaaaaagagagaaaataatgtgtgctttacatagacctggtcattttgaaggtgttttggcggtaattaatcaatttttgattaaattaaaaccaaaatatatgtttttaggtgagaaggattatcaacaattatttttaataaaaaattttattaaaaataaattaa

SEQ ID NO: 311568 - DNA, 736 bp, Unknown
  Bacterial polypeptide expressing nucleotide sequence isolated from the Sargasso Sea
acatttaactttagttgataaatctcttagaacatcagaagtcacagttgtaagcatatttgtaaatcctcttcagttcaataaagcagaggattttaaaaactatccaacggcatatgacaaagatataaagattctaatcgaaaaaaaagtggatttgatattttttccagatcaaaaagacatgtatccagaagattttagtacctatataaatttaaaaaaatataatcatatattgtgcggaaaaaaaagaaaaggacacttttctggcgtcgcaataatagttttaaaattattttctttagtaaatccaaactttgcgtattttggggaaaaagattatcaacaattagtaattattaaaaagcttgttaaagacttaaatcttgatattaagattttctcaataagaacagttagagataaaaacggattagctttatcctctaggaataagttacttgataaggaagaaaaaataaaagcttcaaaaataaattctattttaaataaagtgaccttaaaaaaattacataatcaaaaaaatctatttatagaaataaagagaaaattaaattcatgtggtatttacaagattgaatacctagaagtaagagatgaaagatcactaaaactatatgatcccaccactagatgtaatgaaaattatagagtttttatagcggtcaaaatagggaaagtcagattaattgataataaaagagtaatttaa

SEQ ID NO: 311569 - DNA, 835 bp, Unknown
  Bacterial polypeptide expressing nucleotide sequence isolated from the Sargasso Sea
tatgaaaatattagaaaataagagagaattagatgaattattagctaaaattagggccaatgggacaaagattggacttattccaactatgggtagtattcatgatggccacttatctttggtagaaaattcaataaaagaaaattttttttcaataacatctatatttgttaatccaactcaatttaatgaccttaaagattttaaaaaatatccgcaaaataaaaaacaagatattgaaaaacttaatacagtgaaatgtgacgcagtattttttcctcagattgaagaactttatcctgaaggcataaaaagaaaaaaaacaattttaaaatatagagatattttatgtgacaaatttcgaccaggtcattttgatggggtgacaactgtagtaaaatcattatttgatattgttactccggatacagttttttttggagaaaaagattttcaacaattaaaaataatcaaagaattaattaaaaaaaataatttacctattcagttaatagattgtccatctgtgcgatcaaaaaatggcatgagtttatcatcaaggtataataattttaatactaatcaagaaattctttttaatcaaatttctttaaaaattaatgactgtgtaaatctattaaaaaaacaaattgatataaataatttaaaaaatctatatcaatatttagaagaagataagaaaattaaagttgattatttagaagttagagatgatgatgaattattacttacacaaaaaaataaaaatgcacgattatttatatctttttatattgaagatattcgcataattgataattttaaattatactaa

SEQ ID NO: 311570 - DNA, 838 bp, Unknown
  Bacterial polypeptide expressing nucleotide sequence isolated from the Sargasso Sea
ttgaacacattcagctcctatagaaatcttaataatgcgcttagaaatagaaaagggagtcttggtcttgtcccaacaatgggctcattacatactgggcacctttcattagttgaaaaggccgtaaaagaaaattcaaatgtaattatttcaatttttgttaatccaactcaatttgatagcaagtctgaccttaaaaattatccccagaacctaaaaaatgatttaaagcaactacaaaaattcaataatgtatttgtatatgtccctgatattcaggatttgtatccaaagaatactatttcaaaaaagtataattttgggagattagacaaaataatggagggggagtctagagtaaatcactttaatggagttgccactatagtagaaaagctttttaaaatatttaaacctaattttgcttactttggcgaaaaagattttcagcaattacttataattaaatcacttcttaagcaaaagagcctaaaagtaaaaataatttcatgtccaactgtaagagaaaacgatggacttgctatgagctcaagaaataaattactaaacaaaaaagagagaaaaactgcaacagtgctttatcgtactctgctagaagccaaaagattaatgaattcttctaagcctccagaaatagaaaaaactatttccacaaaatttagtaatattaaggatatagacctcctatattttaaaatattaaccgatggctcattctcagatctaaaaaatttgaagagtaaagaaaatgtcagagcgtttatagcttgtaatattggcaatgttagactaatagataatatgatattagaataaa

SEQ ID NO: 311571 - DNA, 835 bp, Unknown
  Bacterial polypeptide expressing nucleotide sequence isolated from the Sargasso Sea
tatgaaaataatcaaaaaaatatcagaaattaaagaaatagtatctaattttaagaaaaacaaaaaagaaattaatcttattccaactatgggcagtatacatgctggccatttatcattgctatctgaggctaataaatatgatggaataaatattattagtatttttgtaaatcctgcacaatttaatgatctaaatgattttaacaattatcccaatacattagaagcagatattaaaatattatcaaaaacaaactgcaaaatgatttttgcccctagtaaaaaagacatatatcctttaggtattaaaacggaaaaatcagtattcaaatacagaggtattttatgtgatctttttagattaggacattttgacggagtcacaacaattgttaaaattcttttagatttaatagaaccctcaaaagtcttttttggtgagaaagattttcagcaattaaagattattgagcaacttatttttcaaaataatttaaaaataaatttaattagatgtccatcaatacgagactcttatggcatgagtttgtcatcccgctattcaacattcagtaatgatgaaaaatcaaaatttaaaaaatgtgcacaaataattgatgcaaatttattaaaattaaaaaaaaattttaatcataaaattttagataacattaaaaatgaattaagaagttatggaatttcaaaaattgattattttgaattaaggaatgaagaagatttaagccttagtataaaaaatgaaagatcaagattgtttattgcattctatttaaataaagtaagagtaattgataacttcttgttatactaa

SEQ ID NO: 311572 - DNA, 730 bp, Unknown
  Bacterial polypeptide expressing nucleotide sequence isolated from the Sargasso Sea
atgctgataattaaagacatttctaatttacagtcatatttgactgcttatcaaaatcgaaaatactcaattggttttgtccctactatgggcgctcttcataaaggacatggggaacttattaaaaaatcaaaaaatgataatcacaaaactattgtaagtatttttgtaaatgaaaaacaatttaacagcaaagaagattttaactcttatcctaggaataagggtcttgactacgaattttgctctgacaacgatgtagatctattatttgaaccatcggcagaagaaatttacaacaaagatagaacaattttaaaaaatataaattttaaaaatattctttgtgataaatttagaaaaggacattttgatggtgtaatcacagtactagataaattcttcacaattataaaaagtaataaagtttactttggagaaaaagattatcagcaactcaagataattgaaaaatttattctaaaaaaatataaatctttacaattagtatctgttccaacaaagagaagtgaagaaggtatagcctattcatcgagaaatgaaaaattaactaaaaaacaattacaagattttgttagttttcatcaaaaagtagaaaattttttaaaatcattagaaaaaacatttgatattgaaattgcaaaccaaaaagctaaagatttcattgtcgaacaagatattgaagaattagactacttcgaattttaga

SEQ ID NO: 311573 - DNA, 856 bp, Unknown
  Bacterial polypeptide expressing nucleotide sequence isolated from the Sargasso Sea
ctgaccgggagcggtgtggtgaaaattgtacgatccattgccgaaatgcgtgacgtggtcgccgactggcgtcggatggacgccactgtgggtttggtgccgactatgggcgggcttcatgccgggcatttatcccttgttcacatggctggcgaacgttccgacaaagtgatcgcgaccctgttcgtgaacccggcgcagttctcggccgacgaggattttgacgcctatccccgaaatgaagacgacgactgtcggatgtttgaagaggcgggcgccagccttttgtttgcaccgcccatcgaggaggtctatccggccgaccacgtcacgaaggtccatgtggggggcttgagcagtctgttggagggtgaatttcgcccacaatttttcaccggcgtggcgacggtggtcagtaagcttttgatccaggccatggccgatgtggccgtgtttggtgaaaaggactaccagcaacttcaagtaatccgtcgcatggcccgagacttggacattccgacggagatcattggtgcgccgacggttcgcgagcacgatggcttggcgatgtcgtcccgcaaccgttatctgagcgaggacgaacggccccgcgctgctaagcttttttcggccatttccgacattgcgcgtgcgaccgccgaaggtgccgacccggcgcccctttgcgatgcggcagcacgccagttgactgaagctggatttcgagaggtcgactacgtcacggtccgcgatgcgaacactctagagcagtatcgctgctccgaggggcccggacgggtcttggccgcggcctggctaggcaaggcccgcttgattgataacgtggctgtataag

SEQ ID NO: 311574 - DNA, 832 bp, Unknown
  Bacterial polypeptide expressing nucleotide sequence isolated from the Sargasso Sea
atgctgataattaaagatatttctaatttgcagtcctatttgagcgcttatcaaaatcgaaaatattcaattggttatgtgccaacaatgggagctcttcacaaaggacatggtgaattaatcaagcaatcaaaaaaagataatcacaaaactattgttagtatttttgttaatgaaaaacaatttagtagtaaagaggattttgaaacctatccaaggaataaaggttttgactatgatttctgcacagacaatgaggtagacatactatttgaaccctcatctgaagaaatatttaaaaatgatgaaacactactaagtaataattattttaaagatattctttgtgataaatttagaaaaggacactttgacggtgttatcactgttcttgataaatttttttcaattataaaaagtaataaagtttattttggcgaaaaagattatcagcaactaaagatcatagagaaatttattgaaggaaaatacaaatctttagacttagtttctgtcccaacacaaagacacgaagagggaatagcttattcatcaagaaatgaaaaactaagtaaaaagcaaactcaagattttgtagattttcataaaaaagtaaaaaattttataggctctcttgaaggatctttagacattgaaacagctaaccaaaaagcaaatgattttatgaaattacaagatattgataagtttgattattttgaatttagaaatgatactgacttaagttttgtaggtactgtgcctcaagccagacttttttatgcaatctataaaggtaaagttagattaattgataatttaaaagtttaaa

SEQ ID NO: 311575 - DNA, 178 bp, Unknown
  Bacterial polypeptide expressing nucleotide sequence isolated from the Sargasso Sea
atgaaattaattaaaagtataaaatatctcaataagatcctagatcgatatagaagtgatggttttaaaattcacttaacaccaacaatgggagctttgcatgcaggacatttaaaattagttaaggagtcaaagaaactaaaatcaattgttgtagttagtatttttgttaacccta

SEQ ID NO: 311576 - DNA, 405 bp, Unknown
  Bacterial polypeptide expressing nucleotide sequence isolated from the Sargasso Sea
aatgaaaatttttgaaacagaaaatgacattgaagataatcggttaaacgcaaaaagtctaagtttaataccaactatggggaatcttcatgatggtcaccttagtcttattaaagaagctaaaaattataatgataaaactatagtatctatttttattaatcctctccaatttgggccaaatgaagattttaaaaattatccaagaactgtagtttcggatattaaaaaattaaaaaaaattgattgtgattatgcttttattcctcaagaaaattttgctaaagaattaaaattaataaaagcaccttcaatttcaaagaaattatgtggaaaagatagaccaggacattttgacggtgttttaacaataattaataaaattttttctgttattcgtcccca

SEQ ID NO: 311577 - DNA, 637 bp, Unknown
  Bacterial polypeptide expressing nucleotide sequence isolated from the Sargasso Sea
ctgatctcaacgcaggctgacctggatgcctttcactccaggcttgcgcaaccgcttcagttcgtcccgaccatgggaggtctgcatgacgggcacggagagctgatccgccgagcggcggcgcatggccccgtgttggtgagcgtgttcgtcaacccgcttcagttcggacccgcggaagacttcgatcggtatccgcgcagcttggagagcgatctcactctggccgatcggtgcggggcagcggcgctctgggctccatccgtccagatgatctaccccgatggagcctgtccctcccgccatgcagcggatgggctgcagcagcatctctgcggagctggccgtcccgggcactttgatggggtggtcacggttgtggcacgtctgctgcatctggtacggcccgccagcctctggctgggggagaaggactggcagcaactggtgatcctgcgtcggttggtggctgatctctgcttccctgtgaaggttcagggggttgccacggtgcgcgaagtcgatggcctggccatgagttcacgcaaccgatatctgacgtccgcggagcggcatcaggccgccaccttgcctgcggccctgcgggccgctgatgcaaccacgccgttggacatca

SEQ ID NO: 311578 - DNA, 844 bp, Unknown
  Bacterial polypeptide expressing nucleotide sequence isolated from the Sargasso Sea
ggaatgaagattgtgcacaaaaagtccgaattggagggatctatcaaggaggcaggaaccgaagctttaaccgcttttggtaacggtgccgtatacatggaaaaatttctgcaaaatccgcggcatattgaaattcaggtgataggtgatggaaaaggtacggtagtgcacctgggagaaagagattgttctcttcaaagaagacaccaaaaaattttagaagaagcaggttcccctgctctcaactctaacgttagggatagtattggcgaaactacatgcaacgccctatcgtccttgcattatcgtaacgcgggcacagtggagtttctctatgagggtggcgagttttactttatcgaaatgaatactcgtctacaagttgagcatcccgtaacggagatggtgactggcatagatattgtacgcgaacaaattaagcttgccagtggttcagatatttctttttcccaaaatgatataacctttaatggccatgctattgaatgtcgtattaacgcggaaacacctattgattttagaccttcccccggcaaagttaatacataccatccacccggaggaataggtgttagggtagattcgggattatactctggttacagcgtgcttccacattatgatagcttgatatctaagttggttgttcatgcaacgacacgaaacgaatgcctaatgagattaaatcgtgcgctcgaagaatatgttattaatggtattgaaactaccatccctttgcaccaagaaatcataaaaaatcgagattttgtaaatggtgactataatattcattggctcgagaattttgttgaaacacggtgac

SEQ ID NO: 311579 - DNA, 811 bp, Unknown
  Bacterial polypeptide expressing nucleotide sequence isolated from the Sargasso Sea
atgaaagtaattaaaaatacaaagataattaaaagaattttaaaaggttctagatcactttcatttataccaactatggggtcattacataatggtcatataagtttaattaaaaaagcaaaaagggataaaaacaaaatagttgtcagtatttttgttaatccaaaacaatttgaaaacaataaagattataagtcctacccaagaaacttaagtaaagacctgaatatactgaaaaaacaaaaaatagattttgtttttttgcctagagttaaggatatttacttatataaaactaaaaataaaatttatcttgataaatttagtaaaaatttgtgcggtaaatatagatctggtcactttaaaggtgttattgatatagtaaacaggcttgttgagatagttcgtccaaagaaaatttatctaggaaaaaaagattatcaacaactaatattaattaaaaaacatttttctaaaaataattttaaaattaaaataattgagtgcaatacgtatagagatgcttttggtttagccgagtcttcaagaaataaaagtttgaataaaaatcaattaaatgtggctagaaatgtgtaccaaattttaaaaaaaaataaattatttattaagcgaaatttaaaaaattacagattaaataatttaaagaaacaaattatatctcttggattaaaaatagaatatattaaactattaaatttaaaaacattaaaatatccaaaaattaatgaaaattttaatatttttattgcttactatttaggaaaaataagattgatagacaacatttaac

SEQ ID NO: 311580 - DNA, 811 bp, Unknown
  Bacterial polypeptide expressing nucleotide sequence isolated from the Sargasso Sea
aatgaaaatttttaaaagctttaatgttttaaataaagaaattaattttaatgaaataattggattcgtgcctacaatgggatcattacatgatggccacttatcgttaatcagaagtgctaaaaaaaaatctaaaaaagtattagtaagtatttttatcaatccaactcaatttaatgaaaaaaaggattttgataaatatccacgtaacttaaaaaaggatatttcgatattaaaaagattaaaagtaaactatctttttttacctagtaaaagagagatttatcaaaaaggtataaataaaaaaattaatattttgcaaaatgacaaaatattatgcgcaaaatatcgaaatgggcattttgagggtgttttagctgttgtaaatagatttatggaaaatatcaaagcaaaatatatatttttcggagaaaaagattttcagcagatttacctgataaaaaaatatttacaaaaaaaattttctataaaaataatttgctgtaggtcagtaagaaattttaatggtttgccattatcttcaagaaatattttgttaacaaaaaaaaatttaaaacaaagtgaagaaatatctaagcttttatttgagtttaaaaataaaattattaaaaattttataaatataaatcaaattaagttatataaatcaaaaataaatagattatgtgataagattgaatattttgaaatcagaaattcaaaaaatatgacaaaaaaaataaataaaaccaactttaaaatttttattgcatatagacaaaaaaaaataagattaattgataatatttaa

SEQ ID NO: 311581 - DNA, 784 bp, Unknown
  Bacterial polypeptide expressing nucleotide sequence isolated from the Sargasso Sea
ctgtctgaaaacatttgtttaattcccacaatgggagcaatacatgaaggtcacctatcacttgtagatattggaaaagaaacaaatttaaaaacgttggtatccatatttctaaataaaagacaattcaacaatgaggacgatttgaaaaattatcctatcgagcttgaacaagatattcaatttttggaaagtaggggtgttgattatatttttctgccccaggaaagctacatttaccctagtgtgggggtgacttctattgttcccaataaagtgggatatattctcgagggggcttcaaggcctggacatttcgaaggagttttaacagttgtaaatagactgtttgatttagtaaagcctagccatgctgtgtttgggaaaaaagatgcgcaacaattatttttaattaaggacatgattaatcggtttgatttaaatattgaaataatagaaggcgaaatatttcgagatataaatggccttgctttgagtagccgaaataagcatttatcgaaggatgctaaattaaatgcagcaaatatttttaaatcattacaaaaagtggctacagaaataaatttaggtaaaagttttgaagaatccgttgaactaggggttaatttatttaataaaaatgaaatagatttagactatcttgaaatagtagatgaagaaaattttaattatccaaataaatactcaaagaaattaaagttattaactgcagcttatgttgaaaatgtaaggttgatagacaacattgatatagaaatatgaa

SEQ ID NO: 311582 - DNA, 778 bp, Unknown
  Bacterial polypeptide expressing nucleotide sequence isolated from the Sargasso Sea
attaattctgttttcaacagtgtaaaaaaaactggttttgttccaacaatgggttctttgcataaaggccatgagtatctgataaaaaaatcattaaaacaaaatcatgtcacttttgtgagtatttttttaaatcccaaacaattcaatagtaaaagggacctaaaaaactaccctaaaaaacttaatgacgacattaagatctgcaaaaaaaatagggttgattatttgtttataccatccttcaaagaggtttattcttggaaaacaaaaaaaaaaagatttccaaaaattaataatattatggagaataaatatcgtaggggacattttgatggtgttattaaagtaatagataaattaatagatattattcctgctagcagaatgtatttaggagaaaaagattttcaacagattaaagttataaaagatttttttaaaataaataaaattaaaactaaaataattaaatgtaaaactataagagataaaaatggtttggcgctatcatcaagaaataaattgcttaataataacaatttaaaaaaggtagcagagcttgtaaaatttataaagaaaattaaattaaaaaactattcaattagttgcaaaaaaaaaactataaaaaaatttttaaaaaataataaaattacttatgattatgttgagtatatcaatttaaaaaaatttaatgtttcaaaaatacaatcttttaatgttagattatttattgctttctatataaacaaaataagattaatagataatatttaaa

SEQ ID NO: 311583 - DNA, 741 bp, Unknown
  Bacterial polypeptide expressing nucleotide sequence isolated from the Sargasso Sea
atatacatgccggacatttatcattgttatctgaggctaatacatttgatggaataaatattgttagtatttttgttaatcctacacaatttaatgatgaagatgattttaataattatcctaatacatttgaagcagatatggaaatattatcaaaaacaaactgcaaaatcatttttgccccttctagaaatcaaatgtatcctgagggtatcaagtcggaaaaaacagtattcaaatatagagatattttatgtgatttttatagattgggacattttgatggagtcacaacaattgttgaaattcttttcaatttaatagaaccctccaaagttttttttggtgagaaagattttcagcaattaaagatagtcgagcaacttatttttcaaaataatttaaaaattaatttaattaaatgtccatcaatgcgagactctaatggtatgagtttttcatcccgctattcaacattcagcaaagatgaaaaatcaaaatttgaaaaatgtgctaaaataataaatactaatttattaaaatttaaaaaaaattttaatcacaaaattttagataatataaaactagaattaagaagttatggaatttcaaaaattgattattttgaagtaagaaacgaggaagatttaagccttagtattaaaaatgaaagatcaagattgtttgttgcattctatttaaataaagtaagagtaattgataactttcttttgtactaag

SEQ ID NO: 311584 - DNA, 814 bp, Unknown
  Bacterial polypeptide expressing nucleotide sequence isolated from the Sargasso Sea
aatgataatttttaaaagcataaatagattaaataaagaagttaattttaaggcaaatattggttttgttcccacaatgggagcactccataaaggtcatatttcattaatcaaatcatcgaaaaaaatgtgtaaaaaaacgttagttagtattttcataaatccttcacaattcaataaagctaatgacttcaaaaattatccaaaaaatttaaagaaagatattgcgattcttaaaaagttaaaagtagactacttattggctccaaaagttaaggaaatttatagaaataaaaaaaatagtaaaattaaactaaaaaaaaaggataaagtaatgtgtgctctgtatagacctggtcattttgaaggtgttttggctgtaataaatcaatttttgattaaaattaaaccaaaacatattttttttggtgaaaaagactatcaacaattactattaataaaaaaatttgtaaaaaataaatttaaaattaaaattcatatctgtccaactatacgtggcaaagataatatagcattatcttcacgtaatatgttgttaagtaatactgatattaaaaaatcagcttatattgcaaatttaatacttaattttaaaagaaatatgaaaagaaatattttatttaaaaaaaatctaacaaatatcatcgataaaataaataatataaaaaaaattaaaatagaatatcttgaaattagaaataaaattaatttatcgaaaaattataatcaacataattttaaaatatttattgcttattataataatacggtaagattaattgataattattag

SEQ ID NO: 311585 - DNA, 181 bp, Unknown
  Bacterial polypeptide expressing nucleotide sequence isolated from the Sargasso Sea
atgaaagttgtctcaaatatagccgaattacgggcgctcttaggaaaatgggttggcaatagttcaagtataggttttgtacctacgatgggggcactgcatacagggcatttatcgcttataagtcgatcaataaaagaaaatgataagacatgtgtatctatttttgttaacccaaaaa

SEQ ID NO: 311586 - DNA, 670 bp, Unknown
  Bacterial polypeptide expressing nucleotide sequence isolated from the Sargasso Sea
tttgaaaatttttaaatcaatagaagaatttattatatctaaatctggattaggtaaattaactttcataccaactatgggcaatcttcataaaggacatgcctctctaattgatattggaaaagaatttaaaaatgatgtcattagtacaatttatgtaaataagcttcaattcaatgatcaaaatgattatcttagatatccaaaatcacttgataatgatattgagttgttagaaagacatggctgtaattatttacttattccagatgacaccattttagacgaaataatttcagtgaaagcgccatcaaagtttaacaagttatgtggtaaaaatagaccaggacattttgatggagtattaactattttaaataaaatgttcaaaattattgaacctgaaattgctatttttggtaaaaaagattatcaacaatttgttctagttaaagattttattaaagaaaataacttgaatattaaaattataggagctgaaactatcagagaggaatcgggtttagccttatcatcgagaaacaaccttctaacaagaaatgaaaaattaattgcaaaaaatattaataaagttttgattgatttaaaagataataaacaaactattggtttaaattttataaattccaaaaataaaatatttagaaaa

SEQ ID NO: 311587 - DNA, 832 bp, Unknown
  Bacterial polypeptide expressing nucleotide sequence isolated from the Sargasso Sea
gatgaaaattttcagaaaagctagtgaattagagccaaatttagtttcaatcaaagacaaaggccagtctattggtttagttttaacaatgggaaacttacacgatggacatttatctctcattagagaggcacaattacataacgaatttgtgatctgttcaatatttattaatcctactcaatttaacaatgaaaatgatttcaattcttatccaaagacaattgatgaagatatttctaaattagaaaatattggttgtaatttactcttcttacctgaagttcaagagatataccctaaaggattggcaaagaaaaaaattgtaaacaattttagaaatattttatgtgataaatttcgacctggccattttgatggagttactactgttgtggatcttttttttaatatgattaaaccaacgaatagttattttggtgagaaggattttcagcaagtaaaaataatacaagatttagtaaaaattaatcatcacaatattaaaataattcaatgtccatctgtacgagataaaatgggtatgagtttatcttcaaggaactctaaattttctaatgatcaattaaaaattttcaatgtattaggaaataaaattaaagaacatattaatctattaacacaaaatgaaattaataatttagatcaattaaaaatagagcttcttcaaaataatataaataaaattgactatttagagataagaaatgaaaataatttagaaataacaaaaaattattctgaagctagattatttattgctttatatattggtgatataagaattattgacaattttaagttatattaa

SEQ ID NO: 311588 - DNA, 700 bp, Unknown
  Bacterial polypeptide expressing nucleotide sequence isolated from the Sargasso Sea
aaagcaattcaaaaataaaattatagctagtatttatgtaaacaagcttcagtttaatgataataatgattacttgcgttacccgaaaacacttgatgcggatattgagcttcttgaaagacatggatgcgactatctattaataccagatgatataattttagaaaatattcagcgcatacaagcccctcttaaatcgacaaaattatgtggtcaaaataggccaggacattttgatggagttttaactatattaaataaattctttaaaattattgatccaaatattgttatttttggaaaaaaagactaccaacaatttattttagttagagattttattaagaataataatttaaatattaagataataggaggacatactattagagagccatctggtttggcattatcttcacgaaataatcatttatgtgattcagaaaagtctattgcagcaaaattatatgaagttctaaaagatattgaatctgaaaaagataaattaagcttagattttataaattcaaagaaagattatttagaatcttttggtattaatgtagattatttaatttcatgtgatccagaatcatttgaagaaagttatgaaatacataataaaaatttacttattgcaattgcggcctttgttggaaaagttagattaatagacaatttaaaacttacaaaactttaa

SEQ ID NO: 311589 - DNA, 697 bp, Unknown
  Bacterial polypeptide expressing nucleotide sequence isolated from the Sargasso Sea
atatgaagttatagtctctatttttgttaatcctttacaatttggaaaagatgaagattttgattcatatccaaaaactttaaaggaagataaattaaaacttataagtaaggaatgtgactacctctttctgcctaaatctgaagaactcttaaatggaattcatcaagaaacttcaaaatacaacaattttctttgcgggatagatcgtccagaacacttcaacggagtagcatcaattattagaaagtttttagaacttataaaacctaattcgatcatcatgggggaaaaagattttcagcaaaccctcgtaataaaagaactaatcatcaagcataatttcaaatgcaaattaataaccatacctactgccagagaaaattctgggttagcaatgtcttcaaggaacaattatctgacagaaacccaaaggatgcaggcagctaaaatatattcaacgcttgtagatacgaaaaatcttatttttaagaacggttttaagaaaaaagacttaaaaaataaaataaattaccttaaaaaaaataatataaatgtaatttattttgatctttttgatgcagagtctttgaaatcaataaatgaaagtccccacctaaagggtaattttgttttagcgactgctgcaaaaattggaaatacaagactaatagataatattgttttttcaatatag

SEQ ID NO: 311590 - DNA, 835 bp, Unknown
  Bacterial polypeptide expressing nucleotide sequence isolated from the Sargasso Sea
atgaaaatattagaaaataagagagaattagatgaattattagctaaaattaggactaatgggacaaagattggccttattccaactatgggcagtattcataatggccacttatctttggtagaaaattcaatgaaagaaaattttttttcaataacatctatatttgttaatccaactcaatttaatgatcttaaagattttaaaaaatatccgcaaaataaaaaacaagatattgaaaaacttaatacagtgaaatgtgacgcagtattttttcctcagattgaagaactttatcctgaaggcataaaaagaaaaaaaacaatttcaaaatatagagatattttatgtgataaatttcgaccaggtcattttgatggggtgacaactgtagtaaagtcattatttgatattgttactccagatgcagtcttttttggagaaaaagattttcaacagttaaaaataattaaagaattaattaaaaaaaataatttacctattcagttaatagattgtccatctgtgcgatcaaaaaatggtatgagtttatcatcaaggtataataattttaatactaatcaagaaattcttttcaatcaaatttctttaaaagttaatgattgtgtaaatctattaaaaaaacaaattgatataaataatttaaaaaatttaaatcaatatttagaagaagataaaaaaattaaagttgattatttagaagtcagagatgatgatgaattattacttacacaaaaaaataaaaatgcacgattatttatatctttttatattgaagatattcgcataattgataattttaaattatactaag

SEQ ID NO: 311591 - DNA, 805 bp, Unknown
  Bacterial polypeptide expressing nucleotide sequence isolated from the Sargasso Sea
atgaaaattattaaaaatatttttgagctaaataaggcaataaaaaattataaaaatattggttttgtacctactatgggaggtattcacaaaggtcatgcctctttaataaaaatttcacaaaaaaataataaaaaaacaatagtaagtatttttgttaatccgactcaatttaatgtaaaaaaggattttaaaaaatatcctagaaatattaagaaagatatatcgatattaaaaaaattaaaagttagttatttatttctacccagtgttgaagaaatatataaaaaaaaaatgaaaaagttcaatctgaaaaaatctgataaaattctatgtgcaaagcataggaaaggtcactttgaaggtgttttaaatgtaatgaatagattgttatcaataattaaatctaagaatgtttttatgggagaaaaagattttcagcaatgtaatcttattaaaaaaatcttaggtaaaaaatataatattaaaattattttttgtcctattataagagaaaagaacaaaattgcattatctacaagaaacaaattgttaactaattcagctattgaaagagcttctaaaatagctaataaactcataaacttaaaaaaaatatcaaaaactaataatttaataaatttatcaaaatttaaaaaaaatttagaaaataaatataatattcaaattgattatcttgaatttagaagtgaaaaaaatctaaaattaaataaatttaagtcaaaatacagattgtttatagcttatcatattaacggggtaagacttatagataatttttgat

SEQ ID NO: 311592 - DNA, 811 bp, Unknown
  Bacterial polypeptide expressing nucleotide sequence isolated from the Sargasso Sea
aatgaaaataattacaagcatttttgatttaaataaagagattaaaaactatagaaatattggatttgtgcctaccatgggtggaatacatgagggtcataagtccttaataaaagcctcacaaagtaaaaaaaaaatgactattgttagtatttttgtaaatcctactcaatttaataaaaaagatgattttaagaaatatccaagaaatattcagaatgatattgctatattaaaaaaattaaatgtagaatatttattcacacctaatgccaaagaaatctacagatttaaagctaagaaatttaatttaaaaaaaaaggacaagattttgtgtgcgaaatttagagttggtcattttgagggtgttctaaatgttatgaatagattgctgaccattataaaatcaaaagatttgtatatgggtgaaaaagattatcagcagttatatctaataaaaaaattcctatcaaaaaaatttaaggtacgtgttaattcatgcccaactgtcagaataaataacaaaattgcgttatcaactcgaaacaaattattaaaaaagggatcctttaaaaaagcttcagaaatctcattatttttgaaaaaaataaagtttaaatcaaaattagagggttctaaattagcctttaatttacataattacaaaaaagaattagaaaaaaaatacaaaattaaaatagattatttagaatttagggacgaaaaaaatttaaagcttaataatttcaaaaataaatataggctttttgtggcttataaaatagacaatgttagattaattgataattat

SEQ ID NO: 311593 - DNA, 841 bp, Unknown
  Bacterial polypeptide expressing nucleotide sequence isolated from the Sargasso Sea
attgaaaattataacttcagtagaagaccaaaaaaaattatctaaagagctaattaatgataacagaaatatatcattgatacctactatgggtaatcttcatttgggtcatgaaagtctgttaaaatcctctacagaagatgactatagagtttcatctttattcattaatccattacaatttgatgatattaacgattataataattatccaaagacaatagaaaaagatattgagatattaaaatcatataagatagattgtttgtttttaccatataaggaaggaatcatttcaaatgtttctaataatgagcgtttaagtttgccgaagtttactgatacattatgtggaaaatatcgaaaaaatcattttcagggagtattcataattgttaaaaaattatttgagatagtacaaccatcaaaggcttactttggaaaaaaagattatcagcaaattttgcttatcaagcatcttgtgaatgaatattttggtggtaatattgagattattcaatgtgaaactataagagaaaataatggtttggcaatgagctctcgcaatagtcatttaacccaagatcagagagatctagctgctattgtctacaagaaaatttgttttttaaaggaagcatttcttgataataaagatttatttgatcaacataaaaaaattgtgctaaaaaatttattagatctaggaataaaaatagaatatcttgaaatcttgtcaagaaacactttaactaaacctaggcaaaatgataaagaagtaaatatctttgtagcattttatgttggcaatactcgtttgatagataatatagaaatataa

SEQ ID NO: 311594 - DNA, 820 bp, Unknown
  Bacterial polypeptide expressing nucleotide sequence isolated from the Sargasso Sea
ttgaaaatttttaaatctatacaagaatttaatgaagcaagagatggtttaggtaaattatcttttgtacctacaatgggcaatctgcaccagggtcattcatctcttgttgatattgcaaagcagttaaaaaataaaattatagctagtatatatgtaaacaaacttcagtttaatgatgataatgattacttgaattacccaaaaacactaaattcagatattgaacttctagaaaaacacggctgcgattatgttttgatacctgatgattctattctagataatattcaatcgatgcaagccccacctaagtcaaaaaagttatgcggtcaaagcaggccaggacactttgagggagtgctaactatattaaacaaattttttagaattattgatccaaatattgttatctttggtaaaaaagattatcaacaatttattatggtaagagattttattaagaataataatttgaatattaagataataggaggaaatactgttagagaatcttcaggtttagctttatcttcaagaaacaatctcctatcagctcaagaaaagttaattgcagcaaaactatatgaagttcttaacgatattgagtctaaaaaatataatttaaatacagacttcattaattctaaaaaagattatctagaatcttatggcattaaagtagattatctaactacatgtgatccagaatcacttgaagagagttacgagataaacaataaggatttacttgttgctatagccgcctatgtaggaaaagttagattgatagacaatttaataattagaaaactttaat

SEQ ID NO: 311595 - DNA, 529 bp, Unknown
  Bacterial polypeptide expressing nucleotide sequence isolated from the Sargasso Sea
cttggcgacacgctcgaaggcgaattccgccccgggcttcttcaagggcgtgtgcacggtggtgatgaagctgttctgctgcgtgcagccgcgtgtggccgtgttcggcaagaaggactaccagcagttgatgatcgtgcgccgcatggcgcatcagtttgcgttgccggtcgacatcgtccccgccgaaacagtccgcgcggatgatggtctggcgctgtcgtcgcgcaatgtctacctgaccaacgaagagcgcgccgaagcccctgagctgtaccgcacgctgcatcaggtgcgtcaggacgtgctggaaaccgtgctgcagggccaggcgtcgcacgaagaggtgaccaccaaggcaatggaatatctgcgtggccgcggctggcaacccgactacgtcgccgtgcgccgccgctccgacctgcaagaaccgacgcccgagaacatcgctgccggcgaacccctggtcgtactgacggctgccaaacttggcaagacgcgcctgatcgataacctcgaaatctga

SEQ ID NO: 311596 - DNA, 829 bp, Unknown
  Bacterial polypeptide expressing nucleotide sequence isolated from the Sargasso Sea
atgaaggttgttcatactatttctgatttaaataaccagttaataaactataaattaaaaagcattgggtttgttccaactatgggctccttacatgatggtcacatttcattaatccaaaaagcttttttaaaagcagaaatagtggtggtaagtatatttgtcaacccaacacagttcaatgaccccaaagactttagtaattatccagttaattacaatgaagatcttgaaaaattagaaaaacagaatgttgatgttgtttttattccaaaatctgtagcagagctttacagcaatgaaaagcctcttaatgttgatttaaatgggattgatgaagttatggaaggttttcaccgaaaaggtcattttaatggagtagtcagggttttaaatttattgttttcattgataaaaccacagtatgctttttttggagaaaaggattatcaacagttgatggtagttaagagtatggctaaaaatcattttaaaaatatagaaatcattggatgtcctaccaaaagagatcaaaacggattagccatgagttctagaaatttattgttaaaaaaggaagatcataataaagctattaaactaataaagttgcttgaagattctaagcatatgtttcaaactcatgaccgcaaatttatagaggactattgcctgtcaaagttgaaaaaatttagtattccagaatattttgagattagagaaatttcttatctaaaaagagtggaggataaaaccactaaacaaagagcatttgttgcagcaaaaattggagacattagattaatcgataatatagaaatcaattaat

SEQ ID NO: 311597 - DNA, 685 bp, Unknown
  Bacterial polypeptide expressing nucleotide sequence isolated from the Sargasso Sea
atggggaatctacatgatgggcacctatctttaattgattatgcgcgaaatatatcagattacatagttgtcagtatttttgttaaccctacccagtttgtagcaggagaggatttcgataagtatccgcgtactctagatagcgatattaaatctatttcaaatttaaatgtagatttagtttttacaccagatatcgaagaaatttatccggctaatgatcggacatctgttgaagctcccgtatccgaattagagtcaattcactgtggtaagtaccgtccaggtcatttcagaggagttgcaacagtcgttacaaaattgtttgatatagtaaagcctgatattgctatttttggagagaaagactaccagcaattattaattatacgttatttagtcaagagtcttttgttgccaatagaaattatcggcttacctacggttagagaaaaaagtggcttagcaataagctcgagaaactcttacatgtcaaaatctgagagacaacaagcaccaatgctatatgaatgtatcagaaaaactattaaatcaatcaggagtggagataaagactattcagaattagaaaaaaaggcaaaactctttctaaaaaaagcaggattcaaaatagactattttaatatttgtgattcctgcacattaaaaacgccaacaaagaaaa

SEQ ID NO: 311598 - DNA, 683 bp, Unknown
  Bacterial polypeptide expressing nucleotide sequence isolated from the Sargasso Sea
aatgattcaaacagcatctattgctgaattacgatctcattgttcgtcatttaaagatcataaggaatgtattgcctttgttcccactatgggaaatttacatgatggtcatttacatcttattgactatgctcactctcttgcatcaaaagtcgttgtcagtatttttgttaaccaaactcaatttggacctaacgaagattttgaatcatatccacgtacacatgaagctgatttatcctattgtaaccaacataatgttgatcttgttttcatgccatcccaagatattatgtatccatatcatcctttttctactacaattcatgttcctaatttatcaactcgtctttgcggtcactctcgacctcacttttttgatggcgttgcttcaattatcgttcgtttatttcattgtgtctccccacacatcgctatttttggagaaaaagattaccaacaattttgtctaattaagcaacttgttgatgatttattcattccagtagatgttattgcggccccaacaattcgatcttcgtcaggattagcattaagttcacgtaatagttatctttcaaaatctcaactagatgaagcagctattatttatcaggcactatgttacgtaaaatcacactatgaacaaggcataactttagcatccatattaaaaaactctt

SEQ ID NO: 311599 - DNA, 490 bp, Unknown
  Bacterial polypeptide expressing nucleotide sequence isolated from the Sargasso Sea
aatgattgtcgtctcagacacggccgccctagcagaacacctgactccactcagagaacgcgctgacacgatcgcgtttgtgccgacaatgggcaacctgcacgaaggccatcttgcactggtggatcaggcacgcgcggcagcagatgcagtggtggtgtctatcttcgtaaaccccatgcagttcgcggcacatgaggatctggatacctatccccggacgctcgacgacgacctcagcgccctgcgggaggccggcgtggatcttgtcctgacgcccagtgcggatgatatctatccggacactagcgcccgacacaccgcgatccacgtgcccgaattaggtgaggcgctgtgcggtagggatcgacccgggcacttcgatggcgtgtgcaccgtggtctacaagctgttccaactggtcgggcccgacattgctgtactaggcgagaaggatctgcaacagttactgatcatcaaaaagatggtt

SEQ ID NO: 311600 - DNA, 615 bp, Unknown
  Bacterial polypeptide expressing nucleotide sequence isolated from the Sargasso Sea
aatggttaaattaattaaaactagagatgatttgaacgccattagaaaaaacttttcaagaaataacacaattggctttgtaccaacaatgggcaacttacacaaaggacatttgtctctaattgaaaagtctattgaaaaaactgatattacgattataagtatttttgtaaaccctactcaatttgggccaaatgaagattattcaaactatcccaggacactaaaagaagatcttcataaaattgaaagtatatcaaaacaaaaagagttgattgtatttatacccaaatcagtgtccgaaatatacccagaggaattcacaacggagttttatattccagaactagcaaattgcctatgtggtactagccgacctggtcatttcaccggtgttttaagcgtcatatatcaattatttaaaatagttgaacctaacattgcattttttgggcaaaaagattatcaacagttttgcctaattaagaaatttgcttctgatttgttcccagaaatatccatccaaagtcttccaattattagagaaaaaaatggcttagctatgtcgagccgtaataattatatgaacgaagaagaaattaatgattctttaaa

SEQ ID NO: 311601 - DNA, 691 bp, Unknown
  Bacterial polypeptide expressing nucleotide sequence isolated from the Sargasso Sea
agtaattgcaactatttttgtaaaccctcttcaattcgcgcctaatgaagattttgaagcgtaccctcggcgtgaagatagtgatattcggaaacttgttgaagaagacatcgatttactctttgcacctgacgttagcgaaatgtatcgccccgatgcaacaacaacaatcagtgtgggggggttaaccgattgtctttgtgctctctctagaccaggcttctttgatggcgtcgccacagttgtaaccaagttattgctgcaagcgcttccagacatagcaatattcggtgaaaaggactatcaacagcttttagtaataaaacgcctcgcaactgacctagatatacctgtagagattataggtgctccaaccatccgcgaagaagacggcttggcattatcttcaagaaacgtttatctcgatactaaatcccgttctattgcaccttccatgtacaatattttaacccagtatgcgtccgatatatccaacgggaatgatataaagaaaagcctacaacttgctaaacaaaatatgcgaaaatcagggttcgagaaaattgagtatttagatctccgcagttctcaaacactccaagcctgtaatgacattaaaagaccaagccgccttttcgctgccgcatggctaggttcaaccagattgattgataatctggcaattacctga

SEQ ID NO: 311602 - DNA, 750 bp, Unknown
  Bacterial polypeptide expressing nucleotide sequence isolated from the Sargasso Sea
aacaagcacttaaagtggcagaaaaagtgattgtcagtctttttgttaatccaaaacagttttcaaggggtgaagacctggacagataccctagagttttcgctaaggatttagccgttctatccgaattaaatgttgatatggtttttactccatctgtggacacaatgtatccaaagagctttcagtcccaagtgtctaactttggttttgcgcaaggcttgtgttcccttacaagacctgactttttttcgggggtctgtactattgtgcttaagttgttcaacattattagtccagaatttgctgtttttggtaaaaaagattatcagcagttaagagttattcaagagatggtcaaggatttgaatttaaaaacggaaatactttctggagaaattgttcgttcgcaaacaggcttagcgctgagcagtcgaaatcagtacttatcttcttctgaattagaacaagctagttattttccaaggtctctgcgggttgctgaaactcttttgaaacaaggtgttgactgtgtacaagctgttatcttgggagtgaaaaagtccttactcagctatgatttgcaacctgagtacttacagttaagaggtttatctacttttaaaaatattgaagggaaaattgtagaaccttctatattacttgcagctattcgtcttgggaagacacgactgattgataatattgaactccacagaggagcgatagttcatgtttcaagaatttaaa

SEQ ID NO: 311603 - DNA, 720 bp, Unknown
  Bacterial polypeptide expressing nucleotide sequence isolated from the Sargasso Sea
aatgaaaatttttgaaacagaaaatgacattgtaaataatcacctaaatgcaaaaggtttaaatttagttccaactatggggaatctacatgaaggtcaccttagcctcattgaagaagccaaaaattataatggaaaaactatagtatctattttcattaatcctctacaatttggaccaaatgaagattttaaaaattatccaagaactattatttcggatattaaaaaattagaaaaaattaattgtgattatgcttttattcccaaagataattttgctaaaaaattaaagttaataaaagcaccttctatttcaaagaagttatgtggaaagaataggccaggccattttgatggtgttttaacaataattaataaaattttttctgttattcttcccacacatgctttttttgggctgaaggactatcaacaatttatattgattagagaatttacaagaatttcttttcctaagattaaaattgttggattacctatcattagagagaaagatggacttgcaatgtcttcacgcaataatcttttaaccaaagatgaaagaaaaattgcaccaaatatttatgaaggccttctatggatagaaaataatagaaaaagatttacaatatccgaacttataaagctatcatcagaaaagctaaatcaaaataatattcaaatagattatttaggtatctttgataagaaaaacct

SEQ ID NO: 311604 - DNA, 601 bp, Unknown
  Bacterial polypeptide expressing nucleotide sequence isolated from the Sargasso Sea
atgttaattatttccgatattgctgagcttgaagaggcattaaggatacagcgaagaaaattcaagcacatatccttagtccctacgatgggaaatcttcatgagggccatttaaagttagtaaaccatgcaagtgaaatttcagattttgtatgtgtttctatttttgttaatcctcttcagtttgggccaaaagaggattacagtgcctatcccagaaccttagacgaagatattagtaaactagaaaacacaaattgttctcttctattccttccagagtcaaaggatttactacttaatatacgagaatgtaaagccgatccttacttatcctcaatcttatgcggaaaaacaagaacaaatcattttgatggagtagtaacgatagtcaacagactatttgaactatttaaaccaaaatcaacttattttggcgaaaaagattaccaacaattgatgattattaaagagtttattaccagaaatgatttaaatattaagattaaaggaatatcaactgaaagagaggagtctggtttagcaaaaagtggtaggaataagtatttgagcaatgacgaaaaagagaaggcaaccttaa

SEQ ID NO: 311605 - DNA, 706 bp, Unknown
  Bacterial polypeptide expressing nucleotide sequence isolated from the Sargasso Sea
aatgaaaataataaaaaaaatagattctattaaaagttatggagacatagtatttgtcccaactatgggagctttacatgagggacacctttcgatagttgaagaagctaaaaaatggaatcttcctatttgtatgtcaatttttgttaacaagctacagtttaataataaaagtgactttgaacaatatcctcgagacatagatagagatataattattgctaaagaaactggagtaaaaatcttgtttcttcctgaatctgaatatttgtatgaacataaaaacttttcaataatttcttcaggaaagcttgggatggagcttgaggggaagtcaagaccaggacattttgatggagtattgtcgattgttgacattttgcttcaactagtacagcctaagtatgcaatctttggtaagaaggatgctcagcagttctatttaatatcatctatcttaagaaagagacacaggaaagttaattttttagctactcaaacggttagggaacttgatgggcttgctttaagtagtaggaatgctttattaagtagttcttctagaaaagaatcagtaggtatttttgaatgcctaaaatttgttgcagaagatattcttaagaataaagatattaatagttctattcaaaaaggtaagatgtacctacaaaaatattctggaatagttttagactatttggtagtt

SEQ ID NO: 311606 - DNA, 500 bp, Unknown
  Bacterial polypeptide expressing nucleotide sequence isolated from the Sargasso Sea
gccaatgaaaggagaggcgagaccacattttttcgctggtgtcgccacggttgtgtccaaactgttcaaccatattcctgctaattttgctatttttggtgaaaaggattttcaacaacttgcggttatccgccaaatggttcgcgatcttgacataaatatcggcatagtagctcatccaacaatccgcgaggcagatgggctagccctctcatcgcgcaatcaatacttaacctctgcacagcgtcgccttgcaccacagatttatgcccaaatgcaaaacacaagcgcacttatcaataacggaaccgatattaacgctgctatttgtcaagcaaaaaaccagctgcaaaaagctggatttggtaagattgactattttgatcttcgccagccagatgatttccaaccttgcgagaaaccaacagccacaagccgaatttttgttgccatatggctcggttcaaccagattaattgataattgtgctttaggatagc

SEQ ID NO: 311607 - DNA, 737 bp, Unknown
  Bacterial polypeptide expressing nucleotide sequence isolated from the Sargasso Sea
tatgcaaattatttctgactctgattaccttagaactgctttaaatgaagaacgcaggaaaggccgttcgctggcttttgttcctactatgggaaacttacataagggacatatggaattggtaaaccgcgctaaaactctggcagatattgttatcgtgagtatttttgtcaatcccctacaatttggttcagatgaagatcttgaaaaatatcctagaacactttcaacagataaagctttgctattctctgaaggaattcatactcttttcgttccaacggaaatagatatctatccaaatggccgagagcaagaaacgactatagtggttcccgaaatttctaaaattctctgtggcaaagataggccggggcattttgaaggtgtggcaacagtagtaactaaattgctaaatttggttacccccgattacgcgattttcggtgagaaagactatcagcaactttctattatccgaaaacttgttcatgacttaaaatttgacacaaatattgttgctgtcggcacagtgcgcgatgacgacggtctggctctgagttctagaaatatgtatttaaatgcagatgaacgcaagttagctcctctactcttcgatacacttgcccattgtagagatgcaattgccagtggcttcgataattttctggagcttgaatctcatgctcgctttgcacttatcgaatcaggcttttcacttgattactttaacatac

SEQ ID NO: 311608 - DNA, 763 bp, Unknown
  Bacterial polypeptide expressing nucleotide sequence isolated from the Sargasso Sea
ttgacacttgttcctacaatgggaaaccttcatatgggtcacatttcccttatagaggctgctaaaaaagttaacaatccaattatttcaactatttatataaataaacttcaatttaatgacaaaaatgattatttgaaatatccgaagacaattgatgatgatattgagctgttagataaacatgggtgtgattttttattaataccagatgattcaattttaaaaaatattctaacaataaaggctcccaataaatcaaaaaaactttgtggtataaataggccaggtcattttgacggagtgttaacaattgtaaataagttatttgatattattaaccctcatagtgtggtatttggcaaaaaagattatcaacagttaatcttaataaaagactttatccaacaaaataaatctaatataaatgttataagtgccgaaactctaagagatgttaatggactagccttatcatcaagaaacaacttactatcaaaagaagaaaaattaattgcttcaaaattatatgaagtacttgttagtataaataaaaataaaaatttcttaactcctaaattgttagatgaaaaaattgaatatcttaattctataggttttaaagtagattatttgacagcatgtgacacaaatacccttgaggagtcatttgaaatcagaaataaagatatacttattgctatagcagcaacaatcggaaatataagacttattgataacatgatcctctcaaaactttaat

SEQ ID NO: 311609 - DNA, 805 bp, Unknown
  Bacterial polypeptide expressing nucleotide sequence isolated from the Sargasso Sea
tttgcttaagggtcataatgatatttgtttagttccaacaatgggtgcccttcatgatggccacgtctcattaattcataaagcaaaagagactggattaaaaaccgtagtatcaatatttgtaaataaacttcaatttaatgacgaacaagattttgttaattacccccgagatattgaaaaggatataaagattttaaatgatttagacgttgattttgctttcatacctgatgaagaaactatttatccaaaatctggatttgagaatttatacgcgggaaatcttggaaataaatatgaagggtcgtcacgtccaggtcattttgatggtgttctaactatagttaatcggctttttcaattaattcgtccacacactgtgatttttggttcaaaggacatacagcagttgtttttaattaaaaaattaattttgaataaaaaatacgatataagaattattgagcaaaagactacaagaaccaaaacgggtttagccctaagtagtcgaaataaactattgactaaagaaggcatgaaaaaagctgaaaatatttttaaagctttacttttagttcaaaatgaacttgaaaaatcaacaaatttaattgcaatcgataacaaagcaaaatcattacttgtttcagaaaacattcagttagactatttagaaattttagatatgaatacattttcaccacccaaaggagattcgaaagattttgttattattattgctgttgtaattgaaggggtaaggttaattgataatattcgattcaactatgaggaaattaaatga

SEQ ID NO: 311610 - DNA, 763 bp, Unknown
  Bacterial polypeptide expressing nucleotide sequence isolated from the Sargasso Sea
tctggttccaacaatggggtctcttcatgaaggacatttgtctttaataaggaaagccataagtgaaaatgaaaaagtaattgtttcaatttatgttaatccattgcaatttaataatgttaatgacttaaaaaagtacccgcgtgacattaaaaacgatcttcaaagattagagactctaagtgacattatagtttacgttcctgatgataatgatatatatgaaaaagacataaagaagaaaaaatataattttggtcatttcacaaaaataatggaaggtaaaatgagacctggtcattttgacggcgttgcaactgttgttgaaaaacttttaaggatgtttaacccctctaatgcatattttggcgaaaaagattttcagcagctaattttaattaaaacattagtaaaaaagcaagaactaaaagttagtattgttggatgtgaaacaattcgagaagatgatggccttgctatgagctcaagaaataaattacttaacagctcggaaagaactattgcaggtaatgttattagattactaaaaaaagccaaaaaactttataaaagctcaactaaagaggaaacaaaatttaatataataaaggatgccctaatgattgagaattttaatttagagtattttgagatacttgatatctctgagctttcagggtttctagaagaggagaaagaaattagagcatttatagcatgtaaagttggtaagattaggcttatagataatataaaaatttaa

SEQ ID NO: 311611 - DNA, 853 bp, Unknown
  Bacterial polypeptide expressing nucleotide sequence isolated from the Sargasso Sea
aatgcaaatagtcaagaatataattgatttaaataatactctcaaatcaagcaaaaaagaagaaaaaaaaactggactagtgccaactatgggttcattacatgaaggtcatctatcactaataaaaacagcattgaaatcctgtgatgaagtttgggttacaatttttataaatcctactcaatttaatgatcctaaggactttgagtgttatccaaaagattttgaaaatgatattaatacaattaattcaatctcaagtaaaattaatctatttattcctgaaagtgtaaatgagatttacaaagatgatattactgtagatgaatttgaacttgggtttgtaaataaagtactggaagctagatcaaggcctggtcattttgatggtgtggcaacaattattaataaactgtttaatatatttcttcctcaagttgtattttttggagagaaagactttcagcaaacactggtggttagaaatttaattgatagcttctttccaaatattagtttagttatatgctcaactgtaagaaatgaaaatgggttagcattaagctctaggaataaattgttatcagcaaattcctataaacattgtggaataatttttggctgcttattatttgctaaggaaaattatttgaaaattgattatgcagatttattaaataaaatcaaaagtaaaattgaaaaaatcaatgagtttaatcttgaatattttgaaattagagatgaaatcactttggagccttttggtaagtctaatgatgagggaagatttagaggatttatctgcgttaaagtagaaggtgtaagattaattgataatcttcttttagattaa

SEQ ID NO: 311612 - DNA, 841 bp, Unknown
  Bacterial polypeptide expressing nucleotide sequence isolated from the Sargasso Sea
atgaaagtcatcagctcgatccatgaactgcgcgaccagctgcgcggccagaaccgcacggcgttcgtgccgacgatgggcaacctgcacgaagggcacctgtcgctgatgcgccttgcgcgccagcacggcgacccggtcgtggcgagcatcttcgtcaaccggctgcaattcggcccgaacgaggatttcgacaagtatccgcgcacgctccaggacgatatcgagaagctgcagaaggaaaacgtctacgtgctgttcgcgccgaccgagcgcgacatgtacccggaaccgcaggaataccgcgtgctgccgccggacgatctcggcgggatcctcgaaggggaattccggcccggcttcttcaccggcgtgtgcacggtcgtggcgaagctgatggcctgcgtgcagccgcgcgtcgccgtgttcggcaagaaggactaccagcagctgatgatcgtgcgccgcatgtgccagcagctcgcgctgccggtcgacatcatcgccgccgaaaccgtgcgcgacgaggacggcctcgcgctgtcgtcgcgcaatcgctacctgtcggccgacgagcgcagcgaagcgcccgaactcgcgaaaacgctgcaacgcatccgcgaaagcgtgctcggcggcgagcgcgacctcggcaagctcgaggaaatggcccgcacgcatctggccggccgcggctgggcgcccgactacatctcgatccgccgccgcgcgaacctgatcgcgccggacgcggcccagctcgaagccggcgaaccgctcgtcgtcgtcgccgccgcgaagctcggcgcgacgcgcctcatcgacaacctggaaatctgac

SEQ ID NO: 311613 - DNA, 829 bp, Unknown
  Bacterial polypeptide expressing nucleotide sequence isolated from the Sargasso Sea
atgataattttaaaagataatgaacatatatttaataataaaaacctttgtctcgttccaacgatgggagctctgcatgaaggccacattgcattaattaatgccgcaaaaaaaacagaacaagaagtaatagtttctatatttgtaaacagacttcagttcaatgatgatttagattttaaaaattatccaagagatttagaaaaagatatttcaatacttaatcgattaaatatagaatatgctttttttcctgatgaggagtatatgtttcctgaatcaggttttgataaacttgatgcaggtaatttaggaaaaaaatatgaaggaaattctagacctggtcatttcgatggagtattaacagtcgtaaatagattatttgaattgattgctccaaaaactgcagtgtttggagcaaaagattttcaacaattgtttttaattaacaagttgattttagaaaagaaatacaatataaaacttattgaaaataagacagtaagaaatagttcaggtcttgcattaagcagccgtaatcaacacctgtcaaataagggtattcatcaggcaagttttatttacaaatcattgaatgccgcaaaagatgaatttataaaaactaacaacacaatagatgcagtcaaagttgggacagatatattatttgataacaatattgatttagattattttgaaattcttgatcataaaacattttcacctccaaaaaatactacaaaaaaatttataatcattactgctgcttatgttgagggtataagattaattgataatattcagtttgaagttggagctacaaaatgaa

SEQ ID NO: 311614 - DNA, 826 bp, Unknown
  Bacterial polypeptide expressing nucleotide sequence isolated from the Sargasso Sea
aatgaaaatttttgagacagaaaatgatattaaagataattgtctaaacgcaaaaggtttaaatttagttccaactatggggaatctgcatgatggccatctaagccttattgaagaatctaaaaattataaaggtaaaactatagtatctatttttattaatcctctccaatttggaccaaatgaagattttaaaaattaccctagaactatcatatcggatattaaacaattagaaaaaattaattgtgattatgcttttattcctcaagatgattttgctagaaaattaaatttaataaaagcaccttcaatttcaaaaaaattatgcggaagtaatagaccaggtcattttgatggcgttctaacaataattaataaaattttttctgttattcttcccgattatgccttttttggtttaaaggattatcaacaatatatattaattagagaatttacaaaaatttcttttcctaggattaaaattgttggattacctattattagagagaaagacggacttgcgatgtcttcgcgtaataatcttttgaccaaagatgaaagaaaaattgcaccaaatatttatgaaagtcttttatggatagaaaacaatagaaaaaaattcacaatagcagaacttataaaactatcatcagaaaggctagaaaaaaataatattcaaatagactatttgggtatctttgataagaaaaatcttaagaaagttaaaaattttgaagaaggcgctttaattgctgttgccgcaaaaataggtaaagtaagattaattgataatatcattcttgataagagcaagaattaa

SEQ ID NO: 311615 - DNA, 820 bp, Unknown
  Bacterial polypeptide expressing nucleotide sequence isolated from the Sargasso Sea
ttgatagtttttaattccataaaagagtttaataaggctaaagaaaattttgatagtttaagcttcattcctactatgggcaatcttcatagaggccatatatcactcattgatactgcaaaggaatacaaaaataaagttattgcttcaatttatataaataaacttcaatttaacgataaaaatgactatttaaattatccaaaaacaattgaagatgacattaatattcttgaaaaacatggttgtgattatgtactaattccagatgaatcaataatagaaaatattataaatataaaagcaccaccaatatctaataagttgtgcggccaaagtcgacctgggcattttgatggggttttaactattttaaataaattttttcaaataatagatccagaaattgttttctttggtaaaaaagactatcaacaatttgttttggtaagagattttattcttaataataatctaaatattaaaatagttggagttgacacagtaagagaagattctggtttagctttatcttcaagaaataatcttttatcaaatcaagaaaagataattgcaactgagttatataaggcccttaaagatattgctatcaacaaaaccaatttaaactcaaacctaattaatttaaaaaaagattatttaaaatctctagacattaatgttgattatttaatttcatgtgatcctgatacgtttgaggagtgctataaaataaatgaaaaagatatattagtcgcaatagcagcatatgttggaaaaattagacttattgataatataaaactcacaaaactttaat

SEQ ID NO: 311616 - DNA, 826 bp, Unknown
  Bacterial polypeptide expressing nucleotide sequence isolated from the Sargasso Sea
tctgaggcagcgtatatcgagttggcgggctgagggtcaaacggttagccttgtgcccacaatgggtgcgttgcatgatggccacttatctttgatcaaaattgcacaagaaaaatgtgatagagtagtagcctctatattcgtaaacccgaaacagtttttgccaaacgaggatttcgagaagtatccgagaaacgaagacagcgacattgaaaaacttgttgaactgggcaccgaccttcttttttctccaaatgcatctgagatgtatcgagcagacgcctcaactgcggtcgtgatatcccaactaaccgattgcctttgcgccacctcccggcctggtttttttgatggcgtgggaacggtagtaaccaaactactaatccaaacattaccagatatagctatatttggggaaaaggattatcaacagcttttaattatcaaaaggctagcccgcgatcttgatattcctacaaagattattggggcacctactattagagaaatcgacggtttggcagtttcatcaagaaacgtctatctttcgccaactcatcgggaaactgcccctagcatttttaaagtcttaaaaagaaccgccacggctattgctctaggtgatgacgccttattagcggcccaaaaagctcacgatgatctggtgctcgctggcttctccaaaatagaatattttgaggcccggcattcagaaaccctagaaccaataaaagatactagaaaccccgggcgtttattcgctgcggtttggctaggatctactaggctaattgataatttagaaatcaaagcatatagcgattag

SEQ ID NO: 311617 - DNA, 415 bp, Unknown
  Bacterial polypeptide expressing nucleotide sequence isolated from the Sargasso Sea
ttgctgcaagaggccaatgccacccccttgcatctggtccccaccatgggggctttgcatcaaggccatggggcgctgatacgtgctgctcggaaccagggcgggcgcgttctggtcagcatttttgtgaatccgttgcagttcggccctaacgaggactttgctagctatccgcgcaacttggatcaggaccattccctggctttagaagccggtgcggatgccatttgggctccccagtcgcaggatctcttcccgatgggtgcagcgggattaacccagttgctgcctgcgccagaactggtgacgaacctctgtggtccaggccgtccgggccatttccaaggtgtttgcaccgtggtcgcgaggttgctggccttggtgaagccgagccacttgcatctgggtgaaaaag

SEQ ID NO: 311618 - DNA, 847 bp, Unknown
  Bacterial polypeptide expressing nucleotide sequence isolated from the Sargasso Sea
atgatcactagcgcccatatcgatgatattcgtactcaagtgcgagcatggcgtgccaagggcgaaaccatcgcctttgtgcctaccatgggcaatctccatcagggacacatcaccttagtgaaagaagcagcgaagaaatgcgaccatgtggtcgtgtcaatcttcgttaatcccatgcagttcgggcagaacgaagatctcgacgcctacccgcgcaccttagaggccgatagccaagcgctgactgccgcgggcgccgagctgctatttaccccaacgcctgcgattatttatcctaaaggcttggcgcagcaaacctatgttgaagtaccgggaatttccgatgtactctgcggtgccagtcgtcccggtcatttccgtggcgttgcgactgtcgtctgcaaactgttcaacatagtgcagcccgatgtggcgttttttggcaacaaggattatcaacaactgttagtgatccgcactatggttgaagatttgtcactgccgattgaaattatcggtgtggataccattcgtgaagcctcgggcttagccatgagttcacgcaatggctacctgacggcggaagaaaaagccgcggcgccggcgctgaaaaaagctatcgatgccatggcgcaaggcattaagcaaggcgtgagcatcgaacaagtcaccgctgaagctaaagcgagccttatcgccgcaggctttacgccggattatttagaagttcgccatgccactacgctggcccatgcggaaactacggaccaagcactggtgattttggccgccgcttacttaggtaaggcgcgtcttatcgataacctgcgcttcgaccgctaag

SEQ ID NO: 311619 - DNA, 835 bp, Unknown
  Bacterial polypeptide expressing nucleotide sequence isolated from the Sargasso Sea
aatgaaattagttaagagcataaaatatctcgataaaatcctaaatcgatatagaagcgatggttttaaaattcacttaacacccacaatgggagctctacatgcaggacatttaaaattagtaaagaagtcaaaaaaactgaaatcaattgttgtagttagtatttttgttaatcctacacaatttggaccaaaagaagattataaagattaccctaggacgctcaaaaatgatcttaaagttttaaaaaaatacggtgctgatattgtctttactccaatacaaaaacaaattctctcccataaaacaaaacataattgtccacagtttgcaattgagaaacgactatgtggtaaatcaaggccaaattactttccaggtgtaaaaaatattgtacttaaactttttgatatagtgcagccagacgcggctttttttggtgaaaaagattatcaacaatatttggtaattaaaaaaatgactgagtcattaaaattaaatacaaggataatatgcgttaaaactgttagggatacaaatggacttccactttcatcaagaaataactatttaagtgatcaggaatttaaaattgctattaaaatcaacaaattacttaaaaaattacctccattgattagaaccaagttaaagattaataaaatacttaatcacacaaaaaaaatcctgatagatcatggtgttgataaaattgattatctgactgtattaaatgatgatctctctgttcgaaaaaaaataagtgataaatcaagaatatttattgcggctaaaataggaaatactcgattaattgacaatataaaaatctaa

SEQ ID NO: 311620 - DNA, 385 bp, Unknown
  Bacterial polypeptide expressing nucleotide sequence isolated from the Sargasso Sea
ttggaagtaataagtgaaaaacagaatttgcgttcacagatacgctcacagaaattgctccgaaaaaaaattgccctagttcccacaatgggaaaccttcatgaaggccatttgagcctaattaatagagcaaaaaaaattgctgattttgttgtagtttctatatttgttaatccaactcaattcctagaaggtgaggactttgagagatatcccagaacaatggaggatgatttatctaaattaaaaaaaatgggaattgatattgtctatacacctgaattggaagatatctatcctcactatccagatgagatggttggtgtaactctgtcaggtatttccaatgtatttatgtggaagcataagaccgggacactttgat

SEQ ID NO: 311621 - DNA, 796 bp, Unknown
  Bacterial polypeptide expressing nucleotide sequence isolated from the Sargasso Sea
atggggcggcgcatcggctttgttcctacaatgggtagccttcatgcgggacacacatcattagttgatcgtgcaatggctgaatgtgacgacgttgcgacctcaatttttgtgaatccaagtcaattcggaccacaggaagattttgagcgatacccaagagattttgatgctgatttcaatctattggctcagcatgacgttcgctggattttcgcgcctgacgttcatgagatgtatccacctggtgattcaactcgtattgaaatctctggacccgctgagccctacgaggggcagttgaggcccggccatttttctggcgtcgcaacaatagttttccggcttcttcagagtacaccagcgaatactgtctattttggtgcgaaggattggcagcaggttctggtagttcgacaaatggtgcgtgaccttgggctcgacgtagaggttatgacatgcccaatagtccgtgacaaagatggcctggcgctgagttcgcggaatgcatacttgagtgaatcggagaggacgcgtgcccaaactatttacgctgcacttcaacaagcagaagaaaactggtgccgtggtttggcaatcgataagatagagctgaaggtaagagacatgctgtcagcacgagagatccggattgactacgctgatattgttcacgatgaatctttgagaaagatttctgaagtgagtcgcaacacccctgcaatttttctcatcgcctgccacgttggctcaacacgactgattgataacattctcctgccatcacagacgtaat

SEQ ID NO: 311622 - DNA, 817 bp, Unknown
  Bacterial polypeptide expressing nucleotide sequence isolated from the Sargasso Sea
ttgagagcctactcttcctataaagacattgttagattagttaagaaagttaattctattggcctggtcccaacaatgggctctctgcatgatggccatttgtcaattataaaaaaggccttgataaaaaatgatatagtaattgtttcaatttatgttaatccaaagcaatttaatgattcaaaagatttaaaaaaatatccaagaaatcttgagcatgaccttgaaaaactaaaaatcttcaataaagttatagtgtatgcaccaagtgataaagatctatatgatgaaggagaagaggtaaagaaatataattttggagaaattataaaaataatggaaggtagattaaggccaggtcattttgatggtgttgcaactgtcgttgaaaaacttctagttaagtttaagccaaacaatgcatattttggtgaaaaagatttccagcaattagtattaattaaagagctagtaaaaaaaattaaattagatgtaaatattattggctgcgagaccataagagaaagtgatgggcttgcaatgagttcaaggaacaaattcctaaataaatcagagagaaaatgcgcaggtcaaataattaaattactcgacagggctaaaaaaatgtattcgacttcaagcctaaaagctataaaaagtgatatcttaaaacaggcttactcaattgataatttaaaaattgaatattttgaaatacttgatgtttctgattttttaaaagacaaaaaagaaattagagcatttatagcgtgtagaataggtaataccaggctaatagataatattagaatttaaa

SEQ ID NO: 311623 - DNA, 853 bp, Unknown
  Bacterial polypeptide expressing nucleotide sequence isolated from the Sargasso Sea
atgaaggtggttgatagcatttcagcattgcgcggcacggtgaatgcttggaaacgcaatggtgaaaccgtaggttttgtacccactatgggcaacctgcacgatggtcatctcaaactagttaaaaaggcgaaagcgcataacgacaaagtggtagttagcatttttgttaaccctatgcagtttggcgcgaacgaagatttagacgcctatccacgcactatcgaagaagataaagctaagctgacttcagtgggtgcagacgcggtgtttttaccaagcgttgcggaaatgtatccggcgggactggacgcgcagactttcgttgaagtacccggcatttcaggctctcattgtggcgcgagtcgcccaggccactttcgcggcgtagctaccgtggtgaccaagcttttcaacatggtacagccagacgatgcgttttttggtgaaaaagacttccagcagctacaagttattcgcgctttagctcgcgatttatcaatggcagtgaaagtccacggcgtgcctactgagcgcgagacgtcaggtctggctatgagctctagaaacggctacctgacagacactgaaaaagcgacggcgagtgctatttttgcagaaatgcagcgcttaaaagcgggcatagaaagtggtaacaccgactttgttgagcttgaaaatgccatggtcagtaaccttgaagcaaaaggctttaagaaagactactgtcaggtagttaacgccgccacctttgaaccagctagcgatagcgacaaagaattagttctgcttgttgctatgtttatgggcaagacacgcttaattgataatatgcaaatcacgcgagattaag

SEQ ID NO: 311624 - DNA, 820 bp, Unknown
  Bacterial polypeptide expressing nucleotide sequence isolated from the Sargasso Sea
aatgaagatttttgcaacagaaaatgacattgaagataatcgactaaacgcaaaaggtttaagtttaataccaactatggggaatcttcatgagggccatttaagtcttattaaagaagctaaaaattataatgacaaaactatagtatcgatttttattaatcctctccaatttggaccaaatgaagattttaaaaaataccctagaactattattgcagatattaaaaaattagaaaaaattgattgtgattatgcttttattcctcaagataactttgctaaaaaattaaaatcaataaaagcaccttcaatatctagaaagttatgtggaagcaatagaccaggacattttgatggtgttttaacaataattaataaaattttttcagttattcttcccacacatgctttttttggcttaaaagattatcaacaatttattttaatcagagaatttacaagaaaatattttcctggcattaaaattattggattacctattattagagagaaagatggacttgcgatgtcttcacgcaataatcttctaactaaagatgaaagaaaaattgcaccatatatttataaaaatcttaaatggataaaaaataatagaaataaatttacaatacctgaattagtaaagctatcatctgaaaagctagaaagacataatattgaaattgattatttaggtatctttgataagaaaagccttaatgaagttaaaaattttgaaaaaggggctttggttgctgttgctgctaaaataggtaatgtaagattaattgataatattattcttaataagaattaa

SEQ ID NO: 311625 - DNA, 772 bp, Unknown
  Bacterial polypeptide expressing nucleotide sequence isolated from the Sargasso Sea
tttgattccaaccatgggagctttacatgaaggtcatctctcattaatcaaaaaaggtaaagagtttggggtctcaacaatggtaacaatttttatcaatgagctgcaatttgatagtaaagaagattttagtaattatccatcaaagattgaagatgatattaaaactttaggcaatttagatattgattatttatttattccagaaaataattatatttatccagacagtgggtttgagaaaattgactcaggagctataggaaaaaaatttgaaggcaactcacggcctggccactttaatggaatgcttaccgttgttaacaggctatttcaattaactcttccaaagattgcagtttttggaaaaaaagatgcccagcaattgttcttaattaaagaaatggtaaataaaaaaaattatcaaataaaaataattgaagggttgactgtaagagataatttaggactagctttaagtagccgtaatttattactcagcaaatacggagaagaaaaagcaagactaattaaccaaatacttaaccattcaaaaaaagaattttgcgaaacaaaggatttaaatatttttaaaaagttaaaatcttattattcagatggagatatagaaatagattatttagcgatagtagatccagaaacatttggtgatcctttagagcaaacagagaattatataataatcattgcagcctatattgagaatattcgattaattgacaatattgaatttaaattggagagagtatga

SEQ ID NO: 311626 - DNA, 779 bp, Unknown
  Bacterial polypeptide expressing nucleotide sequence isolated from the Sargasso Sea
acggattgcatttgtgccgactatgggtaatctgcaccagggccatttgcagttagtcgataccgccaaacaaagagccgacagagtcattgtcagtatttttgtcaatcctatgcagtttggtgccaatgaggatttagataaatatccccgcactctggagcaggactgtaaaggcttgaccgaacacggcgctgatgcggtatttacccctacacctgccattatttatcccaggggcctggatgtgcagacttatgtcgaggtgcctttactgggtgatcaccactgtggcgctagccgcgctggtcatttccgtggggtgtcgaccatagtgaccaagctgtttaatctggtccagcctgacattgcctgttttggccagaaagactatcagcaactggctattatccgccaaatggtggccgatttatctatgccgattgaaatcataggtgtccccactacccgtgctgaggatggcttagccttaagttcacgcaatgggtatttgactgcagaacaacgcgccatagcgcctgatttgtacagcgttttacagtggatgaaacaacagttacatcaaggcttctctgacttcagggctttagagcaacaagcgaaagacaagctcaatgctgcaggtttcaaagcggattacatgaatatatctaatcgtcagacgctagtacctgccacagacagctcccagcctttagtgatactggctgcagcttatctgggcaatacccgtctgattgataatattgaagtttagg

SEQ ID NO: 311627 - DNA, 847 bp, Unknown
  Bacterial polypeptide expressing nucleotide sequence isolated from the Sargasso Sea
aatgatcactagcgcccatatcgatgatattcgtactcaagtgcgagcatggcgtgcaaagggcgagactgtcgcctttgtgccgaccatgggcaatctccatcagggacacatcaccttagtgaaagaagcggcgaagaaatgcgatcatgtagtcgtgtctatcttcgtcaatcccatgcagtttgggcaaaatgaagatctcgatgcctacccgcgcaccttagaggccgatagccaagccttaaccgcagcgggcgccgagctgttgtttaccccaacaccggcgattatttaccccaaagggttagcgcagcaaacctatgttgaagtaccggggatctccgatgtgctctgcggtgctagtcgtcccggccacttccgtggcgtcgcgaccatcgtttgtaaactgttcaacatagtgcagcccgatgtcgcgttttttggcaacaaggattatcaacaactgttagtgatccgcactatggttgaggatttgtcgctgccgattgaaataattggcattgataccattcgtgaagcctcgggtttagccatgagttcacgcaatggctacctgacggcggaagaaaaagccgcagcgcccgcactgaaaaaagcgattgatgccatggcacaagggatcaagcaaggcgtgagtatcgaacaagtcaccgcagaagccaaagcgagccttatcgccgcaggctttacaccggattatttagaagttcgccatgccaccacgctggcccatgcggaagctacggaccaagccctggtgattttggcggccgcttacttaggtaaagcgcgtcttattgataatctgcgctttgatcgctaa

SEQ ID NO: 311628 - DNA, 865 bp, Unknown
  Bacterial polypeptide expressing nucleotide sequence isolated from the Sargasso Sea
catgctcgtcgtcacggacgcgtcggagatgcgagggtggtcgcgcgcgcgacgcgcggagggcaaacgcatcgcgttcgtgcccacgatgggggcgctgcacgagggtcatctgtcgctcgtggaccacgcgcgcgcgaagggagacgcggtggtgatgtcgatttacgtcaatgagacgcagttcgcgccgggggaggatttcgatcagtatccgcgcacggcggaggacgttcgcgccgcggaggcgcgcggggtggactgcgtgtatcagccgaaacgcatgtacgcggcggcgcaggatggggaggatccgcacgagacgttcgttgaggtgacggagttgagtaatgggttgtgttcggggacgaggccgcactttttcaggggagtggcgacggtggtgaccaagttgttcaacgtagtcgagccggacgtcgccgtgttcgggaagaaggattatcagcagtggcgggtgattcagcgcatggtgagggatttgaattttgacatcgacatcgtcggtggtgagatcgtgcgcgaggcggacggtctggcgatgagctcgagaaatttattactcgcgccggagaaacgtcgggaagcgactgttattaatagaaccttgcgcgaagccaaagcgttggccgagcgcgaaacgacgacgggtgagagtttagagaagatggtttctgaaggtatcgaaaatggtggaggcgtggtggattacgtgcgcgtgatgcagcccgtatctttgaagcctcattctggcgcggtgacgtcctcgtgcgtgatagccatcgctgccaagttcgggactgttcgattattggataatatcgaaatcgacatcaaccgcgactga

SEQ ID NO: 311629 - DNA, 490 bp, Unknown
  Bacterial polypeptide expressing nucleotide sequence isolated from the Sargasso Sea
cgattccggcctggtttcttccagggcgtgtgcaccgtggtcatgaaactgatgtcgtgcgtgcagccgcgcgtcgcggtgttcggcaagaaggattaccagcagttgatgatcgtgcgccgcatgtgccatcagttcgcgctgccgaccgacatcatcgccgcggaaaccgtgcgcgacaccgacggcctcgcgctcagctcacgcaaccgctatctgcaggccgccgagcgcgccgaggcgcccatgctggccaccgagctcaatcgtgtgcgcgacgcggtgctcgccggcgatcgggacttcgcaaaactcgaaaaagcggcgatggcggaactggctgcgcgcggctggcaacccgactacatcgcggtgcgcaagcgctcgaatctgctgccgccgggcgcagaagacgcgaacgcggagctggtcgtgctggctgccgccaagctgggcgccacccgccttatcgataacctcgaaatctgaa

SEQ ID NO: 311630 - DNA, 880 bp, Unknown
  Bacterial polypeptide expressing nucleotide sequence isolated from the Sargasso Sea
tatatacaattcatcaaaactcattaaagttcaaagcccagaagatgttcttattcaggctgctgagattgcaatggagagatatgagggaaatattattggagttacaggcagcaatggaaaaacaaccacaaaaaatattttgaattcatgcataaaagatagttatgccacttaccaaaactataacaatgaaattggtttaccgctttgtgctttagaattagattcgcaaaaaagtactgcaatttttgaaatgggtgcagcaaaaatgggcgatatagatcttctatctaaaattattaaaccgaatataggtattattactcatataggccactcacatttagacggactaaactctgttcaaggagtgctaaaggtaaagtcagaactaatcaataatattaaacataaaggctcagctattgttccagatggtaaatatattaattattggaaaaaaataagaaatgacattactttttatacatttggtgaaaaatcttcagcatcttatttcccaactaaaattaagatgtcaaaacgaggcctatctttttttattgaatctatgcatttaaagaaaagaattcatgtaaaaacaagacttataggaatgcataatgtgttaaacattcttgcttcttttgcggcaatccatatttctcaactaaacgtagaagaatttttagatggtttgagctccctgcaaaaccctccgcaacgtttagatcttaaaacatgggtaaaacaatcacaggttatcgatgacacatataatgctaatcctgactctatgagagctgcaatagatgttttatgtcaatttaaaggcagaaagattgcaattctttggagatatggcagagctaggtag

SEQ ID NO: 311631 - DNA, 1402 bp, Unknown
  Bacterial polypeptide expressing nucleotide sequence isolated from the Sargasso Sea
gatgctcagtctcggcgaagccgcccgcctgatccccggcgcgaccgttcacggcgacgcaggcgtcacgttcgaccgcgtatcgacggacagccgcacggcaggccccggcgacctgttcgtcgcattgaaaggcgagcgcttcgatgcgcacgacttcctcggcgatgtcgccgcgcgcggcgctgcggcggcgctggtcgcgcacgtgccggcgggcgtcgcgatgccggcgatcgaaggtggtgaaacgcgtgccgcgctcggcgcgcttgcgcatggctggcgcacacgattcgcgctgccgctcgtcgcggtgacgggcagcaacggcaagacgaccgtcaaggaaatgatcgcgtcgatcttcgcggcggcggtcggcgccgacgcgcggctcgcgacggccggcaacctgaacaacgatgtcggcctgccgctgacgctgctgcgcctgtcggccgcgcatcgtctcgcggtgatcgagatcgggatgaaccacccgggcgagaccgaagtcctcgcgcgcctcacggcgccgacggtcgcgctcgtcaacaacgcgcagcgcgagcaccaggagttcatggcgacggtcgaagccgtcgcgctcgaacacgcggccgtgattcacgcgttgccaccggacggcgtcgcggtgttcccggccgacgatgcctacgcgggcatctggcgcgtcgcggcgaccggcaaccggattctcgatttcgcgctgcacgatgccgaacggcagaccgacgcgcaggtcacgggccgcctccatggaggcgaactcgcgatcgacacgcccgcgggcgccgtcacggtgcggctgcgcgcgctcggcgagcacaacgcgcgcaacgcgctggccgccacggcagcggcgctgggcgccggcgttgcactgtcggcgatcaagcagggcctcgaatcgttcgaaccggtcaaaggccggctgcaggtgaagcaggcgatcgcaggcagcctcgcgggggcgacggtcgtcgacgatacgtacaacgcgaatcccgattcgatgcgtgccgcgatcgacgtgctcgccgcgcaaccggcgccgcgcgtgctggtgatcggcgacatgggcgaggtcggcgacgaagggccggctttccatcgcgaggtcggtgcctacgcgcgcgagcgcgggatcgacgtgctgttcgcgctcggcgaggcgtcgcgcgatgcctgcacggcatacggcgacacggcccgtcatttcgacgacgtcggcgcgctggtcgaggcactgctcgcagcgggctacggcgcgcaggcgacgctgctcgtgaagggctcgcggtacatgaagatggagcgcgtggtcgacgcgctgacgaaccaacccgcggcgggcactgcgcccgctgcacactga

SEQ ID NO: 311632 - DNA, 1408 bp, Unknown
  Bacterial polypeptide expressing nucleotide sequence isolated from the Sargasso Sea
catgttctcgctgcgtgaagccgcggcgctgattcccggcgcaaccgtgctgggcgacgaaagcgtcgcgttcgaacgcgtttcgaccgatagccgcagcgcgggtccgggcgacctgttcgtcgcgatcaaaggtgagcgtttcgacgcgcacgatttcctgccggaagtcgcgtcgcgcaacgtgacggccgtgctactaacgcacgcgcctgacaattggcatgtgccggcgttgcgcgtagccgatacgcgtgtcgcgctcggcgcgctggcacgcggctggcggcagaaattcaacctgcccctcgttgccgtgaccggcagcaatgggaagacgacggtcaaggaaatgatcgcgtcgattttcgccgccgcggttggcgtggatgcacgcctcgcgaccgccggcaacttcaacaacgatatcggcttgccgttgacgctgttccggctgcacgccgcgcatcaactggctgtggtcgaactcggcatgaaccatccgggcgagacctcgctgctcgcgaagatcgccgagccgacggtcgcggtggtgaacaacgcgcagcgcgagcatcaggaattcatggcgacggttgaagccgtcgcgctcgaacatgcgagcgtgattcacgcgctgacgccggaaggggtcgctgtgttccccgccgacgatgcttacgcgagcatctggcgcgtcgcggcgaccggcaaccgcattgtcgacttcgctttgaacaacgccgggcgcacgactgaagccgctgtaacgggcacgttcgaagacaacgtgttgagcatcgacacgccggaaggccacatcgacgtcacgctgcaggtactcggcgcccacaacgcgcacaacgcgctggccgcgacgtcggccgcgcttgccgcaggcgtgtcgctcgacgcgatcaagcgtggcctcgaatccttcggcgccgtgaaaggccgtttgcaggtcaagcgcgcagtgctcggcacgctagccggcgcaaccgtgatcgacgacacctacaacgcgaatcccgactcgatgcgtgcggcgatcgacgtgcttgcgtcgcgcgaatcgccgcgtgtgctggtgatgggcgatatgggcgaagtcggcgataacggcccggcgtttcatcgcgaaatcggagcgtacgcaaaggaacgcggtatcgatgcgctgtacgcgatgggcgacgcctcgcgcgacgcctgcaccgcgtacggcccaggcgcgcatcacgtggccgatatcggcacgctggtcgcgcaattgcagcaagccgctttcggctccgctgcaacgcttctcgtgaaaggctcgcgcttcatgcaaatggagcgcgtggtggacgccgtaacgagtccacaacccaacgcagcgggcagtgcgcccgccgcacactga

SEQ ID NO: 311633 - DNA, 259 bp, Unknown
  Bacterial polypeptide expressing nucleotide sequence isolated from the Sargasso Sea
tgcagatggtataatgttacagatgacaatcctagaaatgaagattctgataagattagaaagtcaatattagaaacttgtccgtcagctatagaaatacccaatcgaaaagaagctataattacggcaattaatcaaggtgaaaaaggtgattcaattttaattgctggtaaaggtcatgaaaagtttcaaattattagcgataaaaaaattcctttttctgatcaagaaataataagagaagtgataggtgattaaa

SEQ ID NO: 311634 - DNA, 550 bp, Unknown
  Bacterial polypeptide expressing nucleotide sequence isolated from the Sargasso Sea
ttgatttatggttacggcattagcggaaaatctattgaaaaataccttaataatagaaattgtgattatcatatctatgatgattataagaaaattaaaaaaaaaaaatttataaataaagattacctattaaaaaatattaaaaaatataatttttttattgtttctccatcaatcaaaattgaaaaaggacattttttatacaaatataaaaaaaaaattttaattgatttggactttttaagtttagagttgtctaaacagaaagttattggcgtcacaggaacagaggggaaatcaaccacttgtatctatctaaaagatatattatccaaaaaatacaatacacaaatagttggaaactttggtaacactatactggagaataaaaacctaaaaaatttgctttctaaaatagatattttaattattgaattaagctcgtatcaattagataaagtaaagtttttaaaattaaattatgccttaattacaaatatttttagtgatcatttagactaccataataatttaaaaacaatatattaag

SEQ ID NO: 311635 - DNA, 211 bp, Unknown
  Bacterial polypeptide expressing nucleotide sequence isolated from the Sargasso Sea
gatgggtataaaaaaaagagaaaaaataacaattgaaattgatagatttaaagcaataaatgaatctattaaatttgccaataaaaaagatattgttttaattgcaggaaaaggacatgaagactaccaaattctcaatgataaagttattaattttgatgatagaaaaatagcttataaattattaaaagaaaaaaataaatctcaataa

SEQ ID NO: 311636 - DNA, 160 bp, Unknown
  Bacterial polypeptide expressing nucleotide sequence isolated from the Sargasso Sea
caccaaggtagattggatggactagaatttaaatttggaatatttactaatttttcacaggatcatttagactatcacaaatccatgaagaattatttcaaagcaaaaatgcttttagttttcaaaaataagaaaaaaaaaaggttttataatttgtgat

SEQ ID NO: 311637 - DNA, 808 bp, Unknown
  Bacterial polypeptide expressing nucleotide sequence isolated from the Sargasso Sea
aaagattatctaaattctaaactttttttgtttagaaatttactaaaaaaaaaatctaatattattactgacagtactattcctcaatataagattattaaaaaaatttcagaaaaaaaacgatacaaaatatttactattggtcaaaaaaatagctatataaaactaatcaaacatagctatttggatgacaggcaattgctccagattgaacgaaaaagtagaatttacaatatagttcttaatttaattgggaaaattcaaattaaaaatattttaatgaccattatattagcagaaaaaagtaatattaaatttgaaaagataattaaatgtttgaaaaaaattaaaagtgtcgaaggtagatttgaaaaaataggacatttaaaaaataattctaaagtaatacttgattttgctcatacgccggatgcattaaataactgcctacataatttaaaagagcagtttatggatcataaaatctcaatcgtatttggttgtggtggaaatagagataaatctaaaaggtcaaaaatgggtaaaatagcaaataaatattgtcacaaaatatatttaacagatgacaatccaagatttgaaaatccaaaaaaaattagatcaatggtaaaaaaatttattagtaaaagtaaattgttagaattttcaaatagagaagtggcaatatcaaatgcaatttcaaatttaaaaactggagatattttattggttgctggtaaagggcatgaacaaaatcaagattatggatcatttattaaaaaaatttcggataaaaaaattatttaaa

SEQ ID NO: 311638 - DNA, 617 bp, Unknown
  Bacterial polypeptide expressing nucleotide sequence isolated from the Sargasso Sea
aatgaaaagcgctataaccgtattactgattatcgcagccacactcattctgggtggttgtgtggtcctcaacctcgcgcggtttggcgcggcgccggacgcacaacagcagaaggcatattcggggtcagctaactacaatgcagggaaacaagcttttcataatcaggtaaccacgccggtactcaaagaaggcgtcagtacctggtcagtgatgtggggtaaccttacctcatcggccgataatctggcaccgcaaggggcgataccggtaaacaaagtagactttaaaagcctcccccgcgaggaaaacctgatcgtcaggcttggccactcaggcttttatctgcaacttaacggccagcgcattctggtagatccggtcttcagcgactacgcttcgccgttctcgtttatggttaaagcgtttaaaggaacaaccatctttacagtggacgatttaccagagattgatgtgctgcttatctcccatgaccactatgaccacctcgactaccacacccgccgtagcgctcaaaaacaaggtaaaaaaaggtgtttgttccgctgggtatcggcgcccatttttctcactgggactacacaccagagcagct

SEQ ID NO: 311639 - DNA, 752 bp, Unknown
  Bacterial polypeptide expressing nucleotide sequence isolated from the Sargasso Sea
attgattaatttaaaaaaaaaatttttaatatatggatatggaattagtggaaaatcaatagaaacatactttattaataacaattgtaattataatatttatgatgacgtaaaaataattaataacagtaagtttgttaatagaggttatttatctaatcatttagatagatatgattattttgttgtatctccatcaattaagattgataaaaatcattttttatttagatataaagaaaagattataattgatttagattttttgagcatagaattaacaaatcaaaaaattattggagtaacaggaactgaaggaaaatcctcaacttgtaattatttaaatgagatactttcaaaaaaatataatacaaaaattataggtaattttggaaatactattttaaataataaaaatttaacaaaatatttatctaaaatagattttttaattattgagttaagctcatatcaattagataaattaaaatttttaaaattaaattatgctattataacaaatatattttgtgatcacttagattatcatgataacattaaaaattatataaaatcaaaatttagaatacagtatttattatataataattctaatttacatttatcaaaaaaattatactcaaattattctaaaagtataaaaatcaataaaaaaagaataattttaaataattacaatatttcaataactaatgatcttactaaacacttcaaagttcttaatttacata

SEQ ID NO: 311640 - DNA, 944 bp, Unknown
  Bacterial polypeptide expressing nucleotide sequence isolated from the Sargasso Sea
agtgtatgtctggaggtatcatctcatgcgcttgatcaaaataggcttgatggcattcaatggctgaattctgcatcaatattaaatattggtgaagatcatttggattatcataaggatatttcttcttatagagattcaaaatttagaatttttaaaatgaattcgccaataaaacttgttattgacgaatctaataattttgcaaaagactatgattttttaaacgaaacaaagttgacatctataagtagtaaaaataatttttctgatattttttataaaatcacaaaagctaattttaagaattgcgaatttaaaatatttcttaataatccaccaagcggacaagaaatacataaaaataagaaatataaattcaaatgtactcttttcccagagtttaatatcactaatcttgtatttgcaatttcttctataggatttgataaattctctgataagcatgttaatgatctatcttttattaagttgcctaaaggtcggactgaagttattaataatatttctaaaaatataatcatagactatgcccataattctcactcatttgaagtgctattatgttcaatcaaaaaatatttcgacaatttgattttagtttttggttttggaggtgatagagacaaatctaaacgagcaaagatgttacaaattgctttagacaattcgtctaaaattttcttaacatcagataattccaggagcgagaaatttgaaaatattataaaagatgccatgaaggggaataatgaaggagatataacaatcatagaagatagaaaagaggcaataataaatgcaaataaatttttggataaaaatagttgtttgttaattcttggcaaaagacatgagcaaactcaagaaattgatggaaaaatttatcattttagtgaccatgaggtagttgatgaaattta

SEQ ID NO: 311641 - DNA, 694 bp, Unknown
  Bacterial polypeptide expressing nucleotide sequence isolated from the Sargasso Sea
ttggtagtagctggcaaaggccatgaaaattatcaagaatataaaaaaagaagatttttttcagataaaaaatatattcttaaatatattaatttaaaaaataaaaaaatttacaatgattggaaactaaatgttataagtgaaaaaataaatattaaaaattttaataaaaacttaaaaataaattcagcatcaattaattcaaaagagataaataaaaatgatatatttgttggaataaaaggtaaaaagaaagatggaaacaaatttgcaaatgacgccattaaaaacggagcatcaattgcattagtccaaagaaattatttaaaaagaaataaaagaaaaattaaaataaataatacttacaattttttaaaagaaacctctaaattaattagaaaagtatcacccataatatctatcgctgttacaggtagctcaggaaaaacttcagtcaaagatcttttgggaaaaactctaaataaattatcagcaacatcttattcaaaaaaatcatttaataataagtatggagtgccattaagtttatataatattaaaaaaaatgataaatttggagtctttgaagttgggatggataaaaaaggtgaaataaataatttaactaagttgattttaccaaaacgtaggtttaatcacaaaatatttcatatgctcacattaaaaattttaa

SEQ ID NO: 311642 - DNA, 761 bp, Unknown
  Bacterial polypeptide expressing nucleotide sequence isolated from the Sargasso Sea
tgaaaagtttgtatatgtcgattctgaatggggaaataaattaaaacatgagtctaaacttccctcatttagtatcggttataaaagtaataataatctttatatagagaaaattaatgtagacaaagaatcttttgatttagagttttatcttgatggtaaaaaatatgaaatttctgtgcctttgagtggtccacttgcacatatgaattatttacttgctttatctatggcttatttttcagaacaatataaattaagtgaattgttagaagcatcagctgatattaaaaatcctcttggtaggtatgaaattattagtatagacactaatgatattatcattgattatgctcatacccctgaatcaataaagcaatcaattgcttatgtcaaaggtaaatataaaaatacgactgtaatttttggtgctggtggaaatagggataaagataaaagacctttaatgggagatgcagtaaatgaagctgacaaaataataataactaatgacaatccaagagatgaaaatgaagaggatattgcaaaagacatattagaaggggttaatttaaataaagacgtagaagtagtactaaatcgtaaagaagcaattagaaaaggaatagagaatcttaaaaatgattctgtattattaatactagggaaaggtcatgaaaaaattcaagaatttgaaaacaatacaattaaatttagtgaccaacaagtagtcaaagaaatgataaaggaaattcaatgat

SEQ ID NO: 311643 - DNA, 804 bp, Unknown
  Bacterial polypeptide expressing nucleotide sequence isolated from the Sargasso Sea
atatttttaacagatgataacccaagatatgaaaatccaaaaaaaataagaagtcaaataaaaaaaaaaatatctagatctaaattagttgaaattgcttcgagagaaaaagcaataaaagttgcaatagaaagcttaaactccggagatatattattagttgcaggcaaaggtcatgaaatctatcaagaatataaaggtaaaaaaaaaattttttcagataaaaaatgtattttaaaacaaattaattcaaaaaataaaaaattatttcaaaactggaaagcaaatatcttgcacgaacagtgcaatttaaattcggtaagtaaagatttgaaaattaacaaagcatcaataaactcaaaaaatatcaaaaaaaatgatattttttttgcaattaaaggccctaaaaatgatggtaataattatgcagatgaagcaattaaaaaaggtgcatctttagcaatagtaaataaattaggaaaattaaataaagtaaaaaaaattaaaataaataatacaattagagttttaactaatgcatctaaagatgtaagaaaagtttcaaatgcaaaatttatttctattactggcagctcaggaaaaacatctttaaaagatttgctagcattctgtttaaataaattggcaccaactacaaaatcaaataattcctttaacaataaatacggcgttccactaagtttattcaatgtaaataaaaatgataaatttgcagttcttgaagccgggatggataaagcaggtgaaattgattatttgacaggaataataaaaccagatttt

SEQ ID NO: 311644 - DNA, 310 bp, Unknown
  Bacterial polypeptide expressing nucleotide sequence isolated from the Sargasso Sea
ggaaaacgaaaaaaaatggggaagaattgcaaagctatatgctaatataatatatattactgatgataatccacgtttcgaagattcatcaaaaattagacaatctattttaaaatattgcaaaaatgatgcaatagaaattcctgaacgtaaaaaagcgataataagagcaataaatgatttaaagaaaaatgaaatattaataatagctggaaaaggtcatgaaaatttccagattataaatgatatttcttatccattagatgattataaaatagcaagaaaagcattgagaaagtatagtaaatga

SEQ ID NO: 311645 - DNA, 733 bp, Unknown
  Bacterial polypeptide expressing nucleotide sequence isolated from the Sargasso Sea
aatttaaaaaattatttaaaagcaaaactttatttatttgaaaacctaatccacaaaagaggcaatgtaattgtagatcaattaataccagagtttaaaatcataaaaaaaattacaattaataagaagttaaaattgcatacactggatgataataaaaataatctagagcttctatctcataattttaaaggagagggtcaatttcttagaattaaattaaatagttcaataagagatctaaatttaaatttaattggaaaaatacaattaaaaaatgttttgatggcaataattgcggcaaaatatagtggtcttagtttagataaaattttgaatacaattcctaaattgaaaccggttgagggaaggtttgaaaaaattggtaaaattaaaaatcaatctaaagtaattcttgattatgctcatacgcctgacgctttaaaaacttgtcttttaaatcttaaagaacaatttcctaataaaaaaattacagtgctatttggttgtggaggaaatagagatcaaaacaaaagatcaaaaatgggaaaaatagctagtgattttgcagacagtatcattcttacaaatgataaccctagatttgaaaatcctcaaaaaataagaggagatataaaaaagggaattaaaaaaaaaagaattactgaaatatccaatagagcaattgcaataacacaagctattcgtaatttaaattctggtgatattttgt

SEQ ID NO: 311646 - DNA, 727 bp, Unknown
  Bacterial polypeptide expressing nucleotide sequence isolated from the Sargasso Sea
aataaacccgaaaaatatagttggcggtaacaggggactaatgggaaaaacatcggtatcagacttttttcatcagatttttacacatgaaaatataaagtcgggatttattggaacactaggcttaaaaaaaaataaagtactaaaaaaaagaaatttaacaacactagactcactttctctaaatagagatttagatcagctaaaaaaatctaaaataaataatgttattattgaggcttcaagccatgggttaaagcaaaaaagattaaattttttaaaaattaaagcaggtatttttacaaaccttagccacgatcatttagattatcataagaatatgaaagattattttcaatctaagctaatactttttaaaaatatattagagcaaaatagtacagttattacagatactgacattaaacaatataaacatattaaaaaattacaaattaggaaaaaattaaaaattttaacaataggttcaaagagtaatattttacaagttttgaatcataaaatttttgaaaattttcagttattagagatcatgtataagaaaaaaatatttaaacttaaagtaaacttgtacgggtctattcagattaaaaacttattaatggcaattttagccgcaaaggtctgtggactaaaaattagtaaaattttcaaaaatatcgaaaaaataaaaagtgtaaaaggaagattagaattaattaaaata

SEQ ID NO: 311647 - DNA, 772 bp, Unknown
  Bacterial polypeptide expressing nucleotide sequence isolated from the Sargasso Sea
aatccaaaaaaaaatatagtgtgcatagacagttctttcggcaaaaaacttcattcaaaacttttaaaagataataaggaaacttacagcatatctataaaagaaaatgctgattttcacgcttcgtttgagaaatccccaattggattaaaggttaatttaaaagcattcgggaaacatcttacttttgaactaaaaacattttccagatatcttgcttcgaacattatatgctcaatggctgttttgattttggagggagtaaagctttctgagatatcaaaaataacaaaagatatagttctacctcaaggtaggcttgaaagaataattaaaaatcagcaagttatttatatagattatgcacattcacctgaagctttggaatgcacactgaaagaattgaataacatacataatgagcctatctggtgtctttttgggtgtggaggaaatagagataaggataagaggcctttaatgggtaagattgctcaaaaatattcaaaccatgtagttttaaccaatgataatccaagagatgaagatgaaatggatataattaatgacatcctttctggaataaaggaaatggaacaaatatccataaatttagatagaaaggatgcaatagaatcatctatcttggaaatggaaagaaaccatatcaatggtgtcttattaattgcaggaaagggtcatgagcactaccaagaagttaatgataatttatatgagttaaatgataaaaatattgttaattctttataaa

SEQ ID NO: 311648 - DNA, 839 bp, Unknown
  Bacterial polypeptide expressing nucleotide sequence isolated from the Sargasso Sea
aaaattgcaaacaaactatgtaattatatttatcttacagacgacaatcctagaaatgaaaatccaaaaaatatcagagcaagtattaagaaatcaattttacaatctaaaatgattgaaataccatcaagaaaattagcaataaaaaaagcaattctaaatagtaagtctgatgaggttttaattattgcaggaaaagggcatgaaaacacccaagaatatactaggaaaaataaattttctgacaaagacaatataagaaaatcaataattttaaaaaatagatttttattgaatgattggaaattaaatatacttaaagaaattataaataacaaaaaattagatagaataaaaaatttaaaaattagcactaattcgaaagaaaagaataaaggtaaaatttttcttggaattaaagggaagtctctgaacggaaatgattttgcagacgaagctctaaaaaatggagcaaaattagcaatacttcaaaataataaaaatgatagtaaaaaaaagattaatgttaaaagtactctagaattattaattaaattttcacaaaaaataagaatttcctctaatgcatctcaagttgcaattacaggatcttcaggcaaaacttcgctgaaagaattgttaggacaatgtcttcaaaaaaattattctacaacattttcaaaaaattcattcaataataaattcggtttaccaatttcattaataaatttaaataaggatacgacttatggaatatttgaaattggaatggataaaaagggagaaatagactatttatcaaaaataattaaaccagacattggagttattacaaatat

SEQ ID NO: 311649 - DNA, 268 bp, Unknown
  Bacterial polypeptide expressing nucleotide sequence isolated from the Sargasso Sea
attgctaataattatgctgcaaaagtttatattactgatgataatccacgatacgaaaatcctctactaattagaaaaaaaatactaaaatattgtccaaatgcatatgagatacctgatagaaaaaaagctattataaaagctgtacaagatataaaaaaaaatgaaattttgatagtagcgggtaaaggtcatgaaaaaatacaaattatcaaaaataaagaattaaagtttgatgattttcaaatagtaaaaaaaattatttaat

SEQ ID NO: 311650 - DNA, 742 bp, Unknown
  Bacterial polypeptide expressing nucleotide sequence isolated from the Sargasso Sea
tatgctttgattacaaatatatttagtgatcatttagattaccatagaaatattaaaaattacatcagctctaaatttcgaatacaagattttttatataataattcacctttatttttatcaaattacttatttctaaaacatcgaagtcatgtaaaaatcaataaaaatagattaattttgaatgataaaaaaataatacataaaaaagaacttcccaaccatattagagaattaaatttatattcaattaaaaatttgatttattttatcgactcacgaataaaaataaaaaatattaatgtttctgatgatttaagtcatagaattcaactaatttataataaaaattccctaaaaatttataatgatagcaagtgcactaacttaaataatgctgtttataaaaataatttaataaatagttcaaaaaaaattttaattcttggaggcatacttaagaaacaagataaaaatttaaaatttaatattaaaaatacattagtacttacatttggtaatcaaaaagatttatttattaatcaattaaatcttattgactctaattattttaaatttaatagacttattgaattaataaattttctcaaattaatagttaaattacgtaaatatgaatatatacttttttctcctggtggtgagtcttttgactcttttaaaaattatatagatcgtggaaattattttaatcgacttataaataaagccataacttgaa

SEQ ID NO: 311651 - DNA, 448 bp, Unknown
  Bacterial polypeptide expressing nucleotide sequence isolated from the Sargasso Sea
attaacaatgtaattattgagtcctctagtcatggtttaaatcaaaaaagattacatcacataaattttaaaggagcaatttttacaaatttcagtcaggaccatttagattatcataaaaccatgtcgtcataccttaacgctaaattagtattatttagagaaattttaggtaaaaaatcaacgataatttcagataaaaatattatgccatttacttttttaaaaaagatttcaaaaaaaaaaaacttaagacttttagatatttctaaagaatatgaaaaaataaaaaatacttttttcaaacctacaagtgattttaaaataaaaaatttagctatggcaataaaagcatcaaaattatgtgggcttagagataaattaatttataaagcaattaaaaaggttcaagatgttaacggaagacttgaactagtaaaaaaatacc

SEQ ID NO: 311652 - DNA, 838 bp, Unknown
  Bacterial polypeptide expressing nucleotide sequence isolated from the Sargasso Sea
attgtagaaaaacattgtgataaaatttatattactgatgataaccctagaagggaaaatccaaaaaatattaggaaagatataattgccggtcttaagaaaaataatttctttgaaattgggaatagaaaattggcaattaaaacagctttgcaaaattctacccacgatgaaattataattatagctggcaagggacatgaaaatacgcaggattatggaaaaaaaatttataaaatttcagataaaaagattattaattcagtcaaaatttcttttaaaggtaacacaaaaagaaaaacagatgaaaattttgcaaaaaaagtttttcaaatttctactaaaaaaaaattacctttcaaatttgatggaatatccatagacagtaaaaatataaaaaaaaataatatttttgtagcaattaaaggaaaaaaaagggacggtcataattacataaaagatgcaattaaaaagggagcaagtttttgtgttgttactaaaaaacaaaatgataatagatgttttgctttaaaaaattcaaatcagtttttaaaaaaattcgcaaaaaataacaggatgtcttcaaaggctaaaataattggtgtaacaggtagcactggtaaaacaagtttaaaggatcttttaggcgaaactcttaatctttataaaagtacttactcttcaccaagatcttataataatcaatacggtgtgccacttagtttaagtaatttaaaatttagtcataaatttggaatttttgaaattggaatgagtaatatgggtgaaattaataatttagctaaattagtagcgccagatcttggcattattacaa

SEQ ID NO: 311653 - DNA, 79 bp, Unknown
  Bacterial polypeptide expressing nucleotide sequence isolated from the Sargasso Sea
attggaacaattaaaaataattcggattgttattcttgattatgcacacactcctgatgctttaaagttttgcctttta

SEQ ID NO: 311654 - DNA, 619 bp, Unknown
  Bacterial polypeptide expressing nucleotide sequence isolated from the Sargasso Sea
ctgaaacaccatggggctcaagtcggaattcccgtaaaattatttgcggattacaacttgctaaacatttttctaggcctaccattctttatgtcctgcagtgaaagcatacatctcttttttgaaaaaataccaaaattaaaacttcctactggcaggttgcagttatttgaaaaaaataataaaaaagtttttattgattttgcccatacaccagaagcaatagaaaagaccttggcgagtattaaaaaaatgaaaccaaaaaggataattcttgtttttggtgctggaggtgaaagagatcaagggaaaagagtgcaaatgggagaagtcgcagaaaaatatgctgatcaatcaattatcacatctgacaaccctagaaatgaaaatccaaacaaaatatccgaaatgataactaaaacaatgtctagaaattataattatgaagttgaaaatgatcgaaaagaagcaattgtaaaagctttcgactgtcttaaagatcacgagattttattaattgcaggcaaagggcatgaaaattatcagattattgaaggtagtaaacaaaaatattcagacatagaagaggtaaaaagatgtttaaagttgctggactaga

SEQ ID NO: 311655 - DNA, 356 bp, Unknown
  Bacterial polypeptide expressing nucleotide sequence isolated from the Sargasso Sea
attagagagccattttaagaagagagtaaatatagtttttggctgtggtggcaatagagataagggaaaaagagaaaaaatggcaaaaattgccaacaaattttgtaaaaagattatagttactgatgataaccccagagatgaaaatccaaaaaatataacaaaacaaatttataaatttattgataaaggattaataataaataatagaaagttggctataaaaaaagcaattcaagaaattggtcaaaacgaagtattattagtagcaggaaaaggacacgaaaattatcaaataattaaaggaagaaaatttcacttttctgattacgaagaaattattaaaaatttatgaa

SEQ ID NO: 311656 - DNA, 510 bp, Unknown
  Bacterial polypeptide expressing nucleotide sequence isolated from the Sargasso Sea
aaatttaaatttaattggaaaaatacaattaaaaaatgttttgatggcaataattgcagcaaaatatagcggtattggtttagataaaattttaaatacaattccaaaattaaaaccagttgagggaaggtttgaaaaaattggtaaaattaaaaatcaatcaaaagtaattcttgattatgctcatacgcctgatgctttaaaaacgtgtcttttaaatcttagagaacaatttcctaataaagtaatcacagtgctattcggttgtggcggaaatagagatcaaaataaaagatcaaaaatggggaaaatagctagtgattttgcagatagtatcattcttacaaatgataaccctagatttgaaaatccccaaaaaataagaagagatataaaaaaaggtattaataaaaaaagaattacagaaattgctaatagagcaatagcaataaaacaagctattcataatttgaattcaggtgatattttgttagtcgctggaaaaggaca

SEQ ID NO: 311657 - DNA, 271 bp, Unknown
  Bacterial polypeptide expressing nucleotide sequence isolated from the Sargasso Sea
ctcagatatgctaataaaatatatataactgatgataatccgagatatgaaaatccaagtattataagaaaaagtataaaaaaatattgttcaaaaggagtcgaaatttctaatagacaaaaagcaatttataaagctatctcaaatttagatgtgaacgatatattaatcattgctggcaaagggcatgaaaagtatcaattaattaaaaataagaaaattaaatttgacgattatgaaatagtaaaaaattttataaaatatctatgaa

SEQ ID NO: 311658 - DNA, 82 bp, Unknown
  Bacterial polypeptide expressing nucleotide sequence isolated from the Sargasso Sea
gttgaccaacttaacccgggatcatcttgattatcatggctctatggaagagtacgcaaaggctaaacgtttgttgctagaa

SEQ ID NO: 311659 - DNA, 727 bp, Unknown
  Bacterial polypeptide expressing nucleotide sequence isolated from the Sargasso Sea
aatgtccttactgaccctcattttactgagcgagcttcaccttttacctttgcaggtccgaaacgttatatgcctccaggaatgaaaatagatgatttacctaaaatagatgtcgttaccatttcacacagccattatgaccatcttgattaccattctgttaagttattatctgaaaaatttgatgatgtactttttattgtccctttggggcttaaagaatggtttgaaggtaaaggaatatacaatgtaagagaacttgattggtgggattcaattaaagttaaacaaacaattattactttcgcaccagtgcaacattggtcagccagaggactttttgatagaaatgaaagtttatggggcgcatggcactttaaaaatgcatcacatagctttattcatttaggagatactggttatacagaagatttcaaagaaattagaagaaaactaggtcctgtagatttagcagcaattcccattggagcatatgaaccaaggtggatcatggagttttcacacataaatcctgaagaggctgtgatgacttattttgatttagaggcaactaaagcaattggaatgtcttggggaacatttattttaactgatgagcctgtaactgaaccacctaaaaaattagatgaagcattgaaaaggtacgatctaacaaacaaagacttttttgttctatctcatggggaaacttatttaattaattgaa

SEQ ID NO: 311660 - DNA, 731 bp, Unknown
  Bacterial polypeptide expressing nucleotide sequence isolated from the Sargasso Sea
cacggaattgattatattaacgaagcgattgttaatggagctagctgtgttttgcataacaaaaaagattattatgaacaacataaaataccttgtttttttatagaagacctatttgaaagacaaaaagaaatatgtctgaatttttataatatttgcgaagaaaatttaaagtttcttgtttttactggaacaaatggaaaaacttcgacagcattcttttcttaccaaatcctattaaagaaaaataaagatgctgttctggcaggaacattaggtcttgaaagtagaacgagatttaaggaaacgggaaacacaaccccaaatctttttgaactttttgaattcatttctaaagaaaaatatgaaaatgaactatttatttgtattgaagcttcttcccatggtttagaacagaataggctgatgggtatagatgctgaaactagagcaattttaaatattgaacaagaccatcttgattttcacaaaaatattcaaaattatattgattcaaaactgaagatattagactttccttcccataataagattatcttaaatggagactgtgaaacttctgcttcgcttatagataatgaattagcagaacatgacaagtgcatagtaagcagtactaataaaaaggcagattactttttttcaatagataaaactaataaaaatggttgtgattttaaattaatatatagtaagaaatgtttagagct

SEQ ID NO: 311661 - DNA, 160 bp, Unknown
  Bacterial polypeptide expressing nucleotide sequence isolated from the Sargasso Sea
atgaaaagatccaaggcaatggaagaagcaaaaaaaaatagtgaagaaggagatatagttcttattgcaggaaaaggacatgaggactatcaaatattgaaaaataaagtaatcaagtttaatgactttaaaatagccaaaaaaatttttaataagtaag

SEQ ID NO: 311662 - DNA, 636 bp, Unknown
  Bacterial polypeptide expressing nucleotide sequence isolated from the Sargasso Sea
cttgaagataaagcgaaaaaaaaaaatttacaaaattgaacttaagttaattggtaaaattcaagtaaaaaacattttgatggcaatgttggctgcagaaaaaaataatatcagttttgataaaatagtaagagtaataagtaaaattaaaaatgttaatggtagacttgagaaaataggaattttaaaaaacaattctaaagtaatacttgattatgctcatactcctgaagctttgttttgttctttacaaaatttaaaggagcagtttaaaaataaaaaaattgcgattgtctttggctgtggtggaaatagagataaagccaaaaggcctaaaatgggcaaaatagcaaattatttttgcagcaaaatatatctcacagatgataatccaagacatgagaatccaaaaaaaattcgatcagaaataaaaaaaaaaataaaaaaaaataaattatatgaattttcaaacagagaaaatgctatatcaagtgcaattaaaaacctaaactcaggtgagatactattagttgcaggaagaggacatgaaactaatcaagattatgggtcttactcaaaaaaattttctgataaaaaaataattgaaaaaaatataataaataaaaataaatcttt

SEQ ID NO: 311663 - DNA, 708 bp, Unknown
  Bacterial polypeptide expressing nucleotide sequence isolated from the Sargasso Sea
aatgattgaaataccatcaagaaaattagctataaaaaaagcaattttaaatagtaagtcagatgaagttttaatcattgcaggaaagggacatgaaaacactcaagaatatattaaaaaaaataaattttctgacaaagattatataaaaaaatcaataattttaaaaaatagaattttatcaaatgattggaaattaaatatacttaaagaaattataaataacaaaaaattagatagaataaaaaatttaaaaattagtactaattctaaagaacaaaataaaggtaaaattttcgttggaattaaggggaaatcttttaatgggaatgattttgcagacgaagctttaaaaaatggagcaaaattagcgatacttcaaaataacaaaaatgatagtaaaaaaaagattaatgttaaaaatactctaagattattaattaaattttcacaaaagataagaatttcatctaatgcatctcaagttgcaattacaggatcttcaggcaaaacttcgctgaaagaattgttaggacaatgtcttcaaaataattattctacaacattttcaaaaaattcattcaataataaattcggtttaccgatttcattaataaatttaaataaggatacgacttatggaatatttgaaattgggatggataaaaagggagaaatagactatttatcaaaaataattaaaccaga

SEQ ID NO: 311664 - DNA, 596 bp, Unknown
  Bacterial polypeptide expressing nucleotide sequence isolated from the Sargasso Sea
taagcacgatataaatctcaacgttactggaccaaaattcaatttaaatttcttacttgctttgtccatggctcatttttctgaaaaattaaatattcaaaactatgatgaaaattttcaaaatattcaaaatcctaagggccggtttgaaatgattaattacaagagtaacaaaatagttgtagattatgcacatacccctgacgctatcaaaacaacagtggattttgtaacccaatatttctcaaatgtaattgtaatatttggtgcaggaggcgatagagacacagaaaagcgtctacttatgggcaatgcaacaaaaaatgcagataaaataattattacaaatgacaatccacggcatgaagatcctgaaaagattgcaaatgatattctaggaggatgtgataaagaaaaaactgttgtaatgcttgataggaaagaagcaatatcttatggcattaaccaactcaaggacaattcagttttattagtattaggtaaaggtcatgaaatgcatcaagagataaataataaaaaaattaatttcaatgactttgattatatctcggaccttttaggaggcataagttgat

SEQ ID NO: 311665 - DNA, 832 bp, Unknown
  Bacterial polypeptide expressing nucleotide sequence isolated from the Sargasso Sea
aaacataaaaattttaaatagtaaatataaacaaaacaatcaaattgttaaaatttccataaattcaaaagtttttaatttagaagttccacttataggatatttccaattaaaaaatttatttatggcaattttagctgcttcggtttgtgggttaaatcaaactaagatattgaatcaaatacataaaattaaaccagttccaggtagacttgaatgtgtagcaaacttaaataataattcaaatataattgtagattttgctcatactcctgatgcattaaaacaaagtctcattacattaaaaaaacaatttaaaaaagagatcataatagtttttggatgtggaggggaaagagataaaaaaaaacgacttaccatgggtaaaattgctaataaatattgcagaaaagtttttgttactgacgacaatccaagaaatgaaaacccacaaaaaataagaaatacaattataaatggatgtaaaaaaatcgctatagatattgcaaatagagaaaaagcaataaaaactgcaattcatgaattgcgttcagatgaaatacttctagtaacagggaaaggacatgaggaaattcaagactatggaaacaaaattaaaaatttttcagataaaaaaataataaaaaaaataattaataaaagcaaatttttaccagaaaaaagcagctaccaaaattttttattaaaaaaaatttttgataaaaattttattaataatactaattatgatggtgtatcaattaacacaagaactattaaaaaaaacgatcttttctttgcaattaagggaaaaaataatgatggtcataaa

SEQ ID NO: 311666 - DNA, 726 bp, Unknown
  Bacterial polypeptide expressing nucleotide sequence isolated from the Sargasso Sea
tatgggaagaattgcaaatgcttattgcaataaaatttatttaactgatgataatccaagaagagaaaacccaaaaaaaattagaaatcaaattaaagttaaaataaataaaaaaaaattgattgaaattccgtcgagaaaacttgcaattaaaactgcaattaaaaatattaaatcagaagaaatagtagtagtagccgggaaaggtcatgaaacatatcaagaatataaaaagaaaaaatatttttctgataaggattgcataataaagtcaattaaagaaaaaaataaatcattaaataaaaactggaaaacaaatattttagaagaaaatttagacaatagattaaatcataaaataattattaatgaagcctgtataaattcaaaagaaattaaaaaaaataatattttttttggaataaggggaaaaaaaatagatggtaataaatttgctaatgaagctataaaaaaaggagcatcaatttcaattattgataaaaattatggaaaaaaaataaaaaataaaattaaagtaaataatacattaaaattttttactaaatgtgctaccaaagttagagcttcgtcagacattattgcaattggtattacaggttctgcgggcaaaacatccctaaaagaattactgggacaatcattaagtaaaattcataatacaacctattctaaaaaatctttcaataataaatatggagttcctgt

SEQ ID NO: 311667 - DNA, 597 bp, Unknown
  Bacterial polypeptide expressing nucleotide sequence isolated from the Sargasso Sea
cgaggatcgagtgttaaaacgggctattctggtactttgggctggggcactttgggcaaattgcagcccgcgaatctaactacaccgaatgcagtcgatattcagaaaaggttgtttcacttgttgaaggagggatgttctcgaactgcgattgaagtcagttcacactctctcgatcagggtagagtaagcgatgtccattttgacatcggagttttttctaatttgacaagggatcatttagattatcacaaatctatgaaagcttatgctgagtgcaaggctaagctctttaaggattttgacctgaaaaaggctgttgtttgtgttgatgatccatttggggaatctattgcggattatcttggtaatagagttttgacttatgggttgaaaggagatgtgtcttgggtagccaggccctctccttatggttatacagttagttggaataccccatggggtgatttcgaaaacgaatttccattcttttgtgatttttcgatttcgaacctgggcgcggtcataggggtgatactatctgcaggaggttctgttaagcacctagcaagggagctaaattatttaaagcaaatt

SEQ ID NO: 311668 - DNA, 482 bp, Unknown
  Bacterial polypeptide expressing nucleotide sequence isolated from the Sargasso Sea
aaatatccatcttcctaatggaaggtttgaagttttagatttcaaaacaaaacataaaaaagtgattattgattttgctcatactcctgaagcaatggaaaaacttttatcgcaactatctgaaaattataaagaaacaatttatttagtctttggatgtggaggagatagggataaaggcaaaagaccaaaaatgggtgctatagcagagaaatatgcaacaaaaatatttttaacttctgataattctagaagtgaatctgcagatcaaataattgatatgatcgcagcaggcataaaagacaaatcaaagatacaaatcaatataaatcgagaaaaagcaattaaattagccataaattctatgagccgtaataacgttcttgttattgcggggcgaggacatgaaaattttcaaattgaacaaggtaataggttaaaattctctgatcgtgaaattgtaaaaaaatgtttagtgtaaa

SEQ ID NO: 311669 - DNA, 870 bp, Unknown
  Bacterial polypeptide expressing nucleotide sequence isolated from the Sargasso Sea
tcaatattttaaaaattatcaaagtataaatataatttttaataatcaaaaattcttctttaaaacctccttgataggaaaagttcagatcaaaaacttattaatggcagtaattgcagctaccaaagttttatcaatacgtaaaataataaattctttagaatcggtgaaatctgttaatggaagatttgaggaaataggcaaaataaggaatttatcccgggtgattcttgactactcgcacactccggatgctttaagaacatgtataaatgatattaaagatcaatttaacttaagcaatatttcaatagtttttggttgtggtggggaaagagataagtctaaaagacaaattatgggaaaaatcgcaaatgaaatgtgtcaacgtatttatttaacagatgacaatccaagaaaagaaaatccaatagcaataagaaatcagattaaaaaaaaaattaataaaaataaattatttgagataccttctagggatctagcaattaggacagcaattactgaactgaaatcaggcgatatattaattgttagcggaaaaggccatgaaaattatcaagagtataaagataaaaaaaaattttcagataagcatcttattaaaaaatatataaaacaaaaaaatcaaagtctttctaaatactggaaaaataatatattgaatgaaagcttaaaaatttttaggacatttaatttccgagaaataaaaggtatttccacaaactcaaaaaaaataggaaaaaactccatatttataggacttaaaggtaaaaaatttgatggtagtaagtttgttaatcaggctgtaaaaaataatgcaataatttcaatagttgatagtaaaacgaa

SEQ ID NO: 311670 - DNA, 178 bp, Unknown
  Bacterial polypeptide expressing nucleotide sequence isolated from the Sargasso Sea
attacaactttagatcctttaaatcttcaccaaagtttacagctaattaaaaacaaaaaaataaataatgtcattttagaggcatcaagccatggattaaaacaatcaaggatagatcatttaaaatttacttgttcaatttttactaatcttagtagggatcatttagattatcaca

SEQ ID NO: 311671 - DNA, 482 bp, Unknown
  Bacterial polypeptide expressing nucleotide sequence isolated from the Sargasso Sea
ggcatattatcaaaaaattttaatgtaaaaactataaacacaactttagatccaattaatcttcataaaattttaaataaacttaaagaacaaaaagtagataatgtaattttagaagcatcaagccatggattaaaacaacatagattgaattgtataaaatttaatacagctttgtttactaatttatccagagatcatcttgattatcataaaacatttaaagattatttaaattcaaaattaattctttttgataaattattaagaagaaaagggaatataatttttgataataggattattgaagccaaaaaattagagaaaatttcaaaaaaaagaaaattgaaaaaatacactttcggcacaaataaatcctttatgaatgtaatacatattcaaaaatttaaaaaaaaaaaaaaaatagatttttctttaaataataaaatatattcttttgagtctgaattaattggagaagt

SEQ ID NO: 311672 - DNA, 692 bp, Unknown
  Bacterial polypeptide expressing nucleotide sequence isolated from the Sargasso Sea
aaaacaaggtagacttgatggtataaactttaaagctggaatttttactaattttagtcaagatcacatggattaccacaaatcaatgaaaaattatttaaatgctaaattaatactcccaagaaaattgttaaaaaaaggtgactatattatcactgataggaacatctcagaatttaaaaaaatagacaaaattgcaaaaaaaaataaattaaaaaaaatatacattgattatatgaaaaaagaatatgatcttaaagaattcaaaccgatcggaaactttcaaaaaaaaaacttaatgatggcaattaaagcttgtgaaataattggtttaagtaaaaaaaaaatctctaaatgtataagtaaattgaaaagtgttaagggaagattagaattggtaaaagaatttcctgatcaaacaaagatatttatagattttgcccatactcctgacgcaattaattctgccatatcttctttaaaaacacattataaaaaagatgtaacaatagtttttggttgtggaggagaaagagataaaagtaaaagaaaaaagataggcaaaattgtaaatggtctctgtaataaaatttttgtaacagatgataatccaagaggagaaaaaccagaactaataagaaaagcaataataaaacatataaaaaaagaaaaagttgtagaagagggaaata

SEQ ID NO: 311673 - DNA, 160 bp, Unknown
  Bacterial polypeptide expressing nucleotide sequence isolated from the Sargasso Sea
gaatctattaaatttgccaaaaaaaaagatattgttttaattgcaggaaaaggacatgaagactaccaaattctcaatgataaagttattaattttgatgatagaaaaatagcttataaattattagtagaaaaaaacaatctcaataaaatttcctaat

SEQ ID NO: 311674 - DNA, 274 bp, Unknown
  Bacterial polypeptide expressing nucleotide sequence isolated from the Sargasso Sea
aaatcgaatggtgtcagcttaaaacttaataatacaactgttgatgctattacaataaataaaatacttacagatttaaagaataaaaaaattgaaaatgtaattttagaagcatcaagccatggtttgcatcaaaaaaggcttcatggcattaaatttagtacatctatattcactaatttaagcagagatcatttagattatcacaaaaattataaaaattattttaattcaaaattaattttatttaatgagttgacaaagaaaaatggaa

SEQ ID NO: 311675 - DNA, 402 bp, Unknown
  Bacterial polypeptide expressing nucleotide sequence isolated from the Sargasso Sea
tagagaaaacactaaagtcgataaaaatagaatatccaaataacaaaattattactgtttttggttgtggtggagatagagatatcaaaaaaagagctaaaatgggagaggttagtgtcagatattcagataaagtatatctaactaatgacaacccaagaacagaagatccaaaaaagattattaatgatatagttgatggaacaaaaaattctaaaaaaataaaaattattttaaatagagaagaagcaattaagaaagcaattgtcacagctgacaaaaaagatgtaatcttaattgctggtaaaggtcatgaaaactatcaagagatcaatggagtaagagaagcatattcagaccataaagttgtttccaaaattttaaaaaatgaaactttataag

SEQ ID NO: 311676 - DNA, 645 bp, Unknown
  Bacterial polypeptide expressing nucleotide sequence isolated from the Sargasso Sea
tttgcttgttgcaggtaaaggccatgaaaaaactcaagattttggaattagaaaaatttttctttctgacagaaaaattattcttaatgcaataaagataaaaaatttaactttgtctaaaaatttaaaaataaatataattaaagaattatctggaaaaaaaaaaatatcttctagaattattataaaaaaagcaagaattagttctaaagaaataaaaaaagaggatattttttttgcaatcaaaggaaaaaaaaatgatgggaacaaatttatagatgaagcttttaagaacaaagcatcattagcaatagtaaataaaataaataaaaataataacgctaaacgtcaaattaaagtccaaaacactttaaaatttttaacaaaaaactctataatttttagacaaaatataaatacaaaaatagttgcaataacaggaagttgtggaaaaacaactctaaaagaattattgggaaatgcattaaagaaaatatctagaacaagtatatcaccaaaatcatataacaataaatacggtgttccgctaagtctttttaatttaaatcaaaatgatgattatggagttctagaagttggaatggataaaaaaggagagatagattatctttcaaaaattgttta

SEQ ID NO: 311677 - DNA, 211 bp, Unknown
  Bacterial polypeptide expressing nucleotide sequence isolated from the Sargasso Sea
atttgatacaagtatttttacaaatttatctcgtgatcacttagattaccacaaaacatataaagaatatttaaactctaaattaatattgtttaataaacttacaaaaaaagggggaaatataatatatgaaaatgatatttctcaatcgaaaatacttaaaaaaatctgtataaagaaaaatctaaaatcactaactattggaaaaaaa

SEQ ID NO: 311678 - DNA, 845 bp, Unknown
  Bacterial polypeptide expressing nucleotide sequence isolated from the Sargasso Sea
tggtggaaatagagatcaaaataaaagatcaaaaatgggtaaaattgcatctgatttctctgataaaatttatcttactgatgataatcctagatttgagaacccagataaaattagaagagatattaaaaaaggaattaagagaaaaaaaataattgagatttctaatagagcgaaagcaatatttgaagcaacaaaaaatttgaataccggagaaattttattagttgctggtaaggggcatgaaaaaattcaggatataggtaagcgaaaaatttacttttcagataaaaaaattattcttaaagcaattaaaattaaaaacctaagtttatctgataatttaaagttaaatataattaaagagatttcaggtaataaaagagtttcttcatcattatctattaagcaagcaaaaattaattcaaacgaagtgaaaaaagatgatattttttttgcaataaaaggtgaaaaaaatgatggaaataaatttgtaaaacaatcatttaaaaatagggcgtccttagctattgtaaatcgatttcaaaatagtttgaacaaatctaaacaaattaaagtaaaagattctctaaaatttttgacagatatctctaaaatttttagaaaaaacatagatgctaaaataattgctataacagggagttgtggcaaaactacattgaaagaattattgggcaacacattgaaaaaaatttcaaaagtaagcatctctcctaaatcatataacaataaatatggagttcctttaagtctttttaatctaaccaataaagataattttggtgttttagaagttggaatggataaaaaaggtggaaattgac

SEQ ID NO: 311679 - DNA, 479 bp, Unknown
  Bacterial polypeptide expressing nucleotide sequence isolated from the Sargasso Sea
aaaatttcatcatatacctggaagattagaacaatttgaattaatcaataataatcatgccataattgatttcgcacactcacccgattctttcacaaatattctttctacaataaaagaagtaacaaataaaaaaattataacaatttttggttgtggtggagaccgcgatagaactaaacgacctattatggcagctatagctgaaaaattttcatatcatgtatatattacgaatgataatccacgaactgaaaatgaagatttaattatagatcaaactataaaaggttttaaaagcaatcaatttactgtaatgaaaaatagaaaaggtgctatagagtatgttttaaataatgcaaaaaatacaattgtgataattttaggtaagggtagagatgactatcagataataaataatgaaaaaatgcatcattccgattttgaatcaatagaaaaatatttaaatgagaattaaa

SEQ ID NO: 311680 - DNA, 1330 bp, Unknown
  Bacterial polypeptide expressing nucleotide sequence isolated from the Sargasso Sea
atgaataaaagagccaaaataggaaaaattgttaacaaattatgcaataaaatatttgttacagatgacaatccaagaagagaaaatcctaaattaattagaaaagctattattaaatatataaaaaaagaaaaattaattgaaataggtgataggagaaaagctattcactctgcaataaaacaggcgagtgcgaatgaaattattttaatcgctggaaaaggacacgaaaatattcaagattatggcaaaaagaaatttaagatctcagacttcaaaatagtaaaagattttaaaattaaaaagattcaatcgaaaagaaaagcaaacattcatcaaaataatttttttataaataaaattataaaaaaaaaattaaataaaaaatttttaggtgtttctataaattctaagtcaattaaaaaagaaaatttatttgtagcaattaaaggaaaaaataatgatggtcataattatgttaaagaagctattttaaaaggggctagcggttgtgttgtatcaaaaaattttaataaaattaaaaaaaataagataattaaagtttctagtacttacaatttcttaaaaaaacttgctattgtaaaaagaaattactttaacggaaaaattattgctgtcactggcagctccggtaaaacaacagttaaagatttattaggaaatttgcttaaaaattatggggacacatattattctccaagttcgtttaataacttttatggtgttcctttaagtttatgtaatctagaaaaagagcataaatttggtgtttttgaaattggaatgagcaaaagcggtgaaattaacgatctatcaaaaattgtaaaaccagatttagcaattattacaaatatagccgaagctcatattgaaaattttaaaaatcttaaacatatagcaaaagctaaaggtgaaataattgaccatatttcatcttcaggctatttaatagtagacagagataataaattttataattattttaaatcaagggcaaacaaaaaaaagataaaagttatttctgttggttataatgcaaaatcagatattagggtacttaaagaaaaaagatttttcgaatacaaacttataactataagatcatttcaaaaagagtataaatttaaaattaaagatcaattaacaaaaaatattatttttgctttagctgctatagaaattttaaacttagatgtaaataaagtaaaaaataaaattaaaaatataaacatattagaagggagagggaaggtttataaaattaaatataataatttaaattttaatttgatagatgaaagctataacg

SEQ ID NO: 311681 - DNA, 961 bp, Unknown
  Bacterial polypeptide expressing nucleotide sequence isolated from the Sargasso Sea
ttgaaatttttaggtaaacctaaaaataaaacttatgaaaatataattttagaagcttcttctcatgctcttgatcaagaaagatttaagggtataaagtttaatacttctggatttacgaatctttcaagagatcattttgactatcacaacaacataaataaatattttgaagctaaactaaaacttttttcaaaaaacttatctgataagtttgtttatattgatagtgaatggggaaatagagtcaaagagaattctgttattccatcatttaagataggtaataataatgattcaaatctaagaatcctagaagaaaaattatttccaaatatcaatctgaaaatacaaatcaatgaagataaacatgatataaatttgaatgttactggacccaattttaatttaaatttcttacttgcattatcaatggcttatttttctgaaaaatcagatattcaaaattatgaggaaaattttcagaatattcaaaatcctaagggcaggtttgaaataattaattttaagagtaacaaaattgttgtagattatgcacatacccctgacgcaatcaaaacaacagtggattttgtaacccaatatttctctagtgtaattgtagtttttggtgcaggaggcgatagagacatagaaaagcgtttgcttatgggcaatgcaacaaaaaatgcagatcaaataattattacaaatgacaatccacgtaatgaagatcctgaaaagattgcaaaagatattctcgaaggatgcgataaagaaaaaactatcgtaatacttgataggaaagaagcaataacttatggtattaaccaactcaaggagaattcagttttattagtattaggtaaagggcatgaaatgcatcaagagataaaaaataaaaaaattaattttaatgattttgactatatttcagaccttataggagatataaattgat

SEQ ID NO: 311682 - DNA, 898 bp, Unknown
  Bacterial polypeptide expressing nucleotide sequence isolated from the Sargasso Sea
ttctcatgcacttgatcaaaaaagaatgaccaagataaactggttttattctttatcaataatgaatatacgttcagatcacttagattatcatctaaatattgatgcctatatagattcaaaatttgaaattttcagacttaattcgtcaataaaattaattgatgaagagctattagatcattcgaaatcttatgattttaataataattattctttaactagcatcagtaacacaaataatttttcagacatattttttaacatcgaaaaactatctttaaataaatgtattttttcaatacaaattaataatccaccattatgtcagaaacatgaaaagcacaaaaaatacaaatttttctgcaaaatatttcctgaatataatatttctaatttggtttttgcaatatgctcaattggttttgatgaattcagtgagaacgaaattaatgatctgtcatatttaaaattaccaaaaggaaggttagaacttattaaaaatatacctgcaaatgtaattattgattatgctcataatgaacactccttccatactgttttgtcatctttgaaggaatattttgaaaatttaattgtggtttatggttgcggtgggaatagagataaaagcaaaagatcaaaaatgttgagtattgctacggaaaattgtgctcaggtaatttttacatcagataattcaagaacagaaagctttaataatatacttgcagattcaaaaaaaggtaatgatcttgataaagtcatatcaatcgaagatagaaaaaaagccatcattcatggcactgagctaattaaggaaaaagactgtttacttatactaggaaaaggccatgaagttacgcaagatattggtggagaaataaaacatttttag

SEQ ID NO: 311683 - DNA, 454 bp, Unknown
  Bacterial polypeptide expressing nucleotide sequence isolated from the Sargasso Sea
tttcctttattccggtgctactgcgatagttgattatgcgcatacgccagatgcttatacaaaagtacttagtacaattaaagaactaatgattgattcagaagctaatatttatgttgtatttggttgtggaggtaatagagataaatcgaaaagatccataatgggtgctatagttgagcaatttgcaacgcatagctttattacacctgacaatccaagaaatgaaaaaatatctgtaataaatcaagaaattattaatggatttaaaaaaaataattttgatgtttttcttgatcgggagaaaggtttgaaaactgctttaaacaaggcagttaaaaatgatattgtgattgctttaggtaaaggacgtgaagattatcaagaaatgaataatgaactaattccgtattcagacataaatattattaatgagtatagtcatgagaattag

SEQ ID NO: 311684 - DNA, 1297 bp, Unknown
  Bacterial polypeptide expressing nucleotide sequence isolated from the Sargasso Sea
aatgaaagttttacgagatctaggcttaaatattaatgaagacatatttatatctggattgacaagctcatctggattaatagaaaaagatcaatgttttatagctcttcaaggtttaaggtctcacggacttgattatattgacgaagctattgctaatggagccagctgtgtcttgcatgataaagaaaattataatgagcaacacaagataccatgtttttttatagaagatttatttaagagacaaaaagaaatatgtcttaatttttataatattcgtgaaaaaaacttaaagttccttatttttacagggactaatggaaagacttcgaccgcattcttttcttaccaaatactattaaaaactaacaaagatgcattactagcagggaccttaggaattgaaagtaaaacaagatttaaggaaacaagtaacacaactccaaatctttttgaactttttgaatttatatctggagaaaaatatgaagatgacctatttgtttgtatcgaagcttcttctcatggtttagagcagaatagacttataggaatagatgctgaaactagggcaattttgaatatcgagcaagatcatctagattttcacaaaaatattcaaaattatattgactcaaaactgaagatattaaatttctcttctcataataagattatcttaaatggggactgtgaaacttctgcttcacttataggtaaagaattagcagaatatgaaaaatgcatagtgagtagctccaataaaaaagcagattactttttttcgatagataaaactaataaaaatggctgtaattttagattaatatcgaatgatagatgtattgacttaaaagtaagattttttcaaaaacataatatttataatttagtttttgcaatagcatgccttgatcaaatagaaaaaaatattttttttgacaaggagcttattaagtcaatagatcttccttctggtagggcaaaaataatatctaaaaataataaaaatattttaattgactatgctcataattttgggggcatcagagctatagttaattctgtctcaaatatttatcatgatttaatcattgtttatggatgtggaggagagcgagatagttctgaaagaggaaaaatcatgaaatttacatgcgctaattcacgaaaagtcatttttacttctgacaattgtagaaatgaaagtttccagtcaattttggatgattctagaaaagatcaggagtatagtaacttaattgttgaaccagataggaaacaagcaataaag

SEQ ID NO: 311685 - DNA, 991 bp, Unknown
  Bacterial polypeptide expressing nucleotide sequence isolated from the Sargasso Sea
tttgttttctaaaaatcattcaaatgaatattttgataaaagtaaggaacaccatacacctcatggttttacaaacccttttctttcagatgggccacaaaataaaaatttttatgatttgattaaaatgatgcgtgaaaaaagacctgataaacctaagaaaattaaggttgaagaaatttcatcaagtgaaatcgaagacttgattaaaaaaggagaaaatttttatttatggataggacattcaactgcttttctacacataaatggtaaaaatattcttacagatccaattttttccgacagatgctcaccctcgcagttattcggtccaaagcgctattctgaaccttctatttctataaattcattacctaaaattgatcttatagtaattagccataatcactatgatcatcttgattatcatacagtgaagttgattggtgattcaactttttggtttgtgcctttaggattaaaaaagtggtttaatgataacgatgttaagaatgtaatcgaaatggactggtttgaatcatatgactatggtggtataaaagtagattgcctgccttcgcaacactggtcaaaacgaactgcgtttaaaagttttgacactctttgggcatcttggtcaattgaagtggaggattttaagttttggtttgctggagatactggatacaacgatgtacagtttaaatcaattggtagagactatgggccatttgattttgcggcaatacctataggtgcttatgagccaaggtggtttatgaaggattttcatattaatcctgatgaagcagttcaaatccatttagatgttttatcaaaaaagagtgtaggaattcattatggaacttttattcttactactgaaccaattgatgaccctataaaaaaattggatattgctaggcaaaaatatgggcttgatataaatgatttttcagattcaaaattagggaaaattattaaattataa

SEQ ID NO: 311686 - DNA, 1246 bp, Unknown
  Bacterial polypeptide expressing nucleotide sequence isolated from the Sargasso Sea
attgataaaattaaataaaaaatttttaatttatggatatggtgtaagcgggaaatcagtagaaaaatatcttataaataataattgtaattttaatatatatgatgattttaaaaaaattattaataaaagagtaattagcaaaaagtatttagaaaataaaattaatcaatatagttatttcgtagtatctccatcaatcaagattgaaaaaaatcattttttatataaacataaaaataaaattttaatcgatttagattttttaagtttagaaatatcctcgcaaaaaatattgggcgtaacaggaacagagggtaaatcttcaacttgtagttatattaatcaaatactttcaaaaaaatataaaactaaaattattggcaattttggaaatactattttggacaaaacaaatttaaacaaatatttatcaaaaatagatattttaattattgaattaagttcatatcaattagataaattgaaatttttaaaattacattatgctttgattacaaatatatttagtgatcatttagattaccatacaaatattaaaaattacattagctctaaatttcgaatacaaaattttttatataaaaattcacctttatttttatcaaattacttatttctaaaacatcgaagtcatgtaaaaatcaataaaaatagattaattttgaatgatgaaaaattaattcctaaaaaagaactccccaaccatattagagaattaaatttatactcaattaaaaatttgatttattttatcgattcacgaataaaaataaaaaatattaatgtttatgatgatttaagtcatagaattcagctaatttataataaaaattctctaaaaatttataatgatagcaagtgcactaacttaaataacgctgtttataaaaataatttaataaatagttcaaaaaaaattttaatccttgggggcatacttaagaaacaagataaaaatttaaaatttaatattaaaaatacattagtgctaacatttggtaatcaaagagatttatttattaatcaattaaatcttattgactctaattattttaaatttaatagacttattgaattaataaaatttcttaaattaatagttaaattacgtaaatttgaatatatacttttttctcctggtggtgagtcttttgactcttttaaaaattatatagatcgtggaaattattttaatcgacttataaaaaaagccatatcttga

SEQ ID NO: 311687 - DNA, 1282 bp, Unknown
  Bacterial polypeptide expressing nucleotide sequence isolated from the Sargasso Sea
atgaaagttttacgagacctagacataaatattaatgaagacatatttatatctggattggcaagctcatcaagattaatagagaaagatcaatgttttatagctcttcaaggtttaaggtctcacggacttgattatattgacgaagcgattgccaatggagctagctgtgtcttgcataataaaaaaaattattatgaaaaacataagataccttgtttttttgttgaagatttatttgagagacaaaaagaaatatgtataaatttttataatattatcgaagaaaacttaaagttccttatttttacagggacaaatggaaagacttcgacggcatttttttcttatcaaattctattaaaaaaaaataaagatgcagtcctagcagggacattaggccttgaaagtaaaacaagatttaaggaaacaagaaacacaacaccaaatctttttgaactttttgattttatatctaaagaaaaatatgaagatgacctatttatttgtattgaggcttcttctcatgggttagagcagaatagacttataggaataaatgctgaaactagagcaattttaaatattgagcaagaccatctagattttcacaaaaatatccaaaattatattgactcaaaactgaagatattagatttctcttcccagaataagattatcttaaatggagactgtgaaacctctgcttcacttatagataaagaattagcagaatatgataaatgcatagtgagtagctctaataaaaaagcagattacttttttttgatagataaaaccaataaaaatggctgtaattttaaattaatatcaagtgatagatctatccaattaaaagtaagattttttcaaaaacataatatttataatttagtttttgcgatagcatgccttgatcaaatagaaaaaaatattttttttgacaaggagcttattaagtcaatagatcttccttctggaagggcaaaaataatatctaaaaataataaaaatattttaattgattatgctcataattttggaggcatcagagctatagtgaattcagtctcaaatatctatcatgatttaatcattgtttatgggtgtggaggagagcgagatacttctgaaagagaaaaaatcatgaaatttacatgcactaattcacgaaaagtcatttttacttctgacaattgcagaaatgaaagtttccaatcaattttggatgattctagaaaagatcaggagtatagtaacttaattgttgatccagatagga

SEQ ID NO: 311688 - DNA, 1465 bp, Unknown
  Bacterial polypeptide expressing nucleotide sequence isolated from the Sargasso Sea
atgagtgaatatgaagaaatattaggtataaaaattcctaaaaatactaaaattaaagctgtaaccaattcatcaaagaaggtaacaaaggattcaattttttttggattcaaaggaactaaagttcatggaagcaagtatgctaaagatgccattaagaatggagcatcgttggttattcacgacgatcctttgtttgtaaaaaataatgaaaagataatttactcaaaagatctaaaaaaaaatattattaaatttttagattccttttattcaattgatattaatagtaataattttttcgcatttacaggaactaatggcaagtcgtcaactgcctacatttgtcatcaattacttcgcaatatggattatgaatctttatacgtaggtaccctgggtattaaacataatgatgaaaaaattcaaacaaaattttcaaataaaacaactccagatatatttgaattatacgaaatacttggttcacttaatttcggtttagactctataagtatatgtctggaagtatcatctcatgcgcttgatcaaaataggcttgatggcattcaatggctgaattctgcatcaatattaaatattggtgaagatcatttggattatcataaggatatttcttcttatagagattcaaaatttagtatttttaaaatgaattcgccaataaaacttgttattgatgaatctaataattttgtaaaagactatgattttttaaacgaaacaaagttgacatctataagtagtaaaaataatttttctgatatttattataaaatcacaaaagctaattttaagaattgcgaatttaaaatatttcttaataatccaccaagcggacaagaaatacataaaaataagaaatataaattcaaatgtactcttttcccagagtttaatatcaccaatcttgtatttgcaatttcttctataggatttgataaattctctgataagcatgttaatgatctatcttttattaagttgccaaaaggtaggactgaagttattaataatatttctaaaaatataatcatagactatgcccataattctcactcatttgaagtgctattatgttcaatcaaaaaatatttcgataatttgattttagtttttggttttggaggtgatagagacaaatctaaacgagcaaagatgttacaaattgctttagacaattcgtctaaaatttttttaacatcagataattccaggagcgagaaatttgaaaatattataaaagatgccatgaaggggaataatgaaggagatataacaatcatagaagatagaaaagaggcaataataaatgcaaataaatttttggataaaaatagttgtttgttaattcttggcaaaggacatgagcaaactcaagaaattgatggaaaaatttatcattttagtgaccatgaggtagttgatgaaatttataactaat

SEQ ID NO: 311689 - DNA, 952 bp, Unknown
  Bacterial polypeptide expressing nucleotide sequence isolated from the Sargasso Sea
gaagtatcatcacacgcccttgagcagaatagattaaagtacatagaagaatttgtagctacgtctattttgaatatcgagaaagaccatcttgattatcataaaactgagaaagcttaccaagatgcaaagtttaaaatgtttaatctttcatcagaatctataaaaataattgatgaagatttgaaagggtctatggagagctataaatctattgtggatatcaatgacgttacttttattagtaataaaaatagattttcagatatttattatgaaataactgaaagtagtattgagaagaccacatttttattaaccctaaaagtaaatgacgaaaaaacaaccaagaaaaaaattaaaagatttaaattcacctgtactttgttcccagattttaatatacataatttagtcttcgctctttcatcaataggcagcatagaagaatatttcgatgaaaatatagttaatgatttatctttcttagatttgccaaaaggaaggtcggagctaatacccaatatttctagcaatgttattattgattatgcacataatcctagggcatttagtttctttttatcttctttagaaaaatactttgaaaatttagtggtcgtatttgggtgtggaggcaacagagataaatcgaaaagatcagaaatgttaaaaatcgcaataaaacatgcatcaaaagtaatatttacttctgataattcaagagatgaaggttttgatgatatttatcaagatgctatagaaaataatactttagaaaaagttattccaattagagatagagaaaaagctatcctacatggaagcacgttaattggagagaatgattgcttaaccattctaggaaaaggacatgaagaaatacaggaagaaaatggaaaaatcttattttttagtgaccatgaggtagttaatgaaatttataaataat

SEQ ID NO: 311690 - DNA, 199 bp, Unknown
  Bacterial polypeptide expressing nucleotide sequence isolated from the Sargasso Sea
ttgaaaaaccgtgagctggcagtgtctattcccgatcgcgagcaagctattcgtcattgccttgagcatgcgcatgaaagcgacatcatcatcgtggccggaaaaggccatgaagattaccaaattatcggtgacaaaaagactaactataacgaacgtgcagttgtggcgcgactgcaacaggagtacagcaaatgat

SEQ ID NO: 311691 - DNA, 147 bp, Unknown
  Bacterial polypeptide expressing nucleotide sequence isolated from the Sargasso Sea
gggacagagacaaaggcaagcgaccgttaatggggcaggctgccgaggttggtgctgacgctattgtgatcaccacagataacagtcgcagtgaaagccctgaatctatcgccgaggatatcatttgcgggtttgaaaaaccgtgag

SEQ ID NO: 311692 - DNA, 1369 bp, Unknown
  Bacterial polypeptide expressing nucleotide sequence isolated from the Sargasso Sea
ttgacaagctcatcaggattaatagaaaaagatcaatgttttatagctcttcaaggtataaggtctcacggacttgattatattgacgaagctattgctaatggagccagttgtgtcttgcataataaagaaaattataatgaacaacataagataccttgtttttttatagaagatttatttgagagacaaaaagaaatatgtcttaatttttataatattcgtgaaaaaaacctaaagttccttatttttacagggactaatggaaagacttcgaccgcatttttttcttaccaattactattaaaaaccaataaagatgctgtcctagcagggaccttaggacttgaaagtaaaacaagatttaaggaaacaagaaacacaactccaaatctttttgaactttttgaatttatatctggagaaaaatatgaaaatgacctatttgtttgtattgaagcttcttctcacggtttaaaacagagtagacttataggaatagatgctgaaactagggcaattttgaatattgagcaagatcatctagattttcataaaaatattcaaaattatattgactcaaaactgaagatattaaatttctcttctcataataagattatcttaaatggggactgtgaaacttctgcttcacttataggtaaagaattagcagaatatgaaaaatgcatagtgagtagctccaataaaaaagcagattactttttttcgatagataaaactaataaaaatggctgtaattttagattaatatcgaatgatagatgtattgacttaaaagtaagattttttcaaaaacataatatttataatttagtttttgcaatagcatgccttgatcaaatagaaaaaaatattttttttgacaaggagcttattaagtcaatagatcttccttctggtagggcaaaaataatatctaaaaataataaaaatattttaattgactatgcacataattttgggggcatcagagctatagttaattctgtctcaaatatttatcatgatttaatcattgtttatggatgtggaggagagcgagatagttctgaaagaggaaaaatcatgaaatttacatgcgctaattcacgaaaagtcatttttacttctgacaattgtagaaatgaaagtttccagtcaattttggatgattctagaaaagatcaggagtatagtaacttaattgttgaaccagataggaaacaagcaataaagaatggtatagatgccttaaaagaagatgatattttattgattcttgggaaagggcatgaagaatttcaagaaataaaaggaactaagataccatttaacgatcaaagggttgtggaggaaatattatgaa

SEQ ID NO: 311693 - DNA, 1447 bp, Unknown
  Bacterial polypeptide expressing nucleotide sequence isolated from the Sargasso Sea
aatgagtaagttagaaaaaattttaaaagtttcttttccaaatggaactaaaattataaatgctaccaattcttcaaaaaaaattaaagaaaacactttattttttgcattgcaaggacaaaaaatgcatggaagtgtatttattgaagatgcaataaatatgggcgtatcagcagttgttcataataattcaaaattcagatcagatagcccattagttttttttattcaagatctagatagtaaaatcatagacatccttacttgtttgaacaaaattgatattaataataataatttttttgctttcactggaacaaatggcaaaacttcatctgcttatttctgtcatcagatattaagatttggtggatatgattcactttatataggaaccctaggaattcagtataatgagagcaaattagaaaaaaaattttctgataaaacaacacctgacatatttgaactatttgaaattattaaaagttttagttttaagaatcctgtaaatatatgtattgagatttcatcacatgctttagatcaaaaaagacttcaaggaattaaatttttaaattcagccgcagtcttaaatatcaaaagtgatcatattgattatcataaaagtatcgagaaatatcgtgatgccaaatttgaaatttttagaatgaattcagcattaaagcttatcaacgaaaatttaaaagaatttatagatagttatgatcatattgtaaataatcaatataagttactttgtgtcagtgaaaggaatgaattttctgatattttttacaaaatagaaaaaatatctattgatgaaacaatttttgaaattcatataaattcttctggccatttttatggattttctaataagaaaaaatacaaatttatttgcaagatattcccaagctttaatattgaaaatttagtatttgctatttgttcaattggattcgatttatttaaagaatctgaattgaacgatttatcatttttagaaatgccaaaaggaagggctgagtttataaaaaatattcctacaaatattattattgattatgctcataatcatgaagcaattgaaatttttttacactcaatcaaagactattacaaaaatctaatagtaatccttggatgtggtggagatagagataaatcaaaaagagataagatgttaaggtctgcaataaaaaattcttcgaaagtaatttttacgtctgataactcaagatctgagaacttcaatgatattttttctcatgcatctgaaaataatgatgtaaaaaatgtgcataaaataaaagacagaaaagaagcaattaattatggcgttacaattctatcaaaagacgactgtttagtaattttgggcaaagggcatgaagaaactcaagaagagaatggaaaatttatgttttttagtgatcatgaggta

SEQ ID NO: 311694 - DNA, 1342 bp, Unknown
  Bacterial polypeptide expressing nucleotide sequence isolated from the Sargasso Sea
aaaaattgttcttttgtttggttgtggtggaaatagagatcaaaataaaagatcaaaaatgggtaaaatagcttcattatatgcagatcaaatatatttgacagatgataatcctagactggaaaatcctaataaaattagaaaagatattaagagagggataaatagtaaaaaaatatcagaaatttctgatagagcaaaggcgatttctgaagcggttaaaaatttaactacaggcaatatcttattagttgctggcaagggtcatgaaaaaattcaagaaattggtaatcataaaatttatttttcagataaaaaaataatcttaaacgcaattaaattaaaaaatttgaatttatcaaataatttgaaattaaatcttattaaagagtcatctggtgataaaaaattaaatacaaatttaactctgggacaagctagaattaattcaaaagaagtaaaaaaaaatgatattttttttgctatacgaggcaggaaaaatgatggaaataagtttgtagaagaagctctgaagaaaaaagcttccatagtagttgttaataaaattaaaaaaaaattagattataaaaaacaaataaaagtaatggattcattgaaatttttgaccgaaacatcaagtattttcagagagaatattgatgcaaagataattgcaataacagggagctgtggaaaaactacacttaaggaattattaggcaaaactttaaaaaaaatttctaaaacaactatttcccccaaatcttataataataaatatggggttccattaagcctttttaatttgagtaagaacgataattatggagttttggaagtcggcatggataaaaaaggggaaattgattatttatcaaaaattatcaaaccagacataagcgttataactaatataaattatgctcatgctaaaaattttaagaatataaaagatattgcacttgcaaaatctgaaataatttcaaatacgaaaccaaatggtttcgtgattttaaatgcagatgataacttttttacattacataaaaaaatagctacaaaaaataatgttaatacaatttcatttgggatcaaaaatcataaatctgatgtgaagttaattaatattattaaaattaataataattttaaaataaaaatcaaagctaaagatttatacaaaagttttgtgatttctaataattttcaaaataatatttataatattttagctgctttagcggtaatgagtatcaatattgatattactaaattagataaaaaagttttttttaattttacaactccccaaggaagaggagatttatcaagaataaaaata

SEQ ID NO: 311695 - DNA, 643 bp, Unknown
  Bacterial polypeptide expressing nucleotide sequence isolated from the Sargasso Sea
atgttacttggaaattattttgatggtatccacaaaaattataaaaaattatttttttcaggtatttcttttaatactagatcgttaaaaaaaaataatattttctttgcaattaagggaaatagtatagatggaaataaattcatttctaaagctatagaaaaaggttctaaaataattgtaacagaacaaaaaataaaagattaccgtaatggaattttttttataagaacaaaaaatataagaaaattattagcagaagtttcatttaaaatttacaacaaaataccaaaaaatttagtagctgttactggaactaatggaaaatcttcagttgctgaattttatcttcaaataatgcaattaaataaaaaaaaagttgcttcaattggaacactgggggttaaatcaaaaaatataaatttaaatttatttaatacaacaactgatccaattaatttggctcagatcttacaaaaattaaaaaaagaaaaagttgataatgttatcatggaagcttccagtcatggattaaaacaatatagattagatggattaaaatttaaatctggaatttttacaaatttatcacaagatcatcttgattatcataaaaatttaaaaaattatttaaagcaaaact

SEQ ID NO: 311696 - DNA, 307 bp, Unknown
  Bacterial polypeptide expressing nucleotide sequence isolated from the Sargasso Sea
tatgggatcaatagctgaagagttttctgatcaactttttataacttcagataatccaagatcagaagaaccccaaaagatagtaaatgatattttgatgggtataaaaaaaagagaaaaaataacaattgagattgatagatttaaagcaataaatgaatctattaaatttgccaataaagaagatattgttttaattgcaggaaaaggacatgaagactaccaaattctcaatgataaagttattaattttgatgatagaaaaatagcttataaattattaaaagaaaaaagaaaatttcaataa

SEQ ID NO: 311697 - DNA, 316 bp, Unknown
  Bacterial polypeptide expressing nucleotide sequence isolated from the Sargasso Sea
attaaaaaaagttttgcaatcaattaaaaaactttgtgaagggaaactaataactgtttttggctgtggcggagatcgtgatcgtagtaaaaggcctttgatgggatcaatagctgaagagttgtctgatcaactttttataacttcagataatccaagatcagaagaaccccaaaagatagtaaatgatattttgatgggtataaaaaaaagagaaaaaataacaattgaaattgatagatttaaagcaataaatgaatctattaaatttgccaataaaagaagatattgttttaattgcaggaaaaggacatga

SEQ ID NO: 311698 - DNA, 490 bp, Unknown
  Bacterial polypeptide expressing nucleotide sequence isolated from the Sargasso Sea
tattttaaaaaaaatcattaatccccctggaagattacaaaaagttttaaataataataaaaattataaagtttttatagattatgcgcataccccagaggctttaaaagaagttttaataagcaaaacttctaataaaaaaaaaccaaatattgtttttggatgtggaggagatagagataaggggaagcgaaaaaaaatgggaagaatagcaaatctttatgctaatagaatatatattactgatgataatccacgttttgaggattcttcaaaaattagacaatctattttaaagtattgtaatagtcgggctttggaaattcctgatcggaaaaaagcaataataaatgcagtaaatgatttaaaaaaaaacgagacattaattattgctggaaaaggccatgaaagctttcagattataaaaaacatttctaacccattagatgattataaagtagcaataaaagttctaaaaaaaaaattataa

SEQ ID NO: 311699 - DNA, 376 bp, Unknown
  Bacterial polypeptide expressing nucleotide sequence isolated from the Sargasso Sea
tttggattcaaaaattcgaaccgttattggttgtggtggtgatagggataaggctaagaggcctgaaatggggaaaatagcacataggtatagtgattcagtagtttttacttctgacaatcctaggacagaaaaccctcagattattattaatgaaatgttgagtggtttgtctgaggaccagcaaattgatgcgtttgttaatctagatcgtttagaggcaattaaaatggctctttctttttccaaggacaaagacattgttttaattgcaggaaaaggtcatgaaaaatatcaggaaataaatggtgttaagcatcaatttgatgatatggcaataactaaaagaatattaaaaataaagcaagaattatga

SEQ ID NO: 311700 - DNA, 589 bp, Unknown
  Bacterial polypeptide expressing nucleotide sequence isolated from the Sargasso Sea
aaaattttaaatacaattccaaaattgaaaccagttgaaggaagatttgaaaaaataggtaaaattaaaaatcaatcgaaagtaattctcgattatgctcatacgcctgatgctttaaaaacatgtcttttaaatcttagagaacaatttcccaataaagcaatcacagtactattcggttgtggtggagatagagatcaaaacaaaagatcaaaaatgggaaaaatagctagtgattttgcagacaatataattcttacaaatgataacccaagatttgaaaaacctcaaaaaataagaagagatataaaaaagggaattaaaaaaagaattacagaaatttctaatagagcaatagcaataatacaagctgtttataatttgaattcaggtgatattttgttagttgctgggaaaggccatgagaaaacgcaagaaattggaaataagaaaattttcttttctgacagaaagttaattctaaatgctattaagcataaaaataataatttatcagataatttaaaattaaatgtggttaaagaggcagctaaaattaaaaaattgtctgcttccatatctttaaaaa

SEQ ID NO: 311701 - DNA, 777 bp, Unknown
  Bacterial polypeptide expressing nucleotide sequence isolated from the Sargasso Sea
tttgagccaagatcatttagattatcatggttcaattgagaattatttgaactctaaggcaaaattatttcaacaaggtgtatctgaaaaatttgtatatattgattctcctgaaagcactcaaattgtaagtgcttcaaatatcgaatcatttagcattggtacaaatgatcacaatcatgttaaatataaagaaatagatgatcaaatattaaaattcacaattgacagtaatcaagttgagtgtcagattcaattatcagggccaaaatttattgaaaattttttgttagctttttctatggcttattactcgaatttatttgaattggaagatttgatacataaaagtaaatatgttgtaaatccacctggaaggtttgaaacaataaatcgaaacaataaaactgtaataatagattatgcacatactcctggtgcaataaaagaggcaattaaatacgctcaaaacaagtatgaaaaagtaaatgtaatattaggtgctggaggtgatcgagacaaaggcaagaggatgaaaatgggagaggcttcctcaaatgctgactacgttattatcacaaatgataatcccagaaatgaagaccctttagaaatatccaaaaatatacttgaaggtattccactaaataaaagttctgaagtaatcctagatagaaaagaagcaatacataaaggagtacaattattaaaagagaatgaagttttattagtattaggtaaaggacatgagaaatatcaggaaatcgataataaatt

SEQ ID NO: 311702 - DNA, 943 bp, Unknown
  Bacterial polypeptide expressing nucleotide sequence isolated from the Sargasso Sea
tatgaaagaaaatcataaaattatcaaagtcaaaaatgtgagagaagctctaggaaaaatttgtgcgaaattttatattaataaaccaaaaaatattatagctgtgacaggcactaacggaaaaagctcagtagcagatttttttcatcagatacttacttataataatatacctgttgcaacaattggaacactagggataaaaactaataagataaaaaaaaatagtctgactagcccagatgttataagtttacacaaagagcttgaaatattaaaagataaaaaaattaataatgttttattagaagcctctagtcatggtttaagtcaaggaagaataaatggaataaatataaaggcaggaatttttacaaattttactcaagatcacatggattatcacaaatctatgaaaaattatttaaactctaaattaattctttttaataaaatattaaaaaaaaatagttacgtaattaccgataaaactattccagcaataaaaaaaatttcaaaaattacacaaaaaagaaaattaaaaaaaattttcattgattatacaaaaaaggagtatgatttttcaaattttaaactaataggaaattttcaaaaaaaaaatcttataatggcagcaaaagcatgtgaaattatagggttaaataaaaaaaaaatttctaaatgctttaaaaaattaaaaaatgtaaaagggagagttgaattagttaaggaatatcctgatcaaacaaaagtctttattgattttgctcatacacctgaagcaattaaaacagtaataaattctcttaaaaatcattttaaaagggatgtaactatagtttttggatgtggtggagaaagagataagaacaaaagagaaaagattggaaaaatagtaaataaattgtgtaacaaaatatttgtaacggatgataatccaaga

SEQ ID NO: 311703 - DNA, 892 bp, Unknown
  Bacterial polypeptide expressing nucleotide sequence isolated from the Sargasso Sea
catgttattgaaagactactttccaaatttaaataaaaaatatcaaaaagttagttttaaagggatagcgtttaattctaggaaaattaaaaagggatatattttttttgcatttaaaggaaataatacagatggaaatttgtttattaaggatgcaattaaaaatggatcaaaaataataatttctgataaattaaaaaaaaatggttggaaaaataatattttatttttgaattttaaagaccctagaaaactactagctctatttagttcaagaatttttaataaaaaaccaaataacttgatagcagtcactggaacaaatggaaagtcttcaatagcaaatttttatttccaaattgcaaggttaaataaagtaaaggcagcctcaattggaacattaggaattaacggtttaaaaataaaaaaaaatttttcaaatactacttttgatccaattgaaataaataatattttacaaaaattaaaacaaaaaaaaattaataatgttattttggaagcgtcaagccatggattaaatcagaatagattgtatggattaaaattcgatgttggtatatttacaaatttatcaagagatcatttagattaccacaaaacatttcaaaattatttgaactcaaagttaatattatttagaaaattgatgaaaaaaaattcatgtgctatttacgacgataagttaaaaattgcctcaaatttaaatagaattacaaaatcgaataaaatcaaaaaattaacaataggaagttctgcgtcaagttttgtaatcttaaatcatcaatttttaaaagatgaacagaaagtaatatttaaatttaataataagaaatattccttttcaacaaaattaatggaagagtacaaataa

SEQ ID NO: 311704 - DNA, 949 bp, Unknown
  Bacterial polypeptide expressing nucleotide sequence isolated from the Sargasso Sea
tcataaaacatacttctctggagtagcatttaatagtaatcaggtaaaaaaagataatattttttttgcaattgaaggaaataaatttgatggaaataaatatatttctgatgccattaataaaggagcaaaaataataatttcaaaaaaaaatattaagtttgatgataaaaatctaatttttctaagagatagtaatccaagaaaactattagctgaaatttcatttaaattaatcaaaaaaaaaccaaaaaatcttgttgcagttacaggaaccaatggaaaatcatctgtagcagatttctattatcaaatattaaatttagataaaaagaaaactgcatctattggaactattggtgttcaatcaaataataaaaaaaatttattagaaaatactaccttagacccaattaaacttagaaaaattattaataatcttattaaaaaaaagattagtaatgttattttagaggcttctagtcatggtttagaacaaaatagattagatggattactttttgatgttggaatatttacaaatttatctcatgaccatttagattatcataaaaatttaaatgattatttaaatgctaaactttatttatttaagaatttaatcaaaaaaaaaggaacagtaatcacagatccatctattccacaatttaaaaaaattaaaaaattagtaaataaaaaaagattaaaacttttgaccatatgtaattcaaatgcagatttagaattgatttcacatgaatataaaaatgaccatcaaattttaaagattaaagaaagaaataaaaaaaaaattataaaattaaatttaaacttaattggaaaaatacagattaaaaatattttaatggctatcttagcagcaactagtaatagagttgatataaattctataactaaatcaattattaaacttagaccagccgaaggt

SEQ ID NO: 311705 - DNA, 823 bp, Unknown
  Bacterial polypeptide expressing nucleotide sequence isolated from the Sargasso Sea
aaaagggagaatatattttttgcaattaatggacacattaacaatggaaatttatttattaatgatgcaataaaaaatggagcaaagacaataatctctgacaatagtttttcgggttataagaatgatgttttgtttataaaaaacaaaaaccctagaaagttacttgcaaatttaataaataaaattcattcaaaaaaaccaaaaaatttgattgcagtaacaggcacaaacggaaaatcttctattgcaaatttttattatcaaatactaaaattaaataatttaaaagtagcatcaataggcacactcggcgttcagacaaattttaaaaaatactccactgaaaacacaacatctgatcctgttattattaataaaatattaaatgaaattaaaaaacaaaagattgataatgtaatcttagaagcatcaagccatggtctaaaacaacatagactggatgggataaaatttaatacaggaatatttactaacctgtcccgtgatcatttggactaccataaatcatataaagattatttaaattctaaactaatactttttaaaaatctgttgaaaaaaaaatcaaacgtaatatttgataaagaaatacagcaagctaaaaaacttgagcaaatttgtaacaaaaaaaaatataaaaaaatcacaataggaaataacaaagctgaattaactataattaatcaccgatatataaataattttcaagaggtaaaaatacaatttaagaaaaagttttttacatttagaacttcactaataggaaaattacaaattaaaaatttattgatggcaattt

SEQ ID NO: 311706 - DNA, 858 bp, Unknown
  Bacterial polypeptide expressing nucleotide sequence isolated from the Sargasso Sea
gatgcagactttaaataatagtaaaaatcaacttcaaatcttatctcattgttttagcggtgagaaacaaatattaaaaataaaatacaataatcttataagagaagtaaatttaaatcttattggaaaaatacaattaaagaatattttaatggcaattcttgcagcaaaaaacagtaatttaagtttaattaagtctctaaatgtattatcaaaacttaaatcaatagatggaagatttgaaaaaataggtaaaatcaaaaataagtctagagtaatacttgattatgctcatacaccagatgcactaagaatatgcctttcaaaccttaaagagcaatttcctaataaaaaaataattttactttttggttgtggtggaaatagagatcagaataaaagatataaaatgggaaagatcgcaagcgattattctaatgaaatctatttaactgatgataatcctagatttgaagatccacaaaaaattagaaatgacattaaaaaaggtattaagaatactttcataaaagaaatacctgacagaaaaaaggctatatctgaagctatcaaaaatttaaatacaggtgatatcttgttagttgctggaaaaggtcatgaaaaaacacaagattttggtaaaaagaaaatttacttttcagataaaaaaatcattttagattgtattaaaattaagaatataaacttatcaaaaaacttaaagataaatattattaaagaagtatctaaaataaaaaataaaattcctttgataaaagtggccacagcaaaaatcaattccaaagaagtaaacaagaatgatattttttttgctattagaggaaaaaaaaatgatgg

SEQ ID NO: 311707 - DNA, 963 bp, Unknown
  Bacterial polypeptide expressing nucleotide sequence isolated from the Sargasso Sea
acacttaatgatgaaaaaaataatctagagcttttatctcataattttaaaggagagggtcaattttttagaatcaaattaaatagctcaataagagatataaatttaaatttaattggaaaaatacaattaaaaaatgttttgatggcaataattgcagcaaaatatagtggtattagtttagataaaattttaaatacaattccaaaattaaaaccagttgagggaaggtttgaaaaaattggtaaaattaaaaatcaatcaaaagtaattcttgattatgctcatacgcctgatgctctaaaaacgtgtcttctaaatcttagagaacaatttcccaataaaaaaatcacagtgctattcggttgtgggggaaatagggaccaaaataaaagatcaaaaatggggaaaatagctagtgattttgcagacagtatcattcttacaaatgataatcctagatttgaaaatcctcaaaaaataagaagagatataaaaaagggaattaaaaaaaagagaattgttgaaatatctaatagagcaatagcaataactcaagccatttataatttgaattcaggtgatattttgttagtcgctggaaaaggccatgagaaaacacaagatattggaaataagaaaattttcttttcagatagaaaagtaattttaaatgctattaagcataaaaataataatttatcagataatttaaaattaaatgtggttaaagaggcagtaaaaattaaaaaattatctctatccacatctttaaaaacagcaagaattaattctcaagaggttactaaaaacgatattttttttgctattagaggaaaaaaaaatgatggtaataaatatgttgcacaatcatttaatagaaaagcatctttagctgtagtaaataaaattcaaaataaattaaataaaagtcgtcagattaaagtaaaagatactttaaaa

SEQ ID NO: 311708 - DNA, 636 bp, Unknown
  Bacterial polypeptide expressing nucleotide sequence isolated from the Sargasso Sea
aatgtttctaaaagattattttcctaaaatagaaaaaaaatatcaaaaacattttttttcaaacattacttttgatagtttaaaaataaaaaaaaattttattttttttgcgatcaaaggtaataaatatgatggtcataactttataagcaatgctattaaaaaaggcgcaaaaataattgttcatgaaaaaaagttttcaggtttaaaaaataaaatcttatttataagtacaaaaaatattagaaagttattagcaaaagtttcttttaagattaatcatttaaaaccaaaaaatcttgtttctgttacaggaactaacggtaagtcatctgtcgctgattttttttatcaaatacttaacctcaataagataaaagttgcatcaataggaactttggggattaagaccaaaaattctctaagaagtttacccaatacaactatagacccaattacattgagtaaaatattaaagaatttaaaaaaaaaaaatatagacaatgttataatggaggcttctagtcacggattgaagcaacatagattagatgggttattatttgatactggtatttttacaaatttttctcatgatcatttagattatcacaaaaatttaaaagattatttaaa

SEQ ID NO: 311709 - DNA, 880 bp, Unknown
  Bacterial polypeptide expressing nucleotide sequence isolated from the Sargasso Sea
tatgcttctaggaaactactttcataacattgataaaaactataaaaatttttctttttcaggaatttcatttgatacgaagagtattaaaaaaaataatattttttttgcaatcaaaggaaatagtattgatggtaatgaatttattcctaaagcaattaaaaaaggatctaaaattattgtaactgaaaaaaaaacaaataaattccaaaatggaattttgtatatttatacaaataatgtaagaaaattattggctgaaactgcttttaaaatttataataaaaaaccaaaaaatttaattgcagttactggtacaaacggaaaatcatcagttgcagatttttataatcaaatattaaaattaaataataaaaaaagtgcttcaattggtacattaggtgttaaatcggaaagaactaatttgaatttatcaaataccacaatagatccaattaaattggctaaaattttgagtaagttaaaatcacaaaaaatagagaatgtaattatggaagcctcaagtcatggtttaaaacaaaatagattagacggtttgaagtttaattcgggtatatttactaatttatctcaagatcatcttgattatcataaaaatttaaaaaattatctgaaagcaaaactttatttatttgaaaaacttatccaaaaaagaggcaatgtaattacagatcaattaataccagagtttaaaaacataaaaaaaattactattaataagaaattaaaattgcatacactaaatgataagaaaaataatctagagcttttatctcataattttcaaggagagagtcaatttcttagacttaaattaaatagctcaataagggatataaatttaaatttaatttggtaa

SEQ ID NO: 311710 - DNA, 895 bp, Unknown
  Bacterial polypeptide expressing nucleotide sequence isolated from the Sargasso Sea
ttacataaaaatctccaatttttctcaaaaaaaaaaataaataacttaattttagaagcatcaagtcacggactagatcaaaatagattagacaatttaaatattaaaataggcatatttacaaatcttagtcacgatcatcttgattatcataaaaacataagatcttatttcaaagcaaaactatacttatttaataaattacttggtaaaaaatcaacagttattactgacaaagacattaaagaatataaaactataaaaaaaattacaaaaagaagatctattaaaataaaaactataggaaaaaataattctagtataaaaattttaaatcacgagaacaaagaagatgtacaattaataaaaattttatttaactctaaaatttatgatttagaagttcctcttattggatattttcaagttaaaaatttattaatgtcagttatagctgcacatacttgtggtataaaaatagaaaagattttaaataaaatcaaaaaaattaaaccgatttcgggaagacttgagtgtgtagcgaaagtgaaaaaaaattctagaattataatagattttgctcatacaccggatgcattagagcagagtttaactgctataaaaaaacaatttagaaaaaaaataattatagtttttggctgtggaggagatagagataaaaaaaaaagatatttaatgggaaaagtagcgaaaaaatattgtaggaaaatatttattaccgatgacaatcctagaaatgaaaatccaaaaaaaataagaaattcaataattaggggttgcaaaaataaagctgtaaatattgctgatagaaaaaaagcaataaagcttgccattaaagaattaggattaaatgaaattttattagtagcaggca

SEQ ID NO: 311711 - DNA, 712 bp, Unknown
  Bacterial polypeptide expressing nucleotide sequence isolated from the Sargasso Sea
gagatgaaaaaatcaaaaatagacaatgtgatcatcgaagcatcaagtcatggtctcgctcaaaaaagattagattttttaaatataaaatcagggatttttactaatttgagccatgatcacttagattatcataaaaatatgcaaaattatttttcggcaaaattaattttatttaaaaaaatactcaagaaaaactctattatgattactgactcagaaataaaggaatatccagctttaaaacgtttacaaaaaaaaagaaatttgattttgagaagtattggtaaatctggaaacacatttaaaattttaaatcatagaatttttaacaattatcaattaataaatatctcacataacaataaaatatataattttaaaattaatttaattgggtcaattcaaataaaaaatttattaatggcaattttggcttgtaatatttgtggtttagactttcatagtatatttaaagttattaataaaatcaaaagtgtaaatggacggttggagtttattagatgtttaccaaatcaatcgaaaatttttttggattatgctcatacaccagaagcattaaaaaatgcaataatctccctagaggaacattttaataaaaaaataacagtagtatttggatgtggtggtgaaagagacattccaaaaagatcaaaaatggggaggatagtcaataaattatgtgacaaaa

SEQ ID NO: 311712 - DNA, 706 bp, Unknown
  Bacterial polypeptide expressing nucleotide sequence isolated from the Sargasso Sea
gatgaaataccctgaatttaaaacaattaataagattgcaaaaaaaaaaagattaaaaataattacattgaatgataaaaaaaatgatttcagaattttgtctcatacttttaagggcgaaactcaattacttaagatcaaatataataactccataaaagagataaatcttaatttgatagggaaaattcaattaaagaatatattaatggcaatatttgctgcaaaaaaaattattaatttaaaaaagattttggatattattgaaaaaattaaaccagtagagggtaggtttgaaaagattggtaaaattaaaaataaatcaaaaataattcttgattatgcacacactccagaggctttaaaaacttgtcttttaaaccttagagaacaatttccaaataaaaagctctgtttattatttggttgtggtggaaatagagatcaaaataaaagatcaaaaatgggtaaaattgcatctgatttctctgataaaatttatcttactgatgataatcctagatttgagaacccagataaaattagaagagatattaaaaaaggaattaagaaaaaaaaaatcattgagatttctaatagagcgaaagcaatatttgaagcaacaaaaaatttgaatactggagaaattttattagttgctggtaaagggcatgaaaaaactcaggatataggtaagcgaaaaatt

SEQ ID NO: 311713 - DNA, 937 bp, Unknown
  Bacterial polypeptide expressing nucleotide sequence isolated from the Sargasso Sea
ttgaaatcaatttcaaaaaaaaaaagtttaaaacttttagatattaatgatattaaaaataaaatagataaaaaatcaaattatagatttaataaatttcaattaaagaatattgccatggctgtgcaagctgctagattatgcaatttaagtgagagaagtatatttaataaattagatgaaataaaagatattgatggaagacttgaacttgtaaaaacttttcctaataatataagggtctttgtagattttgcgcatacacctgatgctcttaaagaagtattaagtgaattaaaaaatcaatatggtgaaaatatttctttagtctttggctgcggtggcgacagagatttaaaaaaaagacctttaatggctaaaatagcaaattcaaattgtaaaaaaatttatgttacagatgataatccaagaaatgaaaggcccgaaagtataagaaaagagattcttaaacatataaaaagtactccttgttttaatatttctaaaagatcccttgcaattaaatcagctattttaagtgctgaacctaatgaaatcatactggttgctggaaaaggacatgaatctaaacaaatttacaaaaataaagtaatacatatctctgacaaggagacaattcataagttaaggttgaatttaaaaaagatctcacacaaagagcaaacatttcgagaaaacaaaaaaattttgagagaaatttacaaaacttctactcttaaaaattttcatggattatctattgactctagaacaataaaaaaaaataatttatttttaactattaaaggaaagaataaagatggagtaaattttatgtctgacgctcttaataatggagctcagtatatagtttcctctaaaaaaacgaaaaaattaagacataaaactttaaaagttaataatgaaataaaatttt

SEQ ID NO: 311714 - DNA, 625 bp, Unknown
  Bacterial polypeptide expressing nucleotide sequence isolated from the Sargasso Sea
aatgttactaggcaaagtatttaaagatattaatccgaaacataaaaatattaaatttaataatattaagtttaacagcaaaaagtgtaaatctaatgatattttttttgcactaaggggaaataacaataatggaaataattttattaaagatgcaataaataatggtgcaaaaataattgtttctaacttaaagttcaaaggctttaataaaaaaaaaattttgtttattcatagcaaagatccaaaaaataaattagcagaggtggcaaaaaatttttatttaaaaaagccaaaaaatattattgctgtaactggtactaatgggaaaacttctatagcaaatttttattatcaaatattaactttaaataaaaaaagagcagcagcaataggaactcttggtatattatcaaaaaaaataaatttaaaaactaataatacaacacttgattctgtaaatatttttaaaatatttaaaaaacttaaagaacaaaaagtaaacaatgtaataatggaagcatcaagtcatggattaaaacaacataggttagatggaataatttttaatactgctttatttaccaatttatctcgggatcatcttgattatcataaaacatat

SEQ ID NO: 311715 - DNA, 739 bp, Unknown
  Bacterial polypeptide expressing nucleotide sequence isolated from the Sargasso Sea
atgaagttatcagcattaattcctgagctaaaactatcaagctgcttaaatgataaagaggttagtagtattcatatagacagtagagatgtaaaagaaggaggtatttttttcgcccttaagggccgaaattttgacggtaatgattatataaatgaggctttggaaaagggggcttgtttagtagttacagatactggtaaatacaacaattctgagaaaattatttatttaaaaaaccttagagagaatctaagcgacatagcttctagattctatgaaaatcccagtgccaacttaaaaaccatctgtgtaaccggaacaaatggtaagactacagcggttgaaacatttgcaatgttaggtaacttgttgggtgaaaagagctcatatatgagtacgataaatttttcaattaacggatcaatacaacatacatctgatttgactactccagatactattacaataaatagaaaccttagtcactctataagagagaactcaatatatttttcgatggaagcttcttctcatggtctcgaacaggatcgtctgcagggcttagatattgattatgctgttcttacaagcttttctcatgaccatcttgactaccatggtgaccttgaaagttataaattagccaagaaaaaactgttcgttaatcatagtccacaaacaaatatagtgtgcattgatagtgagtttggagcagaacttatttgcagaacttaag

SEQ ID NO: 311716 - DNA, 378 bp, Unknown
  Bacterial polypeptide expressing nucleotide sequence isolated from the Sargasso Sea
aagtattcgcgccagaacgagtggtcgggttgatttgcgtgatagggtgtggcggtgatagggatcaaggcaaacgcaaagaaataggtaagattgtttctgaactttcagactttgcgtggttaacatcggataaccccagaagtgaagatcccatgaagattattcgacaggtcgcgtcaggctttactacagggaactattccgtttctcttgatagaaaggatgcaattagacaagcgataacaagctctgaagatcaagacattgtaatgctgctgggcaaaggtgatgagtctactcaggaagtgaatggtgttttttcgcctcatagcgatagagatattgccaaacaagtagtcggagggttggtctgat

SEQ ID NO: 311717 - DNA, 780 bp, Unknown
  Bacterial polypeptide expressing nucleotide sequence isolated from the Sargasso Sea
actggatattgaaatttttggtattacatcaaatactaaaaaaatcgctgagggctacttatttgtcgctttgcggggtgcaaaatttgatggtcacgactttataacagaagcaattgaaaaaggagcggtagcaattttaggacaatctgggagcaaattccaattgtcattagataattcattttcatcttgttttatagcttgcgaagatcctagaggtacatacccaaaactatgttcagtctattacaataaacagccggagatgatagcgggcattactggtacaaatggaaaatcatctgtagctgagttcacccgtcaattgtggtcatttaattctttgtctgccgccagcctaggtactctcggcttggtaacggagaatttcagtaagaaaacaaatcttacaactcctgatcctgcagagcttttctctttagttaagcgacttgcagaaagtaatattacacacttagcgctagaggcttctagtcatgggttggatcagcatagacttgattaccttgatataggagtagccgcgttcaccaacctaagcagagaccacctagactatcataaaaatatgcgagattacttatcagcaaaaacattacttttttctgaccttctgagaaacaatggcacggccgtaattaatgcagatgatgcaaactatagtcacataattagttcgttaaatagcccaaagattagtgtaattgattatggagcccgcgcaaaaacattacgactattagaaagaaaggtaga

SEQ ID NO: 311718 - DNA, 928 bp, Unknown
  Bacterial polypeptide expressing nucleotide sequence isolated from the Sargasso Sea
aaaaacgtcaatcgcagatttttttcatcaaatatttacacttaacaaaagatcagtcgggttaattggcactcttggatttaaaaaaaataacagtttaaaaaaaagaaaccttactacttcagattcaattagcctacatagggatttaaatgatatgaaaaattctaaaattgaaaatgttattttagaagcttcaagtcatggacttaagcaaaaaagattagattttttaaatataaattccggtatatttacaaacctaagtcacgatcatatagattatcacaaaaatatgtctaattatttatccgctaaattaattttatttaaaaaaattttaaaaaaaaactcaactataattactgactcagaaattaaacagtatcctttaatgaaaaatataaaaaaaaaaagaaaattaaatttactaagtattggaagtcttggaaatacttttaagattttaaatcataaaatttttaatgattaccaattaattagagttagttataaaagaaaaatttataatttaaagataaatttatacggatcaatacaaattaaaaatttattaatgtcaattttagcctgtgaaaaatgcggattaaaaacaaagaatatttttaaaataattaataaaataaaaagtgttgatggaagattagaactcataagaaaattacccaatcgatcaaaaatttttcttgattatgcacatacgccagaagcattaaaaaaagcaattaattctttacaagaacattttaataaaaaaataacattagtttttggttgtggtggtgaaagagataaacataaacggaaattaatgggaaaaattgctaacaaactttgttctaaggtttatgtaactgatgataatccaagaaatgaaaatcgaaatgttataagaaaaaacattata

SEQ ID NO: 311719 - DNA, 734 bp, Unknown
  Bacterial polypeptide expressing nucleotide sequence isolated from the Sargasso Sea
tttgaacaatgataacccattaaatttactagccaaatttagttctaaaatatttaacgaaaaaccaaacaacttaataggagttactggtactaatggtaaatcgtctatagcaaatttttattttcaaattcttacctataataaaattaaagctgcatcaattggaacattaggtgttaatggtttaaaaataaaaaaaaaattacaaaatactacttttgataccatccaaataaataaaattttaaaaaaattaaaagaaaaaaaaattgaaaatgttattttggaagcttcgagccatggattaaatcaaaatagattagatggactagaatttgatgttggtatatttacgaatttaaccagagatcatttagattaccataagacttttaaaaattattttaattcaaagttaatattgtttaaaaaattaatgaaaaaaaaatcttatgctatttatgacaatgatctaaaaatttcgtcagatttaaataaaataactagattaaataaaatcaaaaaacttacattgggaaatacaaaatcaagtcttgaaataatagatcatcaatattttaaagatgaacaaaaaataaaattcagatttgataaaaagcaatattctttttcaactaaattaattggaaaagttcaaattaaaaatttactaatggcaattatggcagcaatgaaaagcaaaatttcgttagaaaaaattttaaaagtta

SEQ ID NO: 311720 - DNA, 895 bp, Unknown
  Bacterial polypeptide expressing nucleotide sequence isolated from the Sargasso Sea
tttgtcgcgttaccgggcgctgagcacgatggtcgagatttcatcgagcctgcgttggcggctggcgctgtggcggtgctgatggaatccggtcgagagcttcatcgagatgatgcgagagtgatccctatttctggtctcaagggtgaactgggcgcactggcaaatcgtctctatgggtcgccctcctgtgatctcaaagtggtcgcggtcacaggaaccaatggaaagacatcggttgtcgatttaacggcccagctgttgcgacgcacagggcgcaagacaggaacaatcggtacgctgggtatgcggctcgatcaagaacgcaccgagacaggcaacaccacgcctgactgcctcgcacttcaacgtcagctgaggcagtggcgtgatgatggggtcgagtgcgtgacgcttgaggcctccagtcacgcgctggaccaggggcgactggatggcttggcagttgatgtgggggtgttcaccaatttgacccgggaccatctagattatcacgattcgatggacgcttactgcgaggcaaagctgaaattattccgagagttcgagcctgccagtcgcatctacaacgcagatgatgaggcggtagtcacccactctgatatctggtggtcgggtggccttggcgtgtcgaccggcggcgccaacacggaaatcaggatagaagtcgtgcaggccgtaccgcaggtgctcaaactgaagacgccctggggcgacggtcgtctgcaaacggcgctgagtggtcgctttaatgctttcaatgtcggggcgtccctggccgctgcactgtcgctagacgtcgactttgctgaggcgctggcggcggctgaggcgctggagccggtgctggggcgactgcaagcggtaggtgatg

SEQ ID NO: 311721 - DNA, 676 bp, Unknown
  Bacterial polypeptide expressing nucleotide sequence isolated from the Sargasso Sea
atgcttcttggaaattattttaataatataagtaaaaattataaaaatttttccttttcaggaatttcatttgatacaaaaagtataaaaaaaaataatattttttttgcaattaaaggcaatagcgttgatggtaataaatttataccaactgccattagaaaaggatctaagattattgtaactgaaaaaaaagcaaatacattacaaaatggaattttatatatatatacaaagaatataagaaaattgttagctgaaatatcttttaaaatttataataagcaaccaaaaaatttaattgcagttactggtacaaatggcaaatcgtcagttgcagatctttattatcaaatattaaatttaaataatataaaagtcgcttctattggtactttgggtgttaaatcaaaaagtattaattttaatttacctaataccacaatagatccaatcaaattagctcaaatattgagtaagttaaaaattcaaaaaatagaaaatgtgattatggaagcttcaagtcatggtttaaagcaaaatagattggatggattaaagtttaattcagggatatttacaaatttatcccaggaccatcttgattatcataaaaatttaaaaaactacttaaattcaaaactttatttatttgaaaacttaagaaaaaaaaagg

SEQ ID NO: 311722 - DNA, 808 bp, Unknown
  Bacterial polypeptide expressing nucleotide sequence isolated from the Sargasso Sea
agaaaattagtctcagaaatcgcttcaaaatattacaaaaatgtttcggccaacctagttgctgtaaccggaacaaatggtaagtcctcaatagcaaatttctattttcaaatacttaataataaaaaattaaaggttgctgcaattggaacccttggtataaaaactaataataataataagttaacagacaatactacattagactctgtcactattaacaaaacactctcattattaaaaaaaagaaaaataaaaaatactattttagaagcatctagtcatggtctaaaacaatacagattaaatggattaagatttgatacaacaatttttacaaatttatctcgtgatcacttagattatcataaaacgtataaagattatttaaattccaaattaatactatttaacaaacttacaaaaaagggtggaactataatatatgataatgatatttctcaatcaaaaatacttaaaaaaatctgtataaaaaaaagtctaaaatcactaactattggaaaaaaaaattctaatttaataattaaaaaacatgagtatttaggaaattttcaaaaaattgaaattgaatttaataaaaaaaaatactcatttacaacaaatttaattggaaaaattcaagttagaaaccttctgtttgcagctttagcagcaagtaaaagtaaaattaaatttagcaaaatagttgagttaatgagtaaaacaaaggctgttgaaggaagattggagaatgttggtaatataaaaaataactcaaaagtaattctagactatgcgcacacacctg

SEQ ID NO: 311723 - DNA, 788 bp, Unknown
  Bacterial polypeptide expressing nucleotide sequence isolated from the Sargasso Sea
gattattggaatcacaggaactaatggtaaaactactactggatgtctgctcgattctataattagatcggccaatgagagtacaggtttcattggaacacttggtgtttcaggcccaggtgtggaggcccatactgggcttacgactcctgatagtttagagcttcagcgaaccttggctctttttgttgatggtgggttgactcatgctgtgctagaagtatcctctcatgcattagagcttgagagagtggctcatgttgattttgatattgcaatatttaccaatttttcacaggaccaccttgattttcatggcagtatggataagtatttttccgctaaagcaaaacttttttctagcctttcctctgataagtctgtaatacttaatgcgaatgatccaaaatcagcaataattgaaaaattaaccaaagctaaaattataaaatatggaattgaggtcgattctgatataaaatttgacaattggggtatgtctattgatggaataattggaagtattgaatttgagggacaaaaaatcgatatttcttccaagttaatcggctcatacaatcttcataatattcttgctgcaatcaccgcagcaaaagaaatggaaatccccatagataaaattcaaaagggtattaattcgcttgatactgtgcctggccgtgtcgagcagatattaagccctaatggtgcaactataattattgactatgctcatactcctgatgcatttatgaagcttttctattcgctttcagagctcctacctt

SEQ ID NO: 311724 - DNA, 748 bp, Unknown
  Bacterial polypeptide expressing nucleotide sequence isolated from the Sargasso Sea
ttattctggtatatttacaatttatctcaagatccatttggattatcataaaaatctcaatgattatctaaatgcaaaactttatttatttgaaaaacttgtaaaaaaaaagggaaatgtgattacagatgacaaaatacatgaatttaaaaaaatcaaaaagatttctttgagaagaggtttgagaataaatagcctttttagcaaaaattataaatttcaaattttatcacatttttttaaggatgaaactcaagtattaaaaataaaatataaaaattctataaaaaaaattaatcttaaattaataggaaagatacagctaaaaaatattttaatggcgattattgctgctgaaaaaagcaatatagatatgaataaaatcttaaaagtaattccaaaaattaaatcaatcgaaggacggtttgaaaaagttggaaaaattaaaaatcaatcaaaagtaattcttgattatgcacatacaccaggtgctttaaaaacatgtctattaaatttaagagaacaatttcctgataaaaaaattattacattatttggttgtggaggaaatagagatcaaaataaaagatcaaaaatgggaagaattgctgatgattattctgatgaaatatatcttacagatgataacccgagatatgaaaatcccaacaagattaggaaagacataaaaagaggaatatcaagaaataaaattatagagatttctaatagaaagagagcaatagtt

SEQ ID NO: 311725 - DNA, 732 bp, Unknown
  Bacterial polypeptide expressing nucleotide sequence isolated from the Sargasso Sea
catcttgattaccataaaaatttaaaaaattatttaaaagcaaaactttatttgtttgagaatttaatagaaaaaaaaggaaatgtaattacagacaaagatatacctcaatataaaacaatcaagcaaatctcattaaagaaaaaattaaaaatatcagcaataaatgaaaaacaaaataattttcaaatattatctcatagatatgacaatgaaaatcaattgattaaaataaaatataaaaatttaattaaggaaattaatttaaatttaataggtaaaattcaaatcaagaatatattgatggctgtaactgcagcacaaaaaagtaatttaaattttgaaaatattttaaaagtcttaccagaattaaaaccagttgaaggtagattagaaaaaattggaacaattaaaaataattcgattgttattcttgattatgcacacactcctgatgctttaaagttttgccttttaaatattagggagcaatttcctggtaaaaagttaaaccttttatttggttgcgggggaaatagagatcaaaacaaaagaatgaaaatgggtaaaattgcaagtatttatgcagataatatctaccttacagatgacaatcctcgtttagaaaatccagtaaaaattagaaaagatattaaaaaaggtattaagtttaagaaaattaaagaaatttctaatagatcaatagcaatatctgaggccattaaaaattta

SEQ ID NO: 311726 - DNA, 922 bp, Unknown
  Bacterial polypeptide expressing nucleotide sequence isolated from the Sargasso Sea
aaagtaaaaaaaggattcatattttttgcttacaaaggagataattacgatggaaatgaattcattgaagacgcatttaagaatggagcttgcttagcgatttctgattctgataagttagaaactcaaaaaaatgtaattaaagttgatgatattagaactgcagcaggcattgcttgttcaaatttttataattttccacaaaataaagtaaagttgataggaattactggaacgaatggtaaaacatcaacatcaaccattttaaaaagcattttagatgctgaaaatgaaaagactttacaaattggaacaagtggaataaagcctccattagagattaattctgatctaactacgccagatatttttgatttgtatgaaatattaaattatgcagttaatggcggcttcaaaaatgttgtcttagaggtttcttcacacgcactatctcagagaagaatagaaaatattttctttgatataacagcatttacaaatcttacacttgatcatttagattatcataagacgatggaagaatacttctgtgaaaagcttaaactttttgatttaaataaagaaaatgcttcgtcagttgttatgattgatgatgaatatggcaagagaatttctgagttaaatccacatgcaaaatgtatttcacttgaaaataaagatgctgattattcttgcactaacttcagcataaatgatttaggaatagtaggtactttagtatgggactccaaaactttagactttcaatccaaacttattggttcatttaatttagaaaacattattcttgcggcatctattgcagttgagctgaacatttcaacacaatctatttcggaaggaattaaaaattgtataaacatagatggaagacttcatttggttaaaaataaaaataata

SEQ ID NO: 311727 - DNA, 790 bp, Unknown
  Bacterial polypeptide expressing nucleotide sequence isolated from the Sargasso Sea
ttgaattttgaaaatattgttaccattactggtacgaatggcaaaacatcagtagcatggtttgtaaataatatttggcataagattggtttaaagtctgcttctataggaacattaggagtttttgatggaaagaatatatataaaactgatttaaccactcctaatatagatcaaacttatgaacaattgagttatttaaataagaatgattttaaaaatgtaattatagaggcttcaagtcatggtattgatcaaaataggattggaggtttaagtatttcaattgctgctataactactttatctagagaccatttagattatcatttaagttataaaaactataaaatggctaaattaaaattatttagtaaagtttcaaaaaatggagttgcaattattaatgactcaatcaaagagtataaagaatttatagaaattgctttaaagaataaattaaaaatattattggttggaaaaaaaaataattctgatttgtcttatcaaataaaagtattgaagaatggtgagcaacttgtaaaagttaattataaaaattttaaaggttctttctctactaaattaataggaggttttcaggtaaataatttaattacttctatggcaattttattagaaactggcgtaccgtttaatactttaattaatagtatgaaagatatttcttctcctcctggacgaatggaatatatttgtagtgttaatcaagcaagaatcttcgtagattttgcgcatacaccggatgcgcttaaaaatgtattatagc

SEQ ID NO: 311728 - DNA, 637 bp, Unknown
  Bacterial polypeptide expressing nucleotide sequence isolated from the Sargasso Sea
tatgtttctctctgaagtttgtaatattattaaaacaattaaaataatcaacttaaataaaaatagaaaagttaaaacaataacgaactcaactgaaatagctgaaaattcaagcattttagtaattaattcaattaaatttaaaaaacaatttttaacaaaatcacagaaaaaaaatatacctgcattaattacaaataaatatattaaagaattttataatacacaatttattgtaaaaaatacaaacaaagaatcattgaaaattatgcaaagcttatttccatttaagcctgataaatctgttgctattactggaaccaatggaaaaacatctgttgcgtggtacttatcacaaatttgcaaacaggctaatttaaaaactaaaatgttaggaactttaggtttttataaaaatcataaaaaaataaaaaatacttttcttaccactcctgcttttgaagatttgtatcaattctctcatagcaaaaataaatctacatataattttatttttgaagcatctagtcatgcattaagtcaaaataggttaagaaatattccagttgatattgctgctataactaatatttctaacgatcatttggattatcataaaaatatgtcaaattatact

SEQ ID NO: 311729 - DNA, 121 bp, Unknown
  Bacterial polypeptide expressing nucleotide sequence isolated from the Sargasso Sea
ggccaaagctggtgatttggtgctgatcgctggtaagggccacgaggactaccagatccttggcaccaataaggtgcatttcgatgatcgcgagcaggcggctctggctctgaaggcctga

SEQ ID NO: 311730 - DNA, 607 bp, Unknown
  Bacterial polypeptide expressing nucleotide sequence isolated from the Sargasso Sea
ttgaaaaatttaattagagttatttcaaaagataaaaaaaatattatcatctctggaatttcaacgaatagtaaaaaaattaaaaagaatttcattttttttgcaatcagaggaaaaaaatataatggtgaaaaatttattaaagacgcagttaataagggtgcctcagttgtagtttgctctaaaagttgtaaatttagaaataacagtactcttataattaaaacaaataaaccaagacatcttttgagtgatatatcttcgaaattttacaaatcaaagccaaaaaatattatagcagtaactggaacaaacggaaaaacatccgtgtctgatatgttttatcagatcttaagaattaacaatatacgtgttgcatcaataggtactttaggaattaaatataatgataagattataaaaactaacctgacttcacccgatgcgattacacttcacaaaaatttagagtatttaaaaaataaaaaaatagataatgtaatcattgaggcttcaagtcatggtttagatcaaaaaagattacatcatattaaatttaaaggagcagtttttacaaatttcagtcaggatcatttagattaccaca

SEQ ID NO: 311731 - DNA, 858 bp, Unknown
  Bacterial polypeptide expressing nucleotide sequence isolated from the Sargasso Sea
tacaccagatgctctgacaacatgtgttaaaaatgtgaaggaacaattcaaattaagaaaaattaatatagtatttggatgtggaggagaaagagataagcccaaaagaaaaataatgggagcaattgctaataaatattgtgataaaatatatttaacggatgacaatccaagaagagaagatccaaaaaaaataagaaaagatataaagtctaatatttcaaagaacaaagtattggaaataccatcaagagaaagtgcaataaaagcagcaattttagatattaaatcaaacgaggtagttattattgctggaaaagggcatgaagcttatcaagaatattttactaaaaaactcttttcagataaaagctgtatcaaaaaattcataaagattaaaaataaatctttaaataaaaattggaagtcaaatattgtttcagagataactaaaaaaaaattaaaaaaaaataccaatattaataaagcatcaatagactcaaggaaagtaaaaaaaaataatattttctttgccataaaaggaaaaaactttgatggaaataaatttgtgtatcaagcatttaaaaatggagcttctgtttcgatcaacgagaataaaaaaaaaaataagttcaaaaatgatatatatgttaaagactcattaaaaatattttcagaaattgccaaacttgtaagagtgtcgtctaatatttcatctatagcaattactggatcttcaggtaaaacttctctgaaggagatgttaggtcaaatgatgagtaaaatattccaaacatcatattcaaaaaaatcatttaataacaaatatggagtaccaatttctttatttaatataaa

SEQ ID NO: 311732 - DNA, 844 bp, Unknown
  Bacterial polypeptide expressing nucleotide sequence isolated from the Sargasso Sea
gatgagtaaatttgcagatattttaggtatagacattcctaaaggcactaaaattttaagcgcaacaaactcaacaaaaaaaataaagaaagattcaattttttttggtttacaaggatcaaaaatacatggaagcaattatgcagaagaggcactaaatttgggagcatctatcgttgttcacaatgacgtaaatttcacatctcaaaatagcaaaattttttatataaaaaatcttgaaaataaaattatagatttccttaataccttatatgaaatcgatatcaatcaaaataatttttttacgttcactggcacaaacgggaaaacctcagctgcgctcctctgccatcaattacttacaagcatggaatatgattctttatatgtaggtactatgggtattcaatataaaaataataaatttaatacttcattttcatcaaaaaccacaccagatatatttgaattatttgaaattatagattcttttaattttggcctagattcaataagcatatgtatagaaatttcttctcacgcgctagatcaaaaaagattaagtaatatttattggctcaattcagcttctatactaaatatttctaatgaccacttagactaccatgaaaatatatcttcatatatagatacgaaatttgatatttttaaaataaactcctctataaaattaattaatgatgattccaataaacttaaaaatcataattatgacctcagatgcataagcaataaaaataatttttctgatattttttatgaaataaaaaaaatttcattaactagatgcgaatttaatattttaattaacaaacccccacag

SEQ ID NO: 311733 - DNA, 735 bp, Unknown
  Bacterial polypeptide expressing nucleotide sequence isolated from the Sargasso Sea
cttgggtataaaaaaaaatgatattatcaaaactgtctctaaattaaaaaaacctgaaggaagatttcaagaaataggagagctaaataatgattcaagagttgttgttgattatgctcatacaccagaagcattacaaaatattttactagcttctaatttaaaggggaaaaaaccaaatgtattatttggttgtggaggaaatagagataaaaataaaagaaaaataatgggacatatagctaataagtatgcatcaaaggtttatgttactgatgataatccgagaaatgaagatccttctattattagaaaatcaataattgctggatgtccaagtgcaattgaaatagctaatagacggctagctattcataaagctattgatgatcttgaaaaaaaatctacacttataattgctggcaaaggtcatgaaaaagtacaaattataaataataagataaaaaaatttaatgattctcagattgctgcagaatatttgaaaaaaaagaagttaaaaaataaatcaaaagatttattttataaagttcaaaattatttaattagaaattcaaataaaataaaaattaatagtagagatattaaaagaggagatgtttttgtagcacttaagggcttatctgatcatggtatgagatatattgatgatgcttttaaaaaaggtgccaaatatataattactaataaaatttctaaacttacaaaaaataaaaa

SEQ ID NO: 311734 - DNA, 430 bp, Unknown
  Bacterial polypeptide expressing nucleotide sequence isolated from the Sargasso Sea
aatgtattgttacaattcacaagaaattaaaaaaggggatacgtttctttgtctgcctggaggagcgccgtatgtaaatgatgcgaagagtagaggggctttagaggttaaacatgtaacgcgtagagaaatggctgagctggcacatgattattataaacatccgtcaaaatcactttgtgtatatggtgttactggaacaaatggaaagacgtcggtatgtcattttttgcattgtgcattgacgtatttggggcgggtgtcttatttgcaagggacgttaacgcatcgacttacaactccggaatctttagacacggttaatgttatggcgaggcatcgtgattcaggaggtacagattttgttatggaggttttcgtcacatggcatttcgcaacatcgcgtttacggtatcgagttttgatgtga

SEQ ID NO: 311735 - DNA, 627 bp, Unknown
  Bacterial polypeptide expressing nucleotide sequence isolated from the Sargasso Sea
aatgcttctttctgatttaagaaaaattatcgatataaaaaaaatattaaaaataagaaatgataaaactttcaacaaaattagcggttattctaaagagttaagtaagttttcaatatttgttattgattataataataatattaaaaaagaatacattaatgaagcaataagaaaaaaaattcctgcaatcataactaataaatttataaaaaatattaatataactcaatttttagttaagaatatagaaaaagaaacaaaaaaattattatattatttaaaacctaataaacctattaacacaattgctataactggtacaaatggaaaaacatctgtttgttggtatatttctgaaatatgtcggttaaataaaattaaaataaagatgcaaggcacacttggatactatgttaatggtaaaaaaattaaaagtgaaattctcacaacacctcaatatgtaaatttacatcaaaacagttttagtaaatcaaataatttttataactatgtatttgaagcatcaagccatgcattagatcaaaatagaattaataattttcctataaatattgcagccattacaaatattactcatgatcacttagattaccataaaacact

SEQ ID NO: 311736 - DNA, 661 bp, Unknown
  Bacterial polypeptide expressing nucleotide sequence isolated from the Sargasso Sea
actgatttatgcttgcaaagatatccagttccaaaccatagggtcagtggatgttgaaatttttggtattacatcaaatactaaaaaaatcactgaaggggacttatttgttgctttgcagggtgcaaaatttgacggtcatgattttataacagaagcaataaaaaaaggagcggtagcaatattaggacaatctgggagcaaattccaattgtcattagataattcattttcatcttgttttatagcttgccaagatcctagaggtgcatacccaaaactgtgttcaatctattacaataaacagccagagatgatagcgggtataactggcacaaatggaaaatcatctgtagccgagttcactcgtcaattgtggtcatttcattcgttatctgcggccagcttaggtactctgggtttggtagcggagaattttagtgaaaaaacaaatcttacaacccctgatcctgcagagctcttctcttcacttaagcgacttgcagatattaatattacacacttagctctggaggcttctagtcatgggttggatcagcatagacttgattgcctcgatataggaatagccgcgttcactaacttgagcagagaccacctagattaccataaaaatatgcaagagtacttactggcaaaa

SEQ ID NO: 311737 - DNA, 659 bp, Unknown
  Bacterial polypeptide expressing nucleotide sequence isolated from the Sargasso Sea
tttggcaatgaattcaaacgaggtaaataaaggtgacatatttatcgcaatacctggaactaaattagatggccataactttattgagcaggccatagataaaggcgcatcagccattatatctaacgggacggacttaggcaagctacctgtgccacaaataaaagtggcaaatccacgaagagccgcatcaattgtggcctcggagttttatggacatcctacaaaacatttaaaagttattggggtgacaggtaccaatggtaaaacaaccacagcctcaatcctgaaatctattctggataatgcaggatataaagttgctcaaattgggacacttggtcttattgctgatgattttgaacaaattaaaacccttactacaccagatcctataactcttcaaaaactattctcaaaattgaaagaagccaattattcacatattgtcatggaggtatcctcacatgcgcttgaccagtttagagttgccgacgttaattttaatattggagtgtttaccaacctatctccagaacatcttgattatcatgcgacaatagagtcttactttcaatctaaacttagattatttacaatgctgacaattaattcagcagccattgtaaatatttcagattcatttggaaaacgaatat

SEQ ID NO: 311738 - DNA, 634 bp, Unknown
  Bacterial polypeptide expressing nucleotide sequence isolated from the Sargasso Sea
atgctcgtttcttataagagtactaccgttaaaatcgcaacaaaattgatcggctcgttcaacgcctataatctcttagcagttgttgcaagtttgctaacgatggactttaagttgtcggagattgctgaagcattgcaaggtatcacgcctgttgaaggtcgtatggaatcttatggaggtggcgataaaccaaccgttatagtagattatgcacatacgccagcggctttggaagaagttctagtaagtttgcaacgttattgtgagaggcgccttgtctgcgtttttggttgtggtggcgatagggatagtggtaagcgtaaattgatgggtcagatagcagagcgatatgccgaccatgtaatcattaccgacgataatcctcgtcatgagtctagtaagcgcattgttgagcaggttttacgaggtttcttgtgtccatgggctgttgatgtcatacatgatagaaccaaggctattgtgcatgctatcgatgaagctatgcctggtgatgtgattttaattgccggtaaggggcatgaatcgtaccagataatcggagatgaaaaaatcgccttcagtgataaagagcaggttaagtttcttttgaatctccgtgcggatgcatgat

SEQ ID NO: 311739 - DNA, 754 bp, Unknown
  Bacterial polypeptide expressing nucleotide sequence isolated from the Sargasso Sea
atttattaaatttaaaaatttcaaaattaagaccttttctatggccattgcagcagcaaagttatgcaatttaaagaaaaaagaaatttttctttcattaaataagataaaagatgtaaatggtagactagaactagtcaaaatattcagcaacaatgtcagagtctatgttgactttgctcacacacctgatgcgcttcttaaatcaattacagctcttgaagaatcagataataaaaatgtatcaatagtttttgggtgtggtggtaatcgtgactttaaaaaaagacctctgatggggaaaatagctagtcaaaattgtaaaaatatttatgtaactgatgacaacccaagagatgaaaaacctgagaagataagaaatgaaattattaaaaatattaaaaataaaaattgctataacattaaaaatagatcacttgctattaagacggctataattaatgctgaaccaaatgaaataattttaattgcaggtaaagggcatgagagtcaacaaatatataaaaaaaaaacgatttcaatttcagataaaaaaattgttaaaagttttaattataaaagtaaaaaactatcaaataaacatttaacttttctacaaaacaaaaagatttttaaagaaataaaaaaaaatacaaagataaaagattttcatggtcttgcgatagattcaagattagtgaaaaaaaataatttatttttaacaatcaaaggtaagaatcacgatggtttggac

SEQ ID NO: 311740 - DNA, 837 bp, Unknown
  Bacterial polypeptide expressing nucleotide sequence isolated from the Sargasso Sea
tgttagatcaacattatcatatgctgcctctaagttttataataaaaaaccaaaaaatataattggtataacaggtacaaatggaaagtcttctatagcaaatttttattatcaaattctaagccaaaataaaaaatcatcagcatcaatagggactttaggtataaaatcaaaatcatataataaaaacttcaatatcactactttagatccagtaaatcttcattacaatttacaaaatataaaaaatgaaaaaatagataatgtaatcttagaggcatccagccatggattaaaacaatcaaggttagatcatttacaatttaattgttcaatttttactaatattagtagagatcatttggattatcacaaaacttttaaagattatataaattctaaattaaagttatttagatttcttgcaaaaaaaaactctacaattatatttgataatgatttacccacctctaaaatattaaaacatataagcaatgtaaaaaaactaaaaccaattaccattggatcaaagaattctaatttaaatattaataaaatttattataaacaagattcacttttagtaaaatttaaatataaaaaaaaaaattatttaattaatttaaatttaattggaaaacttcaagtgaaaaatattttaatggcatgtttggctgctgaaaagagtggtttaaaattttcaaaaattatatcaaatattcataaaataaaacctgttgagggaagattacaacagatacaaaaaattaaaaataattctaaagttatattagattttgcacatacgccagatgcattaaaatcctctctgcaaaa

SEQ ID NO: 311741 - DNA, 856 bp, Unknown
  Bacterial polypeptide expressing nucleotide sequence isolated from the Sargasso Sea
aaaagttatcataaaatatttttttctggcatagcttttaacagttcacatgtgaaaaaaaataatattttttttgcaataaagggaaataaatttgatggaaataattatatagaagatgcaattaaaaagggagctaaaataattgtttcagaaaaaaaaattaatttaaagaaaaacaatataatttttataaagaatagtaatccaagaaaattattatctcaattttcttatagaaatgttaaaaaaaatttaaaaaaaataattgcggtaacaggaactaatggaaaatcatcagttgctgatttttattttcaaattttaaatttgaatgataaaaaaactgcatcaataggcactataggtgttaaacaaaaaaataacataagagagatatctaatacaacgcttgatccagttgaattaagtaaaattatcaatcaattaagttcaaaaaatattaaatatattgttttagaggcatctagtcatggacttaaacaaaatcgtttagatggactttcttttgatataggaatttttactaatttatctcaagatcatttagattatcataaaaattttagagattatttattagcaaagttatatctatttaaacatttattaaaaaaagatggatgtataatttcagattcaacaattcctcaaataaaaaatttaaaaaagatatctaaagaaaaaaagattaaattagaaacagtttttgggaaaaactctgaattagaattaattgatcatgtctataataatgaacaacaaattattaaggttaaatacaagtctaagttacatgaattgaagattaatctgataggtaaagtccaataaa

SEQ ID NO: 311742 - DNA, 817 bp, Unknown
  Bacterial polypeptide expressing nucleotide sequence isolated from the Sargasso Sea
cttgctcaaatttgtaaaataaataagattccttcaaaattaacaggtactctaggttattttatagatttaaaaaaatataaggactctaaattaactacaccaagtaatttagatctttatcaatttgctaatgcaagtaaaaaaaataaattttgttttatagctgaggcctctagccatggactacatcagggacgtttcaaaaatttcaatatagatatagctgcaattactaatctttcacatgatcatttagattatcataaaaactttagatcttacgtaaatagtaaagtatcattattcacaaatattttacactctaaaggagtagctataattaattcacgtttaaaaaattataaaactttagaaaaaaaaataaaagaaagaaaaattaaaataattacttatggagccaaagatgtgtatttttataaaaataattatttagaattatatattctgggaaaaaaatataatttaacaaaatttaaattaacaaacaatattcaaaaagaaaatttggaatgtgcaatagcctgcgctctcgctatgaatataagcataaaaaaaataattaattctttggataaattaaaatcagcgccaggtaggtttgaaattataaactttagaaaaaaaaattcaaaaatcataatagactatgctcatactcctgcagctcttgaaaatattttaaaaactttttcatacgataactttaaaccctctcttgtttttggctgtggaggaaatagagataaagaaaaaagaaaaaaaatggcaattatagcaaaaaaatttcaaatag

SEQ ID NO: 311743 - DNA, 620 bp, Unknown
  Bacterial polypeptide expressing nucleotide sequence isolated from the Sargasso Sea
catgtatctgggaaatttcatagaaaatttagaaaaaaaatattctaagcttagcttttctggcttagcttttaacagcagagaagtaaaaaaaaattatattttttttgcaattaaaggaaataaatttgacggtaacaattacattaatgacgcaattaatcgtggtgcaagaataataatttctaaaaaaaattctaagataaataaaaaaggtattaatttcattacaaataaaaatccaagaaaattactttcagaattatcatataaatttttgataaaaaaaccaaaaaatttagttgcagttactggtacgaatggaaaatcatctgtatcggatttttattatcagattttaaatttaaataaaaaaaaatctgcatcaataggaactattggcgttcagtttgaaaataagaataaaacaattactaatacaacccttaatcctattaaattaagagaaataataaactttttaattaaaaaaaaaataaacaatataattctggaagcatcaagtcatggtttaaaacaaaatagattagatggtttagattttgatatcggtatcttcacaaatttgtctcatgatcatttagattatcataaaaata

SEQ ID NO: 311744 - DNA, 673 bp, Unknown
  Bacterial polypeptide expressing nucleotide sequence isolated from the Sargasso Sea
tcatctcatggtatagatcaatctaggatatttggattaaattttaaaggtggggttttccttaatatttctcatgatcatttagattatcacaaaacattcaaagattatagggatgtaaaaaaagtattttttgatcaattgccaaaaggagcatttgcattaagtaattttgatgataaaaatggcaaatacatattacaaaatactctagcagaaaaaaaatcattttcaattaactcctatgcggattttaatgcaattatacttgaaattgatttttcaggaatgttaattaaaataaataatactgatttttggacacatttggtcgggaaatataatgcatcgaatttactagctgtttattcagttgctatgttactgaagttagattcaataagtgttttatctcatttaagtaagctaaaaaatgttagaggacgttttgacattattcaaactaaaaaagcaaaaatcataattgattatgctcatactccagatgccctaaaaaatgttctttcatcaattaacgaaattaggaaagattttaagaaactaattacgattgttggttgtggaggagaaagagataaaaaaaagaggcctataataggaaaaatagcaagtattaaaagtgacaaagtaatttttacttcggataatccca

SEQ ID NO: 311745 - DNA, 703 bp, Unknown
  Bacterial polypeptide expressing nucleotide sequence isolated from the Sargasso Sea
aatgttattgggtaaattaattaaaaatattaagccagcgtataaatttattagatttaataatattagatttaatagcaaagattgtaaaacgaacgatatttttttttctattcagggaaataattcaaacggaaataattatattaaagacgctataagaaatggctcaaaaattattatttcaaatataaattttgagggatttaataaagataaaattttatttgttaaaagtaaaaatccaagaaaaacattagcagaagctgcaagtaatttttatacaaaaaaacctagaaatatcattgctataactggcacaaatggcaaaacctcaatatcaaattttttctatcaaatattatccctcagcaaaaaaaaagctgctacagttggaactttgggagttttatcaaaaaaaattaatttaaagactaataatacaacaatagatcctattaaaatacactatattcttcagaaactgaaaggctcgaagattgataacgtgattatagaggcatcgagtcacggtttaaaacaacataggttggacggaataaattttaaaactgcattgtttacaaacttgtcaagggatcatctagattatcataaaacattcaaagactatttgaattctaaacttattctttttgataaattgttgcttaacaaaggaaacataatttttgaaaatgga

SEQ ID NO: 311746 - DNA, 871 bp, Unknown
  Bacterial polypeptide expressing nucleotide sequence isolated from the Sargasso Sea
tattttttttgcaataaaaggcgtaaatcatgatggaaataagtatattaagaaagcaatagatcgtggatgcaaggttatagtacatcaaaaaaaatttcagggaattaaagatagcatactttatatttcatctaagaatgtcagaaaagatttatcattaatagctcataagtattttaaaagtaaaccaaaaaatattttggcggttacaggtacaaatggaaagtcttcgatagcagatttttactatcaaattctgtcaatgaacaaaaaaaaagttgcttcaataggaacgctaggaataaaaacaaaaaaaaatatatttaaggtaaataacaccacattagatccaattaccttagctaagtcttttaaacttctagattattttaaaattaacaatgtaattttggaagcatctagtcatggtctacaccagaatagacttgatggtattaaatttaatggtggaatatttaccaatctatctcacgatcatttggattatcataaatcattaaaaaattatttgaactcaaaactatatttatttaataatttattaaaaaaaaattcatttattgcaactagcgcaaatatccctcaatataataatattaaaaaaattgctaaaaataaaaaacttaaattaatttctttatttaataaaagtggtattgaaattttagatcataaatatattggggaaaagcaatttttaactattatttacaaaaaaaagaaatactcatttgaaactcacttgattggaaaaatacaaataaataatttattaatggctggtatagcagcaaaaagtagcaaactgaaatttgaaaaaattatagatacattcaatcaaataaaa

SEQ ID NO: 311747 - DNA, 824 bp, Unknown
  Bacterial polypeptide expressing nucleotide sequence isolated from the Sargasso Sea
attgataaagattcattgttataaaaataaagatgttggaattttaggagctggattatctggtttagccgcagcaaaaatacttttaagctcaaaagctaatatatatatctttgatgacaaaaaagataaaccagatctaattaaaaagaatagctggaaaaattataaaacttggccgtgggaaagtttgacaacactagtggtaagtcctggaataccaataaacgcaaaaaagaagcataatgctattaaacttgcaataaaaaataaggttaaaataataaatgaaattgacttgttttttgagacaaaaccgaaagctagaataattggaataactggcactaatggtaaatcaacaactgtagcattattatttcatatattaaaatttaataaaatcaaatgtgttattggagggaattatggttttccagcgtgtgaaattaaggatccaggtagacgtggaattataattctagaattatcaagctatcaactagatggtgctatgaaattaagtttagatttagcttcaattattaatatcactcctgatcatttagattaccatgaaactttttgtaagtataaactatctaaactaaaaattataaattttttaaaggtaaatggtactttttttttagatgtcaaaaacaaactcctaaaagaaataatagattacaaaaggtataattctataaatataattaaaataaaaaacaatgaatttgacaattatgttaatgacaatgattaccttaaaggatctcacaacagagttaatggatctattgcattatctatcgcaaggtatc

SEQ ID NO: 311748 - DNA, 715 bp, Unknown
  Bacterial polypeptide expressing nucleotide sequence isolated from the Sargasso Sea
atgttgttgaaagaattaattaaagatctcccaaataaagataaaaaaatcaagattagaggattatcaacatgtagcaaaaaagtaaaaaaaggctttattttttttgctatcaaaggaaataaatttaatggagaaaattatattcatgaagctgtaaaaaagggtgcttcagtaataatatgttctaaaaattgtaaatattctaaaaaaaatttaataataaagaaaacctcagacattagatttcttttaagtaaaatttgttcaaaattctataatttaaaaccaaaaaatatttttgctgtgactggtacaaatggcaaaacctcagtagcagatttattttatcaaattttaaaacttaacaatattcctgtggcttcaataggtactttaggtattaaaattaatggaaaaataatcaattcaaacattacctcaccagacccgataacattacataaaacattacttaaattaaaaaggagaaaaatagataatgtaataattgaagcatcaagtcatgggctttaccaaaaaagagttgaacatataaattttaaagcaggtatctttacaaattttagccaagatcatctcgactatcataaaaccatgaaatcgtacctaaacgctaaattacatttgtttaataatattctatctaaaaaaaaagtaattatcacagataaaaatttaaaagaatacccaa

SEQ ID NO: 311749 - DNA, 740 bp, Unknown
  Bacterial polypeptide expressing nucleotide sequence isolated from the Sargasso Sea
aatgaaacttaagaaaattttaggatctgtatctaaaaaaaatggcaatattgtaattaatggaattagttttaattcaacaaaaattaaaaaaggaaatgtttttttttctattagaggaaaaaaaactagtggaaaaaaatttattcaagatgtagctgcaaaaaaagcttcatgcgtaattactgatgaaaatatttataaaaaaaattataaaattcctataataaaagtaagaaactgcagaaaatccttgtctgaagcaagttctaatatttataacttaaaaccaaaaaatataattgccgtaacagggacgaatggaaaatcgtcaattgcgaattttttttttcaaattctaactctaaataaaaaattatcagcttcaattggcactttaggaataaatacaagagattttaaaaaaaaaaataaacttacttctagcgaccctattactttacataaaaacttatttcaacttgcaaaaaaaaaaataaatcatgtaatattagaggcttcaagccacggtttagatcaaagtcgcttagatcatgtaaagtttaattcagcaatatttactaatttaagtcatgatcatttagattatcacaaatcatataaaaattattttaactcgaaattaatattatttaaaaatttgcttaaaaaaaaatctaatatcataactgatatggatatagctcaatataaaatattaaatagtatagcaaaagaaa

SEQ ID NO: 311750 - DNA, 372 bp, Unknown
  Bacterial polypeptide expressing nucleotide sequence isolated from the Sargasso Sea
tatctaatcttccaatagatctagaacataaaattattatttttggttgtggaggcgatagagataagagcaaaagatctaaaatggcaaaaatagcatctaaatatactgatattcaaattattactgatgataatccaagaaatgagaatccatcaaatattagaagaattctttttgaaaattcttctaatcctttagaaattccatctagaaaaaaagcaattgaaagaggatttaagcttttaaaaaataaaaaaggacttttgataatagctggcaaagggcatgaaaatatccagatttataaaaataaaaaattaacttttaatgattatcaggtagcgaaatcatatgcaaaatatctttaat

SEQ ID NO: 311751 - DNA, 1003 bp, Unknown
  Bacterial polypeptide expressing nucleotide sequence isolated from the Sargasso Sea
caaaaatataaaaaaatatttttttcaggcatatcttttaatactagattactaaaaaaaaataatattttcttgcaaataaagggaaatagtatagatggaaataaattcatttctaaagctatagaaaaaggttctaaaataattgtaacagaacaaaaaataaaagattaccgtaatggaattttgtttataagaacaaaaaatataagaaaattattatcagaagtctcatttaaaatttacaacaaaataccaaaaaatttagttgctgttacaggaactaatggaaaatcttcagttgctgaattttatcttcaaataatgcaattaaataaaaaaaaggttgcttcaattggaacactgggggttaaatccaaaaatataaatttaaatttatttaatacaacaactgatccaattaatttaggtcagatctttcaaaaattaaaaaaagaaaaagttgataatgtaatcatggaagcttccagtcatggattaaaacaatatagattagatggattaaaatttaaatctgcaatttttacaaatttatcacaagatcatcttgattatcataaaaatttaaaaaattattttaaagcaaaactttatttatttgagaatttaatagaaaaaagaggaaatgtaattacagataaagatatacctcaatataaaacaatcaagcaaatctcattaaagaaaaaattaaaaatatcagcaataaatgaaaaacaaaataattttcaaatattatctcatagatatgacaatgaaaatcaattgattaaaataaaacataaagattcaattaaggaaattaatttaaatttaataggtaaaattcaaatcaagaatatattgatggctgtaattgcagcacaaaaaagtaatttaaattttgaaaatattttaaaagtcttaccagaattaaaaccagttgaaggtagattagaaaaaattggaacaattaaaaataattcggattgttattcttgat

SEQ ID NO: 311752 - DNA, 825 bp, Unknown
  Bacterial polypeptide expressing nucleotide sequence isolated from the Sargasso Sea
tatgcttcttaaagattatattccagacatccctaaacgattttaccaaataaatttttcaggtatcgcttttgatagtctaaaggttaaaaaaaacgatattttttttgcgattaaaggaaaaaaatttgatgggaataattttatatcacaagccataaaaaaaggggcaaaagtaattatatctcaaaaaaaaaatcaaaaaaaaaataccgatgtaatttttttgcattcttcaaacccgagaaagttattagcagaagtatcttataaaatttacaataaaagagtcgaaaaattagttgctgtgactggaactaatggaaaatcatcagtagctgatttttactttcaaattttaaaattaaattcaaaaaaggttgcatcaattggaacacttggacttaaatataaatttaaaacaaaaaatcttgaaaatactacatcagatcctattcaaattggtttaatgcttaaaaatttgagaaaaaaaaaaattaaatttgcaattatggaggcgtcaagccatggtttagatcaaaatagattagatggattaaagtttgatataggtatatttacaaatttatcccatgaccatttagattatcataagaatatgaaaaattacctaaattcaaaattgtatttatttaagaatttgatcaaaaaggaaggtcatataattactgacgaaaatattccagaagcacaaaaaattaaaagaatatcgattaaaaaaaatattaatttaagtcttattcataatgaatctaacgggatacaattggtttcacatagatttaaaaaagaaaaacaaatctt

SEQ ID NO: 311753 - DNA, 772 bp, Unknown
  Bacterial polypeptide expressing nucleotide sequence isolated from the Sargasso Sea
gtattaaatgacgaaataaaaaatattaataattttaaaaaaagaatatcaaatagacaaatcagaatattaacatttggatcaaacaaaagtgatgtttttgtttatactaacaataaaaatacaaatctaaaaatttataataaaaattttaaaataaaaaaaattaattataataagtttgaattaagtaatcttagttgttctatagcttgttgtgtcgctatgggaataaatattaatagcattgttaaatctatcatttttattaaaaagcctgaaggcagacttcaaaaagttagttcaaataagaatataccaaaaatttatatagattacgcgcatactcctgatgctctaaaaaatattttgatttcaaacacatctaaaaaaaataataaacctaatgttctttttggatgtggcggtgacagagataaatctaagagaaaaaaaatgggtattattgctaatagatatgctaacaaagtatatataacagatgataatcctagaaatgaagatccttcaaaaataagaagaacaataattaatagttgtaaaaaagcgattgaggttccaggaagacgcaatgcaattaaaaaagcaattaatgaattaaacttaaacgaaatactaattattgcaggaagaggacatgaaaaaaaacaaattattaaaaacaaagaattcaatctaaatgattttcaaacagcaaaattatttgtatcaaaaaaaaaatatgacattcaaaaaaaatctcaaaaataaa

SEQ ID NO: 311754 - DNA, 745 bp, Unknown
  Bacterial polypeptide expressing nucleotide sequence isolated from the Sargasso Sea
ggatgatgatgcatgggagggcctcgaagggggtgggcgcaaggtcgtatcgtattcgctagtaaggaaagccgacgtgcgggcccgagacatacggttgagctccacagggacgagttttcgtatgactgtagccggccaagatttaaacatcagcctccctctgatcggacgttataacgtcgagaacgccctcgctgcatccgctgcggccatcgcggtaggggtctcgcttgagtgtgtcgctcagaggctcgaagttgcgccacaggtggcgggtcggttggaagcggtggttgctgagccattcggtgtcttgatcgactttgcacatacgcctgctgctctagaaggtgcactagaggctgtccgcccacttaccgaaggccgcctgatcgttttgtttggagccggtggtgatcgagaccgttccaaacgcaggctgatggcccaagcggtcgctcgtttagcagacgttgcagttctaacgtcggataatccgcgcaccgaagatccggatcggatcatagacgacctcgttgagggaataggttcaacggacttcatccggatgactgatcggcgagatgctatcagaaaagccctcgaggtggcacgtccaggcgacacggtcgtgctagcagggaaggggcatgagacataccaggttgtcggaaaagaaaaacagccctttctagaggccgacattgccagagatgcccttcgcgaactgggggtcctctga

SEQ ID NO: 311755 - DNA, 856 bp, Unknown
  Bacterial polypeptide expressing nucleotide sequence isolated from the Sargasso Sea
gttgattggaaagttatttaaaataaaaaataaaaaaatcagaaatcattttttttcaggtttaagctttaatagcaatacatgcaaaaaaaattttattttttttgcgattaaaggaaatttgcaagatggaaataaatacatagacgaagctattgaaaatggtgcaagaacaattattcatcaaaagtcttttgaaggttttaaaggagaagttttatttttaagtttcaaaaatatcagaaaaattttagcctccacatcctttaagttctataataaaatacctaataatataattgcggttactggaacaaatggtaaatcttcggtatctgatttttattatcaaattttaaaaattaataatgttagcgtaggttcaataggaactcttggaataaaatttaaaaataaattaatttcgttaaataatactacattagactctttaaatctttcaaagtacctaagttttttaaaaaaaaaaaaaattgataatgtaatattagaggcttcaagtcatggcttacaacaacatagactcgatagtttaaatataacttctgcaatttttactaatttttctcatgatcatttagattatcataaaaatttaaaaaattacctcaattccaaactatacctttttaacactcttctaaaaaaaaactcattattaattacagatagatcaattaaagagtttaaaaaaatatttaatatttcaaaaaagagaaaattacgtttaaaaactattcttgatgaaaaaagtgatttgcagttgatcaatcacgcctatgagggtgaaaagcaaaaaattcaaatcaaatataagaataaaatttacagtttt

SEQ ID NO: 311756 - DNA, 817 bp, Unknown
  Bacterial polypeptide expressing nucleotide sequence isolated from the Sargasso Sea
agatataaaaaaaggtttcatcttttttgctattagaggaaataaatttaatggggaaaactatatcaacgaagctatcaagaaaggagcgagattggttatttgttcaaagaaatgtaagtttaaaaaaaagaaagttgatataattaagactgttagagttagagattatttaagtgaaattacggcaaatttttacaagataaaaccaaaaaatttaatcgctgttacaggaacaaatggcaaaacttcagttgcagacttttattatcaattattaaacttaaataaaatacctgttgcttcgattggaactcttggcataaaatcaaaaaattcgaaaattcaaaccaatttaacatcaccagatataattactttacataaaaatctagagttacttaaaaaacaaaaaatagataatgttattatagaagcttctagtcacggcttagcacaacaaagactggatagactagatttcaaagctggtattttcacaaattttagtcaagaccatcttgattatcataaatctatgaaagattatttaaatgcaaaacttattttatttaaaaaattattagttaaaaataagtatataattacagatggatcttctaaggaattttcaaccctaaaaaaaatcgctaaaaaaagaaaattaaaaatattagactctacaaaagaagatctattaaagaattttataccaaaagatttcatcaatacttttcaatcaaaaaatttatcaatggcaattttagctgcacaggtaagtaaattaaataaaatcaaaattaaaaacaaaataaaa

SEQ ID NO: 311757 - DNA, 664 bp, Unknown
  Bacterial polypeptide expressing nucleotide sequence isolated from the Sargasso Sea
atgttgttaaaaaatcttattagtaatctaaagcctgaagttggtgcactcaaaatcaaaggtatttcttttgatagcagaagtataaaaaaaggagatttattcgtttccatcaaaggtgataagttcgatggcaatgattatattagccaggccacttccaaaggagctaaagtaatagttcattcccgtccaataaaaaaaaataaaaaagcaacatttataaagtttaaggattctagaaatattcttgcaaggttgagtacaaaatattacaaaaataaaccaaaaaacataattgccgtaacaggaacaaacggcaaaacttcggtagcagattttttttaccaaatttttatgttgcaaaagaaaaaatctggtttcataggaacgcttggttttagaaaaaataaatcactgaaacgtagaaatttaaccactttagattcattgaccctaaacagggatctgaacgaaatgaaaagaagtggcataaataacgttatcatcgaggcttctagccatggattaaaacaaaaaagattagattttttaaaaattaaagtcggtatttttacaaatttaagccatgaccacttagattatcacaaaaacatgaaagattatcttcactcaaagctcttgctattcagagatatttaag

SEQ ID NO: 311758 - DNA, 457 bp, Unknown
  Bacterial polypeptide expressing nucleotide sequence isolated from the Sargasso Sea
aaactagatgataataatctttgttttattgattacgcccataccccagaggcattagaatttgctttaaaggaactgaggagtttaggagagtctactttgtggtgtctatttggatgcggaggtgaaagggataaattaaagagaatggagatgggtaaagtttctaaactttattcggataaggttgttttaactaatgataatcccagaggcgaagagcctagtttaataattggagatattatgaaaggcatagaaagcaataatgacattaaagtagagttagataggaagaaagctattgattattgccttacggaaatgatgggaaacaagaaaaagaatattctcttaattgccggaaagggacatgaggaatatcaagagataaatggtaaaaaaaaggaatttagtgattttattcaggttgagaaatttttagaagaagtttgaa

SEQ ID NO: 311759 - DNA, 972 bp, Unknown
  Bacterial polypeptide expressing nucleotide sequence isolated from the Sargasso Sea
tactttcataaaataaataaaaattataaaaatttttctttttcaggaatttcatttaacacgaagagtatcaaaaaaaataatattttttttgcaatcaaaggaaatagtattgatggtaataaatttatacctaaagcaattaaaaaaggatctaaaattattgtaagcgaaacaaaaacaaatccattccaaaatggaattttgtatatccatacaaataatgtaagaaaattattagccgaaacagcttttaaaatttataataaaaaaccaaaaaatttaattgcagttaccggtacaaatggaaaatcatcagttgcagatttttattatcaaatattaaaattaaataataaaaaaggtgcttcaattggcacattaggtgttaaatcaaaaagtattaatttgaatttatctaataccacaatagatccaatcaaattagctaaaatattaagtaagttaaaagaacaaaaaatagaaaatgtaattatggaagcctcaagccatggtttaaagcaaaatagattagatggtttaaagtttaattcaggtatatttactaatctatcccaggatcatcttgattaccataaaaatttaaaaaactatttaaatgcaaaactttatttatttgaaaacctaatctcaagaaaaggaaatgtaattacagataaattaatacctgagtttaaaaacataaaaaaaatcgcaattaataagaaattaaaattgcatacacttaatgatgagaaaaataatctaaaacttttatctcataattttaaaggagagggtcaatttcttagatttaaattaaatagctcaataagggatataaatttaaatttaattggaaaaatacaattaaaaaatgttttaatggcaataattgcagcaaaatatagtggtgttagtttaaataaaattttaaatacagtttcaaaattgaaaccagtgaagaaaaga

SEQ ID NO: 311760 - DNA, 232 bp, Unknown
  Bacterial polypeptide expressing nucleotide sequence isolated from the Sargasso Sea
aaagtatttttagattatgcccacacacctgaggcattagaaaaggcaataatatctttaagagaacattttcataaaaaaattacaatattatttggttgtgggggagaaagagataaaacaaaaaggagattaatgggacaggttgcaaaaaaatattgtgataaaatttatattactgatgataatccaagaaaagaaaatgcaaaaaaaatacgaaaagaaatcatga

SEQ ID NO: 311761 - DNA, 732 bp, Unknown
  Bacterial polypeptide expressing nucleotide sequence isolated from the Sargasso Sea
acaaattataaaaaataaaaaaattaataatgtaatactggaggcttccagtcatggattaaaacaatctaggctagatcatttaagatttaattgctcaatatttaccaactttagtagagatcatttggactatcataaaaattataaagattatcttaactcaaaattaaaattatttaaaaatcttactaaaaaaaatgcaacagtaatatttgataatgatttgtctacttcaaagatattaaaaaaaatatgtaatttaaaaaaatttaaaataaaaactatagggaaaaaaaattcagatcttaatataaatagaatttcatgctttaaagatttgcaggttgtagaatttgattataaaaaaaaaaattatttaattaatttaaaattagttggaaagcttcaggttaaaaatatattaatggcatgtttggctgctgagtgtagtggagtaaaattttcgaaaattatatctaatatacacaaaataaaaccagtagagggaagaatggagcaaattaaaacaattaaaaatggctccaaggtaatacttgattttgcacatactcctgatgctttaaaaagttctttaaaaaatttaaaagaacaatatccattaaataaattagatattgtttttggatgtggtggtaacagggacaaagcaaaaagacctttgatgggtaaaatagctgatacatattgtgaaaaagtttatcttactga

SEQ ID NO: 311762 - DNA, 946 bp, Unknown
  Bacterial polypeptide expressing nucleotide sequence isolated from the Sargasso Sea
ataaatgatgccatagcaagaggggctcgaataattgtatcaaataagtataaaactggagtcaataaaggtgtattatatataaaagtaagcaatcctagattagccttaacaaattttgcaaataaatattataataaaaaaccaaataatataattgcagtaactggtacaaacggtaaatcgtctatagtcaatttttattaccagatattaaaacttaataaaaaaagagtagcctcaattggaactttaggtgtcaaatcgaatggtgttagcttaaaacttaataatacaactgtagacgccattacaataaataaaatacttgcaaatttaaagaataaaaaaattgaaaatgtaattttagaagcatcaagtcatggcctgcatcaaaaaagattacatggtattaaatttagcacatctatatttactaatttaagtagagatcatttagattaccacaaaaattataaaaattattttaattcaaaattaattttatttaatgaattgacaaagaaaaatggaaatttgatatttgataatgatttaaaatattcgcaaattttgaaaaaaatagcctatagaaaaaaattaaattcattaaacattggtacatcagatagtcatttaaaaattaattcaattaaaattttaaataaataccaacatgtaaagtttacttttcaaactaaagaataccaatttaaaacaagccttgttggaaaaatacaaattaagaatttgatgatggctgttgcagcagcaattaaaagtaatctaaaaattgatgatattgttaaaaaacttaagtatattaaacctgcaacaggaaggctcgagataatcggaaaagccaaagataattcaatttttattttagactacgctcatactccagaagctcttaaaactagtatagaaaatattaaggaacaat

SEQ ID NO: 311763 - DNA, 976 bp, Unknown
  Bacterial polypeptide expressing nucleotide sequence isolated from the Sargasso Sea
gccaaatatgtaaaattaagtgaaaaaaaaattttaaattctctaactaaaattaaatcagtagatggtagattagaacttgtaaaaactttttcaaacaatgttagggtttttgtagattttgcacatacacccgatgcactaaaaaaatccttactttctttgaaagctcaatacaaagaggatgtctcattagttttcggttgcggtggggatagagatacgaaaaaaaggccttttatggctaaaattgcaagttcaaattgtaaaaatatttatgtgactgacgacaatccaagaaatgagagacctgaaaagataagagcagagataattagacaaataaaaaataaaaatttttttaatatcggcaatagatctaaagctataagagccgcaattttaaatgccgaacctaatgagattatacttattgctggcaagggtcatgagcaagaacaaatttataaaaataaagttattttaatatctgataaagaaattgtaaaaaatcttaaagtaaaaataaaaaaaatatcagaaaaaaaaagaaactacttacaaaacaaagaaattttaaaaagtatccaaaaaaaaaataatttaaaagactttcatggaattgcaattgactctagagtagtaaaaaaaaataatttatttctaacaataaaagggaaaaataataatggggttaaatttataccaaatgctctgaaaaaaggcgctcaatatataatctcatctaattacttaaaaaaatataaaaataagacaattaaggtaaaaaacgaaattaaatttttaaatcgttttgcatctgaaaaaagaaaaatttctaaagcaaaagtctttgctgttacgggtagcgctgggaaaacatctttaaaaaatttactaaaaaaattgcttcaaaattttggtgataccttttgctctcccaatcttataataatcattttggtgtgcctttaag

SEQ ID NO: 311764 - DNA, 936 bp, Unknown
  Bacterial polypeptide expressing nucleotide sequence isolated from the Sargasso Sea
ctttgctttgcccggcttgcgtactgatggaaacgaacatttgcaggaagcgctggaccggggcgccaaggtaattattagcgggaaggacgagatcgatttgccgttgggagttacgggtttgaaggtggacgaccccaggcttgcccttgcggaatttgcgaggcgttatcatgggtccccggactccgtccttcgcgtagtgggtattaccgggaccaacgggaagacgaccgtaagtaccttgacgagacacttgatggaacggcccgggaggccggtgggattgatcgggaccgttcgatatcacttgggggatagggaaattccgtctttcaagacgacaccggagtcatcggacttgtttgcgcttttgaggggcatgttggcggcaggatgctcggaaacggtgatggaagtcagttcgcatggtatccatcaagccagggtcgccggattggggttggaggtagcggcatttctaaaccttacccgggaccatctggattatcatggaaacatggaaagctatttccgtgagaaaagaaaaattttcaatggagccaacggaacccttccaaagattgccgtcattaacggggattgtccttacggcagaaggttgatcgaggagcttcctccccaagttcaggttctctcgttcggcctggaggaggataaccatttcagagccaagaatctcagcctgcagtcaggtggatcggagtttattctggaagcgcctgccggcacgatggtagtgaccagtccgcttatcggaagctacaacgtcatgaacgtcctggcctcctttgcaatccttcatgccttggggcattcggtcccggatgcggttcgcaaagtcggtgcattcgagggtgtggacgggagaatggaagcggtggagcgtggacaatcctatcaagtcatcgtgga

SEQ ID NO: 311765 - DNA, 732 bp, Unknown
  Bacterial polypeptide expressing nucleotide sequence isolated from the Sargasso Sea
gatggaatttattcctcagttaaaaaacattgatcaagagattaaaggtgtctgtgcagacagtagacaagtaaaaaaaggcgatcttttttttgcttacaaagggataagtacagatggaaatatttatattgaacaagctatccaaaaaggagctatagctattatttcagatagtatttctgaccctaaaaagaatatttatagacatgattctttaaaaaatgacttagggataataatctcaaatttgtttaataatccttctaagaagttaaagttatttgctgtcacaggtactaatgggaagacctctacagtcgaatttatctctggattaataaataaacagcaaggaaagtgcggatatttaagtactatagggtggtgtttagatggagttaactttcaaaagggatcttccctaacaacaccaaattcgttagaaattaataaacaactaaataaaatgcatattaggggcatgaattatgctgccttagaggcttcttctcatggtttagatcaaggaagattggatggtcttgaaatagatacagcaatttttacaagcttctctcaagaccatctggactatcatcaaacaatgcaaaactatgcggattctaagaagaaattattcttagaacttcatcccaagaaatccgttataaatattgacaatgcattaagtaaaagcatttatacagaattaactaaaaataatttaga

SEQ ID NO: 311766 - DNA, 944 bp, Unknown
  Bacterial polypeptide expressing nucleotide sequence isolated from the Sargasso Sea
tgcattgaataaagctcttgaaacattaaaaaatattgaaggtgggaaagtttctttagtttttggttgtggcggtaatcgagataaaagtaaaaggccattgatgggaaaaatagcaagtgacaattgcgaaaaaatttatgttacggatgataaccctaggaaagaaaaaccagataaaattagacaagaaataataaaaaatattaaaaataaaaactactttaatattggaaatagggctaaagcaataaaatctgcaattttaaatgctgaacctaacgaaactattttgattgcaggcaaaggtcatgaaagtgaacaaatttacaaaaataaaacaattttaatttcagataaacaaattataaaaaaacttaaattaaacattaagaaaatatcaccgcaagttcgattgtttttagaaaataaaaacattttaagcagtattttaaaaaaaagaaaaaaagaaaattttcatggcctagcaattgactcaagagttttgaaaaaaaacaacttattcttaactattaaaggtaaaaataacgatgggataaaatttgtttctcaagcgttaaaaaaaggtgcaaaatatataatttcaacaaagaaaattaaaaaatataatcaaaagattattaaggtaaataatgaaataaaatttttaaacaaatttgcaaaatgtaaaagaacatcaacttccgcgaaaattattgcaatcaccggaagcgcaggtaaaacgtcattaaagaatttaacaaaagatttattaaatgtttattcagaaactttttgctccccaaaatcttataataatcattttggcgtaccactaagtttatctaatttaaaaaccatccataaatttggagtttttgagattggaatgagtaaagcaggagaaattggtaaactttcagaattaatcagacctcatgttg

SEQ ID NO: 311767 - DNA, 781 bp, Unknown
  Bacterial polypeptide expressing nucleotide sequence isolated from the Sargasso Sea
tctgatagttctaaagttaaaaaaaatgatattttttttgcaattaaaggaaataagattgatggaaatatctttatagatgaggctattaaaaaaggagccagaatcattgtttcagaaaaaaagattaacaaacagaaaaagaatataattttcttacattcatctaatgtaaggaaattattagcagagacttcgtacaaaattttaaataaaaaaccaaagaaactgattgcagtaacaggcacaaatggaaaatcatctatagcagatttttattatcagatattagattataattttaaaagagttgcttcgattggaactataggcgttagatataaaaaaggaaaagtaaaattagataatactactttagatccaatacgattaagttcaattctgaaaaatctaaaaaaaaaaaaaattgacaatataattttagaggcatctagccacggtttagatcaaaatagattagatgggttattatttgatgtaggtatatttactaacttatcacatgatcatttagattatcacaaaaatatgaaaaactatttaaactcaaaattatacctattcaataaattgataaaaaaaaaaggcgatataattactgatgaaaatattccacaaaaaaaaattcttaaaaatatttctttcaaaagaaatgtgaatttcaatctaatttttaatagatataagggtatagaacttgttagacataaatatgagaatgaaagacaagtattagagattagatataaaaataaaaatt

SEQ ID NO: 311768 - DNA, 730 bp, Unknown
  Bacterial polypeptide expressing nucleotide sequence isolated from the Sargasso Sea
tatgcttctaggaaagtactttcataacataaataaaaattatagaaatttttatttttcaggaatttcgtttgacacgaagagtattaaaaaaaataatattttttttgcaataaaaggaaacactattgatggtaataaatttattactaaagcaattaaaaaaggatctaaaattattgtaactgaaaaaaaagtaaatcaattccaaaatggaattttatatattcatacaaagaatataagaaaattattagctgaaactgcttttaaaatttataataaaaaaccaaaaaatttaatcgcagttacaggtacaaacggaaaatcatctgttgctgatttttattatcaaatattaaaattaaataataaaaaggctgcttcaattggtacattaggtattaaatcaaaaagaattaatttgaatttacctaataccacaatagatccaattaaattggctaaaattttgagtaagttaaaaactcaaaaaatagaaaatgtaattatggaggcctcaagtcatggtttaaaacaaaatagattagatggtttgaaatttaattcgggtatatttactaatttatctcaggatcatcttgattatcataaaaatttaaaaaattatttaaaagcaaaactttatttatttgaaaacctaatccaaaaaagaggcaatgtaattacagatcaattaataccagagtttaaaaacataaaaaaaatt

SEQ ID NO: 311769 - DNA, 840 bp, Unknown
  Bacterial polypeptide expressing nucleotide sequence isolated from the Sargasso Sea
aatgatttcattgaagatgcatttaaaaacggagcttgcttagcgattaccgattctaataagttagaatctcaaaaaaatgtagtaaaagttgaagatgtaagaattgcagcaggcattgcttgttcaaatttttacaattttcctcaaaacaaggtaaagttgataggaattactggtacgaatggtaaaacatcaacatcaaccattttaaaaagcattttagatgcaaaaaatgaaaagacgatacaaataggaacaagtggaataaagccttcgattgagattaatcctggactaactacgccagatatttttgatttgtatgaaatattaaattatgcagttaatgaaaattacaaaaatgttatattagaggtttcttctcatgcattatcacaaagaagaatagaaaacattttttttgacataactgcatttacaaatcttacacatgatcatttagattatcatgagacgatggatgaatattttagtgaaaaacttaaactttttaatttaaataaagataatggctcttctgttgtgatgattgatgatgattatggtaagagaattgctgagttaaattcaaatgtcaaatgtatttctcttaaaaatgaagatgctgattatttttgcacatcacatagcattaatagttttggattagcaggtactttagcatgggactccgaaactttagactttgaatcaaagcttattggttcatttaatttagaaaacctgactcttgctgcatcaattgcaattgagctgaatatttcagtaaaatacatagcaaaaggaattgaaaattgtaccaatatagatggtaga

SEQ ID NO: 311770 - DNA, 887 bp, Unknown
  Bacterial polypeptide expressing nucleotide sequence isolated from the Sargasso Sea
tttggtttttggttgcgggggagagagggataaaccaaagaggtcaatcatgggcaaaattgctaatgatttatgtgataaaatatatttaactgatgacaatcctagaacagaaagtccaaaaaaaattagatctgaaatcaaagctaagatatataaatcaaaattaattgaaatgccttcaagaaaagaggcagttgaaaaagcaataaaagatctaagatctgacgaaatattaatcgtggcaggaaaaggtcatgaaaattatcaagaatataaaactaagaaatttttctcagataaggcatgtatgattgatgctattaaaaaaaaaaataaaaaattatctaataatttaaaaataaatattattaacgaatgcttaaacaaaaaaattaataataatttttttataaatgaggcttcaattaactcaaaagacgtaaaaaaaaataatatttttttcggtattaaaggaaaaaatattgatggaaataagtttgctgatgaagctcttaagaaaaaagcatctatttgtatattagaaaaaaattattcaaaaaaaaattcaagaaaaatatttgttaaagatacacttaaaactttttcaaatttatcatgcataatacgtagatcattaggaacacccattgttgcaattactggctctgcaggtaaaacttctttaaaagaactaattggccaaagtcttaatactttaataccaacttcatattcaaaaaaatcatttaacaataaatatggagttccattgtcgttatttaatattaataggaaacataaaattggagtgtttgaaattggtatggataagaaaggtgaaattcataagttatctaatttaatccaacccgatataggtgtaa

SEQ ID NO: 311771 - DNA, 859 bp, Unknown
  Bacterial polypeptide expressing nucleotide sequence isolated from the Sargasso Sea
catgttgttaaaaaacctaattaaaaatttcaaacagggtaaatctgataccaaaatcagaagaatttcatttgacagcaggaaaataaaaaaaggtgatctttttatttcaataaaaggaaacaaattcaatggtaatgattatattgatcaagccatcaagaaaggtgcaagggtaatagtacattcacaaccaataaaaaaaaagaaaaaaaatatatatataaaagttaaggacacaagagagattttggcaaagttaagttccaaattttataaaaaaaaaccaaaaaatattgttgctgtaacaggtactaatggcaaaacttcagtatcagatttttttcatcagatttttactcttcaaaaaaagaaagttggttttataggaactcttggttttaaaaaaaacaataatttaaaaaaaagaaatctaacaacattagactccctaagcttaaataaagatctatatgaaatgaaaaaagaaggaatagaaaatgtaattatcgaagcttcaagtcacggtttaaaacaaaaaagattaaattttttaaaagtaaaagctggggtttttacaaatttaagtcgtgaccacttggattatcataaaaatatgaaaaactatctcaattcaaaacttttactatttaaaaatattcttgaaaaaaaatcttcgattattaccgataccgatattaaacaatataaaattttaaaaaaaattcaaaaaaaaagaaaactaaaaatttatacaattggatcaagagggaatactttacagattttaaatcataaaatttataaagatcatcagtttttagaaataaagatcagaaataaagtttatggaataaaa

SEQ ID NO: 311772 - DNA, 886 bp, Unknown
  Bacterial polypeptide expressing nucleotide sequence isolated from the Sargasso Sea
agattctaataagttagaatctcaaaaaaatgtagtaaaagttgaagatgtaagaattgccgcaggcattgcttgttcaaatttttacaattttcctcaaaatgaagtaaagttgataggaattactggtacgaacggtaaaacatcaacatcaaccattttaaaaagcattttagatgcaaaaaatgaaaagacgatacaaataggtacaagtggaataaagccttcgattgaaattaatcctggactaactacgccagatatttttgatttgtatgaaatattaaattatgcagttaatgaaaattacaaaaatgttatattagaggtttcttctcatgcattatcacaaagaagaatagaaaacatcttttttgatataactgcatttacaaatcttacacatgatcatttagattatcataagacgatggatgaatattttagtgaaaaacttaaactttttaatttaaataaagataatggctcttctgttgtgatgattgatgatgagtatggtaagagaattgctgagttaaattcaaatatcaaatgtatttctcttaaaaatgaagacgctgattatttttgtacttcatatagcattaatagttttggattagcaggtactttagcatgggactccgaaactttagactttgaatcaaatcttattggttcatttaatttagaaaacctgattcttgctgcatcaattgcaattgaactgaatatttcagcacaatccatagcaaaaggaattgaaaattgtaccaatattgatggcagattacatttggttgaaaaccaaaaaaatcaaatgatatatttagattatgcacattcaccagatgcatattttagaacattaaaagctctagaagaa

SEQ ID NO: 311773 - DNA, 778 bp, Unknown
  Bacterial polypeptide expressing nucleotide sequence isolated from the Sargasso Sea
atgcgattaaaaaacttttttaaaaatcttaacaaggattttagtaacagaagttttaaagggtttgaatttaattcaaaaaaaataaaaaaaaattatattttttttgctatacagggtaataaatttgacggaaataatttcataaacgatgcaataataagaggagcaagtataattgtatcaaacaagtttaaaactggaattgataaaggtatactttatataaatacaagtgatcctagattggccctatctaattttgcgagtaaattttataacaaaaaaccaaataatataatcgctgtaacgggaaccaatggtaaatcgtctattgtaaatttttattatcagatattaaaacttaataaaaaaagagtagcctcaattggaactttaggtgttaaatctaacagttttagttcaaagctagataatacaaccgttgatgcgattacaattaataaaatactctcaaatttaaaaaataaaaaaattgagaatgttattttagaagcttcaagtcatggtttgcaccaaaaaagactacatggcattaattttagcacctctatattcacgaatttaagcagagatcacttagactatcacaaaaattacaaaaattattttaactcaaaattaattttgtttaatgaattaacaaaaaaaaatggaaatttgatatttgataatgatataaattattcacatactttaaaaaaaattgctaaaaaacaaaaattaaagataataaaaattggagcatcaatatagt

SEQ ID NO: 311774 - DNA, 909 bp, Unknown
  Bacterial polypeptide expressing nucleotide sequence isolated from the Sargasso Sea
ttttgcattcaaaggaaataatacagatggaaatttttttattgatgatgctattaaaaatggatcaaaaattattatttcagataaatttaaaaaaagtggatggaaaaataatattttatttttaagttttaataatactagagcattattagctcaagtttgttcaaagatgtttaataaaaaaccaaacaacctgatagcggtaacaggcactaacggaaaatcatctatcgcaaatttctattttcaaattttaaatttgaataatttaaaggttgcatcaattggcacattaggagtaaaaggatttaatataagaaaaactttttctaatactactttcgatacaattaaaattaatactattctgcaaaaattaaaacaaaaaaaaattgagaatgttattttagaagcatcaagccatggattgtatcaaaatagattagatggtttaaaatttaatatcggtatatttacaaatttaacaagagatcatttagattatcatagaactttccaaaattattttaactcaaagctgatattgtttaaaaaattaatgaaaaaaaaatcgtatgctatttatgacaatgaattgaaaacagcttccaatttaaatagaatttcaaaattaaacagaatcaataaatttactttaggaagctctaattcgaacatattaattttagatcatcaatttttaaaagatgaacagaaaataacatttcaattcaaaaataaaaaatattctttttcaacacaactaattggaagagtacaaattaaaaatttactgatggctatcatggcagcaataaaaagtaaaataccattagaaaaaattctaaaaattataaaaaaaataaaatctgtaaatggaagactagaaaaagttggtagacttaa

SEQ ID NO: 311775 - DNA, 877 bp, Unknown
  Bacterial polypeptide expressing nucleotide sequence isolated from the Sargasso Sea
gtgcgcccgggatacttgttcgcggccctgcccagcgcgtcggcgaattcgggcgctgatggccgtgacttcatcggcgatgcgatggcccgcggcgcatcagcgatcctggcgcccgagggcactcagatcgataatctggccgagaacacgccctgtctgatcactgacgagaacccacgctggcggttgtctcagttcgccgcccgcttttacgaaatacagcccaagcatgtggtgggcgtcaccggcaccaacgggaaatcctcggtcgccggcttcgcgtgccagatctggcgcctgctcgggcatacctctggcgctatcggcacccttggcgtggacgcggacggtttcaggttcgggtccagtctcacgaccccggatccagtcgcactgcactctaccctatcccggatggcgacatcgggcatagatcacttggcgctcgaggcatcctcccacgggcttgagcagtaccgactcgacggggtgcggttcgccgccgccgccttcaccaatctcagccgcgatcacctcgactatcacagcagcgaggagaattacctcaacgcgaagatgcgccttttccgtcatctgcttccggtcgacggcgccgctgtactcaatgcggactcgacccatttcgagacgttcgcggagatttgtcgcagcgctggccaccgcgtgcgcagtttcgggatccagaccagcgatatccacatcgccgacgtctcggccctgcccgacgggctgcggctttgcatcaccgtgaaggaccagagcctcgagacgcgactcaatctggtcggcggtttccagcctacaacgtgctcgccgccctcggcctcgtggcggagaccggcaccgatatagt

SEQ ID NO: 311776 - DNA, 787 bp, Unknown
  Bacterial polypeptide expressing nucleotide sequence isolated from the Sargasso Sea
aaattaaaaacagttgagggaaggtttgaaaaaattggtaaaattaaaaatcaatcaaaagtaattcttgattatgctcatacacctgatgctctaaaaacgtgtcttctaaatattagagaacaatttcctaataaaaaaatcacagttctatttggttgtgggggaaatagagatcaaaataaaagatcaaaaatgggtaaaatagctagtgtttttgcagatagtataattcttacaaatgataatcctagatttgaaaatcctctaaaaataagaagagatataaaaaagggaattaaaaaaaagagaattactgaaatatctaatagagcaatagcaataacacaagctgtttataacttgaattcaggtaatattttgttagttgccggaaaaggccacgagaaaacacaagatattggaaataagaaaattttcttttcagatagaaaggtaattctaaatgctattaagcataaaaataataatttgtcagataatttaaaattaaatgtggttaaagaggcggctaaaattaaaaaattacctccctccgcatcttttaaaactgcaagaattaattctcaagaagttactaaaaatgatattttttttgctattagaggaaaaaaaaatgatggcaataaatatgttttacaatcattcaatagaaaagcatcgttagctgtagtaaataaaattcaaaataagttaaataaaaatcgacagattaaagttaagaatactttaaaattcttaacagacatttcaaaaacttttagaa

SEQ ID NO: 311777 - DNA, 787 bp, Unknown
  Bacterial polypeptide expressing nucleotide sequence isolated from the Sargasso Sea
aaaaatttagtttctgaatgtccaaatcacttaagagaaactaagatatctgacttagctttggatagcaggatagtaaaaaaaaataatcttttttttgctctaaagggccatcataaaaatggagcaaattttataaaagaagcaattaaaaatggagcggctgcaataattactagtaaaaaagataatcacaaaagaagtatttttattaaacataacaaaataaaaaatcttttgtttgatacctgtgaaaaattttataaagaaagaccttcaaatcttattgcagtaaccggcactaatggaaaaagttctgtcgctgaattttataagcaaataatgcttatgagtaaaaaacgagtagcaacaattggaacatttgggatatttataaacaataaaaagatatcaaataatttgactacacctgatattattacaatacataaaatacttcaaaagttaaaaaagaaaaaaatagaaaatgttatgattgaaacctcaagtcacggattaaaacaaggtagacttggaactataaaatttatgagtggagttttcacaaactttagtcgagaccatttagactatcacggatcaatgtcaaaatatttctattcaaaaatgatactctttcgaaaaaatatgaaaaaaaagggcagtattattctttcgaaacaactcccagaattaaaaaaaataaaaaagataacaaaaaaaaatttaaaactaatatactctaacaaatatgaaaaaacttttaaaaaaataaaatttcataacc

SEQ ID NO: 311778 - DNA, 667 bp, Unknown
  Bacterial polypeptide expressing nucleotide sequence isolated from the Sargasso Sea
atggtaggtactttaggacattttataaacggaaaaaaaattaacgatataaatttaacaactcctgcatatgaagaattatatagatatggatcctcaaataaaaaagaaaaaaatatttacatttttgaagcttcaagtcacgctcttgaacaaaacaggttaagaaattatcctataaatattgcagctattacaaacatttcgaaagatcatcttgattaccacaaaacattctcaaattataaaaaatctaaaattaaacttttctctaatcatttagcaaataatggatttgctataattaattcaagattaaatatctcatcggaattaaaaaaatcattgataaaaaaaaatatcaaaattaaatatttcggaaataaaaatataaaattaataaaaatcaatggttttgtatatttgaatattaactataaaaaaaataaactagaaaacctaaaacttaaaacaaatatagaattagaaaatttagaatgcgcaattagttgttgcttagcactcaatattagtcaaagtaaaattgtaagagtattaccaaaaattacaaacccctcaggtcgcttagaaacaattgagtataagaaaaaaaaatcaaaaattattattgattatgcacatacaccagatgctttaaaaaaaatat

SEQ ID NO: 311779 - DNA, 694 bp, Unknown
  Bacterial polypeptide expressing nucleotide sequence isolated from the Sargasso Sea
gatgaatgaatttgagaaaatattaggtatccaactccccaaaaatattgaaatctcaagcgttgtaaatacaactgataaagtaataaaagattctattttttttggattacaaggaactagagtacatggcagtaaatatgctgataaggcgttagaacttggagcttcagttgttattcataacgatcctgatttcaattcaaatcataaaaatattttttatatcaaagaccttcacgataagttggttttgtttcttgatgcgttttacaacattgatattaatagacacaatttttatgcatttacaggaacaaatggcaaaacatcagcagcttatttcacccatcaattacttcaaaaaatgaattacgattcagtatacattggtaccttaggcgtcaaatttaataaagaagaaattgatacctcattttcaaaaaaaacaacaccagatatttttgaattatttgaaattgttaattcaataaattgcaaaatggattctataaatgtgtgtatggaactctcttctcatgcacttgatcaaaaaagaattgacaagataaatcggttttattctttatcaataataaatatacgttcagatcacttagattatcatctaaatatagatgcctacatagattcaaaatttggaattttcagactcaattcgtcaataaaataa

SEQ ID NO: 311780 - DNA, 765 bp, Unknown
  Bacterial polypeptide expressing nucleotide sequence isolated from the Sargasso Sea
attggatccaattcagttagcttttcaactaaacaaactaaaaaagcaaaatatagatcatgttatattggaagcctcaagccatggattaaaacaaaatagacttgatggtttacaatttaagactggtatatttacaaacttatcacacgatcatttagattatcacaaaaattattctgactatcttaattcaaaattatatttatttaaaagattgctaaataaaggatcaaaagtaatagcagatactagtataccagagtttaaaaaaattaaaaaaatatctaagaaaaaaaatttaaatatgaaaacaattttaaatcataataacagtttaagtttaatttcacatagatatgaaggagaaaatcaaattataaaaataaaatataaaaactctacatattcgttttctgtaaaattatttggaaaaatacagataaaaaatattttaatggcaatgttagctgcagaaagtaaaaacttacaatttgataaaattgttgaaaaaattaatgaaactaaacctgtaaatggaaggttacaaaaaattggtaaaataaaaaataattctatggttgttttggattatgctcatacacctgatgctttaaaagtatgtctaaaaaatttaaaagatcaatttaaagataggaaaatttacattgtatttggttgtggtggaaatagagataaatttaaaaggcccagaatgggaaagattgcaaattattattgtgaaaaaatttatttaacagatga

SEQ ID NO: 311781 - DNA, 730 bp, Unknown
  Bacterial polypeptide expressing nucleotide sequence isolated from the Sargasso Sea
aattatcaacgtccaagtaatttagttgcagtaactggaacaaatggtaaatcgtcaatagctaatttttactaccaaattttaaaaataaataaaatcaaagtctcttcattaggaacccttggcacagaaggaataaaaataaaaaaaaaaatttcaaatacaacatatgatcctatcatgttaaataatattttaaaaattttaaaaaaaaaaagaattgataatgttattttagaagcttcaagccatgggcttaaacaacataggttggatggattaaaatttaacttaggaatatttacgaatctcagcagagatcatcttgattatcataaaacttataaagattattttgactcaaagttaattttgttcaaaaaattaatgaaaaaaaattcaagtataatttttgatgaagatttaattattgcaaaaataataaaaaaaattataaaaaaatataattttaaacctttaagtataggatatgctaattctaatttaaaaattattgaccataaatatctgggctcagaacagtatgtaaaatttttatataaaaataatatttataaattttcaactaaattaattggaaaagtacaaataaagaatcttttaatgtcaattttggctgcatctaaaagtaatttaaatttaaaaagtattttaaattcaataaaaaaaataaaatcagtacctggaagatttgaaaaggttggaaaat

SEQ ID NO: 311782 - DNA, 862 bp, Unknown
  Bacterial polypeptide expressing nucleotide sequence isolated from the Sargasso Sea
ccatggtgatatggctgcgtatgctgctgcaaaagccagcttgttcccgccatcggtaccacagcggatcattaacatcgatgatgccgtggggcggcaatggtgtaagcagtggactgatggtgagctgttacgctatggctggcaacatccagcggtgcatgatgtgccagccagtgcctgtgtgtatgctgaggatgtgcgttgctcagccacaggggtgacggctaccctcaaaaccccttggggctgtggccgcatgcaaagtccagtcttgggcagctttaacgtgagcaatgtgttggctgtggcggccatgctaggatctgttggtataccgtttgaagacatgctatggtctttgtcccagctacagccagtgccaggacggatgcaaaggatacaacagccgcaggcacccttggtggtggtggattttgcccatacccctgatgcattggcgcaagtgctgcaagcactgcgtgcgggttgtcacgggcgtttgtggtgcgtgtttggttgtggcggtgaccgtgaccgcagcaagcgttctttgatggccgctcaagcacagcagcatgctgatacggtagtggtcaccagtgataacccgcgcagcgaggatcctctggcgatcatggatgatattcgctcaggctttcaaaaccagggctcggtatgctatattgcagccagagagcaagccattgcgcatgctgtgattgcggctgcggtggatgatgtggtgctggtggcgggcaaaggtcatgaacagattcagatcattggccagaaaaagcacccattttgtgatgtggctcaggtgcatgtagcgcttgagcaaaggagccattgcctatga

SEQ ID NO: 311783 - DNA, 898 bp, Unknown
  Bacterial polypeptide expressing nucleotide sequence isolated from the Sargasso Sea
tgtttaagggaaaaaattttttattttaaaactaaacttgttggaaaaatacaaattagcaatttattaatgtctgttttagctgcatcgaaatttttaccaatgaaaaaaatagtagagtctttgaaatttgttaaacccgtaattggaaggcttgaggttgttcaaaagcttaaaaacaactctacaattatattagattattgtcacactccagatgcattaaaccattgtttgcaaaatattaaagatcagtacaaattaagtaaaataaatttagtttttggatgtggtggtgaaagagataaacaaaaaagacaaattatgggaaaaattgcaaatcaatattgcaataaaatttatttgactgatgacaatcctcgaaatgaaaatccaaacttaataagaaaagcaataaaaaaatttataaaaaaaaataaattgttagaaattccgtctagagaaaaagcaataaagacctcaattgaaaaaattgaatcaggagaagttttaataatagctggcaaaggtcacgaaaactatcaagagtacaaaaaaaagataaatttttctgacagatattttataaaaaaatactccaaaattaaaaataaaactctatccaattattggaaaacaaatttatttaatgaagaattaaaatttttaaaattaaacaaaaatataaatattgaaaacgtatcaattaactcaaaaaaaataattaaaaattctgttttttttggtttaaaaggaaaaaattttaatggaagcaaatttgcagcagaggcaaataaaaataacgcactgttttcggttattgaaactagcaaaaaaaaattatatcaaaataaaaaggtaaaagttaaaaacaccttaaaaacattgtctaaaatat

SEQ ID NO: 311784 - DNA, 832 bp, Unknown
  Bacterial polypeptide expressing nucleotide sequence isolated from the Sargasso Sea
tttaaaaaaataaaaaaaattacaattaataagagattaaaattatatgcacttaatgataagaaaaataatttacaagtcatctctcatagttttaaaggtgaggctcaatcttttaaaattaaattaaacaattcaatacagaatataaatttaaatttaattggaaaaatacaattaaagaatgttttgatggcaataattgctgcaaaaaatagtaatattggattaaataaaatattaaataaaatttctaaattgaaaccagtcgaaggaagatttgaaaaaattggtaagattaaaaatcattctaaagtaattcttgattatgctcacactcctgatgctttaaaaacatgtcttttaaatcttagagagcaatttccagcaaaaaaaatcatagtcttgtttggctgtggaggaaatagagatcagaataaaagatcaaaaatgggaaaaattgcgagttatttcgcagataagattatcctcacaaatgataatcccagattagaaaatcctcaaaaaataagaagagatataaaaaaaggaattaaaaaaaagaaaattattgaaatatcggacagagcaatggcaataacacgagctattcatgatttaaattcaggtgatattttgctggtagcaggaaaaggtcatgagaaaacccaagatattggaagtaagaaaattttcttttcagataaaaaagtaatcctgagtgcaattaaaaacaaaaatattaatttatcaaataatttaaaaataaatgtggttaaagagactggtaaaattaaaagattatctccctttaatatctttaaaaaaagct

SEQ ID NO: 311785 - DNA, 650 bp, Unknown
  Bacterial polypeptide expressing nucleotide sequence isolated from the Sargasso Sea
catgttgttaaaaaatctaattagtaatcttaaacccaattttgcttcgctcaaaattagaggtatatcatccgatagcagaaacttaaaaaagggtcatatatttatttcagtaaaagggaataaattcgacggtaataaatatataaatcaggcaatatctaaaggagccaacgtaatagttcactctcgaagcataaaaaaaaataaaaaaactattttcattaaggttaaagaccccagagaaactctcgctagaatgagtacaaaatattataaaaaaaaaccaaaaaatataatagctgttacgggcaccaatggaaaaacttcaatatcacatttttttcatcaaatttttactaatcaaaaaaaaagagttggttttattggaacactaggatttaaaaaaaataattatttaaaaagaagaagtttaaccacatcagacccattgagtcttaataaggatttagaagaaatgaaaaaagcagagattaataatgtgattattgaagcatcaagtcatggactaaaacaaaaaagattagattttttaaaaatcaaagctggtatttttacaaatttgagtcgtgatcatttagattatcaccaaaatatgaataattacttgaattctaagctcatacttt

SEQ ID NO: 311786 - DNA, 854 bp, Unknown
  Bacterial polypeptide expressing nucleotide sequence isolated from the Sargasso Sea
tttgccggatatccgcttaagtggaatctctgcagatagtagggaaataaaaaaaggctatctcttcgtaagcctttcaggtcgcaaatatgaaggtaacgattttataagcgatgcactaagtaaaggtgctgccgcggtgattacagataaacccccaaaaaaagataatgggaaggatttgccaatcttttgcttggcgaacctaaggcaagatctgggagagtatgcatctcgtttttttggattcccctctaagaatatgcaaataatcgctttgactgggacaaatggaaaaacttctgtaacccatttccttgcccaagttatgcaaaagcggcgttttagtccgggaataattggatcattagggtatggagagccagggaagctcgtttctacagacctaacgactcctgatgcagttagattgcagggtattttaagagccctttatgataagggatgtgaacatgtttttctggaagcttcctctcatggtcttcatcagagccgcctgtccggggttgatatagacatcgctgttctcactaacatctctcaagatcatcttgactatcacggaaccatggatgcctacaaagaggcaaaagcaaagttatttacgctaggttctttgaaaaaagcagttattaataaagatgacgaatacgcgataaatttgcaacgccttttgtctcccgatgttgaagtaaaaacttatggttgcaggcagccagcagatattcgtttgatctctgtcagttttaatagaaaaggaatttctttaagtgtttcttgttctggctttaaattttcattggatctgcctttatttggaaccttcaatgtag

SEQ ID NO: 311787 - DNA, 778 bp, Unknown
  Bacterial polypeptide expressing nucleotide sequence isolated from the Sargasso Sea
atgttgctaaaaaacttaattaaaaattctcctcaaagtctcagaaacctaaaaattaaaggtttagctcttaatagcaaagacgtaaaaaaagggtttattttttttgcggtaaaaggaaatcaatctaatggcgagaattatattaatgatgcaattaaaaatggagcaattatcattatctgctcaaagagttgtaaatttcaaagtacaaaaattaaagtaattaaaacaaaaaaagtaagaaaatatttaagtgaaatcacatctaaattttataaactaaaaccaaaaaatattattgcagtaacaggcacaaatggaaaaacatctgtggctgactttttttatcaaatactagatataaacaatattcctgtcgcatcaattggaacactagggataagatatagaaagaaatttattaagaccaatcttacatctcctgatgtaattacacttcacaaaaatcttgagaaattaaaaaaaaataaaattgataatgttattattgaagcttctagccacggtttagatcaaaatagattagataatctcaatttaaaagccgggatttttactaactttagtcaagatcacttagactatcataaaacaatgaaagattatttaagagcaaaactaattttattttcaaaattattacctaaaaaaagttatgttattgctgataaatttatcaaagaatattcaattttagaaaaaatttctaaaaacagaaaactaagattattggatattaacaaaaaaatttaac

SEQ ID NO: 311788 - DNA, 679 bp, Unknown
  Bacterial polypeptide expressing nucleotide sequence isolated from the Sargasso Sea
atgaaaaaagttaaggacatattgtataagatatccgttgaaactataattggctctacagaagttaatgtagaacatataacctatgattctaggaatgtattaaaaaactctttatttatagcccttgttggagttgattttgatggacattttttcattgatgatgcaatcaaaaatggtgcaagagtgattatttgtgagcgcctaccatcaaatatagttgatgaaaaagtttatgttgtagttaacaactctagacttgccctaggctttattgcttcaaatttttataataatccttctgaaaaattagatttaataggtgttacgggaactaatgggaaaactaccatttcaactttacttcataaagtttttaactctctagatatagcttcaggtctgatttcaacgcttgaaataaaatttggcaagagatcaatttcaactactctgactacacctgatccattaataataaattcattattagatgaaatggttcaattaggtataaaaaaatgcttcatggaagtttcatcacatgggatagatcaaaaaagagtaagtggattaagatttaaaggaattttatttactaatcttacccatgatcatcttgattatcataagactttcaaaaattatcgagatgttaaaaaaccaagtttttgac

SEQ ID NO: 311789 - DNA, 799 bp, Unknown
  Bacterial polypeptide expressing nucleotide sequence isolated from the Sargasso Sea
aataatattagagaatgtctaggaaaaatttgttctaaattttattccagaaagccaaaaaatattatagcagttaccggtactaatggaaaaagttctgtggcagatttttttcatcaaatattgaccttaaacagagtgtcagcagcaactataggaacactcggagttaaaattaaaaaattcaaaccaacaaatcatactagtccagatattattaatttgcataaggagcttagcaacttgaaagaaaagaaaattgaaaatgtattaatcgaagcttctagccatggtttagttcaaggcaggttaaatggtataaattttaaagctggaatttttacaaatttaagtcaagatcacctagattatcataagtcaatggaaaaatacttagatgcaaaactgttgctctttagaaaattattaaaaaataatgattatattattaccgataaaaatattccagaatataaaaaattgaaaaatatcgcacagaaaaaaaattttagaaagaagtatataaattttttagaaaaaaaatatgatttaacaaaatttaaactaataggtgactttcagaagaaaaatttgttaatggctattagagcctgtgaaataattggtttaagtaaaaaaaaaatttcttattctttagataagttaaaagctgttaagggtagactagaattagtcaaagaattttcagacaaaacaaaagtttttattgattttgcccatactccagaggctataagcacggcaataaactctttaaagtcttatttaaaaaggacgt

SEQ ID NO: 311790 - DNA, 778 bp, Unknown
  Bacterial polypeptide expressing nucleotide sequence isolated from the Sargasso Sea
atgttgttaaaaaaactaattgaaaatttaaagccagaaattggtgcaatcaaaattaatagaattagttttgatagtagaagaactaaaaaaaaagatttatttgttgctataaaaggtgaaaaatataacggcaataattacataaatcacgccatttctaaaggcgccaaagtcataattcactctggaaaaatagaaaagaataaaaaaaccaaatttataaatgtcaaagatacaagaaatacattggccgaattaagtacaaagtattataaaaataaacccaaaaatataattgcagtaactggaacaaatgggaaaacatccgtatctgattttttttaccaaatttttaagttacaaaatatcaaatctggttttataggcacgcttggttgtagaaaaaataagtttataaaacgcaggaacctaacgactttggatacattaacactgaaccaagatttagaagaaatgacaaaaaaaaaaataaacaatgtcattatagaagcatcgagccatggtcttaagcaaaaaagattaaatttcttaaaattaaaggctggaatttttacaaatttaagtcatgaccatttagattaccataagaacatgaaagattattttaaatcaaaattaattctttttaatgatttattaaaaaaaaaagatactataataacagatactgatatcaaacaatttaaagatataaaaaaagttcaaaaaaaaagaaatttaaaatttttgacaataggatcaaaaagcaatactt

SEQ ID NO: 311791 - DNA, 859 bp, Unknown
  Bacterial polypeptide expressing nucleotide sequence isolated from the Sargasso Sea
aaaaagtaatctaggtttaaataaaattttgaaagttattccaaaaataagatctgttgagggaagactagaaaaaattggcaatattaaaaataaatctaaagttatcttagattacgcacacacaccagatgcattaaaaatatctcttctttcactaagagagcaatttcctaataaaaaaattgttcttttgtttggttgtggtggaaatagagatcaaaataaaagattaaaaatgggcaaaatagcctcattatatgctgatcaaatatatttgacagatgataatcctagactggagaaccctaataaaattagaaaagatattaaaagagggataaatagtaaaaaaatatcagaaatttctaatagagcgaaagcaatttctacagcggttaaaaatttaactacaggcaatatcttattagttgctggcaagggtcatgaaaaaatccaagaaattggtaatcgtaaaatttatttttcagataaaaaaataattttaaacgcaattaaattaaaaaatttgaatttatcaaataatttgaaattaaatcttattaaagagtcatctggtgataaaaaattaaatacaaatttaactctgaaacaagctagaattaattcaaaagaagttaaaaaaaatgatattttttttgctatacgaggcaggaaaaatgatggaaataattttgtagaagaagctctgaagcaaaaagcttccatagtagttgtaaataaaattaaaaaaaaattaaattataaaaaacaaataaaagtaatagattcattgaaatttttgaccgaaacatcaagtattttcagagagaatatcgatacaaagataattgcaata

SEQ ID NO: 311792 - DNA, 812 bp, Unknown
  Bacterial polypeptide expressing nucleotide sequence isolated from the Sargasso Sea
tttagacacggatattaaagaatttaagtttataaaaagtatagcagataaaagaaaaattaaaataaactcaatcggatttaaatcaggaactataaaaattttatctaacaaatatatagataataagcaggtaataaaaattttatttaattcaaaaaattttcaattgactattccgttaataggatttttccaaataaaaaatttacttatggcagtcttggcagctttaaagtgcggattgagttataagaaaatttttaatcagttacataaaataaagtcagtagatggaagacttgaattagtatctaagttaaaaaataactccatgattgtagtagattttgcccatacacctgatgctttaaaacaaactttaatcgcaattaaaaaacagtttaaaggagagattgtaatagtgtttggatgtggtggagaaagagacaaaaaaaagcgtttacacatgggaagaattgcaaataaatattgtagaaaaattattgttactgacgacaaccccagaaacgaaaatccaaaaaaaattaggaaatcaattattaaaggatgtaaaaaaaaggcaataagtattggtaatagaaaaaaagcaataaatactggaataaaagaacttagatcaaacgagattcttttaattgctggcaaaggccatgaaaaaacacaggactatggaaatagagaaataaatttttcagataaaaaagtagcaaaacaaataattagtaaaagaaaattttatttcaagaaatctaattatcaaaatttattgttaaagaaatatttttgat

SEQ ID NO: 311793 - DNA, 814 bp, Unknown
  Bacterial polypeptide expressing nucleotide sequence isolated from the Sargasso Sea
atttatccaaaattaaataaaaagtataaaaatataaaatttaaaggaatttcttttgattctaaaaatataaaaaaaaattttatattttttgcactcaaaggaagtaatagtgatggtaacaaatatattaatgatgcaattaaaaaaggttctaaaattataatttctgaaaattgtcaaactggttttaaagaaaaaatattatatttaaagaatgaaaaccctagaaagttactcgcagatttttcagtgaaattaaacaatgaaaaaccaaaaaatcttattgcagttacaggcacaaatggtaaatcgtcaattgcaaatttttattatcagatattaaaaataaataaaataaaagccgcatcaataggtacattgggtgttaatggtattaactttaaagaaaaaaataataataccacatttgatcctattcaaataaataaattacttaaagttttaaaaacaaaaaaaatcaacaatgttatattagaagcttcgagtcatggattgaaacaacatagattagatggtttaaaatttaacataggtatttttactaatttaagtagagatcatctagattatcataaatcatttaaagattatttagattcaaaattaatattattcaaaaagctaatgaaaaaaaattcttatattatttatgataatgatttaataatttcttcaaaattgaaatatatatccaaaaagagaaatcttaaaaatttaactttaggtacaaaaaaatcaaaacttataataattgatcataaatttgaaaacatgatacaaaaagtaaaat

SEQ ID NO: 311794 - DNA, 919 bp, Unknown
  Bacterial polypeptide expressing nucleotide sequence isolated from the Sargasso Sea
tatgtaaaaaaaataatattttttttttcaataaaaggtaacgagaaagacggtaataaatttatttcccatgctatatcaaatggtgcaaaaactattatttataataaaaaatttcaaggttttaaaaatggagtactatatttaagatttaaaaatgtaaggaaaatattagctgaattatctcataagattttttactcaaaactaaataatttaattgccgttacaggaacaaatggaaagtcttcgatttgtaacttttattttcaaatattaaatctaaataaaaaaaaagctgcctcattgggtacattaggaattaaaactgcatctagaattttgcctttatcaaatacaacaatggatccaatccatttatctaaatgtttaaaaaatttaaaaaaaaaaaaaattaataatataattcttgaggcatcaagccatggtttaaaacagcatagacttgatggtttaaaattcaatacaggaatttttacaaatttatcacatgaccatttagactatcataaaaatttcaataattatttaaacgcaaaattatatctttttaaaaatttattatcaaaaaaagcaaaaattattactgataaagatattccggaatatattaaaatattgaaaatagctaaagaaaaaaacttaaagttgaaaactatttcgaatcaaaatggagatataaaaattctcctccataaatatatcggtgaaaaacaatttttaaaaattaaatataaaaattcaatatattctttctatttaaatttaataggtaagcttcaaataaaaaatctatttatggcaatcttggctgcagaaaataaaaatcttaaattcaaaaacattgtaaaaatattaaataaaatccaacctgttaatggaagattagaaaaatagg

SEQ ID NO: 311795 - DNA, 773 bp, Unknown
  Bacterial polypeptide expressing nucleotide sequence isolated from the Sargasso Sea
aaaatttctaaaaataaaaaattaaaacttaattttattttaagtgataaaaaaaatttaggaataaaagttgtttcacatatatttgatggggaaaaacaaatagttaacttaaattataaaaaaaaaaatttaaaatttagagtcaatttgattggaaagattcagattaagaatgttttgatggcgttattagctgctgaaaaaagtggtgttaaaattacaaatattatcaaaagtctaaatcatttaaaacctattaatgggagattagaaaaaattggtcaaatcaaaaataactcaaaagtgattttagattatgcccatactcctgaggccttaaaaactgttctagaaaatttgaaagaacaatttccaaataataagatttcaattgtctttggttgcggtggaaatcgagatattaagaagagatccaaaatgggaaaaattgtaaatattttctgtcatcaaatttatttaacagatgacaatccaagaaatgaaaatccgaatttaattagaaaagaaattaaaaaaggaattaaaataaaaaatttatttgaaatagccgatagaaaagaagcaataaatagagctatcttaaatcttaaaagttcagaaattttattaattgctggaaagggtcacgaaactacacaaacttataagaataaagtaagatttttttctgatagagatgtcattaaagtagcaataagaaataaaaataaagatttatcaacaaatgttaaattaaatattattcaaga

SEQ ID NO: 311796 - DNA, 889 bp, Unknown
  Bacterial polypeptide expressing nucleotide sequence isolated from the Sargasso Sea
ttaaaaaaagaaggatttgaaaaagatgtattatatttaaattgtcagaatcccagaaaactattagcagaaaccgcatcaaatatttataaaagaaaaccaaaaaacttgatttcaataacgggaaccaatggtaaatcatcggtagcaaatttttttattcagatattaaagcactgcaataaaactgcagcatcggtcggaactttaggagtaaattcaatgggtataaatattccattaatcaatactacactagatccactaagtcttaataaaatattagaaaatttaacaaaaagaggaataaaaaatgtaattttagaagcttcaagccatggattaaaacaacataggcttgatggaataaaatttgatactggattatttacaaatttttcaagagatcatttggattatcacaagtcttttaaagattattttgattctaaaatgattctatttaatgaattaatgaaaaaaaactcacaagtaatttacgatagagatattttagagtcaaaaaaaattgaaaaaattataaagaagaaaaaactaaaatactattgtttgggtaaaaaaaaatctgatcttaaagtaaccgaacattcatttgtaggaaaaaaacaaaaaatagcctttttatttaaaaatcaaaaatatagttttgaaagtaatctaattggagcaatacaaataaaaaatttattatttgctgcccttgcagcaaataaaatattgcctatgaaaaaaattattaaatcgttatctaaaattaaatctgtcagtggaagatttgaaaaaataggaaacttaaaaaataattccatagtaatacttgattttgcgcatactcctcaagcattaaagatttgtttagaaaatataa

SEQ ID NO: 311797 - DNA, 841 bp, Unknown
  Bacterial polypeptide expressing nucleotide sequence isolated from the Sargasso Sea
aaagagctgcattaaaaatgtgaaagaacaatttaaatttagaaaaattaacttagtatttggatgtggcggtgagcgagataagtataaaagaaaaactatgggaaatattgctgataaatattgtgataaaatatatttaacagatgacaaccctagaagtgaagatccgataaaaataagaagagatatcaaggcaaatatttcaaagagtaaagtatttgaaataccatcaagagaaagggcaataaaatcagcaattatggatattaagtcaaacgaggtagttattgttgcaggaaaagggcatgaagtttaccaagaatatgtctctaaaaaattcttttcagataaaaaatttattgaaaaatttattaggattaaaaataaatctttaaatagaaattggaaaacaaatattgtttcagaaataactaaaaagaaaatagaaaaaaatattaatattaatgaggtttcaattgactcaagaaaaacaaaaaaaaataacattttctttggtataaaaggaaagaactttgatgggaataaatttgttaatcaagctttaaaaaatggagcctcaattgcaatcaatcaaaataaaccagtcaatcaagttaaaaataaaatttatgtaaaaaattctttaaaaattttttctgaaagcgctaaactggtaagaatatcttctaatatttcatctattgcaattacaggatctgcaggtaagacttctttaaaagagatgttgggtcaaatgctaggtaaattatgccaaacatcttattcaaaaaaatcttttaataataaatatggcgtaccaatttctttattcacataa

SEQ ID NO: 311798 - DNA, 691 bp, Unknown
  Bacterial polypeptide expressing nucleotide sequence isolated from the Sargasso Sea
tccgaaattaaataaaaaatatcatggattaagttttaaagggatagcttttaattctaaagaaattaaaaacggatacattttttttgcacttaaaggaaataatacagatggaaatttctttataacagatgcgattaaaaatggatctaaaattataattactgataaattaaaaataaatggttggaaaaataaagttctatttttaaaccataataatcctagaaaattactagctaaatttagctctaaaatatttaacaaaaaacctaacaatttaataggtgtaactggtacaaatggtaaatcatctatagcaaatttttattttcaaattcttactctcaatagaattaaagcagcctcaattggaacattgggggttgctggtttaaaagttaaaaaaaatttttcaaatactactctcgacactattcaaataaacaaaaccttaaaaaaattaaaagaaagaaaaattgaaaatgttattttagaggcctcgagtcatggattaaatcaaaatagactagatggattaaaatttgatattggtatatttactaattttactagggatcatttagattatcataaaacttataaaaattatttaaattctaagttaatattatttaaaaaattattaaaaaaaaagtcttatgccatttatgataatgaattaaaaatt

SEQ ID NO: 311799 - DNA, 773 bp, Unknown
  Bacterial polypeptide expressing nucleotide sequence isolated from the Sargasso Sea
agcaaaatatagcggtattaatttagataaaattttaaatacaattccaaaattgaaaccagttgtgggaaggtttgaaaaaattggtaaaattaaaaatcaatcaaaagtaattcttgattatgctcatacacctgatgctttaaaaacgtgtcttttaaatcttagagaacaattccataataaagcaatcaaagtgctattcggttgtggcggaaatagagatcaaaataaaagatcaaaaatgggtaaaatagctagtgattttgcagatagtatcatccttacaaatgataaccctagatttgaaaatcctaaaaaaataagaaatgatataaaaaaaggtattaaaaaaaaaagaattaccgaaattgctaatagagcaatagcaataaaacaagcaattcataatttgaattcaggtgatattttgttagttgctggaaaaggtcatgagaaaacgcaagatattagaaataagaaaatattcttttcagatagaaaagtaattttaaatgctattaaggataaaaataataatttatcaaataatttaaaattaaatgtggttaaagaggaatctaaaattaaaaaattatctccctccatatctttaaaaacagcaagaattaattctaaagaagttactaaaaatgatattttttttgctattaaaggaaaaaaaaatgatggtaataaatatgttgtacaatcattcaagagaaaagcatcgttagctgtagtaaacaaaatccaaaataaattaaataaaa

SEQ ID NO: 311800 - DNA, 757 bp, Unknown
  Bacterial polypeptide expressing nucleotide sequence isolated from the Sargasso Sea
ttatcgaaaaaaagagggttaagtatatatacactcaataatttcgcaaaaaatttcaaaatcttatcacatcggtttagcggagataatcaggtattgaaaattaggtataaaaacttaattcacgagattaatttaaatttaataggaaaaattcaagtgaaaaatttgataatggcaataattgctgccattaggagtaatattaatttaaaaaaaattttaaatgtaatcccaaaaattaaatcagtcacaggcagacttgaaaaaattggtaagattaaaaatcactcaaaagtaattcttgattatgcacacactcccggtgctttaaaaacttgtcttctcaatttaagagaacaatttccagaaaaaaaaattttattattatttggatgtggaggtaatcgagaccaagacaaaagatctaaaatgggaaaaattgcagatatttatgcagatgaaatattccttactgatgataatccaagatatgaaaacccagcacaaattagaaaagaaattaaaaaaggaataaaaagaaaaaaaatatatgaagtttctgacagattaaaagcaataaaaaaagctatagagagattaaatacaggcgaaattttattaattgcaggtaaaggacatgaggaaactcaggatattggcaaacaaaaaattcatttttctgataagaaaataatcattagagaaatcaaaatcaagaattcgaatttatcaaataatttgaagctaaatattt

SEQ ID NO: 311801 - DNA, 696 bp, Unknown
  Bacterial polypeptide expressing nucleotide sequence isolated from the Sargasso Sea
tcatcgattatggccgtcacgcaaaagatattgttattctaaatggtcaaatatgtggctctggacaggacttggagcttgaaatatttggagttactcatcagtccagacttcctcttcctggggattttcaaacagcaaatgctcttgctgctgttggattagctgtgtccaccggcatgcctgtggaccgggctgtacaagcattatccaaattaaaaagtgtgcctggtcgaatgaatttagtggcaaatcatcctaacggcgcgaatatctatgtggattatgctcatacacctgatgctctgagaagcatgttgtctgccttgagggcccatgtgaaaggaggtcttcatatagtttttggttgcggtggaaatcgtgatcctggcaaacgggaggagatgggtagacttgcagcatctaaagccgattatgtaatcgttactgacgataatccgcgcactgaagatcccgaatcgatacgtaaggaaatccttattggttgtccaggtgcgactgaggtaagcgatcgtgccgaggcaatcgcggcatctattctggctctagcaccgggtgatgcgttagtcatttctggtaaagggcatgaggtattgcaggatattggtggtcagatggttccttttgatgatgctgagatcgcccgtcaggttgttcagggattaatcgcatgac

SEQ ID NO: 311802 - DNA, 325 bp, Unknown
  Bacterial polypeptide expressing nucleotide sequence isolated from the Sargasso Sea
gatggaagtctcaagtcatggtttagtccaaggccgagtcgatgccgtgcccttcgatgtggcggtattcactaacttgacacgtgatcacttggactaccacggcgatatgaaaaactatgccgcggccaagcaaatgctgttttgcttcgacgccctgcgtcacggcttagtgaatctcgatgatcccgttggcgctgcttggttatccgagctggcaaacgtcccggcgaagatgtggggctttagcattgaagcgcataccgaggcggcgttttacactaagaatgcccaatttaacgatcaaggcgtgcaggcgacatga

SEQ ID NO: 311803 - DNA, 715 bp, Unknown
  Bacterial polypeptide expressing nucleotide sequence isolated from the Sargasso Sea
atcaaaggtatccagttcaatggatcagattttataaatgaagcaaaagaaaatggtgctttccttataattacagacaaatctgaagataaaactgtgatatctacaaatgaaatatcaacaagacttgtttataccatacttctagcttctttttataataaacaacctaaagaaattattggagtaacgggcactaatggtaaaacctcaactgttgaattttgtagacagttatgggttcaagcaggatggaaggcggcatcaatgggtacccttggtataaaaattgagaatggactaaacaaaagttttcttaaatctccaaaacaaaatcttaccacttttgatcctggtgaattatacaaagaattatgttcattagaacatcaggaaatttcacacttagctctagaagcatcatcccatggtctagatcaatttagacttgatagtgtgaaatttacaggtgcaattttcacaaacttatcacacgatcatcttgattatcacaaaaatattgaaaattattttcattgtaaaaaaagactttttactgagatacttaaaaaaaattcctctatagctattaatattgatgatgatttcggtaaaagactttttaatgaaattaaaaacaacaggcatattattgtaacatttgggaaaagctctgatgcaaatgttaaaataatttctataaaacaaaatgatc

SEQ ID NO: 311804 - DNA, 811 bp, Unknown
  Bacterial polypeptide expressing nucleotide sequence isolated from the Sargasso Sea
agtaaattaattccagttaaaaaaattgtcgataaaatcaaaaaaattaaatctgttaatggaagatttgagatgattggacaaataaaaaataattcgagagtaattttagattattcacatactccagaggccttaagaacttgcattaaaaatataagaaaacagttttcttttagtagaataattttagtttttggttgtggtggagatagagataaaattaaaagatcaattatgggaagaatagcgaatgaattctgtgataaaattattctaacagatgacaaccctagaaacgaagatccaaaaaaaataagagatcaaattaaagtaaaaataaataaaaaaaaatttattgaaatatcctcaagagaaaatgctataaaaaaatcaatttttgaactcaaatctggcgacgttttaatagttgcaggtaagggtcatgagaattatcaacaatataaaaaaaaaattaaattttctgacaaatcaataattaaaaaatacattatattaaaaaataataaactttctagggaatggaaaactaatattttaaaagaaagcctaaaaaatccaaaagttagaaataaatcaaatattcaaaacgcatcaattaattcgaataaaattcctaaaaattcaattttttttgggattaagggaaaaaaacttgacggaaataaatttgcaaacgcggcaattaaaaatggagcagtattatctatagtagataaaaatttttcgaaaaaaaataaaagaaaaattaaagtaaaaaatagccttaaaactttttcaaaagttcaaa

SEQ ID NO: 311805 - DNA, 763 bp, Unknown
  Bacterial polypeptide expressing nucleotide sequence isolated from the Sargasso Sea
atgcttctaggaaactactttcataacataaataaaaattataaaaatttttctttttcaggaatttcatttgacactaagagtattaaaaaaaataatattttttttgcaatcaaaggaaatactattgatggtaataaatttattccagaagcaattaaaaaaggatctaaaattattgtaactgaaaaaaaagtaaaccagttccaaaatggaattttgtatattcatacaaagaatataagaaaattattagctgaaactgcttttaaaatttataataaaaaaccaaaaaatttaattgcagttacaggtacaaacggaaaatcgtcagttgcagatttttattatcaaatattaaaattaaataataaaaaggctgcttcaattggcacattaggtgttaaatcaaaaagaattaatttgaatttatctaataccacaatagatccaattaaattggctaaaattttaagcaagttaaaaacacaaaaaatagaaaatgtaattatggaagcctcaagtcatggtttaaaacaaaatagattagatggtttgaagtttaattcgggtatatttactaatttatcccaggatcatcttgattatcataaaaatttaaaaaattatttaaaagcaaaactttatttatttgaaaacttaatccaaaaaagaggcaatgtaattacagatcagctaataccagagtttaaaaacataaaaaaagttacaattaataagaaattaaaattgcatacactaa

SEQ ID NO: 311806 - DNA, 784 bp, Unknown
  Bacterial polypeptide expressing nucleotide sequence isolated from the Sargasso Sea
atttattgaagaagcaattttaaaaggagcttctgtaattgtttgctctactagatgtaattttaaacataaaacagtattaataattaaaaaaaatgacttaagaggttttttaagtgaaatatcctcaaaattttataatcttaaacctaaaaatatttttgcagttactgggactaatggaaaaacatctgttgctgatatattttatcagattttaagattacttaaaaaaccagtagcctcaatcggcactttaggtataaaatataatgataaaattattaaaacaaatttaacttctcctgatacagttttccttcataaatctctagaatttttaaaaaagaaaaaaatagataacgtgattatagaagcatctagtcatggattagaccaaaaaagattgcataatataatttttaaagctgcaatatttactaattttactcaagatcatctagattatcataaaaatatgtcgtcatacttgaatgcaaaattaattttatttagagaaattttaaacaaaggatctacaataatttcagacaaagatataaaaccgtttccaaatttaaaaaaaatagcaaaaaaaaaaaatttacgaattctagatatagccaaagttattgataaaataaaatacgttgcaactaatagctcgagtgattttaaatataaaaatcttgctatgtcgataaaagctatagggttatgtggctttaaagagagacaaatactaggaaagattaatcaaattaaagaagtaagcggtagatta

SEQ ID NO: 311807 - DNA, 882 bp, Unknown
  Bacterial polypeptide expressing nucleotide sequence isolated from the Sargasso Sea
aaaattttaaatacaattccacaattaaaaccggttgagggaaggtttgaaaaaattggtaaaattaaaaatcaatcaaaagtaattcttgattatgctcatacgcctgatgctctaaaaacatgtcttctaaatcttagagaacaatttcctaataaagcaatcacagtcctattcggttgtggcggaaatagagatcaaaataaaagatcaaaaatggggaaaatagctagtgattttgctgatagtatcattcttacaaatgataatcctagatatgaaaatcctcaaaaaataagaagagatataaaaaaaggaatcaaaaaaaaaagaattacagaaatttctaatagagcaatagcaataaaaaaagctattcataatttgaattcaggtgatattttattagtcgctggaaaaggccacgagaaaacacaagatattggaaataagaaaattttcttttcagatagaaaagtaattttaaatgctattaagaataaaaataataatttatcaaataatttaaaattaaatgtaattaaagatacagctaaaataaaaaatttgtctccctccacatctttaaagatagcaagaattaattctcaagaagttactaaaaatgatattttttttgctattaaagggaaaaaaaatgatggaaataaatatgttgcacaatcattcaatagaaaagcatcattggctgtagtaaacagatttcaaaataacttaaataaaagtcgtcagattaaagttaaaaacactttaaaattcctaacagatatttcgaaaacgtttagaaaaagtattgatacaaatgttatagctatcacaggtagttgtggcaaaactacacttaaagaattactgggcaat

SEQ ID NO: 311808 - DNA, 789 bp, Unknown
  Bacterial polypeptide expressing nucleotide sequence isolated from the Sargasso Sea
attaaaaaagaatacatcttttttgcatttaaagggaacgatacagatggaaatttttttattgaagacgctattaaaaatggatcaaaaataataatttccgacagtttaaaaaaaaattattggaaaaataatattttatttttaagttataaaaatcctagaaagttattagctcattttagtacaaaaatatttaataaaaaaccaaataatcttatagcagttacaggtacaaatggaaaatcatctatagcgaattttttttttcaaattttaaatcttaataaagtcaaggtagcctcgattggaacattaggtgtaaatggtttaaaaattagaagtagttcttcaaatactacttttgatacaattcaaataaataaaatattgaatagattaaaggaaaaaaaaattgaaaacgtaattttagaagcatcaagccatggtttagatcaaaatagactagacggattaaaatttgatactggcatatttacaaatctgacaagagatcatttagattatcataagacttataaaagttatttagaatctaaattaatattatttaaggatttaatgaaaaaaaaatcacatgcactttatgatgatacactaaaaatttcatcaaatttaaatagaatttcaaaactaaataatattaaaaaatttacaattggaaatgcaaaatcaagtattgtaattatagaacatcaatttctaaaagatgaacagaaaataatgttaaaatataaaaataagaaatactcttttgtggcaaaattg

SEQ ID NO: 311809 - DNA, 859 bp, Unknown
  Bacterial polypeptide expressing nucleotide sequence isolated from the Sargasso Sea
tattaaaggtatttcattcaatagcaaaaaaataaacagaggagatgttttttttgcgattaaaggaaacaaaacatcaggtaatagatatgcaaatgaagctttaaaaaaaggtgcttcggctgtagtaagtaataaaaaaataaaattaaaaaataaaaacatacctcttattttagtaaatgatacgagaaaagctttagcagaagcatgttcgaatttttataataaaaaaccatcaaatataattgcggtaaccggaacaaatggaaaatcttccgtagcagattttttttgtcagattttttcattaaacaatatcccagcagcatcaattgggactttgggagtgttttctaaaaattacaataaaaaaacaaaactaacttcattagatccattatctttacataagcatttacaaaatattaaaaaaaagaaaataaaccatgtaattttagaagcatcaagccatggattagcacaaaaaagattagataatttaaatatcagcacaggaatatttaccaatctcagccacgaccatctcgattatcatcgtgatatgaaatcttattttgcatcgaaaatgtatttatttaaaaatttattaaataaaaattctcatataatttctgatgaagaaaataaagaatttacaattttaaaaaaaatttcacaaaaaagaagaataaaaatgatcacaataggtaaaaatactggagatataaaaatattaaatttaatttataatgaaaataaacaaattgttaaagttttaattaattccaaaatttttattttagaaattccacttataggtttttttcaggtaaaaaatttacttatggcaatcata

SEQ ID NO: 311810 - DNA, 874 bp, Unknown
  Bacterial polypeptide expressing nucleotide sequence isolated from the Sargasso Sea
tatcaaaaaaaaggggaatataataacagatgataaaatacctgaatttaaaaaaattaataaaattgcaaaacaaaaaagattaaaaataattacattgaatgataaaaaaaatgatttcagaattttatctcatagttttaagggtgaaattcaattactaaaggtcaaatataacaactccattaaagagataaatcttaacttgatagggaaaattcaattaaagaatatattaatggcagtatttgctgctaaaaaaattattagtttaaaaaagattttggatattattgaaaaaatcaaaccagttgagggtagatttgaaaagattggtaaaattaaaaacaaatcaaaaataattcttgattatgcacatactccagaggccttaaaaacttgccttttaaaccttagagaacaatttccagataaaaagctctgtttattatttggttgtggtggaaatagagatcaaaataaaagatcaaaaatgggtaaaattgcatctgatttctctgataaaatttatcttactgatgataatcctagatttgagaacccagataaaattagaagagatattaaaaaaggaattaagagaaaaaaaataattgagatttctaatagagcgaaagcaatatttgaagcaacaaaaaatttgaataccggagaaattttattagttgctggtaaggggcatgaaaaaattcaggatataggtaagcgaaaaatttacttttcagataaaaaaattattcttaaagcaattaaaattaaaaacctaagtttatctgataatttaaagttaaatataattaaagagatttcaggtaataaaagagtttcttcatcattatctataagcaagcaa

SEQ ID NO: 311811 - DNA, 866 bp, Unknown
  Bacterial polypeptide expressing nucleotide sequence isolated from the Sargasso Sea
gagcagtttagatggaaataagtttattaaagaagcaatctcaaaaggttcaagaatagttatatctgaaattcatagagaaggttttaaaaaaaatattttatatcttaaaagcaaaaatccgagaaaacttctttcaatatttgcaacgaaattaaataggaaaaaacccaacaacttaattgcagttactggtacaaatggcaaatcttcaatagcaaatttttattaccaaattttaaaattaaatagaataaaagtgtcatccatcggtacacttggcattaatggaattaacaaaaaaaaagaatcatcaaacaccactttagactcaatacaaataaataaattacttgagcgtttaaaacaaaaaaaaattaataatgtaattttagaagcttcaagccatggtttaaagcagcatagattggacggcttgaaatttaatattgggatttttacaaatttaagcagggatcatctagattatcataaaacttataaaaattatttaaattcaaaattaattttatttaaaaaattaatgaaaaaaaattcatatattgtttttgacaacgatttaaatatttcatctaaaataaaaaatatttcaaaaaaaaataatcttaaaaatttaagcattggaacaaaaggctcaaacttgaagattgttgatcataagttttcaaatcttgaacaaaaaattacgttttcacttaataataacactttttatttttcaacaaaattaattggaagtgttcaaataaagaatattttgatgtcaattttagctgcctacaaaagtaaattatctttaaaaaatataataaatactatcaataaattaaaaccaggttcccgga

SEQ ID NO: 311812 - DNA, 829 bp, Unknown
  Bacterial polypeptide expressing nucleotide sequence isolated from the Sargasso Sea
attatttcagatattaaatatgagggatataaaaaaaatattttatttttacactcttcaaatacaagaaagctactttcagaaacagcaaacaggatttacaacaaaaaacccaaaaacctaattgccgttactggtactaatggaaagtcatcgattgcaagttttttttttcaaattcttaagttaaataaaaaaaaagtagcatccattggcacacttggaattaatttgaacagtttaagtttgaatactagtaatacaactatagatccaataactttaaataaaacattacatgaggtaaaaaaaaaaaagatagaaaatgttatattagaggcttcaagtcatggtttaaaacaaaacagattagatggtttaaaattcaatataggaatttttacaaacttatctagagatcatttagattaccacaaatcttttaacgattatttaaaatcaaaaatgattttattcaatagattgttaaaaaaaaattctaaaataatttatgataacagcatcttggagtcaaaattattaaaaaatatatcaataaaaagaaaattgaatccaattactattggtgagaaagattctaatttaaaaattataaaacataaatttattgaaaataaacaagaagttaaatttatttttaaaaataatgaatatttttttgttacaaatcttatcggaaaaatacaaataaaaaacttaattatggcaattattgcagctaacaattgtggtctctcaatgaaaaggataattaaatcaataagtagaattaaaccagttaagggtagattgaacaaatggaaattaa

SEQ ID NO: 311813 - DNA, 801 bp, Unknown
  Bacterial polypeptide expressing nucleotide sequence isolated from the Sargasso Sea
aattaaagatatctcagaaaaacaaaaaaaattaataattcgcggtcttgcgactaatagtaaaaaagttaaaaaaggttacatttttttcgctgtaaaaggccttagagtaaatggagaaaagtttatcaaagaagcagttggaaaaggagcatctgtcattatctgttcaaataagtgtaaatataacaatgaaagaatattagttaaaaaaacaactgatataagaagttttttaagtaaaatttgttcaaagttttataagttaaaaccaaaaaatataattgctgttacaggaactaatggaaaaacatctgtagcagatttgttctatcagattttaactataaatcgtattcctgccgcttcaatagggacacttggtattaaatataaaaataagatagttaaatctaatttaacatcaccagatacgattttgttacataaaactttagaaaatctaaaaaaaaacaaaatagaaaatgttattattgaagcttcaagtcacggtctcgatcagaaaaggttacatcacatcaattttaaagctggaatatttacaaattttacccaagatcatcttgactatcataaatcaatgaaactttatttaaaggctaaattagttctgtttaacaaaatcttaaaaagaaaaaaaataataatctctgataaatcttctaaagtattccccattttaaaaaaaatttcaaaaaaaagaaatttaaaaataagagacatatctacaattaaaaaaaaattaaatgatcagttcagtgaaaaatttaatgaatttca

SEQ ID NO: 311814 - DNA, 901 bp, Unknown
  Bacterial polypeptide expressing nucleotide sequence isolated from the Sargasso Sea
cttatcagaggtcataaactgaatgaaaatgaatttataaaactggcatttgaacgaggcgcatctttggtgattgcagatacagaaaccgaagatacgtcagacgtaatttattttaaagatcttaagcagcacataggtatcttcgcttcacgtttctacggagaccctagtttaagtttaaaaacaatttgtattacgggaacaaatggtaaaaccactgccgttgaaactttttctggtttaagtaatctattaggtagtaggtgtgcttatatgagtactgtaaatttttctatggacggtttgagtttagagaaagcgagtctcactactcccgatgcaattagcattcatagaaatatgaaaaacgctatacataacgatgcaaaatatttggccatggaagcttcttctcatggactagaacagcaaagactgaatggtatagaaattgactacgcagtgttgacaagtttttctcatgatcacttagattaccatggcgacatcaatcactataaatctgcgaaagaaaaacttttcttcgatttacatccaaagagcaatattatttgcatagatagttcatttggaagaaaactatacgaggatctattaaaaataaatcctaatacctacagcgtctcaatcaaacaaaaagctgactttcaagcttctttcaaagaatctcctctaggaataaaagtgaatttattagcacttgaccaagagcttacttttgaattgaggacaatatcaaaatacttggcctcaaacattatttgttcaatggctattttgagtttagagggatttaataattctttattggagaaatacgcgcaagatataaatctcccctcaggtaggttagaaaaaatagttaaagataatctta

SEQ ID NO: 311815 - DNA, 820 bp, Unknown
  Bacterial polypeptide expressing nucleotide sequence isolated from the Sargasso Sea
gttattttagactatgcacatactccagatgctctagaaatttgtctaaaaaatattcgtgaacaatttaaattaagaaagataaatttagtctttggttgtggaggtgaaagagatagatcaaaaagaaaaataatgggaaaaattgcaaataattattgcaataaaatttatttaactgacgacaatcctagaagagagaatccaaataaaataagaaatgaaattaaagtaagcattttaaaaaataaactatttgaaattccatcaagaaatctggcaataaaaaaagcaatttcaagtataaaatctgatgaaatcttagttgttgctggtagaggacatgaaatttatcaggaatataaaacaaaaagatatttttcggatagaaattgtatagttaaagcaattaataaaaaaaataagcatttaaatcaaaattggaaatgtaatgttgttgaagaaattttaggtagaaaattaaataataatattaaaattaataatgcttctatcaattcaaaaaaaattaaaaaaaataatattttttttggtattaacggaaaaaatcttgatggcaataaatttgctgattttgcaattaaaaaaggtgcctcattatcaattgtcgataaaaattatggaaaaaaaaatataaaaaaaataaaagttaacaattcgttaaagttcttttcaaaatgttcttctcttatcagaatatcttcaaatatttgctcaatagctattaccggttcttctggcaaaacttcattaaaagaaatgttagggagatccttaaataaaatatataaaactacta

SEQ ID NO: 311816 - DNA, 925 bp, Unknown
  Bacterial polypeptide expressing nucleotide sequence isolated from the Sargasso Sea
tattttaaagaggctgagattgatggaatttcaaataatagtaaaaaaattaaaaaaaattttatcttttttgcattttctggagataaaactaatggaaacttatatattgatgaagccaggaaaaatggagcaacaattataatttcacaagaaaaacaaaccaaagatgtaattaaattaccaaaaaaaaattattctctaatttatgcgtatttgtgctcatccttttacagtaaaaagcccaaaaatataattgctgtaactggaacaaacggaaagacttctgtaacagatttttgtcgtcaactatggaatttttatggcttgaaatcagcatcccttggcaccttgggtttaagagattctacacaaaactattaccataagattggaaataatctaacaacattagattcaagtgaattaaataaacaattatcgaaactatatgacaaacaaatatcctacgttgctctggaagcatcttctcatggaataattcaaaatcgtttagatggtattaactttaatggagctatatttacaaatctttcccatgatcatctagattatcacaaaaacatggctcagtatttcaatgctaaaaaaaaattattcactgaacatttaaatgatggaacttgtgtgtcaattaacttagatgatcaatatggaatgaaattatataatgagattaaaaacaagaattttaaatttgttaattttggatttaatgaaaaaagtgaactcaaattaatcaaaataaataaaattgaaaaattttggcaattagaaattttatatcaaaacaaatcgtacaagactaatattggtttggttggtcattttcaaatttacaatgcattagctgcagcttcaatatgtttaggtctaggaatgaaagaggattctatttttaaat

SEQ ID NO: 311817 - DNA, 652 bp, Unknown
  Bacterial polypeptide expressing nucleotide sequence isolated from the Sargasso Sea
aatgttattaggccaagtttttaaaaatataaaaaaaaaatataaactaattaaatttaaaaacattaaatttaatagtaaagagtgtaaattaaatgatatttttttttcaataagtggaaataatttaaatggtaataactatattaataatgcaattgtcaatggtgccaaaattattgtttcaaacttaaaatttgaaggatttaataaaaataaaattttatttattcatagtaaaaatcccagaaaattattggccgaagtatcaagtcggtattataatacaaaaccaaaaaatattatcgctgttacaggtacaaatggcaaaacttcaatagcaaatttttattatcaaatattaaatttaaacaaaaaaaatgtagctgcgataggaactcttggtgtagtatctaaaaaatttaattttaaaaccgataatacaacaatcgatcccataaaaattcataaaatactaaaaaaacttaaaaacttaaaaattgataatgtaattttagaggcatctagtcatggtttaaaacaatacagattaaatggtattaattttaatacagccatatttacaaatctatcaagagaccatcttgattatcataaaacttttaaggattatctaaattcaaaacttatt

SEQ ID NO: 311818 - DNA, 846 bp, Unknown
  Bacterial polypeptide expressing nucleotide sequence isolated from the Sargasso Sea
tcccaaaattaaaatcagttgaagggagacttgaaaaaattggagaaatcaaaaataatagtaaagtaatcttagattatgctcacacaccagcagcactagaattggcattattaaacctgaaagaacaatttccaagaaacaaaataaacctggtgttcggttgtggaggggatagagattttaaaaaaaggtctataatgggtaaaattgctgaaaaatattctgatattatctatttaactgatgacaacccaagaaatgaaaatccatcaaaaataagaaaagatattaaaaaaggtattaaaaaaacgaaaattaaagaattttcaaatagaaaaaaagcaattcacaaagccataatgagtcttaatacaggagatttattattggtagctggtaagggacatgaaaaattccaagattatggtgaaaaaaaatattttttctcagaccaaaaggtaattttaaaatctattaaattaaaaaatagatctttatcgaataatttaaaattgaacataattaaagaagtctctaggtcaaaagtatcaaataaattagttattaaaaatatatgtattaactctaaaatgataaaaagaaatgatattttttttgcaatcaaaggaaaaagatttgatgggaataaatttgtttctgaggctttgaaaagaaagtcaagtttagctatagttaataaaatagacaaaaaagcttttaaatcaaaacaaattaaagttggaaatactctaagctttcttactaaatgttcgtctatttatagagaaaatataaatgcgaaaattatctcaatcacaggaagttgggaaaaacaactttaaa

SEQ ID NO: 311819 - DNA, 890 bp, Unknown
  Bacterial polypeptide expressing nucleotide sequence isolated from the Sargasso Sea
tatgagtacaataaatttttctaaagacggatttatattacagaaatcagatctaacgacccctgatgccataaaaatacataaaaatattaaagattcattagcatctggtgctatctacatcgctatggaagcatcttctcatggtttagaacaggatagacttattggccttgatatcgactacgccatattgactagcttttcgcatgaccatttagactatcacggagatatacaaagttatcaatccgctaaagaaaaattatttttagatttaaatccaaaaaaaaatatagtctgcattgatagttctttcggcaaaaaactttattcaaaacttttaaaaaataataaggaaacttacagcatatctataaaagaaaatgctgattttcatgcctcatttgagaaatcgccaattggattgatggttaatttaaaagctttcgagaaaaatttttcttttgaattaaaaacattctcaagatatcttgcttcaaacgtaatatgctcaatggctgttttgatcttggaaggagtaaagctttctgatatagcgaaaatagcaaaagatatagtatttcctcaaggtaggcttgaaagaatatttaaaaatgagcaagttatttatatagattatgcacatacacctgaagctttggagtgcacgctgaaagaattgaataacatacataacgagcctatctggtgtctttttggttgcggaggaaatagagacaaagataagagacctttaatgggtaagattgctcaaaaatattcgaaccatgtagtaataaccaatgataatccaagagatgaagatgaaatggatataattaatgatatcttttctgaagtaaatgaaatggaacaaatttctataa

SEQ ID NO: 311820 - DNA, 763 bp, Unknown
  Bacterial polypeptide expressing nucleotide sequence isolated from the Sargasso Sea
atgggcaaaattgctaacaaactatgtaattatatttatcttacagacgataatcctagaagtgaaaatccagaaaatatcagagcaggtattaagaaatcaattttaccatcaaaaatgattgaaataccatcaagaaaattagctataaaaaaagcaattttaaatagtaaatctgatgaggttttaattattgcgggaaagggacacgaaaacactcaagaatatattaagaaaaaaaaattttctgacaaagataatataagaaaatcaataattttaaaaaatagatttttatcaaatgattggaaattaaatatacttaaagaaattataaataataaaaaattagatagaataaaaaattttaaaattagtactaattcgaaagaaaagaataaaggtaaaattttctttggaattaaggggaaatcttttaatggaaatgattttgcagacgaagctctaaaaaatggagcaaaattggtaatacttcaaaataacaaaaatgatagtaaaaaaaagatttatgttaaaagcactctggaattattaactaaattttcacaaatgataagaatttcttcttatgcatctcaagtcgcgattacaggatcttcaggcaaaacctctttaaaagaattgttaggacaatgtcttcaaaaaaattattctacaacattttcaaaaaattcatttaataataaattcggtttaccgatttctttaataaatttaaataagaatacgacttatggaatat

SEQ ID NO: 311821 - DNA, 739 bp, Unknown
  Bacterial polypeptide expressing nucleotide sequence isolated from the Sargasso Sea
atacagggaaataaatttgacggaaataatttcataaatgacgctataaaaaagggggctcacgtaatagtgtcaaataagtttaaaactggaatttataagggcacatattatattaatgtgattgatcctagattggttttatctaattttgcaaataagtattataataataaaccaaataatataattgctgtaactggaactaatggtaaatcgtctatagttaatttttattatcagatattaaaacttaataaaaaaaaagtagcttctattggaactttgggtgtcaaatcaaatggtgttagctctgaacttaataatacaactgttgatgcagttacaattaataaaatactttcaaatttaaagagtaaaaaaattgaaaatgtaatattagaagcatcaagtcatggtctgcatcaaaaaagattacatgggattaagtttagtacttctatatttacaaatttaagtagggaccatttagattatcacaaaaattatgaaaattattttaattcaaagttagttttatttaatgaattaacaaaaaaaaatggaaatttgatatttgatgaagagtcaaaaaactcaaagacttttaaaaatattgcaaaaaaaaaaaaattgaacctattaagtattggaaaatcaaattgcgatctaaaaattgattcaataaaaattttaaataattatcaatatgtaaaattttcttataaaaataaagaat

SEQ ID NO: 311822 - DNA, 854 bp, Unknown
  Bacterial polypeptide expressing nucleotide sequence isolated from the Sargasso Sea
tactaatctagcgccagagcatcttgattatcatggtacaatggagtcttattacaaagccaaacttcgcttatttactatgcttgcaattgatgcaacagcagttgtgaacatatcagatggttttggaaaaagaattttaaaaaagtcaagcgcgccagtaattactttttctaatagtgatcaaaattctatttactatcaatcaaaaaaaatctcaataactggaataactgggaaaataatcgctgggcatgattcatattctataaaatcaaaattgacaggtgattttaattgtgaaaacatcttagctgcagtttcagtcgcgcatgcattaggtcagagcaaaatagatatagaagagggaatacaaaattgcagcttagtacctggtcgtatggaaatttatggtattgcttctggcgcaaatgtcatagttgattatgcccatacacctgactcttatgaaaaggtgttatacactctaaagaatattatacccgattctagcaatatgtatgttgtttttggtgctggcggagatagagatacaaaaaaacgtccagaaatggcaaagattgctgaaaaatttgcaaaccattgtttcgtcacacctgataatccgagaacagaagatccagaaaatatttcaaatgaaatagctgctggtttcaaaggtaatgcatttacaattttttccgatcggggtagagggttaagagcagcaatagaacgaacagataataaagatattgttgttgttttaggtaaaggccgagaagaatatcaagaaatcaagggtaaaaaagtaatttattcagatattcaaataataagagaatataaatgag

SEQ ID NO: 311823 - DNA, 837 bp, Unknown
  Bacterial polypeptide expressing nucleotide sequence isolated from the Sargasso Sea
taataattatcaattaattaaaatcttacataataaaaaaaaatatattttaaaaataaatttaattggatcaattcaaataaaaaatttattcatggctatcttggcttgcaaaatttgtggtttaagtatccaaaatatatttaaagttattaataaaattcggagtgtaaatggaaggttggagtttattagatgtttaccaaatcaatcaaagatatttttagattatgctcatacacctgaagcattaaaaaatgcaataatttcgcttgaggagcattttaataaaaaaataacagtcatttttggatgtggtggtgaaagagataggtcaaaaagagaaaaaatgggtaagatagtaaataaattatgtgaaaaaattatagtcactgatgataatccaagaaacgaaaacccatctaaaattagaaaacaaattattaaagcaatagacgaacgtaaagtaaaagaaatatctggtagaaaaaaagcaattacttttgcattaaaaaattctagtccatatgaaattattttagtagctggaaaaggtcatgaaaattatcaaaacttgggaaaaaaagaaattttttttagtgacaaaataacaattaagaaagttcatttaggggaaataagcaataaaaaaaatcaattaaaatataatgatattataataaataaaatattgaaaaataaaaaagaaaatcttttttctggtgtttcaataaattcaaaaacaattaaaaaaaataatttatttgttgcaattaaaggaaaaaataaagatgggcataattttttaaatcaggcaattagtaaaggtgctaatta

SEQ ID NO: 311824 - DNA, 856 bp, Unknown
  Bacterial polypeptide expressing nucleotide sequence isolated from the Sargasso Sea
ttccaatataataggagtaacaggaacaaatggaaaatcttctgtagctgattttttttatcaaatattatcattaaataaaattcctgtagcgtccataggaactcttggcatacattcaaaaaaatataaaaaagaaattcagcttacttcacctgacccagtgtcattacataaaaatctagaaattcttgcgcgacataagatcaataatgttattttagaagcgtcaagtcacggactagagcaaaaaagattagatcatttgaattttaaaataggaatattcactaatcttagtcacgatcatctagactatcacaaaaacatgaaatcctattttaattcaaaaatgcatctatttaaaaatttactaaacaaagattctaaaattataactgacgaggaaaataaagaatttaagtttcttaaaaatatatccactcaaagaaaaataaaaagaattactataggaaataattcaggaaatataaaagttttatataataaatatttagaaaataaacaatttgttaaaatttctataaattcaaaaatttctactttagaaattcctcttatcgggtattttcaaataaaaaacttattaatggcaacattagctgcttcttgctgtggactggatttgaataaaattattagtaaattaaataaaattaaaccagtttctggaagacttgaatgtgtttcaaccttaaaaaataattcaaatataattgtagattttgctcatacgcccgaagctttaaaggaaagcttaatttcaattaaaaagcagttcaaaaaaaaaattgtgatagtttttggatgtggcggagaaagagataaaaaaaag

SEQ ID NO: 311825 - DNA, 898 bp, Unknown
  Bacterial polypeptide expressing nucleotide sequence isolated from the Sargasso Sea
actaattaaaaattgcccaaaagatttagaaaatattaatgtaaaaggactatcctctgacactagagatttgaaaaaaggtgaattattctttgctttaaaaggatcagaaaataacggagaaaaatttgtaagtttagctttaaaaaaaggagcttgtgcagttatttcctcaaaaaaaatcagaggcaatactaaggtaattaaaaataaaaatgttaaaaaatgcctagcaaatacctgttcaaaattttattttaaaaagccgaaaaatatcattgctgtaacaggtacaaatggaaaaagttcggtagctgatttttttcatcaaatactctctttaaataatatacctgcagcaacaataggtactttgggtataaaaactaaatcaataaaaaaaaataagttaacaagtccggatattataagcttacataaagagcttagctttataaaagaaaaaaaaattgaaaacgtaataattgaagcatcaagtcacggtttagatcaaggaagacttgaaggaataaattttaaagcaggtatttttacgaatttgagccaagatcacctagattatcataaaactatgaaaaattatttgaattctaaattaatattatttaaaaaattattaaaaaaaaatagctacgtaattactaaaaaaaatattccagagtttaaaaagattaatagcattgttcgacaaagaagattacgaagcaaatttattgactattttgaaaaagaatacgattttgctaattttaagctcattggagaatttcaaaaagataatttatcaatggcagttaaagcttgtgagattttgaaaattaacaagaatgatatttcaaaatgtttcgataaattaaaaagtattacaggaagatac

SEQ ID NO: 311826 - DNA, 790 bp, Unknown
  Bacterial polypeptide expressing nucleotide sequence isolated from the Sargasso Sea
aataaatttatcaatgaagctataactaaaggtgctgcagtgataataactaacaaaaaagtaaaatattacagcaaaaaagttcctataattttggtgctagatgcaaggaaaagtttagcagaggcttgttcaaatttttataaaaaaaaacctaaaaatataatcgcagtaactggaacaaatgggaaatcatccgttgctgattttttttatcaaattttgaattttaataacattcccgtagcctcaattggaactttgggaataaaatacaaaggttatagtaaaaaaaataaactaacatctatggatgcattgcgcctccatcaaaatttagaaaaactgtcagaaaataaaattaatcacgtaattttagaagcatcaagccacggtttaaaacaaaaaaggttagataatctaaatataaatttaggaatatttactaatcttagtcatgatcaccttgattatcacaaaaatatgaaatcatatttacattctaaattatacttgtttcgcagtctacttaaaaaaaattcaaaaattattacagatacagataataaagaatttgaaattataaaaaaaaatacaaagaaaaaaggtataaaaataatttcaattggttcaaattttggtgatataaaaattttagaaaatagatatatagaaaacaagcagttagtaaaaatagaatttaattctaaaatcttttctcttggaatacctcttattgggttttttcaagtaaaaaatttgcttatggcaattttagcagcaacaaatt

SEQ ID NO: 311827 - DNA, 406 bp, Unknown
  Bacterial polypeptide expressing nucleotide sequence isolated from the Sargasso Sea
aaaaaatattttaatggcgattattgcagcaaaaaatagcaatataagtttaatcaagattctaaatgttttatcacaacttaagccaatagatggaagacttgaaaaaataggtaaaatcaaaaataggtctaaagtaatacttgattatgcacatacaccagatgcacttagaatatgtctttcaaaccttagagagcaatttccaaataaaaaaataattttactctttggttgtggtggaaatagagatcaaaataaaagatttaaaatgggaaagattgcatgtgattattctaacgaaatttatttaacagatgataatcctagatttgaagatccaagaaaaataagagatgatattaaaaagggtattcatgacactttgataaaggaaattccaaat

SEQ ID NO: 311828 - DNA, 939 bp, Unknown
  Bacterial polypeptide expressing nucleotide sequence isolated from the Sargasso Sea
gaaagtaaaaaaattaaaaagaattacatttttttttgcaattaaaggtaataatgtggatggtaacaattatatacagagtgcaataaaaaatggttcaaaaattattgtttcagaaaggaaaaaaaataaattttataaaggaatattatttataaatactaaaaatataagaaaattactagcagaagtctcttttaaaattttcaataatagaccaaataatttgattgctgttacaggaacaaacggaaagtcgtcaattgcagaattttattatcaaatattaagattaaataataagaaagttgcttcaataggaactttgggggttaaatcaaaaaatgataatttaaatttatcaaatacaacatcagacccaattcaattaggtcaaattttagaaagactcaaaaatcaaaaaattgataacgttatcatggaagcatcaagtcatggtctaaaacaaaatagacttgacggtttaacgtttaattcaggaatattcacaaatttatcacaagatcatttggattatcataaaaatttgaatgattatttaaaatcaaaactgtatttatttagaaatttaataaaaaaaagggggaatgtaattactgatgcagaaatatctgaatttaacaaaataaaaaaaatcaccataaataaaaaattaaaacttcatacgcttaatggaaaaaacaattttaaaattttatctcattcctttaaaggggaatgccaaatacttaaaatacaacacaataaaattataaaagatataaaaattaatctaataggtaaaattcaattaaaaaatttattaatgtcaattatagctgccaatcaaagcaatttaaaaattacaaaaatattacaaataattcatagaattaaatcagtggaaggcagattccaacaaattggtaaattgaaaaa

SEQ ID NO: 311829 - DNA, 921 bp, Unknown
  Bacterial polypeptide expressing nucleotide sequence isolated from the Sargasso Sea
gctgcgaagctttggtggtttaaaaaaaaaagaaatagattttgctcttaaaaaaattaagagtgttgatggcagattagaattaataaaaattttaccaaataactctaaagtttatatagattttgcacatacaccaggtgccttatcaacagttcttaaatcactgagaaaaaattatacaggcaaaatttctttagtttttggctgtggtggagagagagatcaaaagaaaagaggagaaatggctaaaattgctagacgactcaccgataagatatatgtaactgatgacaatccaagaagggaaagtccaaaaaaaataagagagatgataataaaaaaattaaaaaaagctaattaccttgaaattggcaatagaagcaaggcgataaaaactgcaattcaaaaatctgaacctggagaaataattttaatagctggaaaaggtcatgaaacaacccaagattatggaaaaaaaattttaaatatatccgacagatcaattattaaaaatgcgaattttattggtaaaaaatttaataaaagtaattataacaagcatcttaattcggaaattttaaaaaaaatagttgataaaaataaaaaatttacttttgagggtgtttcttttaattcaaaagagataaagaagggaaatcttttcattgctattaagggcattagaaatgatggacataaatttgtaaatgaagctattaaaaaaggtgcaaatttttgcgtggtatcgaaaaatattaaagttagaaataaaagccatttaataaaatgtgacaacacaataaaatttttaaataatttagcttttttaaaaagaactctctcaaaagcaaaaataattgcggtaacaggtagttctgggaaaactacagtaaagacccttttaggaaagatgttaaa

SEQ ID NO: 311830 - DNA, 817 bp, Unknown
  Bacterial polypeptide expressing nucleotide sequence isolated from the Sargasso Sea
aatgtattcttcaaatttcttacaagagcttaaagatctagaaaattttagagatattaagattaccagtatccacttagatagcagagaggtaaaagagggaggtctattctttgctataaatggtcatgataaggatggtagcgattttatttcctcagctttatcaaatggagcctcgcttgtcatttcggatacataccaaaaatatgcagaaagagttatttatttcgaagaacttaaaaaatatattggtatttttgcatcaaggttttataactttccaagttcaaaaataaaatccatatgtgttactggaaccaacggaaaaactacttctgttgaaacttttgcaaacatgagtaatttactaggctataaatctggttttatgagtacgatcaatttttctaaagatggattaattttagagaaatcagatctaaccacccctgatgccatcaaaatacataaaaatatcaaagattcattagaatctgatgctatttacatcgctatggaggcatcttctcacggcttagaacaggatagacttattggtcttgatatcgattacgctatcttgactagcttttcgcatgaccatttagattatcatggcgatatacaaagttatcaatcagctaaagaaaaattatttttagatttgaacccaaaaaaaagtgtagtttgcatagatagttcttttggcaaaaaacttcattcaaaacttttaaaaagtgataaggaaacttacagcatatctataaaagaagatgctgattttcatgcttcatttgagaaatcaccaattgga

SEQ ID NO: 311831 - DNA, 702 bp, Unknown
  Bacterial polypeptide expressing nucleotide sequence isolated from the Sargasso Sea
aatgttattgggtgaattaattaaaaatattaaaccagcttataaatctataaaatttaataatattagatttaacagcaaagattgtaaaacgaacgatatttttttttcaatccaaggaaataaattaaaaggaaataattatattaaagacgctataaaaaacggctcaaaaattattatttcaaatctaaattttgaagggtttaataaagaaaaaattttatttattaaaaataaaaatccaagaaaagcattaacagacgctgcaagcattttttataaaaaaaaacctaaaaatattatcgccttaactggcacgaatggcaaaacctcaatttcaaactttttttatcaaatattgtctttaagtaaaaaaaaggttgctgccataggaactttaggcgttttatcaaaaaaaattaaattaaagacaaataatacaacaatagatcctattaaaatgcatcaaattttacagaaattgaaaaattcaaatattgataacgtaattatagaagcatcaagtcatggcttaaaacaacatagattggatggattaaatttaaaaactgcattgtttacaaacttaacaagggatcatttagattatcataaaacatttaaagattatttgaattctaaacttattctttttaataaattgttgcttaataaaggaaatataatttttgaaaatgg

SEQ ID NO: 311832 - DNA, 660 bp, Unknown
  Bacterial polypeptide expressing nucleotide sequence isolated from the Sargasso Sea
tccaaatttaaataaaaaatatcataaaataagttttaaagggatagcttttaattcaagagaaattaaaaaaggatatattttttttgcgtttaaaggaaataacacagatggaaatttatttattaaagatgcaattaaaaatggatcaaaaataataattactgacaaattaaaaaaaaatgtttggaaaaatgatattttatttttaagttttaaagaccctagaaaattactagctctttttagttcaaaaatttttaataaaaaaccaaataacttaatagcagttactggaacaaatggaaagtcttcaatagcaagtttttattttcaaattgcaaatttaaataaattaaaggtagcctcaattggaaccctaggagtcaatggtttaaaaattaaaaaaaatttttctaatactacttttgatacaattcaaataaataatattctacaaaaattgaaacaaaaaaaaattgagaatgtaattttagaagcatcaagccatggattaaatcagaatagattgtatggattaaaattcgatgtaggtatatttacaaatttatcaagggaccatttagattaccacaaaactcttaaaaattatttgaactcaaaattaatattatttaaagatttgatgaaaaaaaattc

SEQ ID NO: 311833 - DNA, 904 bp, Unknown
  Bacterial polypeptide expressing nucleotide sequence isolated from the Sargasso Sea
acttttaaagactatcttaattcaaagttaaaattgtttagactactaatgaaaaaaaactctactattatatttgataatgacctacctatttccaatatatttaaacaaataggtaaatccaaaaaattaaaatcaatcactattggcgtaaaaaattctgatcttaatattaataaaatatattatagagacgagttgcttttagtagagtttaattataaaaaaaaaaactatttaattaaattaaaattaataggcaaacttcagattaaaaatcttttaatggcatgtttggctgccgaaaaaagtggattaaaattttctaaaatcatttcaaatataaataagataaagcctgttgagggaaggctacagcagatgaataaaatcaaaaataattctaaagttatattagattttgcacacacaccagatgcattgaaatattctttgcaaaatctaaaggaacagtttccatttagtaatttaaatatagtttttggttgtgggggaaatagggacatagaaaaaagacctttgatgggcgcaatagcgaataaatattgtgaaaaagtttatttaacagacgataatcctagagatgaaaatccaaaaaaaattagaagtcaaattaaatcaaaaataggaaaaaaaaaattaattgaaattccctctagaagaagcgctatatcaaaagcaatttatagtttaaaaagtggagatattttattagttgcaggaaagggtcatgaaaaatttcaacagtatggatctaagaaaataattttttctgataagttaattattaatcaagaaattaaaaaaaaaaataataaactttttaatgatctgaagttaaatatattaaatgaaaattgtggtttaaaaaaaataaaataga

SEQ ID NO: 311834 - DNA, 111 bp, Unknown
  Bacterial polypeptide expressing nucleotide sequence isolated from the Sargasso Sea
tggtgctgattgccggcaagggccatgaggattatcagattcttggtaccgagaaagtgcatttcgatgaccgcgaacaggcggagcaggcgctgagaggacgactgtgag

SEQ ID NO: 311835 - DNA, 684 bp, Unknown
  Bacterial polypeptide expressing nucleotide sequence isolated from the Sargasso Sea
ccgattcgtggaccaggcgttacgggccggtgccgctgcggttctcgtggaaggacacgaatgggatccgagtcaatcccgcacaaactgttttccggttgatgatctgaagaagcaagtcggtctgattgccaaccgtttcttcgggtcgccttcgcatgccttgtgtgtcatcggcatcacaggcaccaacggcaaaaccacctgcgcctcgcttcttgctcaggcgctcggtctgctgggacaccagagcggattgatcggaaccacggggtggggcatgacgggcgatctgcagcctgccgccctgacgacgcctgacgcaattaccctgcagtcacagctcgctgatctggtcgagcagggcgccgatagtgtctgtctcgaggtctcatcacatgcgatagaccagggacgtattgaaggcgttgagttcaactcagcgctgtttaccaatctgagccgggatcatcttgattaccaccagacgatggaacgttacgccgagaccaagctgttgttgttccgtcggacagagttggagagcgtcatcatcaatgtggctgatgcggtagggtgcgcgttcgccagccaggaattctcagcaaagctgtggacgtatggccacgatgacagcgctgacgtctttccggtcaaaatcgatgtggagtctggcggcatcac

SEQ ID NO: 311836 - DNA, 855 bp, Unknown
  Bacterial polypeptide expressing nucleotide sequence isolated from the Sargasso Sea
catgcagttaagaaattttattcccgatatagataaaaactatttttcaagaatttgcattaatagctctaatgtaaaaaaaaatgacatattttttgcaattaaaggaaataaatatgatggaaacaaattcataaatattgctttaaaaaaaggagctaaaattattatctcagaaaagaaaaaaaaaataaaaaaggaaggaataatatttgttaaaacttcaaaaataagaaaactattagctgaaacctgttatagttttttaaaaaaaaaaccaaaaaatttagttgcagtcactggaactaatggaaaatcatcaatagctgatttttactatcaaatattaaatttgaattcaaaaaaagttgcatcaattggaactttaggtgtgagatataaaaataaaaaaaaaaaactaaataatacaaccttagatccaataagcttatgtaaaacattagttaaattgagacacgaaaaaatcaatcacataattatggaggcctcaagccatggactacaacaaaatagactagatggtctcatgtttgatacgactatatttagtaacttatctcatgatcatttggattatcataaaaatatgaggaattatttaaaaactaaattatatttattcgaaaaattaacaaaaaaagaaggacatataattactgatgcaagtataccacaaagtaaagaaataaaaaaaatttcaaataaaaaaaaaattaatctcaacttaatctttgataataaaaaaggtattgaactaatttctcacaaatttaaaggcgaaaaacaaatattaaaaaataaatttaaaaatataagttaccattttgagtttaa

SEQ ID NO: 311837 - DNA, 899 bp, Unknown
  Bacterial polypeptide expressing nucleotide sequence isolated from the Sargasso Sea
attaacaactgaaaatccactcttcattagaaaatttcttaaaaaagttcaaaatcatactaggtatgttttttttgaagcttcttcaattggcattaatcagaaaagacttgatgggctggaaatcaagcacgttggtttcacaagttttgcagaggatcatcttgactatcatcaaaccacttctaattatataagttctaagcttgaacttttgtcaaatagaagtctagaaacattggctttcaatcaagacatgaacatcacaaaagaaattaaacaaaatgcaaatgctagaagtatgttttcaatatcttcatcaaataaaaaagcggaaatttattacgaaattttagatattgatgaaaatggttggatcagatttgatacttttactccatggggacaattctcttcaaatgcaagattatgggctgattataatgttttaaatttgcttatatctctaccttactattactactgttttggggaaataaaatctttttttaggaaaatcgaaaatatcctccttcctaatggaaggtttgaagttttagattttaaaacaaaacataaaaaagtgatcattgattttgctcatacccctgaagcaatggaaaaacttttatctcaactctcaataaattataaaaacaaaattttcttagtctttggatgtggaggcgacagggataaaggtaaaagaccaaaaatgggtgctatagcagagaaatatgcaacaaaaatatttttaacttctgataattctagaagtgaatctacagatgaaataattgatatgattgcagcaggcataaaaaataaatttaaaatacaaattaatatagatcgagaaaaggctattcaactagctattaattctatgagtcatgatg

SEQ ID NO: 311838 - DNA, 509 bp, Unknown
  Bacterial polypeptide expressing nucleotide sequence isolated from the Sargasso Sea
tttgaatagaactttaagcgaacttaaaaagcttaaatttgaaaaagtatacttagaggcttcttctcacgctttagagcaggaaagattaaaagatataaacattgaaaatgcagtttttaccaatttaacccatgatcatttagattatcataaaaatatgaaaaattattttaatgcaaaacgaagactttttaaggattttgatataaaaaatgcagtcataaatgttgatacccaatatggtgaaaaattagcaaaaaaaatagatagaaatatcaaactcttaactttttcaaataagaaaaaaacagcaaacgcttatattaaaaattataaacttaatgaaaatggtatagactttgtattagatgtagagttgaatcaaattaaatgttcaataaacctctatggtttttacaatattgagaacttatctttagccatactaaatttaataaatcaaggatactctcccaaagaaatagaaaaatcattaaaaaatctaa

SEQ ID NO: 311839 - DNA, 749 bp, Unknown
  Bacterial polypeptide expressing nucleotide sequence isolated from the Sargasso Sea
ttttaaatcaaaaatacacaacataatagctgtaactggtacaaacggaaaatcttcaatatgtaacttttatttccaaattttaaacttaaataaaaaaaaggttgcctctttaggaacccttggagtcaaaactcaatcaaaaaactttacatcaaccaatactaccatggaccctttgcagctctcgaaatatctaaaatatttaacaaacaaaaaaattgataatataattcttgaggcgtctagtcatggattaaagcagcatagattagatggtttaaagtttaataaaggtatatttaccaatctatcgcatgatcatttggactatcataaaagttataatgattatttaaatgcaaaactttatcttttcaaatatctattatccaaaaaagcaacaattatagctgacaaagatattccagagtacaaaaatattttaagaatatctaaagaaaaaaaactcagtctaaaattaatatcaaaaaaaaatggaaatattgagattttggaacataaatttattggtgaaaagcaatttttaaaaattaaatataataatttaaaattttctttttatttaaacttgattggcaaaatacaaattaaaaatttatttatggcaatcttagcagcagaaaataaaagtcttaagtttgataaaattgttaaagtattaaataaaatcaaacctatcaatggaagattagaaaaaataggaaaactaaaaaataatgctattt

SEQ ID NO: 311840 - DNA, 849 bp, Unknown
  Bacterial polypeptide expressing nucleotide sequence isolated from the Sargasso Sea
aactttaataaaaataaatatttctctgcaattacttctaattcaaaatttactaataacaaaacgttgtttgtttataacaaaaatactaaggtaaaaaagatttatttagatgaagcaattaagaataaaactcctgctataatttcgaataaatatattaaaaacttaaaaatccctcaatttgttgtgtctaatattaattttgatacatattctttattaaataaacttcatagtaatcctccctttaaaacggtagcagttacgggcacaaatggaaagacatcagttgtttggtatatttcaaaaattcttaattcattaaaatataataatacaactgttggtaccttaggtcattttataaacggaaaaaaaataaatgatataaaattaacaactcctgcctatgaggaattatataaatatggatcttcgaataaaaaagaaaaaaatatttatatttttgaagcttcaagtcacgctttagaacaaaacagattaagaaattatccaataaatattgcagctattacaaatatttcgaaagatcatcttgattaccataaaacattctcaaaatataaaaaatctaaaattaaacttttctctaatcatttagtaaatagcggatttgctataattaactcaagattaaaaatttcatcagaattaaaaaaaaaattgataaaaaaaaacgtccaaataaaatattttggaaataagaatattaaattaaaaaaaatcaatgattttgtatatttgtatatcaacaataaaaattataaactagaaaatttaaaacttaaaacaaatatagaatttgagaatttagaatgtgcaatt

SEQ ID NO: 311841 - DNA, 523 bp, Unknown
  Bacterial polypeptide expressing nucleotide sequence isolated from the Sargasso Sea
catgttagatcaatcaaaaacctacgcttatgattcacgccaagtaaaatctggggactgctttatttgtttgccaaaaggggacgtttatattgaagatgcgttaaataatggggcaacggatgttattcatttaaatcgaaaggactttgcaatcagtgcgaatgactatttcgatgatcctacaacccgagtcagtttaattgggattacagggacaaatggaaagacatccgtggcttactttacagcccagttgcttgaggccatggggcataatgtactggttattgggaccatcaattctaaattaacaacacctgaatcttgggatatcttagcaaaaataaaggcgcatgcagataatgggggaacccacgttgtcttagaggtttcatctcatggaattgatcaataccgagtgtacgggtttaattttcacgtgaaatgtttaaccaatatttacccagatcatcttgattatcatcaaacgtttgagaaatacaaatcgacgaaacttcat

SEQ ID NO: 311842 - DNA, 799 bp, Unknown
  Bacterial polypeptide expressing nucleotide sequence isolated from the Sargasso Sea
ttgaaagatgatggttgcatcgacggtctcatcatcaaaggggtgacttgtgactctcggcaagtcaagccagggtatttatttgctgcttttcaaggaactaatgaaaacggatgtactttcgtttcagaagctatttttaaaggtgcagcagctataatcctcgagaaaaatttagctaaaacacttaattgtaaagaagtgccgattataacggtatcaaattctagaaaagcctatgcagtaatctcttcaaatgtttacaaaccatctcctaagacaatagtagctataacaggaactaacggaaaaacctcgtcagctagttttttgcgccaaatttggtctggcctgggggtgccctcgtgtagtggggggactcttggtcttgagttggcaggtccaaatctcaacaaaaacaaaaatctcataagtaaatcaaatctgactacgcctgatagtgcggatcttcatcgttaccttcagcaattatctattcataatataaataacgtagtcttagaggcatcgagtcatggattagctcagtatcgtttggatgggttgcaaatatcagcagctgcttttaccaatttaagcagagatcaccttgactatcatggtgattttaagaaatacatggctgccaagaggcgcttgtttacggaattgctggtcaaaaagggcctagcagtagtgaataatgatgatcctttctcaatgaatcttatttctgatcttcaaaaagattgtcacaagattttaagctatggtttccgaggagacgagataaaaatag

SEQ ID NO: 311843 - DNA, 964 bp, Unknown
  Bacterial polypeptide expressing nucleotide sequence isolated from the Sargasso Sea
aggtgtggatcacattgtattagaagcttcatctcatgggtgagccaaaacagattagatcatgtaaatattaccagtagagcatttacaaatttatcgcgagatcatttagattatcatggcggcctagacgaatattttcttgctaaggcgatcttatttaggaaaaatccaaatttaggcgccatatccattgttaacattgatgagtattatgggagattaatgaagcttgttgctgaagataatggttttaatgtatttggagtaggacagtttcagggttctaaatttcgcatcattaagcaatcgatgcaggttggaggtcagtttctgtctgtatctttcgataacaaaacttataattttcagttaaaattaatgggagcttttcaaggtgaaaatgttgtaatggctgcggctttagcaatcgcttcaggagctaatcctgataaagtattttccattcttccaaatttaaccgctcctgagggtagacttcaggttatatctgagatgaagagtggcgcaaaaatatttttagactacgctcattcgccagaggccttaaggaaagttcttcttgcagttcgccctcatacattgggtaacctttccttagtatttggtgctgggggagatagggataagggtaaaagaaaaataatgggagaagtagcagaagttcatgccgataaaatatatattactgatgataacccaagatttgaaaatgcaaatatgattaggaaggaaatcaaaagagggtgttcaaaaggtattgacgttccagatagagctaaagcaattttggttgctattagtgaattaaaaagtggcgataaccttatcgttgctggaaagggacatgaaagaggacaacaaataggtaatacgaattacccttttgatgattccgaacaaatttctatgagtgtagaactattggagaaccagttgagat

SEQ ID NO: 311844 - DNA, 821 bp, Unknown
  Bacterial polypeptide expressing nucleotide sequence isolated from the Sargasso Sea
cttactaaaaaaaatgcaacagtaatatttgataatgatttgtctttttcaaagatattaaaaaaaatatgtaatttaaaaaaatttaaaataacaactatagggaaaaaaaattcagatcttaatataaatagaatttcatgctttaaagatttgcaggttgtagaatttgattataaaaaaaaaaaatattcaattaatttaaaattacttggaaagctccaggttaaaaatatattaatggcatgtttggctgctgagtgtagtggaataaaattttcgaaaattatatctaatatacataaaataaaaccagtagagggaagaatggagcaaattaaaacaattaaaaatggctccaaggtaatacttgattttgcacatactcctgatgctttaaaaagctctttaaaaaatttaaaagaacaatatccattaaataatttaaatattgtttttggatgtggtggcaacagggacaaagcaaaaagacctttgatgggaaaaatagctgataaatattgtgaaaaagtttatcttactgatgataacccaagaaacgaaattccaaaaaaaataagatctcaaattaaatcaaagatatctagaaaaaaattaatcgaaatctcatctagaaaaaatgctatcttaaaagcaattaacaatttaagtagtggggatattttattagtagctggaaaaggacatgaaacttatcaacaatatggttctacaaaaaaatctttttctgatagagaaatcataattactggtattaatataaaaaataaatctctatttaatgattggaagttaaatat

SEQ ID NO: 311845 - DNA, 805 bp, Unknown
  Bacterial polypeptide expressing nucleotide sequence isolated from the Sargasso Sea
atgtatcttggaaaatttatcaaaaatttagaaaaaaaatatcatgatttatatttttctggtttagcttttaatagtaaaaaagtaaaaaaaggtaacatcttttttgctattcaaggaaccaaacttgatggaaacaaatatattaatgaggcaattgaaaaaggagcaaaaataatagtttctgatagatatattaagctaaaaaaaaatattgtccttattaagaataaaaatccaagaaagctattagctgaaatatcttataagttaattagaaaaaatccaaaaaattttattgctgtaactggaactaatggtaaatcctctgttgcagatttttactatcaaatattgaatttaaataaaaaaaaagcagcatcagtaggtacagttggtattcaatttaataataaaaaaaaatatattgaaaataccactttagatccaatcaaatttacaaaagtgataaataatttaatattaagaaaagtaaataatataattttagaggcatctagtcatggtttaaaacaaaatagattagatggattactttttgatataggtatatttacaaatttgtctcatgatcatttagattatcataaaaatcttaaagaatatctaaatgcaaaattgtatttatttaaaaatttagttaaacagagaggaattgtaattactgagttatccaccccacatttaaaaattattaaacaaatagttaaaaaaagaaatttaaaacttttaacaatctttgataaaaattcggatttagaattagtgtctcatcattatgaaa

SEQ ID NO: 311846 - DNA, 766 bp, Unknown
  Bacterial polypeptide expressing nucleotide sequence isolated from the Sargasso Sea
aatgttattttctagtttaataaaaaaaattaataactacactatctataattataaaaaagattttaaaattaaagggatttcatctaattcaaagctgataaaaaaaaattatatttttttagctaattacgataaacaaattaaagcaagttatattaaagaagctattaaaaatggtgctaatttaattcttacaaataaaaaaattaaaaatatacaaacttctcaattaatatttaaaaatttggaaaaagcgctcaaaatatttcttagaaatatatttccctatcccccaaaaaatgtaattggtataactggtactaacggtaaaacttctgttatgtggatggttagtagtattattcatagtattgaaagaaatgttgtttctcttggtacaattggattatttaaaaatttaaaaaagatttcatactcaaatttaacaactcctgaaaaagaatttatatactctaaggctttttctaaaaaaaaaataaatatcaaaaattttgtttttgaaatttcgagtcatggaatttctaaaaaaaggattaatctaattcccattaatattgctgccataaccaatattactcaagatcatctagattttcataaaacttttacaaattatagaaatacaaagttgagactttttaaagaatatttactacccaatggatttgcaattataaatgacaatataaacaatattaataaattaaaattagctttagctaaaaagaatattaaaataatt

SEQ ID NO: 311847 - DNA, 874 bp, Unknown
  Bacterial polypeptide expressing nucleotide sequence isolated from the Sargasso Sea
aaattaattttgtttaaaaaacttttaaaaaaaaattccactataattactgactcagaaattaaacagtacccattatttaaacgtatagagaaagaaagaaaactaaatttacttagtattggaaaattaggaaatacatttaaaattttaaatcataaaatttttaacagctaccaatcgattaaaattgaatacaatagaaaaatttataatttaaagattaatttatatggttcaatacaaataaaaaatttactaatggcagtgttagccagcaagatgtgtggattaaatattaagaatatattcagaacaataaataaaataaaaagtgtagatggaaggttagaatttgttagaaaattaccaaaccagtccaggatttttttagattacgctcatacaccagaggctttaaaaaaagcagttatttctttacaggaacatttcaataaaaaaattactttagtttttggttgcggtggagaaagagataaaccaaaaagaaaattgatgggcaaaattgccgataaattgggagataaagtttatataactgacgacaatccaagaaatgaaaaccgcaatactattagaaaacaaattctcagtgttattaaaaagaataaagttaaagaaattcctgatagaaaaaaagctatcatttacgcattaaaaaattctgatccttatgagattattctgatagcagggaaaggtcacgaaagttatcaagattttggaaaaagaaaaatttttttaagtgataaaaaggttataaaaaactttaccccaaatagaatagcatttaaaaaatacaaattaaatttcaataacgaaatagtaaaaaaaataacaaaaagtcaaaaag

SEQ ID NO: 311848 - DNA, 742 bp, Unknown
  Bacterial polypeptide expressing nucleotide sequence isolated from the Sargasso Sea
ttgttaaaaaaattaattaaacactgtccggaaaaattttcaaatattaaaatttcaggactttccctgaacagtaaagatattaagcctgggtacattttttttgctaaaaaaggatataacaaaaatggatcagattatgttctagatgcacttaatagaggggctagagtaattataagcgaaaacttaataacaattaataaaagaattatttttattcgagttaccaatatatcagaacatatagaatacgcttgtaaagctttttttaaagacttgccaaaaaatattatagcggtaacaggtacaaatggtaaaacctcagttgctgatttttttaggcaaatttttctaattaacaagactcaagtagcatcaatcggaacgttaggaataaaaaaaaattctcaaactaaaccctctacattaactagcccagatattattagtctttataaagagctttcaattatgaaaaaaaataaaataaataacgtcataattgaggcttccagccacggccttcatcagggcagactaaatggcttaaatataaaatgtgggatattcacaaatttttctcaagatcacttggattatcataaatctatgaaaagatactatgacgcaaaaactattttatttaaaaaattattaaaaagaaaaagtacagttattacctcctcagattttgtgaaattaaaaaatctaaaaaaaatatgtaaagcaaaagattgaa

SEQ ID NO: 311849 - DNA, 812 bp, Unknown
  Bacterial polypeptide expressing nucleotide sequence isolated from the Sargasso Sea
tttaaaaaaagcagttatttctttacaagaacattttaataaaaaaattactttagtttttggctgtggtggagaaagagacaaaccaaaaagaaagctaatgggtaaaattgccaataaatttggacataaaatttatataactgatgacaatccaagaaatgaaaaccgtaatactataagaaaagaaattctcagtgttattacaaatagtaatgttagagaaattcctgatagaaaaaaagctatcattcactcgttaaaaaactctgatccctatgagattattcttatagcaggcaaaggtcacgaaagataccaagatttcggaaaaagaaaaatttttttaagtgacaaaaaagttataaaaaactttacctcaaaaaaaatagaatataaaaaacacaaattaaaatttaatcatgaaataataaaaaaaattgtaaaaagtcaaaaagataattcatttagaggtgtttcgataaattcaaaaaatattaaaaggacaagcttatttattgctattaaagggaaaaaaaatgacggccataattttttaaatgaggctattatgaatggcgcaagtcactgtgttgtttcaaaaaaagtgaaaaaaaaatttaaacctattagagttaaaaatacttttaaatttttaaaaaaattatctcaaaaaaaacgtgacgcttcctcagcaaaatttattgctgttacaggaagtacaggtaaaacaacagtaaaaacaatgattggaaatatgttaaaaaaatattcaaaaacatatttttctccgcaatcttataataatcatt

SEQ ID NO: 311850 - DNA, 780 bp, Unknown
  Bacterial polypeptide expressing nucleotide sequence isolated from the Sargasso Sea
aaaaaacaaactagcaattgtaaacttagatgacaaatggggtagcaaattaattaaattaattggtaaaaaaattaatgttgtgacctactctcttaaagatagaaaagcagatttttatttagaaaacattgtcaagaaaaatcagaaatcgaatttatttatcaagagtggcgataaagagtacaaggtagagacacttttgtttggcgaccataattttcaaaatattcttgcaagtttcgcatactctattatgaaagggttagatataaaagagatacaaaagagaattaaaaattacaccggggctccgggcaggcttcaaagggttaaaaatacagagctagaaatatttattgactatgcccacactcccgacgcacttaaaaaatcaattatttctttaaaaaaacatttctctgataaaaatatagttgttctttttggatgtggtggcaatagggatgttggaaagcgggagaaaatgggtggggttgccgaaaaatttgcagacaaaattgtcgttacttccgataacccaaggttcgaaaatcccaaagtaataatagatcatatttgcaaaggctttaaggcagataaaaagaaactaaagaaaaccatagttaatagaaaagaggccattagttggtcagtacgcaatatgaagaggagcgaggtattattaattgctggaaaaggacatgagaattatcaagcaataaaggggataaattttaaattctctgattataacgaagttaaaaaatgtctgaagat

SEQ ID NO: 311851 - DNA, 871 bp, Unknown
  Bacterial polypeptide expressing nucleotide sequence isolated from the Sargasso Sea
catgatcacctgggattatcacaaaaaaatgcaattatatttaaattcaaaaatgcatttatttaagaaactacttaaaataaattctaaaattattacggatgaagataataaagagtttaatattataaaaaaaatagcaaaaaagagaaaacttaaaaaaattacgatcggctcaaaaaaaggtgatattaaaattttaaaagttaaatataaaaacaaaaaacaaacaataaaaattttatctgattcaaaaatttatagactagagatacctctaataggttatttccaagtaaaaaatttgcttatggcagttttagcagcatcattgtgtggtttaaataaaagtaaaatttttaaacaattatctaaaattaaatcagtgccgggtagactagaatgtgttgcaacattaaaaaacaattcagatattattgtagattttgcccacacacccgatgctttggaaaaaagtttaacagcattaaaaaaacagttcaaaagacaaatcataatagtttttggatgcggaggagaaagagacaaaaaaaaaagattttttatgggtaggattgctagaaagtactgtcgtaaaatttttattactgatgataatccacgaaatgaaaatccaagaaatataagaaaggcaattttaaaaggttgtggaaaaatgggagtagaaatcggaaatcgaaaaaaggctatacacagcgcaattgatgaacttaaatcaaacgaaatacttttggtagcaggaaaaggtcatgaagaaaatcaagattacggaaacagagttgtaaatttttcagataaaaaaataataaaaaaaattataagaaaaaaaaatttttatctaaaaaaaaaa

SEQ ID NO: 311852 - DNA, 1498 bp, Unknown
  Bacterial polypeptide expressing nucleotide sequence isolated from the Sargasso Sea
aatgaataaagttttttcaaatatacccccagtagagtttgctaaaataaaatttacacaaaagatcatcaaaagtgtaaatttaaaaccaaatttaattctcaggggaatatcagaaaattctaatgaaataggcatagattatggattctttgctcttgcaggttctaaaactcacggtgcactttatgtaaaagatgcgattacaaaaggtgcaaatttaattattactgatactcaaggcttaaaaataattggagaaatgcaattaaatgctgcgatcataattttttcagaaccaagaaaattaatttctgaaatagctacctacttttttacagaaatccctcataatattgtaggaattactggaactaatggcaaaacatctgtagcacattatataaggcaattttgggaaaatttaggttataactcagcaagcattggaactacaggtgttaatggtttgattaatttcaaaactcaatatactactcctgatgccattacattaagatggtatttaaacaaattagtaaaaaaaggtgttgataaaattgctttggaagcttcatcgcatggtttagcacaggatagattaaatggaataaaaatgtctataggggtttttactaatcttagtagagatcattatgattttcatggaaatattaattcatattttgatgctaaagctatcctatttagggaattggttgaagaaaatggaggtgcggctattgctattgatggtccaaagggtgatttaatgcttaaaatagcacaatccagacttccaaaaataataacagttggtgaaaaaaaagaagctaatttaagaattttgtctcaaattcttactgataatggacaaaaattaaaatttagatggaatgaaaatgaatatgttattgatctgaaactttttggaaattttcaagcccaaaatgttttattaacttttgcatgtatgaatttactagaaaaggaaatagaaaaaaataaaaatcatgctatttcattattatcaaaattgaaaccagttcctggaagaatgcaagaagttgcttccaaaaaaaatggtgcaaaaatttttgttgattttgcacacactcctgatgcattagagtctgtacttaagtctgtaagatcacattttattggtaaaattcatctaatttttggtgctggtgggaatagagatattggtaaaagatcaataatgggaaaaatagcttcaaaactatctgaccgcgtaataattactgatgacaatcctagatttgaaaatccatcaacaattaggtctcaaattatgaaattttgtcctaaagcgattgaaattgcagatcgatcagaggcgattttaacaggagtagatcaactcaaaagtggtgatgcacttataattgcaggtaagggacatgagaactttcaaatttatggagataaagagtacccatttaatgattcagaagaagcaagtttgcaatag

SEQ ID NO: 311853 - DNA, 889 bp, Unknown
  Bacterial polypeptide expressing nucleotide sequence isolated from the Sargasso Sea
tagagttgctaatataaattttaacctcgctgctttcaccaatcttactcctgagcatctcgattatcatattacaattgaaaattatttccattcgaagatgaaattatttaagaatctagataaaaattctaaagcaattattaatataggagaccaatacggtaaaaagttagcaaaagaaacagacgcaactattgtttcatttttagatataaataattcatcaatattttttgaaactcttgatatttcaactcaagggataataggaaatatcaaagcagaaaatatcatttatagcatacaatctaaattattagggaactttaatagtgaaaacatattaactgccgtctcaatttgccatagtctaggtataaataaatctaaaattgaaaatggaataaaaagtgtttccttagtctctggtagaatggaatcataccaacttcgcactggtgtgctagcaatcattgattatgctcacacaccagatgcatacgaaaaagtattaaaaaccttacacgaactattaattaatggatctcaattatatgttgtttttggcgcaggtggagaaagagataagattaaacgcccgcttatgggtggtattgctgaaaaatattcttcgcattgttatgtcacgccagataaccctagaaaagaaaatattaaaaaaattaatgatgaaattattgaaggatttcaaaatcaaaatttcacaacctttcttgatcgtggaatgggtgttcgagaagctataaataatgccaagatgggtgacattgtagccatcttaggaaaaggaaaagaagaatatcaagaaattgatggaaagaaaatatattattctgatgttgaaatcatattggaatatctatga

SEQ ID NO: 311854 - DNA, 895 bp, Unknown
  Bacterial polypeptide expressing nucleotide sequence isolated from the Sargasso Sea
aatgcttcttaaagactacatacctaatcttaataaaataaataaaaaaatatttttctctggcatttctttcgatagctcaaaagtgaaaaaaaactttattttttttgcgatcaaaggaagtaactatgacggaaatgattttattaaagaagctataaaaaatggtgcaaaagttatagtttctgaggaaaaatttccaaaagaaaaaaatgatgtagtttatttaaaagtttcaaatgtacgtaaattactttcttccgttgcatataaaattattggaaaaaaacctaaaaaattagttgcagtcacaggcactaatgggaagacatcagttgcagatttttattatcaaatattaacggcaaataaaaaaaaagttgcagcaattggtacaattgggataaaatttaaaaatcaaaagaaaatttctaatactactactctggatccaattgaattaagtttagtacttaaaaatttaaaaaaaaatgaaattgactttgttattatggaagcctcaagtcatggattaaagcaacatcgattagacgggttgttgttcgacataggtatatttacaaatttttcacatgaccatttagattatcataaaaatattgataattatctgaattcaaaattatatttatttaaaaaattgataaaggaaaaaggtagtatcatttctgatacgaatattcctcaaaaaaatgaaattagaaaaatttcttttaagaataaattagatttaaaactcatctttaataagaaaagtggagtcgaattgatttcacataaatttgagaatgaaaaacaaattttagaaattaaattcagaagtcagaaatttaaattcaagttaaatttaataggcaaaatacaaattaagaat

SEQ ID NO: 311855 - DNA, 1403 bp, Unknown
  Bacterial polypeptide expressing nucleotide sequence isolated from the Sargasso Sea
tagaaagttattaaaaaaaaatggaaatattgttactgattattccattcctgaatttaaaaaaattaaaaaaatttctaaaatcaaaaaattaaaacttaatttaattttaagtgataaaaaagatttagggataaaagttgtttcacatatattcgatggggaaaaacaaatagttattttaaattataaaaaaaaaattttagaatttaaagtcaatttaattggaaagattcagattaaaaatgtattaatggctatattagccgccgaaaaaagtggtattaaaatttctaacattatcaaaaatctaaattatttaaaacctatcaacggtagattagaaaagattggtcaaatcaaaaataactcgaaagtgattttagattatgctcacacccctgaagctttaaaaactgttttagaaaatttgaaagaacaatttccaaataataagatttcaatagtatttggctgtggcggagatcgagatattaaaaagagatctaaaatgggaaaaattgcaaacatttattgtaatcaaatttatataacagatgataatccaagaaatgaaaatccaaacttaattagaaaagaaattaaaaaagaaataaaaaaaaaagatttatttgaaatcgctgatagaaaagaagctataaatagagctatctttaatcttaaaagttctgaaattttattaatagctggaaagggtcacgaaactactcaaacttataagaataaagttagatttttttctgatagagaagttattaaagtagcaataaaaaataaaaataaagatttatcaaataatattaaattaaacatcattaaagagatttcaaaatcaaagttatcgttaaaaaaaattaattttaataatgcagtaattaattcaagagatgtgaatagaaatgatattttttttactattaaaggaaaaaaaaatgatgctcacagatatttaagcgaggtatttagaagaaaagcatcaattgcaattgttgaaaaaatactaaagaaatcaaattatacaaaacaaataaaagtaaaagatactttgaatttcttaactaggtgtgcgacgactttgagagattctttagaaactaaatttatagcaatcacaggaagttgtgggaaaacatcacttaaagatatgttgggacttgttttaaacaaacattttaaaaccactttttcaaaaaaatcttttaataataaatatggggttcctttaagtttatttaatataaatcagagagataaatttggtgtattagaagttggaatggataaaaaaggagaaatagattttttgtcaaaaattattaaacctgatgtgggaatgataacaaatataagctttgcccatataaaaaattttaagaatattt

SEQ ID NO: 311856 - DNA, 1465 bp, Unknown
  Bacterial polypeptide expressing nucleotide sequence isolated from the Sargasso Sea
ttaaaattgcatgcattaaatgataataaaaataatctagagctcctatcccacaattttaaaggagaaggtcaatttctaagacttaaatcaaatagttcaatatgggatctaaatttaaatttaattggaaaaattcaattaaaaaatgttttgatggcaataattgcagcaaaaaatagcaatatcggcttagataaaattttaaatataattccaaaattgaaacctgttgaaggaagatttgaaaaaattggtaaaattaaaaatcaatctaaagtaattctagattatgcgcatacaccagatgctttaaaaacgtgtcttttaaatcttagagaacaatttcctaataaaaaaattacagtcttgttcggttgtggaggaaacagagatcaaaataaaagatcaaaaatgggaaaaatagctagtgattatgcagatagtattattcttacgaatgacaaccctagatttgaaaatcctcaacaaataagaagggacataaaaaaaggaattaaaaaaaaaaaaattaccgaaatatccaatagagcaatagcgataacgcaagctattcataatttgaattctgatgatattttgttagttgctggaaaaggtcatgaaaaaactcaagatataagaaataaaagaattttcttttcagatagaaaagtaattttaaatgcaattacaaacaaaaataaaaatttatcagataatttaaaattaaatgtaattagagaggtggctaaaatcaaaaaattgcccacttctatatctttaaatttagcaagaattaattctcaagaagtaagtaaaaatgatatattttttgctataaagggaaaaaaaaatgatggtaataaatatgttacacaatcattcaagagaaaagcatcgatagctgtagtaaacaaaattcaaaataaattaaataaaaatcgacaaattaaggttaaaaatactttaaaattcttaacagatatttccaaaacttttagaaaaagtattgacactaatataatagctatcacgggcagttgtggtaaaaccacacttaaagaattattaggcaatgttttaagtaaagtttcaaaagtaagtatttctccaaaatcttacaataataaatttggggttcctctgagtctttttaatttaaaacaaaatgacgaatttggaattttagaggttgggatggataaaaaaggtgaaattgattatttatctaaaattataaatccagatgttggcgtaataacaaatataaattatgcacatgctaaaaattttaaaaatattaatcaaattgctttggcaaaatctgaaattattaataacataaaatctcatggttttgttgtattgaatgcagatgataatttttttcaactacataaaaaaattgccaaagaaaagaaacttacagtaatctcatttggtattaaaaatcagaaagcaa

SEQ ID NO: 311857 - DNA, 877 bp, Unknown
  Bacterial polypeptide expressing nucleotide sequence isolated from the Sargasso Sea
aatgccaaatcactcccttctagaagaaattaaatcaaagaagataaaatttaatggagtctcatcagactcgagatcgataaaaaaaggaaatattttttttgcaatccctggaaatgaaatagatggatctaggttcataaatcaagcaattaaaaagggtgctgcagctattgttgttccatcatatagtaaaaaaagatatcccaagaatacgacagtgataaaggctaaagatattagaaaatcactatcgctattagcatttgaaataaacaaaaataatattgaaacaaaaattgcaataactggaactaatggaaaaacatctgttgcatattttttaagttatttactgagaatttcaggaaagagtgtagctactataggtactttaggaaattctgtattaaagagaaataaatataaccttacttcacccgaaccgattgatctttcaaagcaattaaaaaagataggtcaaaaaaaaataaaatatttagttatggaagcatcaagtcatggcttacatcaaagcagattttatggaatgaattttgatgtttgtgcattaacaaatatatcacatgatcaccttgattatcataaaactataaataattacataaaaagtaaaatgatccttttcaaagattatatacataaagatagtaaattaattattaattcaaaaacgaaatacattaaaaaaataagatcaattttaaaaaaaaataaatccgttaagccattatattttcaagaaaatagagattataaaattataaaaatcctcaaaaaaaatgatatgcaacatgtaaaagcaatagtgggcagtaagcaaattcatttaaagtttaaaaattttccaaatttt

SEQ ID NO: 311858 - DNA, 1468 bp, Unknown
  Bacterial polypeptide expressing nucleotide sequence isolated from the Sargasso Sea
gatgaatgaattagagcaaatatttggtacccaactccctaaaaatattaaaatctcaagtgttgtaaatacaactgataaagtaataaaagattctattttttttggattacaaggaacaagagtgcatggcagtaaatatgctgataaggcattagaacttggagcttcacttgttattcataacgatcctgatttcatttcaaagcataaaaatattttttacattaaagatcttcatgataagttagttgtgtttcttaatgcgttttacaacattgatattaatagcaacaacttttatgcatttacaggaacaaatggcaaaacatcagcagcttatttgacccatcaattacttcaaaaaatgaattacgattcagtatacattggtaccttaggcgtcaaatttaataaagaagaaattgatacctcattttcaaaaaaaacaacaccagatatttttgaattatttgaaattgttaattcaataaatggcaaaatggattctataaatgtgtgtatggaactctcttctcatgcgcttgatcaaaaaagaattgaaaagataaactggttttattctttatcaataatgaatatacgttcagatcacttagattatcatctaaatatagatgcctacatagattcaaaatttgaaattttcagactcaattcatcaaaaaaattaattgatgcagagcttttagatcattcgaaatcttatgattttattaataataatcattctttaattagtatcagtaacacaaataatttttcagacatattttttaacatcgaaaaactatctctaaacaaatgtattttttcaatacaaattaataatccatcagtatgcaagaaacatgaaaagcacaaaaaatacaaattttcctgcaaaatatttcctgaatataatatttctaatttggtttttgcaatatgctcaattggttttgatgaattcagtaagaacgaaattaatgatctgtcatatttaaaattaccaaaaggaagactagaacttattcaaaatatacctgcaaatataattattgattatgctcataatgaacactccttccatactgttttgtcatctctgaaagaattttttgaaaatttaattgtggtttatggttgcggtgggaatagagataaaagcaaaagatcaaaaatgttgagtattgcaacgaagcattgcactcaggtgatttttacaacagataattcaagaacagaaagctttaataatatacttgcagattcaaaaaaaggtaatgatcttgatcgagtcatttcaatcgaagatagaaaaaaagctatcattcatggcagcgagctaataaaggaaaaagactgtttagtcatattgggaaaaggccatgaagttacgcaagatattggaggagaaataaaacattttagtgatcatgaggtaatcaatgaaatttataaataa

SEQ ID NO: 311859 - DNA, 1301 bp, Unknown
  Bacterial polypeptide expressing nucleotide sequence isolated from the Sargasso Sea
tatgatagaaataaataaagtattaaatactattcttaatgaatctattgaactcccagaagtattagttcaaggccttgctaataattcctcaaaagtaaaaaaaggatacattttttttgcttttaaaggagaaaataatgatggaaatgactttattgaagatgcatttaaaaatggagcttgcttagcgattactgattcatataaagttgaatcacaaaaaaatgtaattaaagttgatgatgttagaactgcagctggcatcgcttgctcaaatttttacaattttccgcaaaacaaattaaggttgataggaattactggtacgaatggtaaaacatcaacatcaaccattttaaaaagcattttagatgctgaaaatgaaaagactttacaaattggaacaagcggaataaagccttctttagatatgaatcctggtctaactacgccagatatttttgatttgtatgaaatattaaatcatgcagttaatgaagattacaaaaatgttatcttagaggtttcttcacacgcattatcacaaagaagaatagaaaacattttttttgatataactgcatttacaaatcttacacttgatcatttagattatcataagacaatggatgaatatttcagtgaaaagcttaaactttttaatttaaataaagaaaatggctcttctgttttaatgattgatgatgaatatggtaagagaatagctgagttaaatccacatgccaaatgtatttctcttgaaacaaaagatgctgattatttttgtgaaatatatagcattaataatttaggaataacaggtactttaacatgggattccaaaactttagactttgaatctaagcttattggttcatttaatttagaaaacctgattcttgctgcaagcattgcaattgagctgaatatttcaaaacaatatatttctgaaggaattaaaaattgcacaaaaatagatggaagacttcatttggttgaaaataaaagcaatcaaatgatatttttagattatggacactctcctgatgcatacttaaaagtattaaaaactctaaaagataattttaatcatcctttgaaagttctttttggcgctggaggtggtagagataaatctaaaagaccaaaaatggcggaagtggttgaaaaatattctgcagaatgttatttagcacctgataatcctagatttgaagacattgaatcaataaatgatgatgtaataaatggattttctaatgaaaattatcattcttttaatgacagaaaagaagcgc

SEQ ID NO: 311860 - DNA, 1390 bp, Unknown
  Bacterial polypeptide expressing nucleotide sequence isolated from the Sargasso Sea
atgaaactaaaatccgaattaaatcaaatcaaaaattttatcatcaaaattactaggaaaaaaaataatttatataatcatcttgcttttactagtaaatcatcatgtaaaaataaaatattaattttaacgaatgtgaaaaataattatatatataattatattaatgaggctataaaaaaaaatataagagccgtcataactgataataaaatagatataagaaaagtaaataaagatattcctatattatactcaaaaaatttatctactaacttgaatatgcttcttgatgacatatactcattcccattacaaaataaaatattgattggtgtaacaggaacagacggtaaaacatcaactgtaaattatttagctcaatgcttatcaaacaaactaataaaaaaaagagttggtattatatcctcattgggaaatggtatttatccttcattaaagagcacatcttatactacaccaccatctcatattctttatgaaaactttaaagattttgataaaaaaaaagtagatattataataattgaatgttcctcgcacggattagatcagggaagactcaatggtattaattttaatacaagcatttttaccaatattacatctgaccatttagattatcacgttactaaaagtgagtatattaaagctaaactgaagctaatgaggcaaacgtctgagactatatatataaatgatgactgcatgacgcttaagaggattaaaaaaagaagaaatattcaattcattaaatatcatttcacagaaaaaaatcaaataagacttaaggataagatatatccaaaagatttaatattaaaatatttatgtaataattataatctcagtcaagaaatcttattggctacacttgaaaagttgaaaccaattaaaggtagatatacatatttatctaagcttaataaaaagattataattgattctgcacatacaccagcatcatttaaaaatatattaaaatatataaggtctgttgaagaatttaaaaaaaaatcactaaaattaattacagtttttggttgtggcggagagagagacaagacaaaacgaaaaaaaatgggagctatagctagtaaatattctgattatatatatctaacaaatgataacccaagacaagaagatcctatgaatattatttcacaaattacacaagggataatagacaaatccaatgtgactgttacattggatagaaagttagctattaaaaaagcactatctaaggctactaaaagacacttagtattaatttccgggaaaggtgatgaaaaatatattgaagaaatgtctaaaaaggttccacacaacgatataaaatatgtgaaaatgctactaagatgaa

SEQ ID NO: 311861 - DNA, 968 bp, Unknown
  Bacterial polypeptide expressing nucleotide sequence isolated from the Sargasso Sea
gatgagtaaattttcagatattttaggtatagacattcctaaaggcactaaaattttaagcgcaacaaactcaacaaaaaaaataaagaaagactcaattttttttggtttacaaggatcaaaaatacatggaagcaattatgcagaagaggcactaaatttgggagcatctatcgttgttcacaatgacgtaaatttcatatctcaaaatagcaaaattttttatataaaaaatcttgaaaataaaattatagatttccttaatgcgttatatgaaatcgatatcaatcataataatttttttacgttcactggcacaaacgggaaaacctcagctgcacacctctgccatcaattacttacaagcatggaatatgattccttatatgtaggtactatgggtattcaatataaaaataataaatttaatacttcattttcatcaaaaaccacaccagatatatttgaattatttgaaattatagattcttttaattttggcctagattcaatgagcatatgtatagaaatttcttctcacgcgcttgatcaaaaaagattaagtaatatttattggctcaattcagcttctatactaaatatttctaatgaccacttagattaccatgaaaatatatcgtcatatatagatacaaaatttgatatttttaaaataaagtcatctataaaattaattaatgatgattctaataagcttaaaaatcataattatgacctcagatgtataagcaataaaaataatttttctgatattttttatgaaataaaaaaaatttcattaactagatgcgaatttaatattttaattaacaaacccccacagggacaggagcaagaactaaagaaaaaatataaattttcctgccagatttttccaaaatttaatatttctaatctcgtttttgccatcacgtctattgggtttgataatttttttgaagactcaa

SEQ ID NO: 311862 - DNA, 789 bp, Unknown
  Bacterial polypeptide expressing nucleotide sequence isolated from the Sargasso Sea
aatgaactcaaacttcaaacatcaatcaattcaaaaacattttggagtaataattgaaaatgacaaggttataacaaacataactgatagcacagaaaatatttcaaaaggctcaattttttttgcaagagagggcatgtcatcgcatggtagtgactatattaatctagctcttaagaggggagctattttaataatttcctctaaagctattaacaataaaaaagtacattacgtacctgatcttgaaaatatactcgctggatttctttatgactattatgatattgaacagaagaaagtaaaattttttgggataactggcactaacggtaaaacatcaatagcatatttggctcataaaataactcaagatcacaaacaatcatctgcttatgtgggtacattgggatatataagtgaaaatttcagatcaaaaagtaacaatacaacaccatcaattttttttatttttgattgtatttctcagacaaaatacagtaatactttatatgtatatttggaactctcctcccacggattatctcaaagacgattaaataatctttgctttgagaaagtatgtatttgtaacattgcctcagaccatcttgattaccatgaaaatcatgaggcatacacaaagtcaaaactttcggcactgaaactttatgctcgaagagaaccacttattaatcatgaaataaccgaaaaaaatgcaatgaatgttaaccactattcaatatctgaaataaatgaaaatgcgactttttatgtaaatattgtaag

SEQ ID NO: 311863 - DNA, 862 bp, Unknown
  Bacterial polypeptide expressing nucleotide sequence isolated from the Sargasso Sea
tttgattatgcttccataataaatattcatagtgatcatcttgattatcatcaaacaattaaaaactatactgattcgaaactgttaatactaaaacaaagcaagaaagctattttgaattacgattcttccttaattatgaaaaataactttgataaattcagaaatgtaaagtatttttatttttcaaaatctaggcataataataagaatatcttatcaacgtgcaagaaagataataaaatatcttttcataatcaggaatttaaattagataaaaccaaaaaagattattttaatatttattctttacttatgatttgctctttattaaaactcgagaattatggtattaaagaaatcacctcatctatgagtgcactcaccaaattgcctggccgaaggcaagttatcaaaactaaaaataaaggcacttttattattgattatgcacacaccacacagtcttttagagatatttataaggaatttaaatcatatggtcacataactacactatttggatgtggaggagatcgtgatccatcaaaaagagctgacattgctaaaattgttgacaataattcgtcattttcaataataactgaagataattctcgtaacgaaaaactttcttcaatttttaacaatataatatctggtttcactgatactaaaaggtatgtcgttattaagtctcgaagagcagcaattaaatatctatttactaattcatcggaaaaacatattaattttatattgggcaaaggaaatgaaaattatcttattaagaataattcaaaagttaaacataatgatatcatctacttaaataacctaatcaataaaaatgaatcttaga

SEQ ID NO: 311864 - DNA, 429 bp, Unknown
  Bacterial polypeptide expressing nucleotide sequence isolated from the Sargasso Sea
caggtggaaaagtttacgttgattttgcacacacgcctgatgctcttaaaaattcaattgtagagtcaaaaaagttagagacatcaaacgtacatgttttatttggttgcggtggaaatagagatagaaaaaaaagaccgctaatgggtaaaatagcttcaaaatacgctgataaagcaacagtcacagatgataatccaagatatgaaaatccagcaaggattagagaggaagtgattggaaatttaaaaaatatatctgaaattggtaatagaaaactagctataaaaaaagctattagcgaattaaaaagaggcgatttgcttcttattgccggcaaaggtcacgaaaaatttcaatccatcatgggaaaaaaatttccttttgatgatgttaaaattgctgaaaaatatttacaaaaaaaatgaa

SEQ ID NO: 311865 - DNA, 1324 bp, Unknown
  Bacterial polypeptide expressing nucleotide sequence isolated from the Sargasso Sea
atgatagaaatagataaagtattaaatactattctaaatgaatctattgagctgcctaaagtattagttcagggtcttactaataattccttaaaagtaaaaaaaggatacattttttttgcttttgaaggagagaataatgatggaaatgacttcattgatgatgcatttaaaaacggagcttgcttagcgattaccgattctgataagttagaatctcaaaaaaatgtagttaaagttaaagatgtaagaattgcagcaggcattgcttgttcaaatttttacaattatcctcaaaataaagtaaagttgataggaattaccggtacgaatggtaaaacatctacatcaaccattttaaaaagcattttagatgcgaaaaatgaaaaaacgttacagataggcacaagtggaatacagccttcttttgagatcaatcctggactaactacaccagatatttttgatttgtatgaaatattaaatcatgcagttaatgaaaattacaaaaatgttatattggaggtttcttctcacgcattatcacaaagaagaatagaaaacattttttttgatataactgcatttacaaatcttacacttgatcatttggactatcataagacaatggatgaatattttagtgaaaaacttaaactttttaagttaaataaagataatggctcttctgttgtaataattgataatgaatatggtaagagaattactgagttaaattcaaatgtcaaatgtatttcttttaaaacggaagatgctgattatttttgcacatcatatagcattaatagtctaggaatagcaggtactttagcatgggactccaaaactttaaactttgaatcaaagcttattggttcatttaatttagaaaacctcattcttgctgcatctattgcaattgagcttaatatttcaagacaatctattatagaaggaattaaaaattgtgaaaatatagatggaagacttcatttggttaaaaataaaagcaatcaaatgatatttttagattatgcacattcacctgatgcatatttcaggacattaaaagctctaaaagaaaactttagtcgtcctttgaaagttctttttggtgctggaggcggtagagacaagtctaaaaggccaaaaatggctgaagttgttgaaaaatattctatagaatgttatctagcgcctgataatcctagatttgaagacattgaattaataaataatgatgtaatagaaggattttcttatgaaaatcatcatattttcaatgatagaaaagaagcgcttaaatttgctttaacaatttaaa

SEQ ID NO: 311866 - DNA, 872 bp, Unknown
  Bacterial polypeptide expressing nucleotide sequence isolated from the Sargasso Sea
aatgatttcattaaaagatataaaagaccatttatcttcagatgttattattaaaggggtgacatgcgatagtagaaaagttgagcccgggtatatttttgtagctattcaaggagaaataaatcgaggtgaagattttattgatgaagcaattaaaaaaggtgcaagcgttattgtaacttcttcagattctgatttaaaattagatattccagtcatcaaagatgaaaatccaagaagatatttatcctatatctcatcaattgtttttaataattcccctgagacagtttgtgcgattacgggaactaatggaaaaacatctactacaaattttttacaacaaatctggaatttgatgggattaaaatcatctagtattggtactttaggcattattggaaatgaagaaatacaagatacaaatattactactccagaccccgtcttactacataagacattggaaaaattatccaatcagagctttacacatttagctttagaggcctcaagccatggcttatcacagtaccgaattgataatgttaaaattagagcagcagggtttacaaatattagccaagaccatcttgattatcataacactatggaagaatattttgatgcaaagaaacgtctttttacagaaatacttcctaaagataattattccgttatttgcatcgatacagaagaaggcagagaattatcttcaattattaacgctagtggaaaaggtgtcatagaggttggtgagtcagcaaacgcacttaatctgagaaggttggttccaactgagttaggaatggaaatgatatttcaatatagtggtagacaattttctattcctcttaaggtgaaggtattca

SEQ ID NO: 311867 - DNA, 652 bp, Unknown
  Bacterial polypeptide expressing nucleotide sequence isolated from the Sargasso Sea
ataaaaaatattattataaaaaaaaatataactattgtagatgtatttattaaatcaaagttatacaaatttaaatttaaagactttccaatttttcagatcaaaaattttatattggctgctgtaggactatctctgattggatttgatgaaaaaaaaatgacaagattttcaataaaatgtccgcatgtaactggaagaatggagttggcaggaaaaaaaaagaatggagcaagagtttatatagattttgctcatacgcccgatgcattaaagaatgtgctacttgaggcaaaattaatatgtaagggtcaactagttgttttatttggctgtggaggaaacagagataaaaaaaagagaccaattatgggtaatattgcagaaagatttgcagatataggcatcgtgaccgatgataatccaagagatgagaatgctgacaaaattcgacaagaaattttgaaaaattctcaaaaattaattaatttgaaaaaccgtagaacagctataaaaaaatctataagtctacttaaatgtgaggatatattaataattgcgggtaaggggcatgaaaaatatcaaataataaaagataaaagactgccatttgatgatttaaaaattgctaagagtttcttaacaagatgaa

SEQ ID NO: 311868 - DNA, 1123 bp, Unknown
  Bacterial polypeptide expressing nucleotide sequence isolated from the Sargasso Sea
tcaacttttaattaataagggtcttaattctatatatgttggtacactaggcactcaactaaataataaaaattttaatacctcattttcatcaaagaccactccagacatatttgaattatttgagatactcaatttttataaggattatattggtaattcaataaatgtctgtatagagatatcttctcatgctcttgatcagaaaaggttgaaggatattaatgattttcactcagctgccctgttaaatataacgagtgatcatttagattatcataaagattttgaatcttatagggattcaaaatttgaaatattcagaaataattcatttatcaaaattatcgatgaagatttaattattcataaagataatttcagttttataaaagatgatcaaaatgatttgaggtctataagtagtatcaataatttttcagatattttttttgaagtcgaagaaaaatcattagaagaatctttatttacaatatatataaataatccacctaatgcatatgctggtgaatcaaaaagaaaatatagattcttttgtaagttgttccctgaatttaatattagtaacttagtttttgcaatatgttcaataggatttgattcattttcagaagaaatcattaacgatttatcatttttaatactaccaaaaggaagggccgagcttattaagaatattccacgaaatataattattgattatgctcataatgaaaaggctatggattattttttatttcaaataaagagttattttgatgatttaatagtggtatttggctgcgggggagatagagataaatctaaaagacctttaatgctaaaggtagctttaatgcattcatcatcagtaatttttacttctgataattcaagaaatgagaattttgatagtatttttgcagatgcatctaaaaataattctgtagataatattattaaaataaaaaataggaaagaagcaataaagcatggcgtttcattattagagaaaaatgactgtatgattatttttgggaaaggacatgaagaaacgcaggaagaaaatggaaaaattatattttttagtgaccatgaggtagttaatgaaatttataaataa

SEQ ID NO: 311869 - DNA, 721 bp, Unknown
  Bacterial polypeptide expressing nucleotide sequence isolated from the Sargasso Sea
atgcttctaggaaactattttcataacataaaaaaaaattatagaaatttttctttttcaggaatttcatttgacacgaagagtattaaaaaaaataatattttttttgcaatcaaaggaaataccattgatggtaataaatttattcctaaagcaattaaaaaaggatctaaaattattgtaaccgaaagaaaaacaaatccattccaaaatggaattttgtatattcatacaaataatgtaagaaaattattagctgaaactacttttaaaatttataataaaaaaccaaaaaatttaattgcagttactggtacaaacggaaaatcatcagttgcagatttttattatcaaatattacaattaaataataaaaaaggtgcttcaattggcacattaggtgttaaatcaaaaagtattaatttaaatttatctaatactacaatagatccaataaaattggctaaaatattaagcaagttaaaaaatcaaaaaatagaaaatgtaattatggaagcctcaagccatggtttaaagcaaaatagattagatggcttaaagtttaattcaggtatatttaccaatctatcccaggatcatcttgattatcataaaaatttaaaaaactatttaaatgctaaactttatttatttgaaaacctaatcttaaaaagaggcaatgtaatcacagatcaattaatacctgagtttaaaacataaa

SEQ ID NO: 311870 - DNA, 907 bp, Unknown
  Bacterial polypeptide expressing nucleotide sequence isolated from the Sargasso Sea
atgccagaattagtaagatctactaattttaaaaattgtaaaatttctagccttcacctagatagcagagaggtaaagaaaggaggtgtattttttgcaatcaaaggcaaaaacctaagtggaattgattttattgaagaagcaaaatctaaaggcgctgaattaatcatctcggaggaattagtcaaagataaggaggtaatacattgcagtgatcttaaacaattgttaggaaaattttcaacaaggttttactcctctcctagtaagcaattaacaactttttgtgcgactgggactaatggaaagacaacttctgtagaggcttattcaaaaatctgcaaaaatctgggcaaacaatgtggctatttaagcaccattggtaaatcggtagatggtaaaaaagttaatgaaccttatcttttaacaactccagaccctatttctttaaataaaagtttctctgagatgttatcaaaaggaactactcatgctgcattcgaagcttcttctcatggcttagaccagggtagattatctgggatagacatagattatgctgtactgactagtttttctcaggatcacctcgattatcataaatctatagaagaatatggaaatgcaaaaaggttactatttaaagagcttaaacctaggaactcatttattcagattgatagtgaatttggaaaaaatctttatgaaaatcttctaaaagatggagctgaagttttcagtgtatctttaaaagaagaatcagacttttacgcttcattccggaagaataatgattctttagaagttaactttaagtcgccgtatggatcatttgaattttctttgggaactatttcaaggtatatagcgtcaaatgttatatgctcgttggcagcactttgcgttg

SEQ ID NO: 311871 - DNA, 1959 bp, Unknown
  Bacterial polypeptide expressing nucleotide sequence isolated from the Sargasso Sea
taaaaaatgttttgatggcaataattgcagcaaaatatagcagtattagtttagataaaattttaaatacaattccaaaattaaaaccaattgagggaaggtttgaaaaaatcggtaaaattaaaaatcattcaaaagtaattcttgattatgctcatacgcctgatgctctaaaaacttgtcttttaaatcttagagaacaatttcctaataaaacaatcacagttctatttggctgtgggggaaatagggatcaaaataaaagaccaaaaatgggtaaaatagctagtgattttgcagatactatcattcttacaaatgataatcctagatttgaaaatcctcaaaaaataagaagagatataaaaaagggaattaaaaaaaagagaattattgaaatatctaatagagcaatagcaataacacaaggtgtttataatttgaattcaggtgatattttgttagttgctggaaaaggccatgagaaaacacaagatattggaaataagaaaattttcttttctgatagaaaggtaattttaaatgctattaagcataaaaataataatttatcagataatttaaaattaaatgtagttaaagaggcagctaaaattaaaaaattgtctgcttccatatctttaaaaacagcaagaattaattctcaagaagttactaaaaatgatattttttttgctattagaggaaaaaaaaatgatggtaatagatttgtttctcagtcattcaatagaaaagcgtcgttagctgtagtaaataaaattcaaaataaattaaataaaagtcgacagattaaagtaaaaaatactttagaattcttaacagatatttcaaagacttttagaaaaagtattgatacaaatattatagctattaccggtagttgtggcaaaactacgcttaaagaattgctgggcaatgtattaagtaaaattacgaaagtaagtatttcaccaaaatcttataacaataaatttggagttcctttgagtctttttaatttaaaacaaaatgatgaatttggaattttagaagttggaatggataaaagaggagaaattgattatttgtcaaaaattatagaaccagatgttggagtaataacaaatataaattatgcacatgctaaaaattttaaaaatataaaacaaattgctatggcaaaatctgaaattattaacaacattaaacctaatggttatactgtattgaatgcagatgacagcttttttcaattacataaaaaaattgccatagaaaataaaattaaagtagtttcttttggtattaaaagtcagaaatcagacattaaattaattaatataaaggcctttggaaaaaattttagaattaatattagattaaataataaaaaaaagtattttgtattatctaacgattttcaaaacaatatatacaatacactttctgctttagcagttatcagtatttataaaaatatatttaaacttaatgaaaatatttttcttaattttaaaattcctgaaggaagaggagatcattctgtagtaaaaattgataataaaaaaattaatttaattgatcaaagttataattcaaatcctctatcattaaaatcagcaataaaaaattttgataaaataaattcaaaaaaatcaaataaatatctactaattggtgatatgttggagctcgggagtcattctaaaaaacttcatcaatctattgctccaataattaatcaaactaagatagacaaggtatttgttaaaggtaaaatggcatctataatatttgcaggtatttcaaaagccaaaaaaggcaaggttttattaaacaattctcaaattattgaattgattagaaaagatttaaataataatgattatttaatgattaaagcctcacttgcgacaggattcaatgaaatagtgaaagatctgaaaggattgcattaat

SEQ ID NO: 311872 - DNA, 1381 bp, Unknown
  Bacterial polypeptide expressing nucleotide sequence isolated from the Sargasso Sea
atgaattttgaaaagagaaattttgtttctaattcaaaatatataaaagatgacgatattttcatttcattaaacaatggaattaaatatctaagccaagaagatattaataaactttctttaattttaatagacagcaagtttaaacaaaaagatgatttaaaaatcttaaaaatagacaatcttgaagaaaattatcttagttgggttgatgaaatctatgatatacaacaatcagccttcaaaaatttttttgtaactggaacaaatggaaaaagcacaacaatagagctgcttagtcaggccttttcttttaattccattcctaattcgacaataggcactcttggaacatatttgaatggcaacaaatatttcagcaatagtttaacaacagaggagccattatttgtgagatcagtaatgcgcaaatgcttagaaaataatattaagaatatctttatagaggcatcatcaataggcctggatcagaatagacttaaaggtttggctgttgagcatgcagcattaaccaatatctcaagagatcatcttgattatcataaaaattttgatgagtacttagcggcaaaattaaaattagctgaaaaaagcagtttaaaaactctatcttataatctagatgaaaagcatttttcaaatatagaaaatgtatttaagggtgaaaaaatatactcagtttctagcaaaaatgagaaggctgatatttactttgaaataaaagaatttcatcaagatggcagaataaattttttagcaaaaacaccatggggccaatttaattcaagccctaagctgcatgcagaatacaatatctataatttgcttctttcattaccttactatcattcagtaacttcaaattgtgcaggattcttctctgctgtagaagaaatgacattgcccagcggaagacttcaaaaaatttctaatgaaaatatatttattgattttgctcacacaccagatgctcttgaagcagtttgctctgaactcaagaaaaaaaaccataaaggattaaaattagtttttggtgctggaggagatagagatcaaggtaaaagagagctaatgggaaatgtcgctcaaaaatatgcaaaaaaggtttacattacatctgataatccaagatttgagaaacccgaagaaattatagagatgattgtggcaggaataagcgataaagataaagtaattattgaacctgatagagcagaagcaattagtatggcaattagcgaattaaataaagatgaaattcttctgataacaggaaaaggtcatgaagaatatcagataatagaaaatgagaagaaaccattttcagattatgaagagattttaaaatgtataaagtaga

SEQ ID NO: 311873 - DNA, 1450 bp, Unknown
  Bacterial polypeptide expressing nucleotide sequence isolated from the Sargasso Sea
tttgaatattaaatttccagataattgtaatatttcaaatattactaataactcaaaaaaagtaaaaaaagattcagttttttttggactttgcggtaaaaataaccatgggagcaagtattctctcgaggcattaaaacttggagcttcatttgtagttcatgatgatgaaagatttcaagtcaaaaatagtaacgtcttttttgtaagaaacttagaaaataaaattattcaatttcttaattcattttataaaattgatataaacaataataatttttttactttcacaggaacaaatggtaaaacatcttcagcattcctatgccatcaattattattaaatatgggatatgaatcaatttacattggaactattggtgttaagcataataatagtaatttagaaacatcattttcttcaaaaacaacacccgatatttttgaattatttgaaataataaattctgtggagtggtcagatgaatcattaaatatatgtattgaagtttcatctcatgcacttgatcaaaaaagactaaaaggcgtaaattggtttaattcatcatcattaatgaacattaaagacgatcaccttgattatcataaggatatttcttcatatagagatgcaaaatttagtatatttaagacaaattcgccagtaaaacttattcatgagaatatatcagatttcagtagggattatgaatttgttaataattcagatagtcagctaatctctataagcaataaaaataatttcgctgatatatattttaagattaaaacaatatcaattaattcatctgaattttatattcttattaacaatcctcctcacacccaagaacatgagaaaggaaaaaaatatcatttcaaatgtaatctttttccagaatttaatatcaccaatcttgtttttacaatttgttcaatcgggtttgataatttttctgagcatactgtaaatgatttatcttttctaaatctccctaaaggtaggacagaatttataaagaatattcctgataatattgttattgactatgctcataatgaagaggcaattgaatttattttaaaatctcttagtaattattttgataatttagtcgtagtttttggctgtggtggaaatagagataaaaacaaaagatcaaaaatgttgagaagcgcaattgaaaattcgactaatgtcatatttacctctgataacctaagaaatgaaacatttgaagacatttttattgatgccaaaggagataataaattagattcagtaatcgcaattgaggatagaagagaagctataattcaaggcactaaaatgattaaaaataatgattgtttggttgttttaggtaaaggacatgaaaactttcaagagacaaatagtaattttataaaatttagtgatcacgaggtcataaatgaaatttatagctaa

SEQ ID NO: 311874 - DNA, 817 bp, Unknown
  Bacterial polypeptide expressing nucleotide sequence isolated from the Sargasso Sea
atgttacttaaagattattatcctaaactgaataaaaaatttataaaagtaaagtttaatggaatagcttttgagtcaagtaatattaaaaataattatattttttttgcaataaaaggaaataatcttgatggaaataaatttatcaaagaagctattaaaaaaggatcaaaaataataatttctgaaaaagttaaagaagaatttaaaaataatattttatatttaaataataaaaaccctagaaaacttcttgctgaatttgctgtaaaaatcaacaacaaatgtccaaacaacttggttgctgttactggtacaaatggtaaatcatctattgcaaatttctattatcaaattttaaaactaaataaaaaaaaagttgcatctattggaactcttggaattagtggaattagttacaaaaaaaatatttttaatactacatacgatccaattgaattaaataaaattttcagaattttaaaaaagaaaaaaattaacaatgttattttagaagcatcaagtcatggactaaaacaatgtagattggatggtttaaaatttaatttaggaatttttactaatttgagtagagatcatttggattatcataaaacgtttaaagattattttaattcgaaattgattttattaaaaagattaatgaaaaaaaaatcaagaataatttttgatgaagatttaaaaatctcgaaaaaaattaaaagaatttcaaaaattaaaaagttaaagactctaagtttagaatcaaataatgctgatttaaaaattattgaacataaatttataaactcaaaac

SEQ ID NO: 311875 - DNA, 1369 bp, Unknown
  Bacterial polypeptide expressing nucleotide sequence isolated from the Sargasso Sea
taatttaagaaaaataagtatagtttttggttgtggaggagaaagggataaaccaaaaagaagaattatgggaaaaattgcaaataaatattgtgataaaatttatttaacagatgacaaccccagaagtgaaaatccagacaagataagagaagaagttaaagttaatattttaaaaagtaaattaattgaaattccatcaagaaattttgcaataaaaaaagcaatttttgatggaaaatccaatgaaatcgtagttgtagctggtagggggcatgagctctttcaggaatataaatcaaaaaaatacttttcggatagagattgtatagttaaagcaataaataaaaaaaataatcaattaaacaaaagttggaagagcaatattgttggagaaattttaggtaaaaaattgaaagataatattataataaataatgcaactattagctccaaaaaaataaaaaaaaataatattttttttggtatcaagggtaaaaaaattgatggaaataaatttgcagactatgcaataaaaagaggagcctctttatcaattattgataaaaactatggaaaaagaaataaaaaaaaaataaaagtaaaaaattcattaaattttttttcgcaatgcgcttctcaaataagaatatcctctaatatttcatccatagctataacgggttcatcaggtaaaacatctttaaaagaaatgttaggaagattgttaaataaaatttataaaacaacatactctaatcgctcctataataataagtatggagttccaatctcattatttaatattgataaaagagataagtttggagtttttgaggttggcatggatagaagtggtgaaatagattatctcacaaaaattataaaaccaaatgttggagtgattacgaatatatcatatgcacatattaaaaattttaagaatttaaatggtattgctaaagctaaatcagaaattattaataatattgttaaaaatggaactttagtaattaatgcagacgatcaattttttgattatttaaaattaaaagctttaaaaaaaaatttaaaagtgatctcttttggtacaaaaaataaagcagatatagtcttaaaaaaaataataaaattaaagaaaaaaacttatatttttattaattttaacggaaaagaaaaaaagtttttaattgatagaaatttagagatttatagagataatgtaatggcctcattggctgtaatttcaaattattttgatttagaaaatttaaatgtgaaattctttaatgattatattacacccgaaggaagaggcgaccaaagtattataaaaattaaaaagaaaaaaattaaccttattgatgaa

SEQ ID NO: 311876 - DNA, 943 bp, Unknown
  Bacterial polypeptide expressing nucleotide sequence isolated from the Sargasso Sea
tttggaagtatcatctcatgcgcttgatcaaaataggcttgatggcattcaatggctcaattctgcatcaatattaaatattggtgaagatcatttggattaccataaggatatttcttcttatagagattcaaaatttagtatttttaaaatgaattcgccaataaaacttgttattgatgaatctaataattttgtgaaagactatgattttttaaacgaaacaaacttaacatatataagtagtaaaaataatttttctgatatttattataaaatcacaaaagctaattttaaaaattgcgaatttaaaatatttctaaataacccaccaagcgggcaagaaattcataaaaataagaaatataaatttaaatgcgctcttttcccagagtttaatatcaccaatcttgtatttgcaatttcttcaataggatttgatgaattctctgataagtatgttaatgatctatctttcatcaagttaccaaaaggcaggactgaggttataaataatatttctaaaaatataatcatagactatgctcataatgctcactcatttgaagtgctattattttcaatcaaaaaatatttcgataatttaattttagtttttggttttggaggcgagagagacaaatctaaacgagcaaagatgttaaaaattgctttagaaaattcatctaaaatttttttaacatcagacaattccaggagtgagaaatttgaaaatattataaaagatgccatgaaagggaataatcagagaagtataacaatcatagaagatagaaaagaggcaataatcaatgcaaataaatttttggataaaaatagttgtttgttaattcttggtaagggacatgaacaaactcaagaaattgatggaaaaatttatcattttagtgatcatgaggtagttgatgaaatttataactaa

SEQ ID NO: 311877 - DNA, 334 bp, Unknown
  Bacterial polypeptide expressing nucleotide sequence isolated from the Sargasso Sea
gttttatttggttgcggtggaaatagagatagaaaaaaaagaccgcttatgggtaaaatagcttcaaaatacgctgataaagcaacagtcacagatgataatccaagatatgaaaatccagcaaggattagagaggaagtgattggaaatttaaaaaacttatctgaaattggtgatagaaaactagccataaaaaaagctattagcgaattaaagagaggcgatttgcttcttattgccggtaaaggtcacgaaaaatttcaatccgtaatgggaaaaaatttaccttttgatgatgttaaaattgccaaaaaatatttactaaaaaaatgaa

SEQ ID NO: 311878 - DNA, 909 bp, Unknown
  Bacterial polypeptide expressing nucleotide sequence isolated from the Sargasso Sea
aacattgaattaaatctaataggcaaaatccagattaaaaatctattaatggcaatgattgctgcagaaaaaagtaatattagatttaaaaatattataaaaattattagcaaagtaaaatcagttagtgggagatttgaaagaattggaaaaattattaacaattctaaagttattttagattatgctcatacaccagatgcacttaaaacatgtcttcaaaatttaaaagatcaatttaaaaataataaaatttctattgtttttggatgtggtggagacagagataaatttaaaagacctttaatgggtaaaattgtaaataaattttgtaataaagtttatttaactgatgacaacccaagaaaagaaaatccaataaaaataagaacaagcattaaaagaaaaattaataaatcaaaactttatgaaatacccagtagagaaaaagcaattaaagaagcaattaaaaatttattaacgggagaaattttagttgtagcaggaaagggacatgaaaatattcaagattacggaaattttaaaaattttttttcagataaaaaatgcattttaaaaaatattaaacaaaaaaataagtatttatcaaaagatataaaattaaatattttaaaagaagaaagtggtcaaaatcatatttcgttaaaaacaaacttgaagaatgcatcaattaactcaaaagaaataaaaaaaaatgatatttttttcgcaattaaaggaaaaaaaaaagatggtaatcaatatttaagtgaagtttttaacaaaaaagcatcgctagcaatagtgcacaaaattaacaaattagaaaaaaaatctaaacaaataaaagtaaaaaataccttggattttttaacaaaaacttcaagtaaagtccgagaaaactcgtca

SEQ ID NO: 311879 - DNA, 967 bp, Unknown
  Bacterial polypeptide expressing nucleotide sequence isolated from the Sargasso Sea
gtaattatggaagcctcaagccatggtttaaagcaaaataggttagatggtttaaagtttaattcaggtatatttactaatctatcccaggatcatcttgattatcataaaaatttaaaaaactatttaaatgcaaaactttatttatttgaaaacctaatcgcaaaaagaggaaatgtaattacagatcaactaatacctgagtttaaaaacataaaaaaaattgcaattaataagaaattaaaattgcatacattaaatgataagaaaaataatctagagcttatatctcataattttaaaggagagggtcaatttcttagaattaaattatataactcaataagggatataaatttaaatttaattggaaaaatacaattaaaaaatgttttgatggcaataattgcagcaaaatatagcggtattagtttagataaaattttaaatacgattccaaaattaaaaccagttgagggaaggtttgaaaaaattggtaaaattaaaaatcaatcaaaagtaattcttgattatgctcatacgcctgatgctttaaaaacatgtctattaaatcttagagaacaatttcctaataaaacaattacagttctattcggttgtggtggaaatagggatcaaaataaaagatcaaaaatggggaaaattgctagtgattttgcagatagcataattcttacaaatgataatcctagatttgaaaatcctcaaaaaataagaagagatataaaaaagggaattaaaaaaaagaggattaccgaaatatctaatagagcaatagcaataactcaagctattcataatttgaattcaggagagattttattagttgctggaaaaggccatgagaaaactcaagatattggaaataagaaaattttcttttcagataggaaagtaattctaaatgctattaagaataaaaatgataatttatcagataatctaa

SEQ ID NO: 311880 - DNA, 562 bp, Unknown
  Bacterial polypeptide expressing nucleotide sequence isolated from the Sargasso Sea
tttgtataaacttaatttctctttaaaagatttatcaagattaataaaatctttccctggtactcctgggagaatggagaaaattgatatcgaaaataatgatgtttcagcattactaccaaatgtaattgttgactatgctcatacacctgatggtttaaagaaagttttgaaatcaattaaaaaactttgtgaaggaaaacttataactgtttttggatgtggtggagatcgagattctagtaaaaggcctttaatgggatcaatagctgaagagttttctgattacgttttcattacatcagataatccaagatcagaagaccctgaaaaaatagtaagtgagattttaaagggtattgaaaaaagagatcaaataaaaattgaaattgacagatttatagcaataaaggaatctattgaatttgcaaaaaaagaagatattattttaatcgcaggcaaagggcatgaggactatcaaattcttaatgataaaataattgattttgatgatagaaaaattgcttataaatttttagaagaaaaaagtaaatccaaataa

SEQ ID NO: 311881 - DNA, 844 bp, Unknown
  Bacterial polypeptide expressing nucleotide sequence isolated from the Sargasso Sea
ttggaaagtcttaatttagattacttaaaaagtatagatatagattattcaaaagttgtgaaccatacatttgatgtagttgaaggttctatattgtgtatagatcatgatgataataataagttaaatgaatatatttcatcatcattaaataaaaatccaaagtttgtaattacaagtaataaatgcgatattcaagatgaaaaagttttaagatttaaagattatgagagtatatttaattatattcttgaagggataagtacaaattacaaaagtcttaattattttggaataactggaactaatgggaaaacaacaacagctttttacttaaatcaactcattggttcagataatttattcattggatctatagatgagaaacaaaaatattcatttactaatgagaaaattcttacaactccaaaattatttaatgttgttaagctaatttcgcttcaaaaggaaaatattagttcagtatcacttgaagtttcttcacacgccctggatcaaaacaggctaggggatttaaaatttcttgtatctggttttacaaatttaagccaggatcatttagattatcatggttcaattgaaaattacatgaattctaaggcaaaattatttcaaaaaggtgtttctgaaaaatttgtttatattgattctcctgaaagcgctcaaattgtaaatgcttctaatatcgagtcatttagcattggtacaaatgaaaataatgatgttatatataaagaaattgatgaaaagatcttaaaatttacaattgacagtaatcaagtcgagtgtcagcttcatttatcggggccaaaaatttattgaa

SEQ ID NO: 311882 - DNA, 926 bp, Unknown
  Bacterial polypeptide expressing nucleotide sequence isolated from the Sargasso Sea
tgctgttgaggcagaatctgaattcgcgatattagaggtaagttctcattctattgctcaaaacaggatatcaggatgcgaatttgaggcggctatatttactaatttaactcaagatcatcttgattatcactcagatatggaatcatattttcaaacaaaaagaaaattatttttcccaccttacttaaaagaaaaagatgggatttgtgtattaaatcatgatgaccattggatatctaaattatcatctgatcttgaaaaaagatctttattagtctctacaaagattactgaaagtgaatttgaaaatgatgatttttttttcgtaacagataaaaaatttactgaaagtggttccacctgtatttttcatacacctagggaaaaaattcaactttttattccacttgttggtgaatttaatttaatgaatgcgattcaagcaataacaattttgtataaacttaatttttctttaaaagatttatcaaagttaatacaatctttccctggtgctcctgggagaatggagaaaatacaaattgataataatgacgttttaagatctcttccaacagtaattgttgattatgcccacactcctgatggattaaaaaaagttttgcaatcaattaaaaaactttgtgaagggaaactaataactgtttttggctgtggcggagatcgtgatcgtagtaaaaggcctttaatgggatcaatagctgaagagttgtctgatcaactttttataacttcagataatccaagatcagaagaaccccaaaagatagtaaatgatattttgatgggtataaaaaaaagagaaaaaataacaattgaaattgatagatttaaagcaataaatgaatctattaaatttgccaataaaaaagatattgtttttaattgcaggaaaaggacat

SEQ ID NO: 311883 - DNA, 859 bp, Unknown
  Bacterial polypeptide expressing nucleotide sequence isolated from the Sargasso Sea
atgagatcagtaaaattacataaacttttagatttggtaggaattattccttcattagatttaatcgatcatgaaataaataatatttcttttaactctaaagaagtacaaaaaggaactttatttttaggtatgcctggtttaaatgttgatggaggaaaatattgtattgaggcaattgaaaatggtgcagaggctgccattattggttctgctgcaaaagagaaaattggatctattgatcgagaaaggattttggttatagaggataatttagattatatttttggtcaaatagtcgctgagttttggaataggccttcaagaaaacttaaacttattggtgttacaggtacaaatggaaaaacgacaattacttttttattggaatatcttttaaaaaaattagggaaaaagactgcattatttggcaccttgctcaatagatggcctggcttttcagaagtggctcttcatacaactgatttcgccgataaactccaaaagaaattaaatgctgctgttgaggcagaatctgaattcgcgatattagaggtaagttctcattctattgctcaaaacaggatatcaggatgcgaatttgaggcggctatttttactaatttaactcaagatcatcttgattatcactcagatatggaatcatattttcaaacaaaaagaaaattatttttcccaccttacttaaaagaaaaagatgggatttgtgtattaaatcatgatgaccattggatatctaaattatcatctgatcttgaaaaaagatctttattagtctctacaaagattactgaaagtgaatttgaaaatgatgatttttttttcgtaacagataaaa

SEQ ID NO: 311884 - DNA, 838 bp, Unknown
  Bacterial polypeptide expressing nucleotide sequence isolated from the Sargasso Sea
aataaaaacttaaaatccctgactattggaaaaaaaaattctaatttaataataaagaaacacgaatattttggaaatcatcaaatggtagaacttgaatttaataaaaaaaaatactcttttactacaaatttgattggtaaaattcaggttaaaaatcttttgttttcgattttagcagcaagtagaactaagattaaatttaacaaaatcattgagaccataaaaaatataaaacctgtagaaggaagactggaaattgttggtaatattaaaaacaattccaaagtcatattagactatgctcatacacctgatgcattaaaatatactttagaaagtataaaagaacagtttgcccaaagttctatatcaatagtttttggttgtggaggagatagagacaaaaacaaaagatctataatgggtaaaattgctaaccagtattgtaataagatatttttaacagatgataatccgagatatgaaaatcctaaaaaaattagaaatcagataaaaacaaaaataactagatccaagctagttgaaattccttctagaaaaaaagcaataagagtagggatagaaaacttaaaatcaggggatatattattagttgcaggaaaaggacatgaaatttatcaagagtacaagggtaaaaaaaaatttttttctgataaaaaaaatattttaaaagaaataaattctaaaaatataaaattgttcagaaattggaaagcaaatatattaaatgaaaaatgcaacttaagtttgataaataaaaaactaaaaataaataaagcttcaataaattcaaaaaatataaaaaaaaatgaca

SEQ ID NO: 311885 - DNA, 979 bp, Unknown
  Bacterial polypeptide expressing nucleotide sequence isolated from the Sargasso Sea
gaattaaatgctgctgttgaggcagaatctgaattcgcgatattagaggtaagttctcattctattgctcaaaagaggatatcaggatgcgaatttgaggcggctatttttactaatttaactcaagatcatcttgattatcactcagatatggaatcttattttcaaacaaaaagaaaattgtttttcccaccttatttaatagaaaaggatggaatttctgtattaaatcacgatgaccattggatatctaaattatcgtctgatcttgaaaaaagatcttcattagtgtctacaaagattactgaaagtgaatttgaaaatgatgatttttttttcgtaacagataaaaaatttactgaaagtggttccacttgtatttttcatacacctagggaaaaaattcaactttttgttccacttgttggtgaatttaatttaatgaatgcgattcaagcaataacaattttgtataaactgaatttttctttaaaagatttatcaaagttaatacaatctttccctggtgcacctgggagaatggagaaaatacaaattgatgataatgacgtttcaagatctcttccaacagtaattgttgattatgcccacactcctgatggattaaaaaaagttttgcaatcaattaaaaaactttgtgaagggaaactaataactgtttttggctgtggcggagatcgtgatcgtagtaaaaggcctttgatgggatcaatagctgaagagttgtctgatcaactttttataacttcagataatccaagatcagaagaaccccaaaagatagtaaatgatattttgatgggtataaaaaaaagagaaaaaacaacaattgaaattgatagatttaaagcaataaatgaatctattaaatttgccaataaaaaagatattgttttaattgcaggaaaaggacatgaagactaccaaattctcaatgataaagttattaatttttgat

SEQ ID NO: 311886 - DNA, 883 bp, Unknown
  Bacterial polypeptide expressing nucleotide sequence isolated from the Sargasso Sea
gaggccatcaaaagaggcgcaaaagccgttatttcagataaacgatcttcaaatagaaaaataatattttgcaaaaataaaaatattaaagccacactagtaaatgcatgtagaaaattttataacgatcaacctaaaaatatcatagcagtaaccggaacgaatggaaaaagttcagtcgtagattattttcgtcaattattatgtttaaataaaaaaaaagtagctaccatcggaacacttggaatgtatttaaattataaaaagactaaatcgattttaacaactccagacttagtttctcttcataaatttatgagagatattaaaagaaaaaaaatagatattgttatgttagaggcttccagccatggtttacatcaaggcaggcttgatggattgaatttaaaagctggagtattcactaatctgagccaagatcatttagattatcacataacaaaaaaaaactatttaaaagccaaacttttactatttagaaaatatttgaaaaaaggtaatttttccatcctatcaaatcaagttcctgaatttaacaaaataaaacaaatttcaataagaagaaaattaaaaataattcaaacaaataaaatttataaaaaattaacaaattcaaaattaaaaaattttgaggcaaaatttcaattagagaatttatcaaaagctattgcagctgcaaaaatttgtggacttaaagaaagaaacattatttttgctttaaaaaaaatgactcaaattccaggtagactggagttagtgaaaaaaattaataatatcaaaatttttgtagattatgcccatacacctgatgctttagaaaaggtcttaaataacttaattgaagataataagagaaacataa

SEQ ID NO: 311887 - DNA, 886 bp, Unknown
  Bacterial polypeptide expressing nucleotide sequence isolated from the Sargasso Sea
atgggcaccttggccaatcgctggccaggccatagccgcaccgctattcacaccacgccatttgctgatcaactgcaagctgatttggctgcagcgaaggctgccggttgccgcttggtggcgatggaggtgagctcccatgcgttggaccaggcgcgggtggctggctgcagcttttccggtgcggtgtttaccaacctcagccaggaccacctcgactatcacgccacgctcgaggactacttcgaagccaaggcgctgctgtttgcctcgccttatctcaaaggccaggcggtggtgaacaccgatgatctgcatggccgcaggctggcgcagcgtctaggtgatcagtgctggcgcagttcgctggaggattccagcgctgagctgttcatggatggcttgcagttcagcgcctcaggtgtgcagggcgtcttgcatggcccggctggtagctacccgttccagtcgcctctggtgggccgctttaatttgatgaatctgctgcaagcggtgggagtgctgttgcagagcggcctggcttgtggagagcttcttgaggcccttggcactttcaacggggtacctgggcgcatggagcgggtgccgcaccggcccgatcaacccgctgtgctggtcgattacgcccacacgcctgatggtttggacaacgcgctgcaggcggcacgcccatttgtggagggcaagctcacttgcgtgtttggttgcggcggtgatcgcgatcgcaccaagcggcctcagatgggagcgattgcggcgcagttggctgatgagttggtggtgacctccgacaacccgagaacagaggaccctcaacagatccttgatgacgtggtggcgggaattcctgctggtagccgttgtg

SEQ ID NO: 311888 - DNA, 1000 bp, Unknown
  Bacterial polypeptide expressing nucleotide sequence isolated from the Sargasso Sea
gtcaaattatttgaagatgcattaaataacggagctcgcacaatagtatcagaaaaaaaatatcaaggatttgttaaaaatattttatacttacatagtaacaatccaagaaaattactctctgagtctgctgcaaaaatatttaaacaaaaacctaataatttaatagcagtaactggaactaatggaaaatcttcaatcacaaatttctattatcagattttaaaattaaacaaagttcaagttgcctctattggtaccttaggtgtttattataaaaataaatttataaaaacacataatactactactgatcctattacattaaataaacttctacaaaaaattaaaaagaatgggataaataatgtaatcatggaagcctcaagtcatggattaaaacaaaaccgtttagatggaataaaatttaaaactggtatttttacaaacttaagtagagaccatttagattatcataattcttatttggactattttaactctaaaatgatattatttaaaaatttaatgcataaaaaatcgtgcattatttttgataaagaaataaaagtatctaaatcaataaataaaattgtaagtaataaaaattataattcaatttgtattggaaaaagcttttctgatgtcaaaattacgaaacataattatatagctgataagcagcatgtagaatttatatttaaaaataaaaaatatttctttaaaacaagtcttttaggcaaaattcagattaagaatttaatcatggcaatgatagctgctaaaaattcaaatattccattggaaaaaatagttaaatcaattaataaaataaagagcgtaaatggaaggctagaggaaattgtaaaatttaaggacaattctcgtgttatcctggactacgcccatactccagacgctctagaaacatgcttaaaaaacttaaatgaacaatttaaatttagtaaattttcaattgtttttgggtgtggaggagatc

SEQ ID NO: 311889 - DNA, 676 bp, Unknown
  Bacterial polypeptide expressing nucleotide sequence isolated from the Sargasso Sea
tttgagtcaaaaattttacccaaaaagccaagatattagattttcatttcgtgataaaatctatcaaaaatcaattaatttaataggagctttccaagccgaaaatctcttgatggcggctcttttagtaattgcttctggtgaagaggaaagcagcatttttgagaaattagataatattaatccagttcgagggcgtatggaattggccgcaaccaaaaaaaatggtgctactgtttacgtagactatgctcacactccggatgctattgaagttgcattaaaatcattaaaacctcatattttaggaaaactaatagttgtcatcggggcaggtggcgaaagagatgaggggaagcgtcctctgatggggacggcggccgaacaaaactccgattttgtaattataacggatgataacccaagaaatgaggatccatcagtaatccatcaaatgattaaaaatggtatccaaaacgataataaagttaaggttatagctgatagagctgaagcaatacttactgcggtcgacttgttggaggtaggtgatggtctgcttatagcaggtaagggccatgaaactgaacaagttataggtgaaaataattttccatttgacgattttgagcaagccagtctttcagttgcttctttagatggaatagaaaaatga

SEQ ID NO: 311890 - DNA, 805 bp, Unknown
  Bacterial polypeptide expressing nucleotide sequence isolated from the Sargasso Sea
atgagatctataaaattacataaacttttagatttggtaggaattattccttcatcaaatcttatcgatcaagaaatcaataatatttcttttaactctaaagaagtacaaaaaggaactttatttttaggaatgcctggtttaaatgttgatggaggaaaatattgtattgaggcaattgaaaatggtgcagaggctgccattattgggtctgctgcaaaagtgaaaattggatctattgatcgagaaaggattttggttatagaggataatttagattatatttttggtcaaatagtcgctgagttttggaataggccttcaagaaaacttaaacttattggtgttacgggtacaaatggaaaaacgacaattacttttttattggaatatcttttaaaaaaattaggcaaaaagactgcattatttgggaccttgctcaatagatggcctggcttttcagaagtggctcttcatacaactgatttcgccgataaactccaaaagaaattaaatgctgctgttgaggcagaatctgaattcgcgatattagaggtaagttctcattctattgctcaaaacaggatatcaggatgcgaatttgaggcggctatatttactaatttaactcaagatcatcttgattatcactcagatatggaatcatattttcaaacaaaaagaaaattatttttcccaccttacttaaaagaaaaagatgggatttgtgtattaaatcatgatgaccattggatatctaaattatcatctgatcttaaaaaaagatctttattagtctctacaa

SEQ ID NO: 311891 - DNA, 892 bp, Unknown
  Bacterial polypeptide expressing nucleotide sequence isolated from the Sargasso Sea
tctatcactattcacaaaacactctcactattaaaaagaaaaaaaataaaaaatactattttagaagcatctagtcacggtctaaaacaatatagattgaatggattaagatttgatacaacaatttttacaaatttatctcgtgatcacttagattaccacaaaacgtataaagactatttaaattctaaattaatactatttaataaacttacaaaaaaaggtggaagtataatatatgataatgatatttctcaatcgaaaatacttaaaaaaatttgtataaagaaaaatataaaaccactaactattggaaaaaaaaattctaatttattaataaagaaacatgagtattcaggaaatcttcaaaaaattgaaattgaatttaataaaaaaaaatactcatttaccacaaacttaattggaaaaattcaagttaaaaaccttctgtttgcagctttagcggctagtgaaagtaaaattaaattcagcaaaataataaagttaattagcaaaataaaagcagttgaaggaagactggaaaatattggtaatataaaaaataactcaaaagtaattctagactatgctcacacacccgatgcattaaagcatacattgaaaagtataaaaaaacagttcagtcatagctctataacgattgtttttggatgcgggggagatagagataaagataaaagatctatcatgggtaaaattgcaaataattattgtgataagatttttttaacagatgataatcctagatatgaaaatccaaaaaaaataagaaatcaaataaaaaaaaaaatatctacatctaaattagttgaaattgcctcgagggaaaaagcaataaaagttgcaatagaaagtttaagctctggagata

SEQ ID NO: 311892 - DNA, 781 bp, Unknown
  Bacterial polypeptide expressing nucleotide sequence isolated from the Sargasso Sea
atgaattttttacatgatatcatgattccattaaatatagacataactaagtatccaaacttaaagattaatggaattaaaactaattccaatgaagtaacaaaaggagatatttttgttgcaattaaaggtaataaatgtgatggccatgactatataagcaaagcagtcagatctggagcttgtgctataattactgattctgaaagttataaattaattcatccgcatcaaataaaagtagaaaattctagaatagccatttcatcaattgcagctaatttttataataatccctcaaaaagattaaaggtaattggaattacaggaacaaatgggaaaacatcaacagcctggttaattgcatctatattaaaagaagcagggcttaaggttgctcaaattggaactcttggtataataactgataataaaattactaaaaagggattgaccacaccagacccaataactttacataaaactttctcaatgcttgaaaaaaataaatttacccatgtcgttatggaagtttcttcgcatgctttggatcagcatcgagttaatgatgtggattttgatttagctatttttacaaacctaactcaagatcatttagattatcacaaatctatgaaatcttattttttagctaaaacaaaacttttcaaatctctagatcctaaagcgatatccattattaataattcttctgaatatagtgaaaagtttaaaaaagcttccaattgtaaggtggtaactttttcaaaaaccagagaaa

SEQ ID NO: 311893 - DNA, 875 bp, Unknown
  Bacterial polypeptide expressing nucleotide sequence isolated from the Sargasso Sea
tcgtctattggcaaatttttttcatcaaattttaacattaaataaaaaaaaagttttatcaattggtactttaggaataaatataaataaaaaaaaaattaaaactaataatacaactttagactctatttctataaacaaatacttaaatttaattaaaaaaaaaaagactaataatgttattctagaagcttctagtcatggtcttaaacaacatagattagactatttaaaatttgatattggcatctttacaaacctatctagagatcatctcgattatcacaagtcatttaaagattatctaaattcaaaattaattctttttaaaaaattgatgaaaaaaaaatctacaataatttttagtaataatattccccaatcaaaattacttaagaaaatttgtaaaaaaaaacgatttaaatttgtcactttaggagaaggtgactcagacttaaaaatactaagtcactcttataaatcagataagcagagtgtaagtttttccttaaataataaaatttataattttgatacgaaattaattggcaaggttcaaatatccaatttactaatggcaattttagcagcacgtcagtctaaaattccaattaaaaaaataataaaaattataaaaaaaattcaacctgtaaatggtagaatggaacaaatcggagttttaaaaaataatgcgaaagttattcttgattatgcacatacaccagatgctttagaaaattgtttagtaaatatcaaagaacaatttaaaaatagaaaaattaatattgtttttggatgtggaggagaaagagataaacctaaaagacaactaatgggttacatagctaacaaatattctaaaaaaatatatctta

SEQ ID NO: 311894 - DNA, 817 bp, Unknown
  Bacterial polypeptide expressing nucleotide sequence isolated from the Sargasso Sea
tttttattttcaattattaaaacttaataaaataaaagttgcttcaattggaactttaggtctaaaatcaaaaaatattagacttaatttagcaaacacaacaatagatccaattcgaataggacaaatattatccaaattaaaatctcaaaaaattaataatgtaattatggaagcgtctagtcatggtctaagccaatatagattagatggtttaaagttttcatcaggtattttcacaaatttatctcaagatcatctagattatcataaaaatttcaaagaatattttaaggcaaaacagtacttatttgaaaatttgataagaaaaaaaggaaatgtaattgtagatgaaacaataccagaatttaaaaagataaaaaaaactgcaatttctagaaaattaagattgcagactttaaataatagcaaaagcaaatttcgaatcttctctcatagttttagaggtgaaaaacaaatattaaaaataaaatacaataatcttactagagaagtaaatttaagtcttattggaaaaatacaattaaagaatattttaatggcgattattgcggcaaaaaatagcaaattaagtttaatcaagatactaaatgtattatcaaaacttaaaccaatagatggaagatttgaaaagataggtaaaattaaaaataagtctaaggtaatacttgattatgcacatacaccagatgcgttaagaatatgtctttcaaatcttaaagagcaatttccaaataaaaaaataattttactttttggttgtggaggaaatagagatcaaaataaaagattcaaa

SEQ ID NO: 311895 - DNA, 715 bp, Unknown
  Bacterial polypeptide expressing nucleotide sequence isolated from the Sargasso Sea
aaatcatgataataatattaagttaaatgattatgtttcctcatctttaaacaaaaatcctaagtttgtaattacaagtaataagtgtgatattcaagatgaaaaagttttaagatttaaagattatgagaatattttcaattatattcttgaagggataagtccaaattacaaaagtcttaattattttggaataactggaactaatggaaaaaccacaactactttttatttaaatcaacttattggttcagataatttattcatcggaactattgatgagaaacaaaaatattcattcactaatgaggaaattcttactactccaaaattatttaatgttgttaaattaatttcgcttcaaaaggaaagtatcagttcagtatctctcgaagtttcttcacatgctcttgatcaaaacagactaggggatttaaaatttctcgtatctggttttactaatttgagccaagaccatttagattaccatggttcaattgagaattatttgaactctaaggtaaaattatttcaaaaagatgtttctgaaaagtttgtatatattgattctcctgaaagtacccaaatagtaaatgcttctaatatcgaatcatatagcattggtacaaataaaaataatgatgttagatacaaagaaatagatgaacaagtcttaaaatttacaattgacagtaatcaagttgagtgtcagctt

SEQ ID NO: 311896 - DNA, 791 bp, Unknown
  Bacterial polypeptide expressing nucleotide sequence isolated from the Sargasso Sea
ttataaaaaaaaacctaaaaacttaattgctgtcactggcactaacgggaaatcttccgttgctaatttttatttacaaatattagaattaaataaaaaaaaagttgcatcgattggaactttaggaattaactcaacttccaaaaaaattgaattgcaaaacacaacattagacccattacaattaggtaaatatttaagtaaattgaaagaacaaaaaattgataatataatattagaagcatcaagccacggacttaaacaatttagacttgatggattaaaatttaaaacaggaatatttactaacttatctcatgaccatttggattaccataaatcttataaaaattacttaaattcaaaattatatttatttaaaaaattacttaaaaaaaattcaaacattatttcagatttagatattccagagcacaaaaaaattaaatcaatagcaaaaaaaaaacaaattaagataaatacaatatctaataaaaatggagatttgtctattatatctcacagataccttggtgaaaaacaactattaagaataaattataaaaaaaaattatataattttaaattaaatttgattggtaaaatacaattaaaaaatgttttaatgtcaatgattgcagcaaatatgaacaacattgattttaaaaaaattgtcaacgttatcgaaaaaattaaacctgtatctggtagactagaaaaaattggttcaatcaaaaataattcatctgtaattttagattatgctcatacaccagatgcattaaggcttt

SEQ ID NO: 311897 - DNA, 967 bp, Unknown
  Bacterial polypeptide expressing nucleotide sequence isolated from the Sargasso Sea
atatctacacctcaatttattgtatcaaatataaataaagaaactgaaatacttttaaaaaacttatataaaaaaaccccatatagaacaattgcaattacaggcactaatggtaaaacttctgtagtttggtatatttcaaaaattttaaatttacttaattttaataatattacagttggaactttaggacatattagcaatggaaagaagaaaaatgaagttaatttaacaacaccagcttatgaagaattatttaaatatggtacttcatataaaaataataaatacgtttatatttttgaagcatcaagtcatgctttagatcaaaatcgaataagaaattatccggttaatattgcagcaataacaaatatatctactgatcatctcgattatcacaaaaaaatatcagaatataaaaaagcaaaaatgaaattatttacaaaacacttggataattatggttttgcagtaattaattcaaggataaaaaatatatcaaatttaaaaaaaaaattaataaacaaaggaattaaagtaatatattttggtaaaaacaatatctattttgaaaagaaaaaagattcaatctttcttaatataaataaaaaaaaatatatagttaataaactaaaacttaatacagatattgaattagaaaacttagagtgtgccataacatgttgtatggcattaaaaattaatgaaaagaagataattaaagcattatcaaatattactaatccacctggccgtcttcaaaaaataaattataataaaaataaatctaaaattattatagattatgctcacacaccagatgctttaaaaaaaaccttaaagtcatttaatgttaaaaataaaaaaccaattctattatttggttgtggaggcgagagggataaaatcaaaagaaaatctatgggaattattgcaaataaatttgcattaagaacttatataa

SEQ ID NO: 311898 - DNA, 799 bp, Unknown
  Bacterial polypeptide expressing nucleotide sequence isolated from the Sargasso Sea
atatcaggctgcgaatttgaggctgctatttttactaatttatctcaagatcatcttgattatcacttagatatggaatcttattttcaaacaaaaagaaaattattttttccaccttacttaatggaaaaggatggaatttctgtattaaatcatgatgacccttggatatctaaattatcatctgatcttgaaaaaggatcttcattagtctcgacaaagattactgaaagtgaatttgataatgatgatttttttttcgtaacagataaaaaatttactgagattggatctacttgtatttttcatacacctaaggaaaaaattaaactttttgttccacttgttggagaatttaatttaatgaatgcgattcaatcaataacaattttgtataaacttaatttctctttaaaagatttatcaaagttaatacaatctttccctggtgctcctgggagaatggagaaaatagaaattgaaaataatgacgtttcaagattacttccaacagtaattattgattatgcccacactcctgatggattaaaaaaagttttgcaatcaattaaaaaactttgtaaagggaaactcattactgtttttggctgtggtggagatcgagatcgtggtaaaaggcctttaatgggatcaatagctgcagagttttctgatcacgtgtttataacttcagataatccaagatcagaagaaccgcaaaagatagtaaatgatattttgatgggtatagataaaagagaaaaaataacaattgatattgatagatttaaagcaataa

SEQ ID NO: 311899 - DNA, 494 bp, Unknown
  Bacterial polypeptide expressing nucleotide sequence isolated from the Sargasso Sea
catggttttggatcaaaaaagattttatcacataaaatttaaaggagcaatatttacaaatttcagccaagatcatctagattatcacaaaactatgaaatcctatttaaatgcaaaacttatattgttcagaaaacttttaagtaaaaaatcaactattatctctgatgatgaaatcccaactttcaaaatattaaatcaaattgctaaaaaaaaaaatttaagaatatcaaatatcaacaaaactattaaaaaaattaaaaattttgacttaaaattgaacgaagattttaagattagaaatttagctatggcgattgaagcagtgaaattatgtggtttaaaagagaaattaatatttagtagtttaaaaaaacttaaagatgtcaacggtaggcttgagttagtcaaaagatacccaaatgatgtgaaagtttttgttgattatgctcacacaccagatgctttgttaaaaactcttaattctttgagaa

SEQ ID NO: 311900 - DNA, 897 bp, Unknown
  Bacterial polypeptide expressing nucleotide sequence isolated from the Sargasso Sea
taatgatgcaataaaaaatggcgcatcagcagctatatctaataaaaaaataataagtgaatttaacaaaccagtcattaatattaaaaatactagaaaagcagcatcaattatatcatccagattctacgataatccatcaaaagatctaacaatcataggtataacgggtacaaacggaaaaaccacaactgcatatctactaaaagaatgtttagattgcgcaggatttaaaactgcacaaattggaacaactggagtaattgctgaaggttacaagcaggaaaaaacattaaccactccagatgctgctaccattcaaaaattattaagaaatttagtcaatgatggattttcccatgtagtcatggaggtgtcatcccacgcccttcatcaattaagagtgcataatgtacattttgacgttgcaatctttacaaacttgaccccagagcaccttgattaccataaaacaatggaaaaatattttaaagttaaatcaacattgtttaaccttttaaaagaaaaaaatggtaaagctgtaatcaattatgatgatgactatggaaaaaaactggcctctaaactcaattgcgatgttgcattatattcaaaaactaattccacaaaatcatttttttctcaaataaatgattataaaaataaaattaatggtactataaattctaatgaacgttcttatataatcgaatctaatttgatcggtaactataaccttgaaaatattcttgctactgtaactactttagactcactaaaaataagtaagaatgccatcatagagggcataaaaacctgcaaaaacatacctggccggttagaattatttccagtcaaaacaggagctaaagtaattattgactatgcgcacactcc

SEQ ID NO: 311901 - DNA, 743 bp, Unknown
  Bacterial polypeptide expressing nucleotide sequence isolated from the Sargasso Sea
atattagatcatcaatttttaaaaagtgagcagaaaatattatttagatttgagaaaaagaaatattatttttcaacaagattaattggaagtgtacagataaaaaatttactaatggcaattatggctgcaatgaaaagcaaaattccattgaaaaaaattttaaaaattactcaaaaaataaagccagtaaatggaagattggaaaaaataggaagacttaacaataatggaattgtaattcttgactatgctcatacaccagatgctttgaaaacttgcattaaaaatgtaaaggaacagtttaaattaagaaatattaatttagtgtttggatgtggaggagagagagataagcccaaaagaaaaatgatggggagaattgctgacagatattgtaataaaatatacttaacagatgacaatccaagaaatgaagatccaaaaaaaataagaaaagatataaagtcgaatatttcaaagaataaagtattcgaaatcccatcaagagaaagtgcaataaagtctgccattttaaatattaagtcaaacgaggtcgttattattgctggaaaaggacacgaagtttatcaagaatatatctctaaaaagttcttttcggataaaagatgtattgaaaaatttattaaagttaagaataaatctttaaatagaaattggaaatcaaatattatttcagagataataaaaaaaaaaatagataaaaatgtaaatattaacaa

SEQ ID NO: 311902 - DNA, 703 bp, Unknown
  Bacterial polypeptide expressing nucleotide sequence isolated from the Sargasso Sea
agaactttaccaaatctttcaaaaatatttcttgattatgcacatactccagatgcattagaaaatgcgatactttctttaagagaacattttaaaaaaaaaattactgttgtttttggttgcggcggagaaagagataaaagcaaaagaagattaatgggaaaagttgcaaaaaaatattgtgacaagatttttgtaacggatgataacccaagaaatgaaaatccaaaaaaaataagaaaagatataatgaaaggattaaaaaattcaaatgccaaagagattggcaatagaaaaaaagcaattctttatgctttaaagaaatcttacccaaatgaagtaattttaattgctggaaaaggccatgagaactatcaaattttaggaaataaaaaaatttttttaagtgataaaaatattattaaaaattttaaaaataaaaatatttattctaataaaataaaccatgatttaaaatataatggaataattttaagaaaaactttaaaagctaaaagagattatttttttaataacgtttcaataaactctaaaaccacaaaaaaaaataatttatttgttgcaattaaaggtataaaaaatgatggtcacaacttcttaagtgaggcaaaaaaaaatggtgcaaattattgtgtaatatctaaaccaaacaaaaaaaaatcaaaattaattcttgtaaaaa

SEQ ID NO: 311903 - DNA, 731 bp, Unknown
  Bacterial polypeptide expressing nucleotide sequence isolated from the Sargasso Sea
tttagaagcatcctctcatggaataattcaaaatcgtttagatggtatcaactttaacggagctgtatttacaaatctttctcatgatcatctggattatcacaaaaatatggaaaactatttcaatgctaaaataaaattatttacagaaaatttaaaagatggcgcttgtgtttcaattaacttagatgatcagtatggcatgaaactatataataagattaaaaccaaaaatttcaaatttgttaattttggatttaacgaaaattgtgaactcaaattaaccaaaataaaaagaattgaaaaaatttggcagttagaaattttatataaaaacaaattatacaaaaccgatattggtttaattggacattttcaaatttataatgcattagccgcagcttctatttgtttgagtcttggactggaacaagattctattttcaaatctttatcgtatctacaaaatgttccaggaagaatgcaactagttaatcatcctttatgtaaagcaaccataattgttgattacgctcacactccagacgcattagcaaatgcaatattagcagttaaaaaaatgaatgttactggaaagatatatacattatttggttgtggaggtgaaagagaccatgaaaaaagatcaaaaatgggtgaagttgcttttaaaaattcggattttactataattacagatgacaatcctagaagtgaagatccatcattaa

SEQ ID NO: 311904 - DNA, 647 bp, Unknown
  Bacterial polypeptide expressing nucleotide sequence isolated from the Sargasso Sea
ggcggcagtgctgccgccagcggcccatgagccggtggtggtggtgggcgagccggtggcccgtcagctgggagaactggcagcggcgttctgggagcagcccagctcgcgactggctctgatcggtgtcaccggcaccaatggcaaaaccaccaccacccatctgatcgagcatctggcgacggccatcggaacccccacggccctgttcggcacgttggtgaatcgctggcctggccacagcatcacggccacccacaccaccggtttcgccgatcgtctgcaggggcagttggcatccgccgccagcgccggggctcagcttggggcgatggaggtcagttcccatgccctggctcagcagcgggtggccggttgccgtttcgccgctgcggtgttcaccaacctcacccaggaccatctcgactatcacgcctcgatgcaggcttatttcgaggcgaaggccgcgctgttcgccgatcccctgctggagccaggaccggcccgcgcggtggtgaacagcgacgatccctgggggctgcagctggcggaacggctttggagatcgctgctggcgcagttccctcagcgagcccggggcggagctgcgcatgagcgatctggtgatgacggctcgtggggtgcgc

SEQ ID NO: 311905 - DNA, 930 bp, Unknown
  Bacterial polypeptide expressing nucleotide sequence isolated from the Sargasso Sea
tggcagccagctggcggcgatggaggtgagttcccacgcccttgttcaggagcgggtggcagggtgccgcttcgcgggggctgtgttcaccaacctcacccaggaccacctcgactaccacggcacgatggaggcctattacgaggccaaggcgcgtctgttcacggctcccctgctggacggagatgggccttcggcggtggtgaacagcgatgacccctgggggagccgtctcgccgagcagctgggggggcgttgctggcgcagctccctgagagacccgcaagcccagctgcagatggtcgacctcgagatgaccggacagggcgtccgtggtcgcttgatcagtcccgctggatccggagcgttctgttctccgctgctgggtcgcttcaacctgatgaacctgttgcaggcggtgggggtgctgctgcaacggggtctgcccctggcgccgctgctggaggccgtcggcagcttccggggcgtgcccggtcggatggagcgggtggtcgtgaacggtgcagaagctgatgcgttgcccactgttcttgtggattacgcccacacccctgatggtctggagaatgccctgtcagcgtctcggccattcacgggtggtcggctggtctgcgtgtttggctgtggcggcgacagggatcggggcaagcggcctcagatggcagtcattgctgctcgcctggcggaccgggtggtggtcacctccgacaacccacgcacggaagatcccgatcaaatccttgccgatgtggtggcgggtatcccctccggcaccgacctgagcgtggagcgcgaccgggccacggcgatcgcggaggccattgctggtgcgtcagcggcggatctggtgctgatcgctggcaagggccatgaggactatcaaattctcggtaccgagaaagtgcattt

SEQ ID NO: 311906 - DNA, 989 bp, Unknown
  Bacterial polypeptide expressing nucleotide sequence isolated from the Sargasso Sea
tggtttaatgttgatggaggagaatattgtattgaggcaattgaaaatggtgcagaggctgccattattgggtctgctgcaaaagagaaaattggatctattgatcgagaaaggatttttgttatcgaggataatttagattatatttttggtcaaatagtcgctgagttttggaataggccttcaagaaaacttaaacttattggtgttacaggtacaaatggaaaaacgacaattacttttttattggaatatcttttaaaaaaattagggaaaaagactgcattatttgggaccttgcttaatagatggcctggcttttcagaagtggctactcatacaactgatttcgccgataaacttcaaaagaaattaaatgctgctgttgaggcagaatctgaattcgcgatattagaggtaagttctcattctattgctcaaaacaggatatcaggatgcgaatttgaggcggctatttttaccaatttaactcaagatcatcttgattatcactcagatatggaatcatattttcaaacaaaaagaaaattatttttcccaccttacttaaaagaaaaagatgggatttgtgtattaaatcatgatgaccattggatatctaaattatcatctgatcttgaaaaaagatctttattagtatctacaaagattactgaaagtgaatttgaaaatgatgatttttttttcgtaacagataaaaaatttactgaaaatggatcaacctgcatttttcatacacccgaggaaaaaattaaactttttgttccacttgttggtgaattcaatttaatgaatgcgattcaagcaataacaattttgtataaacttaatttctctttaaaagatttatcaaagttaataaaatctttccctggcgctcctgggcgaatggagaaaatagaaattgataatgatgaccttttcagatttactccgacagtaattgttgatttatgccacacgcctga

SEQ ID NO: 311907 - DNA, 832 bp, Unknown
  Bacterial polypeptide expressing nucleotide sequence isolated from the Sargasso Sea
aaagagctatttatattaaaaaaattaggagtcaccaatgttatcatggaagcttctagccatggtttagcccaaggacggatgaacggtatagattttaaaataggaatttttacaaattttagccaagatcaccttgattatcataaaaatatgaaaaattattttagttcaaaaatgattttattctcaaaacttttaaaaaaaaagaaaataataattactgataaggagataaaagaatttcataaattgaaaaaaattgctaaaagaaaaaaattaattttaaaaactatcaatgaaaaaaattttattgacctaaaaaaattttcgttaattggaaaatttcagtcaaaaaacttatctatggcttcggtcgctgctaaaatatctggtttaagcataaaaagaataaactcagtattaagtgatataaaaagtgtaaatggcagattagaattaacaagaattttgcctaataaggcaaaaatttttattgactacgcacatacaccacatgcacttgaaactgcactacaatctttaaaggatcattttaaaaataatatttcattagtttttggctgtggtggagaacgtgataagaaaaaaagaaaaataatggctaaagtagctagcaaattttgtaaaaaaatttatgtaactgatgacaacccaagaaatgaaagtccaaaaaagataagaaaaatgataattagagaattaaaaagaggaacttataaagaaattggcaacagatctaatgctataaaattggctatttataattctgatccttttgagattatactagtagctggcaaaggtcaga

SEQ ID NO: 311908 - DNA, 751 bp, Unknown
  Bacterial polypeptide expressing nucleotide sequence isolated from the Sargasso Sea
tttagaaattaagtataaaaataaattatataaacttagaattaatctttatggctcaatacaaataaaaaatttactcatgtcaattttagcttcaaaagtatgtggtttgaaaattgaaaatatatttaaaaaaattgacaaaattaaaagtgtgaatggaaggttgcagcatataagaactttatcaaataaatctaaaatatttatagattatgctcacacacctgatgcattagaaaatgctatactatctctaagagaacatttccaaaaaaaaattaccataatttttggctgcggtggtgaaagagaccaaggaaaaagaaggttgatgggaatggttgcaaaaaaatattgcgaaaaaatatatgtaactgatgataatccaagaaatgaaagtgcaaaaaaaataagaaaagatattatgagtgtacttaaaaactgcaatgcaaaagaaattcctagcagaaaaaaaagtattttcttcgctcttaaaaattctgacccatatgaagttattttgattgctggaaagggacatgagtcatttcaagattttggtaaaagaaaaatttttttaagtgaccacaagataattaaagattttaaagattcgaaattaaacattattaaaaatttaaatgaaatgaaatataacgcatcaattttaagaaagataaaagaaattaaaaatagttatctttttagtggcgtttcaattaactcaaaaaaaattaaaaaaaataat

SEQ ID NO: 311909 - DNA, 793 bp, Unknown
  Bacterial polypeptide expressing nucleotide sequence isolated from the Sargasso Sea
ggttttatagggacacttggtttcaaaaaaaataaatttttaaaacgcagaaacttaacaacactagatcccgtgaatttaaataaagatctacgcagtcttaagaaaagcggaattaataacgtcataattgaagcgtcaagtcatggactgaaacagaaaagattagatttcttaaatattaaagttggtatttttacaaacctaagtatcgaccatttagactaccataaaaatattgttgattatttgaattcaaaacttttactattttctaatcttttaaaaaaaaatggaactgtcataactgatacagacattaagcagtacaaagctattacaaaaattcaaaaaaaaaagaaatttaaaattttaaccattggatctcaaagtaacatatttgagataataaagcatgaattctacaaaaattttcaggtattagaactaaaatataaaaataaaacttataaattaaaaattaatttattcggatcaatacaaattaaaaatttattaatggcaataatagcctctaaagtttgtggccttaaaatagagaaaatttttaataaaattgagaagattaaaagtatagaaggtagactggaattaataaaaacattgccaaatcaatcaaaagtttttttggattatgctcacacacctgatgcattagaaaatgcaattctatcgctgaaacaacattttaaaaataatataacagttgtttttggttgtggtggagaaagagacaagagcaaaagaaaattaatgggaaaagtgcaaaaaa

SEQ ID NO: 311910 - DNA, 816 bp, Unknown
  Bacterial polypeptide expressing nucleotide sequence isolated from the Sargasso Sea
gccggtattgaagctattaatattggaacgacaggtgtagagggaagttggtctactcctttaaattatacgaccccagatccagtaaagcttcatcaagttttacataaagctgcttcagaaggtatcacgcacgttgcgatggaagcttcaagtcacgggttagatcaaaggcgtttggatggagttgaaataaaagctaccgcttttacgaatttctcccgtgatcatttagattatcatgattcaatagaagattactttaatgcgaaaaaaggactatttgaccgtttatgcccaaaagaaaaagttggcgtatttaatattgataacaaagaaattaaggatctagctgattggtattccttgaataatcatgtcttaacggtcgggcacgataaaatagctgaccttgtaattttacagcaaaaatttcacccaaaaagccaagatattagattttcatttcgtgataaaatttatcaaaaatcaattaatttgataggagcctttcaggcagaaaatctcttgatggcggctattctattaattgcctccggtcaaaagaaaagtgtcatttttgagaatttagagaatattaagccagttcgagggcgcatggaattagttgcgacaaaaaaaaatggtgccactgtttacgtcgactatgcccatactccggatgctattgctgttgcattaaaatctctaaggcctcatattttaggaaaattatttgttattataggggcaggcggcgaacgagaccaaggaaagcgtcctctaatgggagcagcggccgagcaaaactcagac

SEQ ID NO: 311911 - DNA, 832 bp, Unknown
  Bacterial polypeptide expressing nucleotide sequence isolated from the Sargasso Sea
aattcactcatccacaaaaaaaattgaattacaaaatactacattagatccattacaattgggcagatatttaatgaaattgaaagagaaaaaagtcgataatgtaatattagaagcatcaagtcacggacttaaacagtctaggcttgatggattaaaatttaatacgggaatatttacaaatttatctcatgatcatttggattatcataaatcttataaagattaccttaattcaaaattatatttatttaaaaagttacttaaaaaaaattcaagtattatttcagacttagatattccagagtacaaaaaaattaaagcaatagcgaaaaaaaaacagtttaggttgaacacaatatcaaatcaaaatggcgatttatctattatatcccacagataccttggtcaaaaacaattagtaaaaataaattataaaaaaaaattatatgattttaaattaaatttgatcggcaaaatacaattaaaaaatattttaatgtcaatgatagcagcaagcatgaacaacattaactttaaaaggattgtgaatgttattgaaaaaattaaacctgtatcaggaagactagaaaaaattggttcaatcaaaaacaattcatctgtaattttggattatgctcatacccctgatgcattaaggatctgtttgcaaaatataaaagatcaatttaaaaatcgaaaaatatctttagtttttggttgtggtggagaaagagataaatctaaaagaccaacaatgggaaaaattgcaaataagtattgtgataaaatttatttaacggacgataatcctagaaatgaaaatcccaaa

SEQ ID NO: 311912 - DNA, 877 bp, Unknown
  Bacterial polypeptide expressing nucleotide sequence isolated from the Sargasso Sea
tttattgcatataaaggttcatttgataatggacttaattatttaggtgaagcgattgagaaaggagcggttgcaattgtcatcgatgataatgaagaatttgatatagaatccttttcttcaaagatttttaaagtcactgaattaagaaaaagtgctggtcacatcatcagtagattttatggacatccatctagaaatataaatattgtaggagttaccggaacaaatggaaaaacaacagtttcatatattcttgggtttgctaatcataagcttaaaaaaaatagtgcatttataggaacattaggccttggacttttcggtcaaatagaagcaagcaagacaacaactccagatcctgtaactatacattcatcgctttcaacatgggaaaatgaagttgattctgttgctatggaggtttcttctcatgctttagatcaaggaagagttgaaggtgtagaatttgacaccgccgtatttacgaatttaagtagagatcatctcgattatcataaaactactgagaattatattaaagccaagttttctttatttgagaaagcgggattgaagaatgcggtaattaatattagcgattcatatggcgctcaattaatagagaagataccagaagatgtgaatgtttttgcatactcctgtaaaaaaagtaatctaaaattttataaaagagaagatatctcattcacttattgtgagaaggtagaaattgaatccttcaaatctaagttaataaaaattaatagtccatggggaaatgcaaacgttagagtaaacttgctcggtgattttaatttagaaaatattctagctgctttcacagtattgtgtatttcaggacaacctgtcgatg

SEQ ID NO: 311913 - DNA, 881 bp, Unknown
  Bacterial polypeptide expressing nucleotide sequence isolated from the Sargasso Sea
tctagctcaaatttgtaaaataaataaagttcccactaaattaactggaactcttgggtatttcatagatttaaaaaagtataaggaaacaaccttaaccacaccagctaatttagatctttatcaatttgctaattctaataaaaaaaataagttttgctttatttctgaagcttcgagtcatggattgcgtcagggtcgtttaaatgatttaaatatagatatagctgcaattactaatctttctcatgatcatcttgattatcataaaagctttaggtcttatgcaaatagtaaaaaattattgtttacaaaaattttaaactctaaaggtgtggctataattaactcacgtctaaaaaattataaacacctagaaaaaaaaataaaagaaaggaatataaaaattataacttatggaaaaaaagatgtatattttttcaaaaataattttttaaatttatatatatttggaaaaaaatataagttaatcaaatttgagttaataaataatattcaaaaagagaatttggaatgtgctattgcttgtgctttagctatgaaaattagcattaaaaatataatcaattgcttaaataagttaaaatcaccaccaggaaggtttgaaataattcactttactaaaaaaaattcaaaaataattatagattatgctcacacccctgatgcacttgaaaatattttaaaaactttttcatacgataaatttaaaccttctcttgtttttggttgtgggggcaatagagataaagaaaaaagaagaaaaatggccattgttgccaaaaaattcgcaaataaagtttatataactgacgataatccaagatatgaaaatccaaaaaatattagatttagttaaa

SEQ ID NO: 311914 - DNA, 769 bp, Unknown
  Bacterial polypeptide expressing nucleotide sequence isolated from the Sargasso Sea
ttggatctatctaatacaacaatagatccaataaaattggctaaaattttgagtaagttaaaaactcaaaaaatagatcatgtaattatggaagcctcaagccatggtttaaagcaaaatagattagatggtttaaagtttaattcaggtatatttactaatttatctcaggatcatcttgattatcataaaaatttaaaaaattatttaaatgcaaaactttatttatttgaaaacttaatctcaaaaagaggaaatgtaattacagatcaatttatacctgagtttaaaaacataaaaaaaattgcgattaataagaaattaaaattgcataaacttaatgatctagaacttttatctcacaattttaaaggagagggtcaatttctaagagttaaattaaatggttcaataagagatctaaatttaaatttaattggaaaaatacaattaaaaaatgttttaatggcaataatttcagcaaaatatagcggtattggtttagataaaattttaaatacaattccaaaattgaaaccagttgaaggaagatttgaaaaagttggtaaaattaaaaatcaatctaaggtaattcttgattatgcccatacgcctgatgctcttaaaacatgtattctaaatcttagagaacaatttcctaataaaacaatcacagttctattcggttgtgggggaaatagggatcaaaataaaagatcaaaaatgggtaaagtagcttgtgattttgcagataatataattcttacaa

SEQ ID NO: 311915 - DNA, 732 bp, Unknown
  Bacterial polypeptide expressing nucleotide sequence isolated from the Sargasso Sea
gtgtttaaaacaaaaaagattagacaatttaaatataaaagttggaatatttacaaacttaagtcacgatcacctagattatcatcgcaatataaaatcttatttggattctaaaatgtatttatttaaaaatttacttaataaaaaatctaaaattataaccgatgaatcaaacaaagaatttaaaatcttgaaaaatatttcgaacaaaagaaaaataaaaaaactaacaataggtgtaaactctggagatattaaaattttacaaaataaatataaagaaaataagcaaatagttaaaatcttggtcaattcaaagatttttacaatagaaattcctcttataggatattttcaaacaaaaaatttactcatggcaattttagcagctacaaattgtggattaaattataaaaaaatatttaaacaattaaaaaaaatcaagccagtacccggaaggctggagtgtgtagctaaattaaaaaataattcagacataattgttgatttttctcatacgcctgatgcattaaaacaaagtttaattgcgttaaaaaaacaatttaaaaaagaaataatcatagtttttggatgtggaggtgaaagagatattaaaaaaagacctatcatgggtaaaattgcaaaaaaatattgtagaaaaatttttattacagatgataatccaagacacgaaagtccaaaaaaaattagaaaccaaataattagaagttg

SEQ ID NO: 311916 - DNA, 763 bp, Unknown
  Bacterial polypeptide expressing nucleotide sequence isolated from the Sargasso Sea
ctgattgcacagtggtgccagctgcttggcgaaaccagcgcggtgatgggtacggtcggtaacggcctgctggataacgtcatcccgacggaaaacaccaccggttctgctgttgatgtacagcatgtgctggcagggttggttgagcagggtgcaacggttgccgcgatggaggtttcctctcacggcctggtgcaacaccgtgttgcagcgctcaagtttgcggcctcggtatttactaacctgagccgcgatcatcttgattatcatggtgatatggagcattacgaagcggcgaaatggctgctgtactccacccaccactgcggccaggccatcgtcaatgcagacgatgaagtgggtcgtcgctggttaggccgtctgccggatgccgttgcggtctccatggacgatcacattaatccgaactgccatggccgctggctgaaagccgtggcggtggactaccacgacagcggcgccactatccgctttgcgtccacctggggcgaaggcgaaattgaaagccgcctgatgggggcgtttaacgtcagcaacctgctgttggcattggcgacgctgctggcgctggactatccgctgaatgaattgctgaaaaccgcttcgcgtttacagccggtgtgcgggcgcatggaagtgtttagcgcgccgggcaaaccgaccgtggtggttgattacgctcatacgccagatgcgctggaaaaagcattgcaggccgcgcgtctgcactgctccggcaagc

SEQ ID NO: 311917 - DNA, 907 bp, Unknown
  Bacterial polypeptide expressing nucleotide sequence isolated from the Sargasso Sea
ttagaccctataacaattcataaaaatctttcatcaataaaaagaaaaaaaataacaaatactattttagaagcttctagccatggtttaaagcaacataggcttgatgggttggaatttgatactgcaatttttacaaatttatccagagatcatttagattatcacaaaacatataaagattaccttaattctaaattaatattatttaacaaacttattaaaaaaggaggtatggtaatttatgacaataatacttgtcattcaaaaataattaaaaaaatttgtaaaaataaaaatttaaaatccctgactattggaaaaaaaaattctaatttaataattaagaaacatgaatattttggtagcttacaaatggtagaatttgaatttaataaaaaaaaatattcatttaatactaatttgattggcaaaattcaggttaaaaatattttgttttcagttttggcagcaagcagaagtaaaattaaatttaatcaaatcattgagtcaataaaagatataaaacctgtcgaaggaagactggaaattattggcaaaattagaaacaattctaaagtcatattagactatgctcatacacctgatgcattaaaatatactttagaaagtataaaagagcagtttggacatagtgctatttcaatagtttttggttgtggaggagacagagatagagacaaaaggtccattatggggaaaattgcaaaccaatattgtaataagatatttttaacagacgataatccgagatatgaaaatcctaagaaaattagaaatcagataaaaaaaaaaataaatagatctaagctagttgaaattgcttctagaaaaaaagcaataagaatagctatagaaaatttaaattctggagatatattattag

SEQ ID NO: 311918 - DNA, 856 bp, Unknown
  Bacterial polypeptide expressing nucleotide sequence isolated from the Sargasso Sea
gttgcttctattggtacacttggaatttttacaaataactcaaatagaaccagtaataatacaacattagatcctattacattacacaaagcactcggtgatcaaaaaaaaaaaggtattgaaaatgtaattcttgaagcatcaagtcatggtcttaaacagcatagacttgatggcgttaagttcgatttgggaatatttacaaatttttcaagagatcatttagactaccataaatcttttaaagaatattttaattcgaaaatgttgctatttaaaaatttgatgaaaaaaaaatctaaagtaatatttgataatgatataaaagaatctaaaaaaataaaaaaaattgctagtaaaaataattctgaattaattacaattggtaaaaaaaaatctaatttaattgttattagtcataattattttggaaattatcaatatataacatttaaatttaataataaaatttatacaattaaaacatttttaattggaaaaattcaaataaaaaatattttaatggcaattctagcagcaaactcacttaaagtgcccatgaataaaataattaaatcgatttctacgataaaaccagcttatggcagacttcaagagattggaaaaatcaaaaataattctagagtaatattagattatgcacatactccagatgctctattaaattgcatcttaagtgtacgagagcaatttaaattaagtaaaatttcaattgtttttggatgtggtggagaaagggacaagccaaaaagaaaaattatgggcaatattgcaaataaatattgcgacaatatttacctgactgatgataaccctagaaaagaagatccaaaaa

SEQ ID NO: 311919 - DNA, 767 bp, Unknown
  Bacterial polypeptide expressing nucleotide sequence isolated from the Sargasso Sea
ttttatggattaaaatttgatgcttgtgtacttacaaacatttcacaagatcacttagattatcataaaactatgtcacattatataatgagtaagctcaaactattttctgattatgtaaaaaaggatagtaagatcatagttaactctgaaactaaatatattggtagaattaaaagttatttaaagaaagaaagcaatattagtcccatatattttcagaaaaataaatttaaaatagttaagataaaaaaaaataagtacaactcaacaatagttgatgtaaaatttggtaaagagcttaaaaaatttaagtttgctaactttccattatttcaaatacacaacttcttactggcaacattaacactttattctatgggtcacaatttaactgagattcaaaagttaagcctaaaatgtccttcagtaccaggtcgtatggaattcgttggcaatacaagaaacagtgcctctgtatatattgattttgcgcacacacctgatgctcttcaaaatgctttaatagaaggtggcaatctttgtaaatcagagctgcatgttgtttttggatgtggtgggaatagagattactcaaaacgcccaataatgggtaaaattgcatcaaaatatgcagataatgtcgttataactgatgataatccacgctttgagaatgcaaaaaaaattagaaaagaaatcattgatgattgtaaaaactttttagaaatctcagatagaagaaaggctataaagcatacaatcaa

SEQ ID NO: 311920 - DNA, 788 bp, Unknown
  Bacterial polypeptide expressing nucleotide sequence isolated from the Sargasso Sea
tgtttcatggcctgatctaaaatcagcggttctaaatttagatgatgaatttagcttatctttaatcaacgacattcgaaaagaggttgaggtttttacgtatagcgtgagtaataaaagtgcgtcagtttattctaagggtttgactttcagtaaatctgggtattcagcatttatcaacactccctttggatgtaaaaaactatcaggggaactgttgggtcgttttaactttagtaatatattagccgtgatagcaactttaatttcacttatgtctagggaagactcagggcatatagacctggcgaaaatatttgatagtatttcttctcttagttccgccgatgggcgcatggaaattgtaaatggatcaaatgaagtcacgactatagtcgactatgcgcatacgccagatagtctaaggaatgccctagaaacattgaagtgtcattttaagggtgaaatatggtgtgtgtttggttgcggcggtaatcgggatgaaggaaaacgccctatcatgggggaaatcgctgaatcgtttgcagatcatattgttattactgatgacaacccaagaaatgaaccgggagatcgaatagtttctcaaattctcagcggtattcaaaagcatcagaatgtttctattattcgaaatcgcgcgaaagctattagtcatgcaattaccaacgcctcgccagcagaccttatatttatagcaggtaaagggcacgaaacatatcaagaaatttccggtagaagagtaatttttagtgacaaggcgcatg

SEQ ID NO: 311921 - DNA, 807 bp, Unknown
  Bacterial polypeptide expressing nucleotide sequence isolated from the Sargasso Sea
gaaagcaggagtatttactaatttaagccacgatcatcttgactatcacaaaaatatgaaatcctattttaattcaaaaatgtatttatttaacaaattgttaaacaaaaattcgataataattactgatgaagacatcaaagaatttaaaaatattaaaaaaatttcaaaaaacaaaaagataaaaagaaccacaattggtacaaaaacaggaaatataagaattttaagtaataagtataaacaacacaatcagcttgtaaaaatcgacattgattcagaaatttttaatttaaacattcctcttattggttactttcaactaaaaaatttatttatggcagtattggccgcttccgtttgcggattgaataaaaaaaaaatattgaagcaaatacataaaataaaacctgttccaggaagactcgaatgtgttgttaacttaaaaaataattcaagtataattttagattttgctcatactccagaagcgttagaacaaagtttaattgcattaaaaaaacaatttaataaagaaattataattgtttttggttgcggcggagaaagagataaaaaaaaaagatttttcatgggtaaaattgccagccagcattgcagaaaaatctttgttactgatgataatccaagaaatgaagatcctaaaaaaataagaaattcaattataaaaggatgcaaacaaattgcaattagcattggaaatagaaaaaaagccattcaaactgctatagaagcattaaactcaaatgaaatattattagtagctggtaaaggccacgagaacaa

SEQ ID NO: 311922 - DNA, 904 bp, Unknown
  Bacterial polypeptide expressing nucleotide sequence isolated from the Sargasso Sea
ctgcaccactttacacatctcgtaaaacatcatggtggccaacgaatttgcatagaagcatcatctcatggtcttgatcaaaatcgcttaagtggatttaaagtcgatactgcagtgtttacaaatttgacccaagatcacttggattatcatgaaacactagaagcctatgccaaagctaaacgcaaactattaaaacaagaaagtttgcgctgtgtcgttctcaatgcagatgacaacgaaagtcaacagtgggctgctgaactacctgagcatttatcggtatgtttatgttctatcaaagcaagtgataaagcctctttgtttgctgagttttcatcacatcctcaccattataagtattgcatcgcgaaaactttaagatttacacccaacggatgcgctttcgaaattgaatccagttggggagaagcatcaatcagcttgcctctgattggtatgttcaatattgctaacttgttgtcagctttaacagccctgctcatgcaaggtttgaatttcgaacagttggtttctgccattgcgcatttgcgcggtattccgggcagaatggaagtgtttgagtcacgtaaacatgcaaatatcatcgtcgactatgcacataccccagatgcattacagcaagctttaatggctgcgcgacagcatgccttaggaaacctgactgtgatttttggttgtggtggtgaccgcgacaactctaagcgagagcagatggggcgcattgctgaaaagtgggcagatgaaatagtactgactcaagacaatagccgcagtgaatcaccagagaatattgttgccgacatcatgcaaggcatgcagggcaaatcaaatttaaaaatagaactagatagaaaaaccgcaataagggaagccttttgaa

SEQ ID NO: 311923 - DNA, 749 bp, Unknown
  Bacterial polypeptide expressing nucleotide sequence isolated from the Sargasso Sea
tgcagagctagccagtcacccaattaagtcgtttagcactcaaggtgagaccagtgccgatttttactgtaccgatgtgcactatcacgatgctggcgtgaatgccgttttgcattacccgtcattaaatggccagggtagtttatccgctagcctagaatcaccgttattaggcgcatttaatttatctaatgttgttgcggctattgctgctttgtatttacaaggtatgtcgatgacagccatgcttgcggtgatgccaaatgtgctgccagtagctgggagaatggagcgtttttctgctgccaataaagccacactggttgtggattatgcccacacgcctgatgcgattgaacaagcattaaaagcattacgagtgcactgcaaaggtactttatggtgtgtgtttgggtgtggtggtgatcgcgataaaggtaagcgtccattaatggcgcaagcggctgagaaatatgcagataaagtgatgatcactagcgacaatgcgcgtagcgaagatccacaaaccattatcaatgatattttacagggcatcaatcagcccaacaatgtgttgacacatgttgaccgtattgaagcaattactcgtgtcgtggcattagcacaagcagatgatattgtactgcttgctggtaaagggcatgaaacctatcaagaagttgcaggccagcgtatcgattatgatgagcgcgcgttagcacttgctttgtcaaaggacgcattatgat

SEQ ID NO: 311924 - DNA, 841 bp, Unknown
  Bacterial polypeptide expressing nucleotide sequence isolated from the Sargasso Sea
ataataaacttattaatagcaattactgctgcaagcaaatatattccaataagtaaaattttaaaatcaattcataaaattaaagaagtcaatggaagaatggaaaatataggaaaattgtacaacaactcaaaggttatattagactacgcacatacaccagatgctttaaaaatatgtcttgaaagtttaaaaaatcattacaaatctagcagcatatcaattgtttttggatgtggtggagaaagggatagaccgaagagaaaaatgatgggtaaaatcgctagtaatttttgtgaaagaatatatttaactgacgataatccacgaaatgaaaatcctgcaaagattagaaatgatgttaagaaaaagatcaataaatctaaattatttgaaataccttcaagaagacaagcaataaatgatgctatatctaaacttaattcaggagacatattagttgttgcaggaaaaggtcacgaaaattatcaagaatatgataaaaaattatttttttctgatagaaagtgcatattaaaaagtatcagaataaaaaataaagcattatcaagagattggaaaattaatgcaatcaacgattgtttaggaagttcaaaaataagaaaatcattaaaaattaataatatctcaataaattccaaagatgtaaaaaaaggagatttattcattggtttaaaaggaaaaaaaagaaatggaaatctttttgcagatgatgccattaaaaacggagctttattgtcaataattgaaaaaaattactcgaaaaaattcattaaaaaaaaaattgaagttaataatacttttaaattttttgttaaaa

SEQ ID NO: 311925 - DNA, 791 bp, Unknown
  Bacterial polypeptide expressing nucleotide sequence isolated from the Sargasso Sea
ttatgctatttatgacaatgatttaaaaatttcttttaatttaaataaaattactagattaaataaaatcaaaaaacttactttaggaaatactaaatcgagtttttcaataatagatcatcaatttttgaaagatgaacagaaaataacattcaaatttgataaaaaaaaatattctttttcaacgacattaattggaaaagttcaaattaaaaatttactaatggcaattatggcagcaatgaaaagtaaaatttcattagaaaaaattataaaaatcattccaaaaataaagtcagtaaatggaagattagagaagttaggaaatcttaataattatggaatagttattcttgattatgctcatacaccagacgctttaaagacttgcatcaaaaatgtgaaggaacaatttaaattgagaaaaattaacttagtatttggatgtggaggcgagcgagataagccaaaaagaaaaataatgggaaatattgccgataaatattgtgataaaatatatttaacagatgataatccaagaactgaagatccaataaaaataagaagagatatcaagtctaatatttcaaagagtaaagtattagaaataccatcaagagaaagggcaataaaatcagcaattatggatattaggtcaaatgaggtagttattattgccggaaaagggcatgaagtttaccaagaatatgtctctaaaaaattcttttcagataaaaaatgtattgaaaaatttattaggattaaaaataaatctttaaatagaaattgaa

SEQ ID NO: 311926 - DNA, 754 bp, Unknown
  Bacterial polypeptide expressing nucleotide sequence isolated from the Sargasso Sea
ttgattggtaaaattcaattaaaaaatcttttaatgtctatgattgcggcaaatataagcaatattgaatttagaaaagtagttaatgttgtaaaaaaaattaaacctgttgcaggtcgttttgaaaaaattggaaaaataaaaaataattcaatagtaatattagattacgcacatacacctgatgccttaaaaatatgtttgcagaatattaaagatcaatttcaaaatagaaaaatttcattagtttttggatgtggtggagagagagataaaaagaaaagacctatgatgggaaaaatagcaaacaattattgcgataagatttatttgactgatgataaccctagaaatgaaaatccagaaaaaataagagcaaatataaaaagaaaaataaaaagactcaaattatttgagatttctaatagagaaatagctattaaacgtagtattgaaaatttaagcacaggggaaattttagttgtagcgggaaaaggacatgaaaaagtacaggattatggaaaatacaaaaattttttttcagacaaatactgtattctaaaatatataaagattaaaaataaacagctaaataaggatctcaaatttaatattataaacgatataagaaaaaataaaaaaatatcttttaaaggaaaaattagaaatgcatcaattaattcaaaagaaataaaaaaaaatgatattttttttgcaataaaaggaaaaaataaagatggaaataaatttatca

SEQ ID NO: 311927 - DNA, 889 bp, Unknown
  Bacterial polypeptide expressing nucleotide sequence isolated from the Sargasso Sea
aaaaataagtttaaaaaaagaattaaaattatttactcttaaaaataaatatttacaaattgtgtctcataattatataaatgaagctcaaatattaaaaataaaacacgaaaacttaatacatgaaataagagttaatcttataggaaaaattcaattaaaaaatattttgatggccgtcatagcagcttcaaaaagtaatttagatttaaaaaaaatatttagcgtaattcctagactatctccagttgagggtagactcgagaaaataggaaaaattaaaaataaatctttagtattccttgattacgctcatacaccagatgctttgcaaacttgtattctaaatattagagaacaattccctgataagcatatttccgtgctctttgggtgtggtggtgacagagataagggaaaaagatcaaaaatgggcaaaatcgcttataaatattcggataaaatttatcttacagatgataatccaagacatgagaggcctaagaaaattagagatgagattaaaaggggtttaaaaaaaagtcaaattattgaaatttctaatagaaaagaagcaattgtaaaagcaattaatgacttaaatacaggagatattttgatagttgcaggcaaaggccatgaaaaaattcagcagattggaaatagaaaagtttttttatcagataggcaaataattttaaattcaattaaaaaaaagaattttaagttatctaaaaatttaaagttaaacattcttaacgaaagatttgatcgaaatgttctgtcatctaaatcagtaatcaataaagccaccatacactctaagaatgttaaaaaaaatgacattttttttgcaattaaaggaaaaaaaaatgatggtaataaattt

SEQ ID NO: 311928 - DNA, 901 bp, Unknown
  Bacterial polypeptide expressing nucleotide sequence isolated from the Sargasso Sea
taaacaaaaaagagtttttggtaaagattttaaaggaattgtttttacaaacttaacacatgatcatattgactaccataagacatttaaagattatagagatactaaaaaagaggtgtttgacactcttaataaaaattcgtttgcactaataaatattgatgataaaaatggaaaattcatgactcaaaactcttcagcaagagtttattcatactcaataaaatctaagtcaaatttttcttgcagaatagttgagcaacaacttaatggaatgttgttaaatattgaaaatagtgaaatatggacaaaactaataggagagtttaatgcatataatgtattagcaatttattcagtcggtaaaatttatgagctagattcattaaatcttttaactaatatcagtcaacttaatagtgttcagggaagacttcaatcatttctttcaaatagcaatgttactgtaataattgattatgctcatacaccagatgcaattgaaaatgtattatctactattaataagattaaaaaatctaatcaaaacttgataacggtaattggatgtggaggagatagagatagagctaaaagatcaattattggaaagatatgctcagatcttagttataaagtaatttttacatctgataatcctagatcagagaatccagaatcaataattaatgatatagtttcaggagtatcaaactacaacaataataaaattttggttgaggttgaaaggtcaaaggcaattgaagaagcaagaaaaaacagtggagaaggagatatagttcttattgcaggaaaaggacatgaagactatcaaatattgaaaaataaagtaatcaaatttgatgattttaaaatggccaaaaaaatttttaataaataa

SEQ ID NO: 311929 - DNA, 635 bp, Unknown
  Bacterial polypeptide expressing nucleotide sequence isolated from the Sargasso Sea
cgttatatcccgcaggcgatagcgcaaggtgttgctgccattattgcagaggccaaagatgaggctgctgacggcgaaatccgtgaaatgcacggcgtgccggtcatttatctcagccagctcaacgagcgcttatccgcgctggccgggcgtttttaccatcagccttccgggcaaatgcgcctgattggcgtcaccggtaccaacggtaaaaccacgaccacgcaactgttggcgcagtgggccaacttgcttggtgaaaccagtgcggtgatgggaacggtcggcaacggtctgctggacaaggttattccgacggaaaataccaccggttctgcagtcgatgtccagcacgtgctttctggcctggcagggcagggcgctaccttcgcggccatggaagtctcttcccacggtctggttcagcaccgcgtagcggcgctgcaatttgccgcctcggtctttactaacctgagccgcgatcacctggattatcacggtgatatggaacattacgaagcggcgaaatggctgctttattccacccatcattgcggacaggctatcgtcaacgccgatgatgaagtgggccgccgctggctggcgaaactgccggacgcggttgccgtctcgat

SEQ ID NO: 311930 - DNA, 688 bp, Unknown
  Bacterial polypeptide expressing nucleotide sequence isolated from the Sargasso Sea
aatgagaaatcttgcagaaatcgtccataatattgtaccattaggtcaacacgtacctaatactcatattcacgggttggcaatgaattcaaacgaggtaaatcaaggtgatatatttatcgcgatacctggaactagattagatggccataattttattgaacaggccatagagaaaggcgcatcagccattatatctaacggaaaggacctaggcgagctacctataccgcaaataaaagtagcaaatccacgaagagccgcatcaattgtagcttcggagttttatgggcatcctacaaaacatttaaaagttattggggttacaggtaccaatggtaaaacaaccacagcctcaatcttaaaatctattctagacaatgcaggatataaagttgctcaaattgggacacttggtcttattgctgatgattttgaacatattaaaacccttactacaccagaccctataactcttcaaaaactattttcgaaattgaaagaagccaattattcacatattgtcatggaagtatcttcacatgcacttgaccagtttagagttgctgacgttgattttaatattgcagtgtttactaacttatctccggaacatcttgactatcacgcgacaatagagtcttattttcaatctaaacttaagattatttacaatgctgaccattaa

SEQ ID NO: 311931 - DNA, 631 bp, Unknown
  Bacterial polypeptide expressing nucleotide sequence isolated from the Sargasso Sea
tatggatatagattattcaaaaattgtgaaccatacatctgatgtagttgaaggctctatattgtgcataaatcatgatgacaataataagttaaatgactatatttcctcttctttaaataaaaatccgaagtttgtaattacaagtaataagtgcgacattcaagatgaaaaagttttaagatttgaagattatgagaatatatttaaccatattcttgaagggataagcccaaattacaaaagtcttaattattttggaataactggaactaatggaaaaaccacaacagctttttacttaaatcaacttattggttcagataatttattcattggaacaattgatgagaaacaaaaatattcattcactaatgagaaaattcttactaccccaaaattatttaatgttgttaagttaatttcccttcaaaaggaaaatatcagttcagtatcgcttgaagtttcttcacatgctcttgatcaaagcagattaggcgaattaaaatttcttgtatctggttttactaacttaagccaggatcatttagattatcatggttcacttgagaattatttagactctaaggcaaaattatttcaaaaaggagtatctgaaaaatttgtatat

SEQ ID NO: 311932 - DNA, 881 bp, Unknown
  Bacterial polypeptide expressing nucleotide sequence isolated from the Sargasso Sea
atttgcagcaaaaattaataataaatttccaaaaaacttgattgctgttactggcacaaatggtaaatcatctattgcaaatttctattatcaaattttgcaattaaataaaaaaaaagttgcttctattggaactcttggaattagtggaattagttataaaaaaaatatttttaatactacatacgatccaattcaactaaataatattttcagaattttaaaaaagaaaaaaattaataatgttattttagaagcatcaagtcatggactaaaacaatgtagattagatggcttaaaatttaatttaggaatatttacaaatttgagtagagatcatctagattatcataaaacatttaaagattattttaattcgaaattaattttatttaaaagattaatgaaaaaaaaatcaagaataatttttgatgaagatttaaaaatttcaaaaaaaattaaaaaaatttcaaaaattaaaaattttaagactttaagtttaggatctaataatgctgattttaaaattattgagcacaaatatataaacttaaatcaagaaatcaaattttcatataaaaataagatttataattttacaacaaaattaattggaaaagtacaaactaaaaatctcataatgtcaattttagcagcttctaaaagtaatataaattttaataatattttaaaatctgtaaaaaaaataaaacctgttccaggaagattagagaaaattaacaatttaaacaataattcagttgttatcttggattatgcacataccccagatgctttgaaagtttgtttgacaaatttaaaagatcaattttcattaaaaaaaattaatcttgtttttggatgcggaggtgaaagagata

SEQ ID NO: 311933 - DNA, 565 bp, Unknown
  Bacterial polypeptide expressing nucleotide sequence isolated from the Sargasso Sea
gtcagtaatttgctgctggcgttggcaacgctgctggcactgggctatccgttagctgatttactgaaaacggcgacacaattgcagccggtttgcgggcgtatggaagtgttcagtgcgccgggtaaaactaccgtggttgttgattacgcccatacgccagatgcgctggaaaaagcgctacaggcggcacgtttgcactgtactggcaaactgtggtgcgtctttggctgcggcggcgatcgcgataaaggcaaacgtccgttgatgggcgcaattgccgagcagtttgcagatgttgtcgtggtgactgatgacaacccgcgtaccgaagagccacgcgccattattaacgacattctggcggggatgctggatgccggacaggcgaaggtgatggaaggtcgcgcagaagcggtgacaaacgccattatgcaggcgaaagaaaatgatgtggtgctggtggccggtaaaggtcatgaagactaccagatcgttggttcacagcgcctcgattattctgaccgcgtcacggcagcgcgtctgctgggggttatcgcatgat

SEQ ID NO: 311934 - DNA, 786 bp, Unknown
  Bacterial polypeptide expressing nucleotide sequence isolated from the Sargasso Sea
cttagatcaaggtagattatcaggaatcagtattgattatgccgttttaacaagcttttcgcaggatcatctcgattatcataaatcattagaaaagtatgggaatgccaaaaagattttatttaaagaacttcaacccaagcattcatttattcagattgacagcgaatttggacaaaacctatatgaagaacttgtggaaagtaaggttgaagtttttagtgtatctttagaaaaagaatctgatttttctgcatcatttaacaaaatagatgattctttaggtgtttccttaaagtcaccttacggggaaactgaatttaatctaagaactgtttcaaggtatatagcttcaaatgtaatttgctctatagcagctttaagtgtcgagggcataaaattagataagctagctgaatgtgcttctgagattagctttcctgcaggacgactagaaagtatacgtgtaggtaaagatatttgttacattgattatgcccacactcccgaagcattaaagcatgcattacaagagattagagaattttatgaggtagaaatttggtgcgtttttggttgtggtggagacagagataaaggaaagaggcctatcatgggaaaaatagcagaagattacagcgaccacatcataattacagacgataatcccagaaatgaagcttcaaaaaaaataatggatgagatattggaaggtactactaaatctgaaaatataaaaaccattgcagatcgaagagaggcaattaaatttactttagaagaaat

SEQ ID NO: 311935 - DNA, 919 bp, Unknown
  Bacterial polypeptide expressing nucleotide sequence isolated from the Sargasso Sea
atggaggaaagatattgtattgaggcaattgaaaatggcgctgaggctgccattattgggtctgctgcaaaagagaaaattggatctactgatcgagaaaggattttggttatagaggataatttagattatatttttggtcaaatagtcgctgagttttggaataggccttcaagaaaacttaaacttattggtgttacgggtacaaatggaaaaacgacaattacttttttattggaatatcttttaaaaaaattagggaaaaagactgcattatttgggaccttgctcaatagatggcctggcttctcagaagtggcttctcatacaactgatttcgccgataaacttcaaaagaaattaaatgctgctgttgaggtagaatctgaattcgcgatattagaggtaagttctcattctattgctcaaaacaggatatcaggatgcgaattcgaggcggctatttttactaatttaactcaagatcatcttgattatcactcagatatggaatcatattttcaaacaaaaagaaaattatttttcccaccttacttaaaagaaaaagatggaatttgtgtattaaatcatgatgactattggatatctaaattatcatttgatcttgaaaaaagatcttcattagtctctacaaagattactgaaagtgaagttgaaaatgatgatttttttttcgtaacagataaaaaatttactgaaagtggttccacctgtatttttcatacacctagggaaaaaattcaactttttgttccacttgttggtgaatttaatttaatgaatgcgatacaagcaataacaattttgtataaacttaatttttctttaaaagatctatcaaagttaatacaatctttcccaggttgctcctgggagaatggagaaaataaaaattgat

SEQ ID NO: 311936 - DNA, 903 bp, Unknown
  Bacterial polypeptide expressing nucleotide sequence isolated from the Sargasso Sea
actatagaaaataaaattaataataaaacctattcatcagaattgacaactccagattcaattcagttaaataattatttgagtaaaatggttgataaaaaatgtgagtattgttttatggaagcaagttcacatgcaattgatcaattaagaatatatggtataagaattaaagttggtatttttactaatatttctcatgatcacttagattatcatttaaactttaagaattatatagactcgaagaagaaattatttgatttattagacaaaaagtcaattgctctagtaaataatgatgataaaagatcaaattatattttgcaaaactgttttgcaaaaaaatattattatggaataaaaaaggattctgagttttcaggaaaaattattaataattcaatagatggattaaaattcagaataaataatcaggatatatttcttaaactaaagggtaagtttaatgcttataatattttgtgcgtttatgcaggctcaattattcttggcattaaaaaatccaatcttttagaacatatttctgaattagaaagcccaaaaggaaggtttcaatttataaaaaatagtaaaggaccatcaattcttattgattatgcacatactcctgatgctttagaaaatgttttaaaaaccataaaagaatttaaagttaaaggtaaaataatatcattatttggcgctggtggtaatagggataagaaaaaaagattttttatgggcgaaatagcatcaaagtatagtgatcaaattatacttacctctgataatccaagaaatgaagacccacttgatataattaatgatattaaattaggtataaaaaatagtaaaaaaatagttattaatgttgatagaaaatctgctataaaatcagct

SEQ ID NO: 311937 - DNA, 940 bp, Unknown
  Bacterial polypeptide expressing nucleotide sequence isolated from the Sargasso Sea
catgggacttcatcaatttagactcgatagtgttaaatttacaggcgcaatttttacaaacttatcacatgatcatcttgattatcataaaaatattgaaaattattttctttgtaagaaaagactttttactgagattcttcaaaataattcagctatagccattaatattgacgatgattttggtaaaagactttttaatgagataaaaaataacagacaccttattattacatttggacaaagttcagatgcagatattaaaataaattctattaatcaaaataatcagaatattgatctggttttagaatataagaatcaaatttttaaatctactattggaatgataggaaagtttcaaacatataatgtagtcgccgctgcttctatttgtgttgcattaggaatagatgcaaatctaatattcaaatcattaagttaccttaagcctgcacgtggcagaatggaagtaatttcagtcaggtataataactcaatgattataattgactacgcgcatactccagaagctctaagttatgttttaaattctattagagaaatagcaaaaggaaaaataattaccttatttggctgtggtggtgatcgagataaaaagaaaagaaaatctatgggagaacttgcaaaagaattttctgatttagtaatagtaactgacgacaatcctagatctgaatctccatcaagtattagaaaagatattttagagggatgcccaaatgctgaagaaatttcagatagaaataaagctattaattatgctatttcaagattacagaaaagtgattttttactcattgctggtaaaggtcatgaaacctcccaaacaataggtatggagacacttccttttgatgactatacagtcgcaaaggagactataaagaatattggaaaaatcagggaaaactgttaa

SEQ ID NO: 311938 - DNA, 668 bp, Unknown
  Bacterial polypeptide expressing nucleotide sequence isolated from the Sargasso Sea
ggcggtgcccgtctcactggccgtgccggcgctcgaccagctcgccggcgagatcgccagcggctggtacggcgatccgagcgacagcctgctcacggtaggagtgaccggcacgaacggcaagacctcgtgcacgcagtggatcgccaccgcgctgacggcgctgcaccagccgtgcgcggtgatcggcacgcttggcagcgggatgcccggccagctcgtgccgacgggtttcacgacccccgacgcaccgcaactgcagcgtagcctcgcgcaattgcgcgacgcgggcgcgaaggccgtggcgatggaggtgtcgtcgcacgcactgcaccaggggcgcgtgaacggtacggccttcgacatcgcggtgtttacgaacctcacgcaggatcacctcgactatcacggcacgttcgatgcatacgaggccgcgaaggcgaagctgttcgcgtggcgcggcctgcgcgcggcggtcgtcaaccgcgacgacgcagccggacagcgcttgctcgagaaactggccggccgcgtgcgcacgatcgcgtacgggatcggcgacgcaccggcaccggacgccgatcgcgaactggtcgcgctcgacgtgcgtgccaccacgaccggcacggcgttccgcttgcgttcgtcgtgggggcgacgcggacgtc

SEQ ID NO: 311939 - DNA, 800 bp, Unknown
  Bacterial polypeptide expressing nucleotide sequence isolated from the Sargasso Sea
tgcagttttggcagcatatctatcaggcattaaaattgataccattctaaggaatataagtaaggttaagcctgtcaatggaagactagagcaaattggtaaactaaaaaataaatcacgagtaatacttgattatgcacataccccagatgctttaaaaacagttatatcaaatataaaagaagattaccctttaagtaaaatttcattagtatttggatgtggaggagatagggataaaagtaaaagacctttaatgggagatattgcaaataagtattgtgataaaatatatttaactgacgacaatccaaggtttgaaaatcctaagttaataagagaccagataaagaggaaaattaagaaaaaaaaatatattgaaatttcatcacggtctgacgctatttcaaaagctgttagtgaattaaattcaggtgatattttaattgttgctggaaagggacacgaaaattatcaagaatataaaaaaaaactttttttctcggataaattagagattattaaagctattaaaaagaagaataacttattgtcgaattctcttaaaacaaatatcttaactgaatcattcaataataaaattttaaataaaagaactctaataaactcagtgtctttaaactcaaaagatgtaaaaaaaaattcagtattttttggggtgaagggtcaaaaatttgatgggaataaatttggaattgaggcaataaaaaataatgcaattttagcaatcacaaataaaaaatctaaaaattccagaaatatatttagtaaaaatcctt

SEQ ID NO: 311940 - DNA, 903 bp, Unknown
  Bacterial polypeptide expressing nucleotide sequence isolated from the Sargasso Sea
aatagaagatcttaatagttcatatttaaagtggatagatgagtattttcagattgatcattcatatttcaataatctcttcattacaggcacgaatggaaaaactacaactctcagctttttaagcgaaattttggagaataatggcattaatcatgcttcatctggtactttaggaacttttataaataatcaaaagatttttaacaacgagctcactacagaagagcctgttttcattagaaatcttatgtcaaagtgttttcgatcaaacattaaaaatatcatttttgaagcttcgtctattggagttgataaaaatagattgcagggcttaaaggttaatcatgcgatatttacaaatatttccagagatcatcttgattatcatggctcattgcaaaattatattaatgctaagtttaagttagttagtaacgcaaaagttgagactgcagctgtaaattttgacgatgaaataatatctagccaacttaaaaagatacgctcaagtaaaacatttaagatttcatctaggaataataaatcagatattttttttaaagctcttaagtactttgaagacggaaatattgaatttttagtagaaacaccgtggggaaaatttcaagctgcttccaaaattgaatctgaatttaatttatataatttatttttaactttgccttattatcaatttattaatgataactgcgaagacttttttgctagagttgagaatctatcattgccattaggcagattaaataaaattgaaaaagaaaatgtatatattgattatgctcatacgcctaaggcattagaatctgtatgtaaatgtttatttaaaaagaaaaaaaataaattaataattgtttttggagctggtggtgaaagagacaa

SEQ ID NO: 311941 - DNA, 759 bp, Unknown
  Bacterial polypeptide expressing nucleotide sequence isolated from the Sargasso Sea
tggtataaaaactaataataataataagttaacagataatacaaccttagattctatcaatattcataaaacactctcacaattaaaaaaaaaaaaaataagaaatgctattttagaagcatctagccatggtctgaaacaatatagattaaatggattaagatttgatacaacaatttttacaaatttatctcgtgatcatttagactaccataaaacatataaagattatttaaattctaaattaatattatttaataaacttacaaaaaaaggaggaaatgtaatatatgataatgatatttctcaagcgaaaatacttaaaaaaatctgtataaaaagaaatctaaaaccattaactattggaaaaaaaaattctaatttattaattaagaaacacgagtatttaggaaattttcaaaaaattgaaattgaatttaataatcaaaaatactcatttaccacaaatttaattggaaaaattcaagttaaaaatcttctatttgcagctttagcagcaagtaaaagtaaaattaaatttagcaaaataattgagtcaataagtgaagtaaaggctgttgaaggaagattagagaacgttggtaatataaaaaataactcaaaagtaattctagactatgctcacacgcctgacgcattaaagcatactttagaaagtataaaagaacagtttagtcacagctctataaaaattgtttttggatgtggaggagatagagacaaagataaaagatctat

SEQ ID NO: 311942 - DNA, 1033 bp, Unknown
  Bacterial polypeptide expressing nucleotide sequence isolated from the Sargasso Sea
tgctataaagggaacaattttgatggaaataaatttatttccactgcaataaaaaaaggatctaaaattattatcagtgagaaaaaaatagtaaattttcaaaaggatgttttatttattcatactaaaaacataagaaaacttttagcaggaatagcttttaaaatttataagaataaaccaaataatttaattgctgtaactggaacaaatggaaaatcatccgtttcagatttttattttcaattattgaaacttaataaaataaaagtagcctcaattggaacattaggcgtaaaatcaaaaaatataagactcaatttaccaaatactacaatagaccctattcgaataggacaaatattatctaaattaaaatctcaaaaaattaataatgtaattatggaagcatctagccatggtcttagccaacataggttagatggtttaaagttttcatcaggtattttcacaaatttatctcaagatcatctagattatcataaaaattttaaagaatattttaaagcaaaacagtacttatttgaaaatttgataaaaaaaagaggaaatgtaatagcggatgaaacaataccagaatttaaaacaataaaaaaaattgcaatttctagaaaattaaagatacagcctttaaataatagtaaaaatcaacttcaaatcttatctcattgttttagaggtgagaaacaaatattaaagataaaatacaataatcttacaagagaagtaaatttaaatcttattggaaaaatacaattaaaaaatattttaatggcaattcttgcagcaaaaaatagcaatttaagtttaattaagattataaatgtattatcaaaacttaaaccaatagatggaagatttgaaaaaataggtaaaatcaaaaataagtctagagtaatacttgattatgctcatacaccagatgcgcttagaatatgtctttcaaaccttaaagagcaatttcctaataaaaaaataattttactttttggttgtggtggaaatagagatc

SEQ ID NO: 311943 - DNA, 905 bp, Unknown
  Bacterial polypeptide expressing nucleotide sequence isolated from the Sargasso Sea
atatattcatacaaataatataagaaaattattagctgaaactgcttttaaaatttataataaaaaaccaaaaaatttaatagcagttacaggtacaaatggaaaatcgtcagttgttgatttttattatcaaatactaaaattaaataataaaaaggttgcttcaattggcacattaggtgttaaatcaaaacgaattaatttgaatttatctaataccacaatagatccaattaaattggctaaaattttgagtaatttaaaaactcaaaaaatagaaaatgtaattatggaagcctctagtcatggtttaaaacaaaatagattagacggtctgaagtttaattcgggtatatttactaatttatctcaggatcatcttgattatcataaaaatttaaaaaattatctaaaagcaaaactttatttatttgaaaatctaattcaaaaaagaggtaatgtaattacagatcaatcaataccagagtttaaaaacataaaaaaaattacaattcataaaaaattaaaattgcacacactaaatgataagaaaaataatctagagcttttatctcataactttaaaggagagggtcaatttctcaaaattaaattaaatagttcgataaaggatctaaatttaaatttaattggaaaagtacaattaaaaaatcttttaatggcaataattgcagcaaaatatagcggtgttagtttaaataaaattttaaatacaatttcaaaattgaaaccagtagaaggaagatttgaaaaaattggtaaaattaaaaatcaatctaaagtaattcttgattatgctcatacgcctgatgctctaaaaacgtgtcttttaaatcttagagaacaatttcctaataaaataatcacagtgctgtttggctgtg

SEQ ID NO: 311944 - DNA, 898 bp, Unknown
  Bacterial polypeptide expressing nucleotide sequence isolated from the Sargasso Sea
aatgggaaatcatccattgcagatttttattttcaattattaaaaattcataaaaaaaaggtcgcatcaattggaactttaggtataaaaactaatactacatttaagagtttacccaataccacaatagatccaattaaattaagtaaaatattcaaatatctaaaaaaacaaaaaatcgaaagtgtaattttggaggcatcaagtcatggattaaaacaaaatagattagatggactgaaatttgatattggtattttcactaatctttcccatgatcatttagattatcacaaaactttcaaagattatttaaattcaaaattatatttatttaaaaatctattaaaaaaaaaagcaaatttaataactgatgaaaatattgaacagtttaaaagaataaaaaatattgctaataaaagaggattaaaacttaattttatttcttctggtaatgtcaattcaggcttaaggattattgatcacgaatttagagatgaaaagcaaatagttaaattatgctatggaaaaaatgaatttaattttgaaattaatttaattggaaaaattcagcttaaaaatgtcttaatggctttaattgcagcagaaaaaagtggaattaaatttacaaaactaatcaaaaatttgaataaattaagatcaattaatggaagactagaaaaaataggaaatattaaaaataaatctaaagtaattttagattacgctcatactcccgatgcattaaaaactgttttggaaaatctaaaagatcaatttcctaataaaaaaatctctttagtatttgggtgcggaggcgatagagacaaaacaaaaaggtttctgatgggtaaaatagctgatagattttgtaacaatatctatatcacagatgata

SEQ ID NO: 311945 - DNA, 757 bp, Unknown
  Bacterial polypeptide expressing nucleotide sequence isolated from the Sargasso Sea
aacttaattgaaaaaatcccttataatcttgaaggactaaatattaaaggcttagcttctaatagtaaggatgtcaaaaaaggttatattttttttgcaattaaaggaaataatctaaacggtgaaaattttattaatgaagcaattaaaaatggagcaagtgttataatttcttctaaagactacaagaaaaatgaaaaaaaagctattcatattaaagttggaaatgtaagaaaaagtttgagtctaatctgttcaaaattttttaactctaaacctagaaatataattgcggtaacgggtacgaatggtaagacttctgttgctgattttttttatcaaatattaaaattaaataatatacatgttgcgtctattggtactttaggcattaagctagataaaaaaactttaaatactaaattgacatctcctgatgtgattacactacataaaaatcttgaaatattaaaaaaaaacaagattgaaaatgtcataatagaagcctcaagtcatggtttagatcaaaacagattgaataatttgaattttaaagcaggaatttttactaacttgagtcaggatcaccttgattaccataagactatgagagcttatttggagtctaaaatggttttatttaaagctcttctccctaaaaaaagtttcgtaattactgatggaaaactcaaggaattttcgattttaaaaaaaatttcaaaaaaaaagaaattaagactaattgatatcaataagg

SEQ ID NO: 311946 - DNA, 903 bp, Unknown
  Bacterial polypeptide expressing nucleotide sequence isolated from the Sargasso Sea
aaattataaaaattattttaactctaaattaactttatttaataaattaacaaaagaaaatggaaatttaatatttgataatgattttaaaaatttaagagtttttaataaaattgcaaaaagaaaaaaactaaatttgtttagtattggatcaaaaaaatgtaacttaagaataatatcaattaatattttaaacaatttccaacatgttaaattttcatacaaaaataaaatatataattttaaaacgaagttagttggtaagattcaaataaaaaatttgatgatggctgttgtagctgctttaaatagtaacgtaaaaatggaagatattgtaaaaagtttaaatcatatgaaacctgtaaatggaagattagaaattatcgcaaaaacatataacaattcaataataattctagactatgctcataccccagaggctcttaagacatgcattaagaatgtaagagagcaatttaatttaagaaaaatcaaagttgtttttggatgtggtggtgaaagagataaagaaaaaagaccgatcatgggtaaaattgctaacaagttatgcgattttatttatttaacagatgataatccaagaagtgaaaaccctgatgaaataagaagaaatataaaaaaatcaatttcaaaatctaagttaaatgaaattccatcaagaaaattagctataagaaaagcagttttaaatactaaatctgatgaagttttgattgtagctggcagaggtcatgaaagaattcaggaatatcatgataaaagaattttttctgatagagataatataattaagtcagtattattgaagaataaatctttatcaaaaaattggaaattaaacatatttaaagaatttataaaagacaaaaaactaaataaatt

SEQ ID NO: 311947 - DNA, 860 bp, Unknown
  Bacterial polypeptide expressing nucleotide sequence isolated from the Sargasso Sea
aatgcacggtgtgccggttatctatctgagccaactcaacgagcgcttatccgcgctggccgggcgtttttaccatcagccttcggaacaactgcgcctggtgggcgtcaccgggactaacggtaagaccaccacgacacagctgctggcgcagtgggcgcagctgctgggggaaaccagcgcggtaatgggaaccgtaggcaatggcctgctggagaaagttatcccaacggaaaacaccaccggttcggccgttgatgttcaacacgtactctctggcctggcagggcagggggcgacgttcgccgcgatggaagtctcttcccacgggctggtgcagcatcgcgtagccgcgctgcagtttgccgcctcggtcttcaccaacctgagccgcgatcacctcgattaccacggtgatatggaacattacgaagcggcgaaatggctgctctactcaacccaccattgcgggcaggcgattgttaatgcggacgatgaagtcggtcgccgctggctggcgaagctgccggatgcggttgccgtatcgatggaagatcacattaacccgaactgccggggccgctggctcaaagcgaccgccgtgagctatcacgatagcggcgccaccattcagtttgcctccagctgggggaacggcgagatcgaaagccgcctgatgggcgcctttaacgtcagcaatctgctgctggccttagccaccctgctggcgctgggctatccgcttgccgatctgctgaaaaccgccgcgcgcctgcagccggtatgcgggcgtatggaagtgttctccgcgccgggtaaaccgaccgtggtcgttgattacgcccacacgcctgatgcgc

SEQ ID NO: 311948 - DNA, 768 bp, Unknown
  Bacterial polypeptide expressing nucleotide sequence isolated from the Sargasso Sea
ctccacgtagatgggccttcggcggtggtgaatggcgatgacccctgggggagtcgtctcgccgagcagttgaggggtcgttgctggcgcagctccatgggagacccgcaagccgagctgcagatggtcgacctcgagatgaccggacagggcgtccgtggacgcttgctcagtcccgccggatctggagccttctgttttccactgctggggcgcttcaatttgatgaacctgttgcaggcggtgggcgtgctgctgcaacggggtctgcccctggcgccgctgttggaggccgtcggcagcttccggggcgtgcccggtcggatggagcgggtggtcgtaaacggtgctgaagctgccgcgttgcccactgttcttgtggattacgcccacacccccgatggtctggagaatgccctggcagcgtctcggccattcacggatggtcggctggtctgcgtgttcggctgtggtggcgacagggatcggggcaagcggcctcagatggcagcgattgcggcgcgattggccgatcgggtggtggtcacttccgacaacccgcgcacggaagatcccgatcaaatccttgccgatgtggtggcggggatcccctccggcaccgacctgagcgtggagcgcgaccgggccacggcgatcgcggaggccattgctggtgcgtcagcggcggacctggtgctgattgccggcaagggccatgaggactatcaaattctcggtaccgagaaagtgcatttcgatgaccgggaa

SEQ ID NO: 311949 - DNA, 839 bp, Unknown
  Bacterial polypeptide expressing nucleotide sequence isolated from the Sargasso Sea
aaaagaaaaaaaaattgaaaatgttattctggaagcctccagccatggattaaatcaaaatagattggatggattaaaatttaatattggtatatttacgaatttgtctagagatcatttagattatcacaagtcttataaaaattatttaaattcaaaattaatattatttaaaaaattattgaaaaaaaagtcttatgctattttcgacgatggtttaaaaatttcaccaaagttaagtagaattactaaattaaataaaattgaaaaatttacaataggaaataccaaatcaagttttgaaatattagatcatcaatttttaaaaaatgaacagaaaatattattaaggtttaataaaaagaaatatagtttttcaactaaattaattggaagagttcagactaaaaatttactaatggcaattatggctgcaatcaaaagtaaaatttcattggaaaaaattttaaaaattactcaaaaaataaagccagtgaatggtaggttagaaaaaattggaaaacttcacaataatggtattgttattcttgactatgctcatacaccagatgctttaaaaacttgcattaaaaacgtgaaggagcaatttaaattaagaaaaattaatctagtctttggatgtggaggagagagagacaggcccaaaagaaaaataatgggtataatagctaatagatattgtgataaaatatacctaacagatgacaatccaagaagtgaagatccaaataaaataaggcgagatataaagtctaatattttaaagaataaaataatagaaataccatcaagagaaagtgcaataaaatctgcaattt

SEQ ID NO: 311950 - DNA, 973 bp, Unknown
  Bacterial polypeptide expressing nucleotide sequence isolated from the Sargasso Sea
cttggaatatttacaaatttgtctcaggatcatttagattaccataaaaatttaaatgattatcttaatgcaaaactttatctctttaaaaatcttatcaaaaaaaaagggaatataataacagatgatacaatacctgaatttagagcaattaataaaattgcaaaaaaaaaaagatttaaaataattacattgaatgataaaaaaaatcattttaaagttttatctcatacttttaaaggtgaaattcaattacttaaaattatacataacaactccataagagagattaatcttaacttgataggaaaaattcaattaaaaaatatattaatggcaataattgctgctaaaaaaaatattaatttaaaaaagatttttgatattattgaaaaaattaaaccagtagagggcagatttgaaaaaattggtaaaattaaaaataaatcaaaaataattcttgattacgcacacactccagaggccttaaaaacttgccttttaaacttgagagaacaatttccagatcaaaaactctgtttattatttggttgtggtggaaatagagatcaaaataaaagatcaaaaatgggtaaaattgcatccaatttctctgataaaatttatcttaccgatgataatcctagatttgagaacccagataaaattagaagagatattaaaaaaggaattaagagaaaaaaaatcattgagatttctgatagaaagaaagcaatatttgaagcaacaaaaaatttgaatactggagaaattttattagttgctggtaaggggcatgaaaaaactcaggatataggtaagcaaaaaatttacttttctgataaaaaaattattcttaaagcaattaaaactaaaaacttaaatttatctgataatttaaagttaaatataattaaagaggtttcaggcaataaaagtgtctcttcatcattacctattaaactggcaaaaa

SEQ ID NO: 311951 - DNA, 863 bp, Unknown
  Bacterial polypeptide expressing nucleotide sequence isolated from the Sargasso Sea
tttcaaacaaaaagaaaattatttttcccaccttttttaaaagaaaaagatgggatttgtgtattaaatcatgatgaccattggatatctaaattatcatctgatattgaaaaaagatctttattagtctctacaaggattactgaaagtgaatttgaaaatgatgatttttttttcgtgacagataaaaaatttactgaaagtggttccacctgtatttttcatacacctagggaaaaaattcaactttttgttccacttgtcggggaattcaatttaatgaatgcgattcaggcaataacaattttgtataaacttaatttttctttaaaagatctatctaagttaatacaatctttccctggtgctcctgggagaatggagaaaatacaaattgataataatgacttttcaagatctcttccaacagtaattgttgattatgcccacactcctgatggattaaaaaaagttttgcaatcaattaaaaaactttgtgaagggaaactaatcactgtttttggctgtggcggagatcgtgatcgtagtaaaaggcctttaatgggatcaatagctgaagagttgtctgatcaactttttataacttcagataatccaagatcagaagaaccccaaaagatagtaaatgatattttgatgggtattaaaaacagagaaaaaataacaattgaaattgatagatttaaagcaataaatgaatctattaaatttgccaaaaaaaaagatattgttttaattgcaggaaaaggacatgaagactaccaaattctcaatgataaagttattcattttgatgatagaaaaatagcttataaattattaaaagaaaaaaataaatctca

SEQ ID NO: 311952 - DNA, 842 bp, Unknown
  Bacterial polypeptide expressing nucleotide sequence isolated from the Sargasso Sea
tatgagatctataaaattatttaaacttttagatttggtaggaattattcctacatcaaatcttatcgatcaagaaatcaataatatttcttttaactctaaagaagtacaaaaaggaactttatttttaggaatgcctggtttaaattttgatggaggaaaattttgtattgaggcaattgaaaatggcgcggaggctgccattattgggtctgctgcaaaagagaaaattggatctattgatcgagaaaggattttggttattgaggataatttagattatatttttggtcaaattgtcgctgagttttggaataggccttcaagaaaactgaaacttattggtgttactggtacaaatggaaaaacgacgattactttcttattggaatatcttttaaaaaaattagggaaaaagactgcattatttgggactttgtttaatagatggcctggcttctcagaagtggcttctcatacaactgatttcgccgataaacttcaaaagaaattaaatgctgctgttgaggcagaatctgaatttgcgatattagaggtaagttctcattctattgctcaaaagaggatatcaggatgcgaatttgaggcggctatttttactaatttaactcaagatcatcttgattatcactcagatatggaatcttattttcaaacaaaaagaaaattgtttttcccaccttatttaatagaaaaggatggaatttctgtattaaatcacgatgacccttggatatctaaattatcgtctgatcttgaaaaaagatcttcattagtgtctacaaagattactgaaagtgaatttaaaaatcatgattttt

SEQ ID NO: 311953 - DNA, 976 bp, Unknown
  Bacterial polypeptide expressing nucleotide sequence isolated from the Sargasso Sea
aaaattagacaaccagctttacctaaagtttcagttgcaattacggaaacaaatggcaagacttcagtatcatggtacctcgctcaaatatgtaaatttaatagaattcctagcaagttaacaggaacccttggttattttgttgatttaaaaaaatacaaagattcagtattaactacaccaagcaatttagatctttatcaattttctaatgaaattaaaaaaaataaattttgttttataactgaagcatcaagccatggattgcatcagggtcgtttcaaaaatttaaaaatagatatagctgcaattaccaatctttcacatgatcatttagattatcataaaaactttagatcttatgtgcaaagcaaattgttattattcacaaaaattttaaataataaaggagtagcagtaattaatgcacgtttaaaaaattataaaacattagaaaaaaaaataaaacaaagaaaaattaaaatgatcacctttggagctaaagatgtatatttctatgaaaataattatttatatttatatatttttggaaaaaaatataagttagaaaaatttaaactaataaacaatattcaaaaagaaaatttggaatgtgcaatcgcttgtgcgttagctattaatgttagtgtaaataaaataattaattgtttgcataaattaaaatcagctcctggtagatttgaagtaataaactttagaaaaaaaaattcaaaaatcataatagactatgctcatactcctgatgctcttgaaaatattttaaagactttttcatatgataattttaaaccttctcttgtttttggctgtggaggaaatagagataaagaaaaaagaactaaaatggcaattatagcaaaaaaatattctaatagagtttatataactgatgataatccaagatatgaaaatgcaaaaactattagagaaagtattaaaaaatttgttccaaagg

SEQ ID NO: 311954 - DNA, 952 bp, Unknown
  Bacterial polypeptide expressing nucleotide sequence isolated from the Sargasso Sea
catgcaaattttaaatattgcaaaataaaatcagcatctatttgtactctaggagttgattatggtaaaaaaataaacaaattagaaaatacaactgtagatccaataacattaaaccaaaaacttttaaatttaaaaaaaaataaaataaaaaaaattattttagaagcatcttcgcatggattagatcaaggaagattagataacttaaaattttcaattggtattttcactaatttatctagagatcaccttgattatcataaaaattataaaaattattttaattccaaaatgattttatttaataaattaatgaaacaaaaaggattagcagtttacgatagtgatacagatgtatcaaagaaagtaattaaaataataaaaaaaaaaaatttaagagctattggagtaggatttaaaaattctgatttaataattaaaaatattgttaatttaagaagtaaacaatttgttgtatttaaatttaagaataaaatccattattttacaacaagattaataggtagatttcaggtaaaaaatttacttatggcagttgctgcagcaagcgaattcataccacttgataaaataattaaaaatattcaaagaatttgctctgtaagtggccgtttggaagaaataggaaagataaacaatcaatcaaaagtttttttagattatgcacatacaccagaagcattaaaatcaactattttaaatattaaaaatcattttaatttagaaaacattaaaattgtttttggatgtggtggggatagagataaaaaaaaaagatctttgatgggtcgaattgcaaacaggtattgtaataaaatttatttaactgatgataatccaagaaatgaaaacccctctataataagaaaacatataaaaaaatatataaataaaaaaaagttaagtgaaattccatctagaataaatg

SEQ ID NO: 311955 - DNA, 801 bp, Unknown
  Bacterial polypeptide expressing nucleotide sequence isolated from the Sargasso Sea
gttcgggttgctgtcgccgcgttcatcaacttgactcgcgaccatctggactatcatggcgacgaaaccgcgtacctagcggcgaaatctcggttgttcgcggagatcgtcgtggatggcggcgtcgtggtaatcaatgccgacatccccgaggcggatggattacgttccatcgccaccggccgtgggcttcgcgtgatcgattatggccgcgatgctaccgatctagtcttggtcgacgtcgtcgcggatggctcgggtcagacccttacggtcgacatctttggtcatcgccatgacgttcgattgctgctgcctggcgcgttccaggcgacaaatgcgttggcggctcttgggctggctgtggcgaccggcgtttcggaacagacggctgttggcgctctggcggaacttgaaggggtgcgcggccggatcgaactggtagcgcggcacccgaatggcgcggcgatctacgtcgattacgcccatacgccggacgccctgaagagcgtattggaaacgttgcggccgcatttggccggtgaactacacgtggtgttcggctgtggtggtgaccgtgacccaggcaaaagggtggagatgggacgctatgctgccgctgttgcggagcacgtcattctcaccgatgacaatccgcgtaccgaagatccggctgaaatccgcaaggccgcacgcgtcggctgtccggacgcgttggagatgggggatcgggccgaagctataacagcgggcgtcaaggcgctgaagccgggggatatccttgtcgtcgccggcaagggc

SEQ ID NO: 311956 - DNA, 832 bp, Unknown
  Bacterial polypeptide expressing nucleotide sequence isolated from the Sargasso Sea
ttactagctcaaatttcatttagtatctttaaaaaaaaaccaaataacctaattgctgtgactggcacaaatggtaaatcttcagtttcagatttttattatcaaatcttacgtctcaacaataaaaaagttgcttctataggaacactgggggtgagatcaaataattttaatttaaatttattaaatacaacgattgatcctatttctttaggaaaaattttaaccaaattaaaaaaaagaaaaatagaaaatgtaattatggaagcatcaagtcatgggttgcaccaaaatagattagatggattaatgttcaattcagctatatttactaatttatcccaagatcacttagattatcataaaaattttaaaaattatcttaatgctaaactttatttatttcaaaatctgataaaaaaaggtggatttgttataactgatgacaaaatacctgaatttacaaaaattaaaaacatcagtttaaaaagagaattaaaattatttacctttaaaaataaatatttccaaattttgtcccataattataaaaatgaagctcaaatattaaaaataaaacacaaaaacttaataaatgaagtaagagttaatcttgtaggaaaaattcaattaaaaaatattttaatggctgtcatagcagctttaaaaagtaatttagacttaaaaaaaatatttagtgttattcctagactatctccagttgagggtagatttgaaaaagtaggaaaaattaaaaataaatctttagtattccttgattacgctcatacaccagataccttacaaacttgtattctaaatattagagaac

SEQ ID NO: 311957 - DNA, 886 bp, Unknown
  Bacterial polypeptide expressing nucleotide sequence isolated from the Sargasso Sea
attatagaagcatctagtcacggattatctcaaaaaagattacatcacgtgaaattcaaagcaggcatttttacgaattttagtcaggatcacttagattatcacaagaccatgaagtcttatctaaatgcgaaacttttattatttagagaaatattagaccaaaaaacttcaattattttagatagaaatataaatcaatattctctgataaagaaaattgcaaaaaataaaaaattaaaggttttagacataaacaaagaattaaataaaaaaggagatttatattttaaagatttaatagattttaggattaaaaatctagctatggcaattgtagcctctaagatatgcggtttaaaagataaatatatttattctgcaattaaaaaattaaaagatgttaatggaagacttgaactagttaaaaattttcccaacaaaattaaagtatttatagactacgcgcatactccagatgctttaattaaagcaataaaatctctaaaaaatgaatacggaaacaatatttctttagtttttggctgcggaggtgatagggacaaaaaaaaaagatctctaatggcaaaaattgcaaacgaaaattgtaacaaaatttatgttacagatgacaatccaagaaacgaaagtccaaaaaaaataaggaaacagcttttaaaatatatacttaacaacaaatcatttaatataggaaatagggaattagctatcagaaaatccattcaaaatgcagaaccaaacgaaattatattaattgcaggaaaaggtcatgaggaaaaacaaatttataaaaataaaataataaacatttcagataaaaagatcgtgaaaaaaataaaaatgaaaactagaatttccaaaaaaa

SEQ ID NO: 311958 - DNA, 788 bp, Unknown
  Bacterial polypeptide expressing nucleotide sequence isolated from the Sargasso Sea
cacgatgaccattgggtatctaaattatcgtctgatcttgaaaaaagatcttcattagtgtctacaaagattactgaaagggaatttgaaaatgatgatttttttttcgtaacagataaaaaatttactgaaagtggttccacttgtatttttcatacaccaagggaaaaaattcaactttttgttccacttgttggagaatttaatttaatgaatgcgattcaagcaataacaattttgtataaactgaatttttctttaaaagatttatcaaagttaatacaatctttccctggtgctcctggaagaatggagaaaatacaaattgatgataatgacgtttcgagatctcttccaacagtaattgttgattatgcccacactcctgatggattaaaaaaagttttgcaatcaattaaaaaactttgtgaagggaaactaataactgtttttggctgtggcggagatcgtgatcgtagtaaaaggcctttgatgggatcaatagctgaagagttgtctgatcaacttttcataacttcagataatccaagatcagaagaaccccaaaagatagtaaatgatattttgatgggtataaaaaaaagagaaaaaataacaattgaaattgatagatttaaagcaataaatgaatctattaaatttgccaataaaaaagatattgttttaattgcaggaaaaggacatgaagactaccaaattctcaatgataaagttattgattttgatgatagaaaaatagcttataaattattaaaagaaaaaaataa

SEQ ID NO: 311959 - DNA, 796 bp, Unknown
  Bacterial polypeptide expressing nucleotide sequence isolated from the Sargasso Sea
aaaacttatgttatattagataaatttataaaagaatatccagttttaaaaagaatttctaaaaaaagacaattaagattattagatattaataagcaaattaaaaaaattaaaaataattcattatctttaattggatcttttcaagcaaagaatttatcaatggcatgcttagcagcacgattgtgtaatgtaggtaatactggaattaacaatgctttgaaaaagattaaaagtgtaaatggcaggctagatttaatcaaaatatatccaaataatattaaaatatttattgattatgctcatacacccgatgcattacaagaggttttgcagtcaattaaaaagttaaataataataaaatttcaattgtgtttggttgtggtggagagagagattataaaaaaagacccttgatggcaaaaatagcaaaatctttttgcgataaaatctatgtgacggatgataatccaagaaaagaaaatccaaaaaaaattagaaaagaaattattaaacaccttaaaggaagtaattattttgatattggaaacagatcgaaagcaattaaagagtctcttattaatgctgaacccaatgaaaccattttagttgcaggaaagggccatgaaaactatcaagattacggtaaaagaattttatcaatatctgatagacaaataataaaaaaattaaaatttaaaaaaaatacatcaaatcaaagaaatcaaaattatttatttaactcaaaaatgatgaatacgattttaaaaaataaaaaattttataaatttgatg

SEQ ID NO: 311960 - DNA, 339 bp, Unknown
  Bacterial polypeptide expressing nucleotide sequence isolated from the Sargasso Sea
gtggccgtggattacgcccacacgcccgacgcactggaaaaagccctgcaagccctgcgccccctggcgcagcagcgcggtgggcaactgtggtgcgtgttcggctgcggtggtgatcgtgatgctaccaagcgtccgctcatgggcgctgccgcccagcaccatgccgactgggtggtagccaccagcgacaacccccgcagcgaagaccctgcccacatcctgcaccagattctgcagggcaccattgccggcgaaaccgtgcgggtggaacccgatcgcgccgccgccatcgccctggcattgaacgaggccgaccctgcggatgtggtgctgatt

SEQ ID NO: 311961 - DNA, 904 bp, Unknown
  Bacterial polypeptide expressing nucleotide sequence isolated from the Sargasso Sea
agaaatataagaaaactattagccaaaatttcatttaaaatttacaaaaaaataccaaaaaatataattgctgttacaggaaccaatggaaaatcatcgattgcagatttttattatcaaatattaaacttaaataatcaaaaagttgcttcaataggaactctaggtgttaaatcaaataattttaaaataaatttatctaatacaacaatagatccaattagattaggtaaaatattaacttatttaaaaaaacaaaatgttaataacataattatggaggcttcaagtcatggcctaaagcaaaataggttagatggtctattatttaatactggaatatttacaaatttgtctcaagaccatttagattatcacaaaaatttgaaaaattatttaaattctaaactttatttatttaaatatttaataaaaaaaaaaggaaatgtaataaccgataaagagatacctgaatttcataaaataaaaaacataacattgaataaaaatttaaatcttcatttactatctgataaaaaaaataaatttgaatttttatctcatgaatttaaagatgaagttcaaatattaaaaattaaatatgataatttaatacataaaattaatcttaatttaatcggaaaaattcaattaaaaaatatatttatggcaattgttgctgcaaaaaaaagcaatatcaatattaaaaaaatatttaaggtaatacctaagattaaatctgtagaaggaagattagaaaaagttggtaagattaaaaataaatctaaagtaattttagattatgcacatactcctcatgctttgaaaatgtgtcttacaaatttaaaagaacaatttcctgataaaaaaatttcactagtatttgggtgggcggaaatagaga

SEQ ID NO: 311962 - DNA, 648 bp, Unknown
  Bacterial polypeptide expressing nucleotide sequence isolated from the Sargasso Sea
tctgaaacaaattaattcagataaagttaaatacaaaaatatttgctctgattcaagaataataaataaaggcgatattttctttgcaatttcaggaagtaatactgatggactgaagtatgttaatgatgcagtagctaaaggtgcctctgcaatagttattccaattagaaaaaaaataaagatttcatctgacatcccaatttataaagtaaaagatatccgtaaagaaatttctttagcagcgttcgtagtcaatagtgagtcaatagaaaagaaaattgcagtaacaggaacaaacgggaaaacatcagtaacttactttctgaactacatattatcaaatttaggagaaaaaactgcgacaattggtacgttaggtaattctttagtaaagaaaattaataatgaaaatctaacttcacctgaaccaattaacttatcaaagcaattaagaaagttaagtaaaaataaaattaagtatttaataatggaagcatcaagtcacggcttacaccaaaaaaggttttatggattaaaatttgatgcttgtatacttacaaatctttcacaagatcacctagattatcataaaactatgtcacattacataatgagtaagctcaaactattttctgattatgtaaa

SEQ ID NO: 311963 - DNA, 457 bp, Unknown
  Bacterial polypeptide expressing nucleotide sequence isolated from the Sargasso Sea
catggccatccaaagggggcacgtgttgttgttgattatgcgcatacgcctgatgcgcttgccgcagctttaggggcacttcgcccggaggccactggcaagctttgcgtgctattcgggtgcggcggtgagcgtgatccgggtaaacgagaaatgatggggcaggttgcatgccaaattgccgatcatgtcattgtaacggatgataacccgcggagcgaagaccctgcagtcattcgtagatccattttaaacgcatgtaatagcgcagttgaaattgttccgcgcgaaaaagctattgccaccgcccttgcccagcttggtatgggcgacgtgcttttgatcgccggcaaaggccacgaaactggccagctaatcggcaatgaaaccctgccatttgatgatgcggcattagccagcaatcagcttcgcgcaatgcatgaggcacaacaatgag

SEQ ID NO: 311964 - DNA, 778 bp, Unknown
  Bacterial polypeptide expressing nucleotide sequence isolated from the Sargasso Sea
actggaggtacaaaatactactttagatccattgcaattaagcaaacaactaatgagattaaaaaaaaaaaatattaacaatttaatattagaggcatcgagtcatggacttaaacaatcaagattggatggtttaaaatttaaaataggaatatttaccaatttatcacatgatcatttagattatcataaatcttataaagattatttaaactcaaaattacatttgttcaaaaaattactaaatagaaattcaaatataattacagatttaaatattcctgagtataaaaaaataaaatctattgcgttagagaaaaatttaaatttacatacagtatctgataaatatggcgacctttcaattatatctcacgagtataatggtgaaaaacaacttgttaaaataaaatataaaaagaaaatatataattttgagttaaatttaattggcaaaattcaattaaagaatgttttaatttcaatgatcgcttcacatttaagtaatattaattttgaaaacattgtaaattttattcataaactaaaacctgtttatggtcgactagagaaagttggctcaataaaaaataattcatctgtaattttagattatgcgcatacaccagatgcattaaaaacatgtttacaaaatataaaagatcaatttaaaagtaagagaatatctctagtatttggatgtggtggtgacagagataaatttaaaagaccatcaatgggaaaaatagcaaatgaatattgtgatagaatttatttg

SEQ ID NO: 311965 - DNA, 745 bp, Unknown
  Bacterial polypeptide expressing nucleotide sequence isolated from the Sargasso Sea
attcggttaggacaaatattatctaaacttaaatctaaaaggattaacaatgtaattatggaagcttctagtcatggcctaagccagcataggctagatggtttaaagttttcgtcaggtattttcacaaatttatctcaagatcatctagattatcataaaaattttaaagagtattttagagcaaaacagtacttatttgaaaatttgataagaaaaaagggaaacgtaatagtagatgaaacaataccagaatttaaaagaataaaaaaaatttccatttctagaaaattaagattgcaggttttaaataatagcaaaaatcactttcaaatcttatctcatagttttagaggcgaaaaacaaatattaaagataaaatacaaaaatctaacgagagaagtaaatttaagtcttattgggaaaatacaattaaagaatatttttatggcgattattgcagcaaaaaatagcaatgtaagttcaataaagattcttaatgcattatcaaaacttaaacctatagatggaagatttgaaaaaataggtaaaatcaaaaataagtctaaggtaatacttgattatgcacatacaccagatgcgctaaaaatatgtctttcaaatctaaaagaacaatttccaaataaaaaaataattttactttttggttgtggaggaaatagagatcaaaataaaagattcaaaatgggaaaaaaggcaagtaattattccaacaaaatttatt

SEQ ID NO: 311966 - DNA, 856 bp, Unknown
  Bacterial polypeptide expressing nucleotide sequence isolated from the Sargasso Sea
atattaaaattaaataaaaaaaaagtagcttcaattggaactttaggggttaaatcaaataatactaatttaaatttatctaatactactattgatccaataaaattaggtcaaattttgacaaagttaaaaaaacaaaaaatagataatgttatcatggaggcctcaagtcatggccttaagcaaaatagattggacggtttgttatttaactcaggaatttttacaaatttatctcaagatcatttagattatcataaaaatttaaaaaattatttaaaagcaaaactttatttgtttgaatctttaatcaaaaaaaatggaaatgttattacagatgaaaaaatacctgagtttaaaaaaattaaaaaaattaccttaaaaaaaagtttaaatctttatacgcttaataataaaaaaaattactttgatatcttatcacatacttttaaaggagagtctcaaattcttaaaattaaatataaaaaatcaatacaagagataagttttaacctcattggaaaaattcaattaaaaaatattttaatggctattattgctgctagtcaaagtaatatagaaataagtaaaatattaaaagtaattccaaaaattaaatcagtagaaggtagatttcaaaaaattggcaaactgaaaaatctatctaaagtgattgtcgactatgcgcatactccagacgctttaaaaacatgtcttttaaatttaaaagaacaattcccagataaaaaaatttcattattgtttggttgtggtggaaatagagatcaaaataaaagagcaaaaatgggtaaaatagctgagaatttttcagataaaatatatcttacagatgaca

SEQ ID NO: 311967 - DNA, 469 bp, Unknown
  Bacterial polypeptide expressing nucleotide sequence isolated from the Sargasso Sea
gcaggacaacccctggtggccgtggactacgcccacacccccgatgctttggacaaggccctgcaagccctgcgtcccctggcggccgagcgtggcgggcgcctctggtgcgtgttcggttgcggcggcgatcgcgacgcgggcaagcgcccgctgatgggggcggtggcccagcagcaggccgaccaggtgctggtgaccagtgacaacccccgcagcgaagacccggccgccatcctgcaccagatcctgcagggcacgattgccggtggcactgtgcgagccgagcccgaccgtgccgtcgccatcgcccaggccgtggccgaagctgcgcccgccgatgtggtgctgattgccggtaagggccacgaagacacccaggagacggcaggcgtgcgcgtgccgttttccgacatggcccacgcgcaggctgcgctgcaggcccgaggagcccacacatgggcatgaa

SEQ ID NO: 311968 - DNA, 907 bp, Unknown
  Bacterial polypeptide expressing nucleotide sequence isolated from the Sargasso Sea
tttgtatattcatacaaataatataagaaaattattagccgaaactgcttttaaaatttataataaaaaaccaaaaaatttaattgcagttacaggtacgaacgggaaatcatcagttgcagatttttattatcaaatattaaaattaaataataaaaaagctgcttcaattggcacattaggtgttaaatcaaaaaatattaatttgaatttatctaataccacaatagatccaattaaattggctaaaattctgagtaagttaaaaagtcaaaaaatagaaaatgtaattatggaagcctcaagtcatggtttgaaacaaaatagattagatggtttaaagtttaattctggtatatttactaatttatcccaggatcatcttgattatcataaaaatttaaaaaattatttaaaagcaaaactttatttatttgaaaacttaatccaaaaaagaggaaatgtaataacagatcaattaattccagagtttaaaaatataaaaaaaattacaattaataagaaattaaaattgcatacattaaatgataagaaaaataatttagagcttttatctcataattttaaaggagaaggtcaatttcttagaattaaattaaatagctcaataaaggatataaatttaaatttaattggaaaaatacaattaaaaaatgttttgatggcaataattgcagcaaaatatagcggtattagtttagataaaattttaaatataattccaaaattaaaaccagttgagggaaggtttgaaaaaataggtaaaattaaaaatcaatcaaaagtaattcttgattatgctcatacgcctgatgctttaaaaacgtgtcttttaaatcttagagaacaattttccaataaaacaatcacagttctattcggttgt

SEQ ID NO: 311969 - DNA, 958 bp, Unknown
  Bacterial polypeptide expressing nucleotide sequence isolated from the Sargasso Sea
atgaaaaatggcgcagaggctgccataatcggccctgctgcaaaagagaaaattggatctattgatcgagaaaggattttggttatagaggataatttagattatatttttggtcaaatagttgctgagttttggaataggccttcaagaaaacttaaacttattggtgttacgggtacaaatggaaaaacgacaattacttttttattggaatatcttttaaaaaaattagggaaaaagactgcattatttgggaccttgctcaatagatggcctggcttttcagaagtggcttctcatacaactgatttcgccgataaacttcaaaagaaattaaatgctgctgttgaggcagaatctgaattcgcgatattagaggtaagttctcattctattgctcaaaacaggatatcaggatgcgaatttgaggcggctatttttaccaatttaactcaagatcatcttgattatcacccagatatggaatcatattttcaaacaaaaagaaaattatttttcccaccttacttaaaagaaaaagatgggatttgtgtattaaatcatgatgaccattggatatctaaattatcatctgatcttaaaaaaagatctttattagtctctacaaagattactgaaagtgaatttgaaaatgataatttttttttcgtaacagataaaaaatttactgaaagtggttccacttgtatttttcatacacctagggaaaaaattcaactttttgttccacttgttggtgaatttaatttaatgaatgcgattcaagcaataacaattttgtataaactgaatttttctttaaaagatttatcaaactttatacaatctttccctggtgctcctgggagaatggagaaaatacaaattgatgataatgacgtttcaagatctcttccaacagtaattgttgattatgcccacactcctgatggataaa

SEQ ID NO: 311970 - DNA, 909 bp, Unknown
  Bacterial polypeptide expressing nucleotide sequence isolated from the Sargasso Sea
tgtataaataaaaatcttaaatcactaactattggaaaaaaaaattctaatttattaataaaaaaacatcagtatttaggaaatgttcaaaaaatagaaattgaatttaataaaaaaaaatactcatttagcacaaacttaattggaaaaattcaggttaaaaaccttctctttgcagctttagcagcaagtaaaagcaaaattaaattcagcaaaataattgagttaattggtaaaattaaagctgttgaaggaagacttgagaatattggcaatataaaaaataactcaaaagtaattctagattatgctcacacgcctgatgcattaaagcatactttggaaagtataaaagaacagttcagtcatagctctataaaaattgtttttggatgtggaggagatagagacaaagataaaagatctatcatgggtgaaattgcaaataaatattgtgataagatatttttaacagatgataatccaagatatgaaaatccaaaaaaaataagaaatcaaataaaaaaaaatatatctatatctaaattagttgaaatttcctcgagagaaaaagcaataaaagttgcaatagaaagtttaagctcaggagatatattagtagttgctggcaagggtcatgaaatatatcaagaatataaaggtaaaaaaaaatttttctcagataaaaaatgtattttaaatggaattaatttaaaaaataaaaaattatttaaaaattggaaagcaaatatcttgcatgaacaatgtaatttaagctcgttaagcaaagatatgaaaattaacaaagcatcaataaattcaaaaaatataaaaaaaaatgatgtttttttttgcattaaaggccctagaaatgatggtaatgattatgcagatgaagcaattaaaaaa

SEQ ID NO: 311971 - DNA, 317 bp, Unknown
  Bacterial polypeptide expressing nucleotide sequence isolated from the Sargasso Sea
tcggggcaagcggcctcagatggcagcgattgcggcccggttggcggatcgggtcgtggtcacctctgacaacccgcgcacagaagatcctgatcagatcctggccgatgtggtggcgggcattccatccggcaccgaactcagggttgagcgcgaccgggccagggcgattgcggagggcattgctgaagcatcaccagcggacctggtgctgatcgccggcaagggccatgaggactatcaaattctcggtacggagaaggtgcattttgatgaccgcgagcaggcggagcaggccctgagacagcgacgctgag

SEQ ID NO: 311972 - DNA, 913 bp, Unknown
  Bacterial polypeptide expressing nucleotide sequence isolated from the Sargasso Sea
gcttgcttagcgattactgattctgataagtttgaatttcaaacaaacgtaattaaagttgaagatattagagctgcagcaggcattgcttgttcaaatttttataattctccacaaaataaactaaggttgataggtattactggaacaaatggtaagacatcaacatcaaccattttaaaaaatattttagataacgaaaatgaaaagacattacaagttggaacaagtggaataaaaccttctattgatatttatcctggtttaactacaccagatatttttgatttatatgaaatattaaatcatgctgttcttgagggtttcaaaaatgttgttttagaggtttcttcacatgcattatcacaaagaagaatagaaaacattttttttgatataactgcatttacaaatcttacacatgatcatttagattatcataagacaatggatgaatattttggtgaaaagcttaaactttttaatttaaacaaagaaaatggctgttctgtcataatgattaatgatgaatatggtaagaaaattactaaattaaattcacatgctaaatctatttctcttgaaacaaaagatgctgactattcttgtacttcatttagtattaataacttaggtataacaggaaccttattatgggattccaaaactttagattttgaatccaggctaattggttctttcaatttagaaaatattgtactagcagcttcgattggaattgagctcaatatttcatcaaaatctattattgaaggaatcctaaattgcacgaatattgacggtagactgcattttgtggagaacaaaaaaaaccaaatgatatttttagattatgctcatacacctgatgcatatttaaaggcattacaagctcttaaagataactttaaaa

SEQ ID NO: 311973 - DNA, 586 bp, Unknown
  Bacterial polypeptide expressing nucleotide sequence isolated from the Sargasso Sea
taagagtattatttattcaagtcttattggtaattatcaaataaataatttgattacagctatttgtataatgatagaaatgggctacaaaagagaagatatagaaaaacattctataaatataaaacctcctccgggtagaattgaattaattagtagtatcaaaggtgctgatatttatattgattatgctcatactcctgatgccttaaagaatgttttattatctttaagaccttatgtgaaaaataaactatatttagtttttggctgtggaggagatagagataaaggtaaaagaggagaaatgggtaaaattgctcatcaacttgctgatattaatattattactgatgataaccctagatttgaaaatccaaaaaatataagaaaagaaatactacaatgttgccctaatgctatagaaattggcgatagaaaaaaagctatagttaaaacaattcaaaagcttattagcggagatatattattggttgcaggtaaaggacatgaaaacagccaagaaataaatggtagacacttaaattttgatgatgcaaaaataattaaaagtatgattaattaa

SEQ ID NO: 311974 - DNA, 862 bp, Unknown
  Bacterial polypeptide expressing nucleotide sequence isolated from the Sargasso Sea
acaactattgatccgataactttaaataaaacattacaagagataaaaataaaaaaaatagaaaatgttataatggaggcttcaagtcatggtttaaaacaacacagattagatggtttaaaattcaatataggaatttttacaaacttatctagagatcatttagactaccataaatcttttaaagattacttaaaatcaaaaatgattttgtttaatagattattaaaaaaaaattctaagataatttatgataatagcatcctggagtcgaaattgttaaaaaatatatcaataaaaagaaaattgaatccaattactattggtattaaagattccaatttaaaaatcataaaccataaattcattggaaataaacaagaagttaaatttatttttaaaaatgatgaatattcttttgttacaaatcttattggaaaaatacaaataaaaaacttaattatggcgattgttgcggccaataactgcggtctttcaatgaaaaggataattaaatcaataagtagaattaaatcagttaaaggtagatttgaacaaattggaaatttaaaaaataattctaaagttattcttgattatgcccacaccccagatgccttaaagacttgtttattaaatttaaggagtcaatttaaattaagtaaaatttctatagtttttggttgtggcgggagtagagataaagcaaaaagaccgatgatgggcaaaattgcaaataatttgtgtgataaaatatatttaaccgatgataatcctagaaatgaaaatccaaaaaaaattagagaagaaattaaaaaaaaaattaataaattgaaactatttgagatttcatctagaaaaa

SEQ ID NO: 311975 - DNA, 955 bp, Unknown
  Bacterial polypeptide expressing nucleotide sequence isolated from the Sargasso Sea
aacctcaacagttgaattttgtcgccaattgtgggtacaagcagggtggaaggctgcctccatgggcactcttggcaccaagactgagactgcaataaataaaagtatatataaaaataaaaaagaaaacctgacaacatttgaaccatctgacttatataaaaaattaaaatttttagttgatgaaaaaatttcccatcttgcccttgaagcgtcttctcacggcattgatcagcgtagattagatggggttaaattttcaggagctgtatttacgaacttgtcccatgatcacctagattatcataaaaatactaaaaattatttttcgactaaaaaaagattatttactgaaattttaaaaaataattctgcaatttctattaatattgatgatatttacggtaaaaaattatatcaagaattaaaaaatactaaccacttcattattacgtttggtgaaagttctgaagcagatataagaattaaatctgctatacaaaacaaacaaagtattgaactaattttagagtataaaaatcagaatttccagaccacaattggaatgattggaaaatttcaagtttataatgttgtagcctctgcatcaatttgcattgcattgggtatggactcaaatctaattttcaaatcattgggatatctaaaacctgctcgtggaagaatggaagtgctctcaaatacaaaaaataacgcattagtaataattgattacgcacacacaccatctgctctaacatttgcactcaaatctatcgaagaaatatcaggtagagaaagaataataactttattcggatgtggaggagatagggataaagagaaacgtaaaataatgggtgaaattgctaataaatattcagatttagtgatagtgactgatgacaatccacgaagtgaagttccttcaaatattagaatggatatcttaaat

SEQ ID NO: 311976 - DNA, 730 bp, Unknown
  Bacterial polypeptide expressing nucleotide sequence isolated from the Sargasso Sea
cttcataaaagtttggatttcttaaaaaataaaaagataaataatgtaatcattgaggcctcaagtcatggtttgcatcaacaaagattacatcacataaaatttaaagggggaatatttacgaatttcagccaggatcatctagattatcataaaaccatgaagtcttatttaaatgcaaaacttatattatttagaaaaattttaagtaaaaaatcaactatcatctccaatggcgaaattccgaccttcaaaatattaaatcaaatcgcaaaaaaaaaaaattttaaaatattaaatgtcaaaaagacttttaaaaaaattcaaaatgttgacttaaaattaaatgaagattttaagattaaaaatttagctatggcaattgaggcttcgaaattatgtggattaaaagagcaactaatattcagaagtttaaaaaaacttaaagatgttaacggtaggcttgaattaatcagaagatacccaaatgatgtgaaggtttttatcgattatgcacatacgccagatgctttattagaagcccttaaatctttgaagaataattacggaaataatatttctttagtctttggatgtggaggtgaaagagatcaaaccaagagaccaatgatggcaaagatagctaatgagaaatgcaaaaaaatttatataacagatgacaacccaagaaatgaaaaacctcaaaaaattagaaaagatctcttaaaaa

SEQ ID NO: 311977 - DNA, 739 bp, Unknown
  Bacterial polypeptide expressing nucleotide sequence isolated from the Sargasso Sea
catctcgattatcataaatcaatgaaaaactatctaaattcaaaactcattttatttaaaagattgcttcctgaaaaaagtcatattatctctgataataaaaataaaatttatccaattttaaaaaagattgctaaaaaaagaaatttaaaattattagatataaataaaaaaattgaaatcaaaaatataaaatattttccattattaggttcatttcagattaaaaacttatctatggcaatcttagcaactaatctgtgtggattgagtaagggtaaaattcttaaaacaataaaaaaaataaaaagtgttcatggacgattagaattaacaagaaattatccaaataacattaaagtatttatagattatgctcatactccagacgctttaaatgaagtgcttaaatcaattaaggttaaatttgatagcgagatctcacttgtatttggctgtggaggagaacgagattttaaaaaaagagctttgatggcaaaaattgctaaacttcattgtgataaaatatatgtgactgatgacaacccaagaagagagagcccaagtaaaattagaaaggaaattataaaaaatttaaaaggtagcagatatttcaatattggtaatcgatcaagagcaataaaaacagcaattaccatggcaaatgcaaatggagtaatcttaatagcaggtaaagggcatgaaaactaccaagattacggaaataaagttctaaaga

SEQ ID NO: 311978 - DNA, 828 bp, Unknown
  Bacterial polypeptide expressing nucleotide sequence isolated from the Sargasso Sea
gcttcaaaaagtaattttagacttaaaaaaaatatttagtgttattcctagactatcctctgttgagggtagatttgaaaaaataggaaaaattaaaaataaatctttagtattccttgattacgctcatacaccagatgccttacaaacttgtattctaaatattagagaacaattccctgataagcatatttctttgctctttggatgcggtggtgacagagataaaggtaaaagatcaaaaatgggcaaaatagctgataaatatgcggataaaatttatcttactgatgataatccaagacatgaaatgcctaagaaaattagaaatgagattaaaaggggtataaaaaaaagtcagattattgaaatttctaatagaaaagaagcaattgtaaaagcaataaataacttaaatacaggaaatgttttaatcgttgcaggcaaaggtcatgaaaaaatccagcagattggaaataaaaaagtttttttatcagatagaaaaataattttaagctcaattaaaaaaaagaattttaaattatctaaaaatttaaaattaaacattcttaatgaaagatttgatcaaaatattctatcatctaaatcggtaataaataaagctagcataaactccaagagtcttaaaaaaaatgatattttttttgcaattaaaggaaaaaaaaatgatggtaataaatttgttgaacaagcaattcaaaaaaaggcatcaataactatagtaaataaaattcaaaagaaactagctattaataaacaagcaatctcaataaaccctttaggtttgcttacagaaaccgcaaaaat

SEQ ID NO: 311979 - DNA, 759 bp, Unknown
  Bacterial polypeptide expressing nucleotide sequence isolated from the Sargasso Sea
gcattcattgccgaagcagtcgcgcgcggtgcggccgccgtgctgtatcagccggaagggctggacgctgcgccggcggtgcccgtctcactggccgtgccggcgctcgaccagctcgccggcgagatcgccagcggctggtacggcgatccgagcgacagcctgctcacggtaggagtgaccggcacgaacggcaagacctcgtgcacgcagtggatcgccaccgcgctgacggcgctgcaccagccgtgcgcggtgatcggcacgcttggcagcgggatgcccggccagctcgtgccgacgggtttcacgacccccgacgcaccgcaactgcagcgtagcctcgcgcaattgcgcgacgcgggcgcgaaggccgtggcgatggaggtgtcgtcgcacgcactgcaccaggggcgcgtgaacggtacggccttcgacatcgcggtgtttacgaacctcacgcaggatcacctcgactatcacggcacgttcgatgcatacgaggccgcgaaggcgaagctgttcgcgtggcgcggcctgcgcgcggcggtcgtcaaccgcgacgacgcagccggacagcgcttgctcgagaaactggccggccgcgtgcgcacgatcgcgtacgggatcggcgacgcaccggcaccggacgccgatcgcgaactggtcgcgctcgacgtgcgtgccaccacgaccggcacggcgttccgcttgcgttcgtcgtggggcgacgcggacgtcgaggtcggcacgctcggc

SEQ ID NO: 311980 - DNA, 754 bp, Unknown
  Bacterial polypeptide expressing nucleotide sequence isolated from the Sargasso Sea
tatttagttgaggatttaattgatcctcacattagctacaaaaatatcaacatatctggaattaaaactgattcaaacgaagtactcccaggcgatttatttgtagcagtaccaggaactaattttgatggtcataattttgttaagcaagcaatcagtaatggtgcgagtgctgttattacgagtcgagaagaggtgaatgctgattctataccaaatataaaagtatctaatccaaggaaggtagtttctcatgtttcatcaaaattatttcataacccatcggaagatattacagtaattggtatcacaggaacgaatggaaaaaccacaacagcatatttaatttcaaacgctttgaaaaaagcaggctttaaaacagcacaaattggtactactggcgttatcgcagaagggtttaaacaagaaaaaacactaaccactccagatgcaataaatctacaaaagttatttttaaattttaagaacctaggatttactcacgtagtaatggaagtatcttcgcatgcattagaccaataccgagtagcagacataagttttgattttgcagtttttacaaacctaacaccagaacatttagattaccatcattctatggaggcgtattaccaagccaagtctcgtttgtttaaaatgttaactgttgacggagtggcaataattaatagtaatgatctaaatggaaaaaggatagcaaaagatacagttgctaaggtattatttttttcaa

SEQ ID NO: 311981 - DNA, 760 bp, Unknown
  Bacterial polypeptide expressing nucleotide sequence isolated from the Sargasso Sea
catgatcatttagattatcataaatcttacaaagattattttaatgctaaattatatttatttaaagaattgatagctaaaaattcaaatataattactgattttgatattccagagtataaaaaaattaaatcaattgcccaaaataaaaagttaaagttacagacaatatccaataaatatggagacctatcaattatatctcatgagtatttaggtgaaaaacaacttgttaaaataaaatataaaaaaaaattatataattttgaactcaatttaattggaaaagtacaattaaagaatgttttaatttcaatgattgcttcacacataagtaatattaattttcaaaatattataaattttgctcataaaataaaacctgttgaaggtagattagaaaaagttggttcaataaaaaataattcctttgtaatactagattatgcacatactcctgacgccttaagaacttgtcttcaaaatataaaagaccaatttaaaaataaaaaaatatcaattgtatttggctgtggtggaaatagagacaaacttaaaagaccattgatgggaaaaatagcaaatgaatattgtgataaaatttatttaactgatgacaaccctagaaatgaagatcctaaaaaaattagaggaagtattaaaaaaaaaattaaaaaatcaaaactatacgatatttcaaacagaggaaaaggtattcatcaagcaatacaagatttatcaactggtgaaattttagttg

SEQ ID NO: 311982 - DNA, 892 bp, Unknown
  Bacterial polypeptide expressing nucleotide sequence isolated from the Sargasso Sea
tccaattaatttaggtcagatcttacaaaaattaaaaaaagaaaaagttgataatgttatcatggaagcttccagtcatggattaaaacaatatagattagatggattaaactttaaatctggagtttttacaaatttatcacaagatcatctcgattatcataaaaatttaaaaaattatttaaaagcaaaactttatttatttgagaatttaatagaaaaaaaaggaaatataattacagataaaaatatacctcaatataaaacaatcaagaaaatctctttaaagaaaaaattaaaattatcagcaataaatgaaaaacaaaataattttcaattattatctcatagatatgacaatgaaaatcaattgattaaaataaaacataaagattcaattaaggaaattaacttaaatttaataggtaaaattcaaatcaagaatattttgatggctgcaattgcagcacaaaaaagtaatttaaattttgacaatattttaaaagtcttaccagaattaaaaccagttgaaggtagattagaaaaaattggaaaaattaaaaataattcaattgttattcttgattatgcacatactcctgatgctttaaaagtttgtcttttaaatattaaggagcaatttcccgataaaaagttgaaccttttatttggttgtggggggaatagagaccaaaacaaaaggatgaaaatgggtaaaatagcaagtatttatgcagataatatctatctaacagatgataaccctcgttacgaaaacccaataaaaataagaaaagatattaaaaagggcatcaatgctaagaaaattacagaaatttctagtagagcaatagcaatatctcaggctattaaaaatttaaaaagtggagat

SEQ ID NO: 311983 - DNA, 679 bp, Unknown
  Bacterial polypeptide expressing nucleotide sequence isolated from the Sargasso Sea
gcgggcgacgtgttttttgcgtatgcggtcgacggggccgacaaccgcgcattcattgccgaagcagtcgcgcgcggtgcggccgccgtgctgtatcagccggaagggctggacgctgcgccggcggtgcccgtctcactggccgtgccggcgctcgaccagctcgccggcgagatcgccagcggctggtacggcgatccgagcgacagcctgctcacggtaggagtgaccggcacgaacggcaagacctcgtgcacgcagtggatcgccaccgcgctgacggcgctgcaccagccgtgcgcggtgatcggcacgcttggcagcgggatgcccggccagctcgtgccgacgggtttcacgacccccgacgcaccgcaactgcagcgtagcctcgcgcaattgcgcgacgcgggcgcgaaggccgtggcgatggaggtgtcgtcgcacgcactgcaccaggggcgcgtgaacggtacggccttcgacatcgcggtgtttacgaacctcacgcaggatcacctcgactatcacggcacgttcgatgcatacgaggccgcgaaggcgaagctgttcgcgtggcgcggcctgcgcgcggcggtcgtcaaccgcgacgacgcagccggacagcgcttgctcgagaaactggccggccgcgtgcgcacgatcgcgtacgggatcg

SEQ ID NO: 311984 - DNA, 949 bp, Unknown
  Bacterial polypeptide expressing nucleotide sequence isolated from the Sargasso Sea
ttagcatttgaaataaataaaaataatattgaaacgaaaattgcaataactggaactaatggaaaaacatctgttgcatattttttaagttatttactgagagtttcaggaaagagcgtagctactataggtactttaggaaactctgtattaaagagaaataaatataaccttacttcacccgaaccgactgatctttcagagcaattaaaaaaaataggtcaaaaaaaaataaaatatttagttatggaagcatcaagtcatggcttacatcaaagcagattttatggaatgaattttgatgtttgtgcattaacaaatatatcacatgatcaccttgattatcataaaactataaataattacataaaaagtaaaatgatccttttcaaagattatatacataaagatagtaaattaattattaattcaaaaacgaaatatattaaaaaaataagatcaattttaaaaaaaaatgaatccattcaaccattatattttcaagcaaatagagattataaaattataaaaatcctcaaaaaaaatgatattcaacatgtaaaagcaatagttggcagtaagcgaattcttttaaagtttaaaaattttccaaattttcagattgaaaattttatatttgcaatttcaattttgaatttaattggatttgatcctagaaagctatcaaaaagcagtcttaattgcccttcagtattaggaagaatggaatatgttggaagaacaaaaacaggtggaaaagtttatgttgattttgcacacacgcctgatgctcttaaaaattcaattatggagtcaaaaaagttagagacatcaaacgtacatgttttatttggttgcggtggaaatagagatagaaaaaaaagaccactaatgggtaaaatagcttcaaaatatgctgataaagcaatagtcacagatgataatccaa

SEQ ID NO: 311985 - DNA, 919 bp, Unknown
  Bacterial polypeptide expressing nucleotide sequence isolated from the Sargasso Sea
aaaaactgcaacaataggtacgttaggtaattcccagataaaaaaacttaatactgaaaatctaacttctcctgagccagttgatttatcaaaacagttaagaaaattaagtaaaaataaaattaagtatcttataatggaagcatcaagtcatggcttacatcaaagaaggttttatgggttaaaatttgatgcttgtgtacttacaaacatttcacaagatcacttagattatcataagagtatgtcacattacataatgagtaagctcaaactattttctgattatgtaaaaaaggattgtaagatcataattaactctgaaactaaatatattgatagagttaaaagttatttaaagaaagaaagcaatattagtccaatatattttcagaaaaataataaatttaaaatagttaagataaaaaaaaataaatacaactcaacaatagttgatgtaaaatttggtaaagagcttaaaaaatttaagtttgcttactttccattatttcaaatacacaacttcttactggcaacattaacgctatattctatgggtcacaatttaactaagattcaaaagttaagtttaaaatgtccttcagtaccaggtcgcatggaatttgtaggtaatacaagaaaaagtgcctccgtatatattgattttgcgcatacacctgatgctcttcaaaatgctttaatagaaggtggcaatctttgcaaatcagagctgcatgtcgtttttggatgtggtggaaacagagattactcaaaacgaccaataatgggtaaaattgcatcaaaatacgcagataaggttgtttatactgatgataatccacgttttgagaatgcaaaaaaaattagaaaagaatcattgatgattgcaaaaacttttggaaaatctcagatagaagaa

SEQ ID NO: 311986 - DNA, 832 bp, Unknown
  Bacterial polypeptide expressing nucleotide sequence isolated from the Sargasso Sea
gaaaatattattcagatttaataaaaagaaatatagtttttcaactaaattaattggaagagttcagattaaaaatttactaatggcaattatggctgcaatgaaaagtaaaatttcattagaaaaaattttaaaaattactcaaaacatagagccagtgaatggaaggttagaaaaaattggaaaactttacaataacggtattgttattcttgactatgctcatacaccagatgctttaaaaacttgtattaaaaatgtgaaggaacaatttaaattaagaaaaattaatctggtctttggatgtggaggagagagagacaggcccaaaagaaaaataatggggaaaattgctaataaatattgtgataaaatatatttaacagacgacaatccaagaagtgaagatccaaataaaataagaagagatatcaagtctaatatctcaaagaataaaatattagaaataccatcaagagaaagtgcaataaaatctgcaattttagatattaagtcaaacgagatagttatcgttgctggaaaagggcacgaagtctatcaagaatatatctttagaaagttcttttcggataaaaaatgtattgaaaaatttattaagattaaaaataaatctttaaataaaaattggaaatcaaatattatttcagagattaccaaaaaaaaaatagaaaaaaatattaatattaatgaagcttcaattgactcaagaataacaaaaaaaaataatatcttttttgggattaaaggaaaaaactttgatggaaataaaaagttagtcatgcttttaacaatggagcctcaatttcaatta

SEQ ID NO: 311987 - DNA, 934 bp, Unknown
  Bacterial polypeptide expressing nucleotide sequence isolated from the Sargasso Sea
gaagcatccagtcatggtatagagcaaaatagaattgatgcattgagaattaacagggcagtattttcaaacctttctagagaccatcttgattatcatgaaactttagataggtattttaaagcaaaaaaaagattattttcagaaatattagaaattaacggcctagcaatagtaaataataattgcaaatatggaagaaatatagaaagcttttgcaaaagaaaaaagattaaagtttttacatatggtacaaaaaaagctgattggaaaataaataaagttattttttgtaattcatttaccaaagtttatatttcagtcttagaaaagccatatacttttaagtgcagattttttgcatactatcaaatagaaaatttagtttgttcaatgctaattgcatattcttatggtattcctcttaaaaaaattattaagtgggtagaaaaaattaaagaacctcctggtagattagaaaaaataaatttaaaaagcaataagtcagctgtctatattgattatgcccatactccagaggcactaaaaataagtttaacacaattaagggagaacttaaaaagtagaggtagattaaaagttttattcgggtgtggtggagacagagatattggaaaaagagcgcaaatggccaaacatgcttccaatttggcggatgaggtttacattactgacgataatcctagatatgaaaatccaaaaaaaattagagatcaattatcattacattgcaaaaaggcatttgtaatagctaacagaaaaaatgctattaagttcgcaataaaaaaactagaaaaacatgacatgctcttagtggctggaaaaggtcacgaaaagttccaagaaattaacggtaaaaaatattcttttgatgataaagaagtagttttagatgcgattagagaaatagagg

SEQ ID NO: 311988 - DNA, 907 bp, Unknown
  Bacterial polypeptide expressing nucleotide sequence isolated from the Sargasso Sea
attaaaactaatgatgtaaaacttctcttgagcgatatttcttctaagttttacaatttaaaacctaaaaatatcattgctgtgaccggaacgaacggtaaaacgtcagtagcagatttattttatcaaattttatcagctaataatataccagtagcctcaattggaaccttaggaataaaatataaaaaaaaaaaattacaatctcacttaacttcaccggatgctattacattgcatcaagcgctccaacatataaaaataaataaaatagacaatgttataattgaagcatccagtcatggattgcatcaaaaaaggattgaaaatttaaattttaaagcaggtatttttacaaattttagccaggatcatcttgattaccacaaaactatgcattcatatttaaatgcaaagctgcacttatttaaaaacttattgaatgaaaaaaaagtaattatctctgataagtctttaaaagaatttaaaattttaaaaaatatagctcaaaaaaaaaatttgaggttaattgatattactcaaataaaaaaaaaaataaaattaatctcagggataaaattaagtaaatttcaattaaacaacctatctatggcaattgcagccgctagattatgtaacgtaaaggaaaaaaaaatattttataatttgaataaattatcagccgttgacggaagattagaacatgtaaaaacttttttttataatattaagatatttgttgattttgctcatactccagacgcactgcaaaatgtattaagtgcactcaagagctcttacggtgaaaatatcactttggtatttggatgtggaggggatagagattttaaaaaacgtccaaaaatggcaaagatagcaaatagacactgtaaaaaaatttatgtta

SEQ ID NO: 311989 - DNA, 745 bp, Unknown
  Bacterial polypeptide expressing nucleotide sequence isolated from the Sargasso Sea
catgcgcgcggccgacccacgccagcatgtggtcatcaccgtgggacaggacaagtctgcagatttccgcattgcccacatctcgccgatggatttcggcctcgagatcaccgttgaacacaaggagcaggcttaccggatcccggtggcgcttgccggcacgttccaggcggtcaatgccgtcaccgcggcggtcacggcctatgccagcggcctgccaatccatgattccctgtcggcccttccctatgtcaccggcgcggaaggccggatgcagcttgtcaccgggcaccccggcggcgcccgcgtggtcgtcgattacgcgcatacgccggacgcgctagaggccgcgttgcgcgcgctgcgccccgaggcgagaggacggcttgccgttctgttcggcgccggcggcgaccgagattcaggaaagcgcccgatgatgggcaaggtcgcgcgcgactatgccgacatcgcctacgtgacggatgacaatccccgttccgaggatgccggcgcgatccgcagccagatcatcgccgcctgcccgaacgccatcgagatcgccgatcgtggcaccgccatcaacacggcgctggacgagctggaaaagggtgatgtcctgctgattgccggcaaaggtcacgaggctttccagcttgtcggtgacgagacgcttcccttcagcgattctagcgtggcgcgaaacgcaatccagcggctgactgagggaggcgagcagaaatga

SEQ ID NO: 311990 - DNA, 619 bp, Unknown
  Bacterial polypeptide expressing nucleotide sequence isolated from the Sargasso Sea
gatgttagatcaatcccgtcattacacacatgattcacggcgcataaagccgggagacggatacatttgcttgccaaagggagagccgtacattgaggatgcattgcagcgaggggctgttgatgttgttcatttatccagagaagcatttgctgaagccgctcatgattattttaattatccaaccaatcggatatctttgattggcattacaggaaccaacggaaaaacatcggtcagttattttgttgcacagctattagaaaaaatgggacacaaggtattggtggtggggacgctgaactcatcattaactacgcccgaatcttgggatattttagctcaaatcaaggcacatgcagatcaaggcgggacgcatgttgttcttgaagtatcttcgcacgggattgaccaaaagcgtgttcatggatttgagtttgatgtgaagtgcttaaccaatatcacccatgaccatttggattatcacaaaacgttcgagaattataagcaaacaaagttgcattttatgatggattatccggggttggccgttttttctgaggaggcctcttcgatagatgcagaagatattccacaacttaaaggatcctttcatgtg

SEQ ID NO: 311991 - DNA, 857 bp, Unknown
  Bacterial polypeptide expressing nucleotide sequence isolated from the Sargasso Sea
tatggctgcaataaaaagtaaaatctcattagaaaaaattttaaaaattactcaaaaaataaagccagtcaatggtagattagaaaaaattggaaagctttataataatggtgttgttattcttgactatgctcatacaccagatgcattaaaaagttgcattataaatgtgaaggagcaatttaaattaagaaaagttaatctagtgtttggatgtggaggagagagagacaagcccaaaagaaaaataatgggcaaaattgctaataaatattgtgataaaatatatttgacagatgacaaccctagaagtgaagatccaaaaaaaataagaagagacataaagtcaaatatttcaaagaataaaatattagaaataccatcaagagaaagtgcaataaaatcagcaattttgaacattaagtcaaatgaagtagttattattgctggaaagggacacgaggtctatcaagaatatatttctagaaagttcttttcagataaaaaatttattaaaaaatttattaagattaaaaatgaatctctaaatagaaattggaaatcaaacattatttcagagataaccaaaaaaaaaatagaaaaaaatatttatattaatgaagcttcaattgattcaagaaaaactaaaaaaaataatattttcttcggaattaaaggaaaaaactttgatggaaataaatttgtcagtcaagcttttaataatggagcctctatctcaattaatgaaaataaaaaaaaaaataaactcaaaaatgatatatatgtaaaaaactcattaaagactttttcagaaaccgctaaattagtgagggtatcatctgatattcaacaatagc

SEQ ID NO: 311992 - DNA, 839 bp, Unknown
  Bacterial polypeptide expressing nucleotide sequence isolated from the Sargasso Sea
tattccttctttagatttaatcgatcatgaaataaataatatttcttttaactttaaagaagtacaaaaaggaactttatttttaggaatgcctggtttaaatgttgatggaggaaaattttgtattgaggcaattgaaaatggcgcagaggctgccattattgggcctgctgcaaaacagaaaattggatctattgatcgaaaaaggattttggttatagaggataatttagattatatttttggtcaaatagtcgctgagttttggaataggccttcaagaaaacttaaacttattggtgttacgggtacaaatgggaaaacgacgattacttttttattggaatatcttttaaaaaaattaggaaaaaaaactgcattgtttgggaccttattcaatagatggccagggttctctgaagtagcttctcatacaactgatttcgctgataaacttcaaaataaattaaatgctgcacttgaggcagaatctgaattcgcgatattagaggtgagttctcattctattgctcaaaacaggatatcaggatgcgaatttgaggcggctatttttactaatttaactcaagatcatcttgattatcacccagatatggaatcatattttcaaacaaaaagaaaattatttttcccaccttacttaaaagaaaaagatgggatttgtgtattaaatcatgatgaccattggatatctaaattatcatctgatcttaaaaaaagatctttattagtctctacaaagattactgaaagtgaatttgaaaatgatgatttttttttcgtaacagataaaaaatttactgaaagtggttccactt

SEQ ID NO: 311993 - DNA, 613 bp, Unknown
  Bacterial polypeptide expressing nucleotide sequence isolated from the Sargasso Sea
aatgagccagacgatgttgctttcgcagttgattcccgacgtggcgctgccccacgacccgaccatcaccgggctggtgctggacagccgcgcggtgcgcccgggcaatgccttcgtggcgatcgccggcttcggcgcgcacgggctgggcttcgtcgagcaggcacgtgctgccggcgcgggcgcgatcctgttcgatccgccggccccggccgagctgccggccccggccgacgcgatcgcggtgccgggcctgcgcatgcgcatgggcgcgatggccgaccagttccacggtcacccctcgcgcgcgatgacgatggtgggagtgaccggcaccaacggcaaaacctccaccgtgcagctgctggcccaggcctggcaccagcttggcatccgcagtggaagtatcggcacgctgggggtcggactttatggtgatgtggtgccgaccggcttcaccaccccgctggtactgcagatgcacgccgtgctggcgcagctgcgcgatggcggcgcgcaggcagtggcgatggaagtcagctcgcacgcgctcgaccaggggcgggtggacgcggtccactacgacgtggcggtgttcaccaacctcacccgc

SEQ ID NO: 311994 - DNA, 721 bp, Unknown
  Bacterial polypeptide expressing nucleotide sequence isolated from the Sargasso Sea
tataagtatggcaattatttacaaaattctcatcatatatatatttttgaagcatctagccatgctttagaacaaaatagactaagaaaatatcctgttgatatagcggcgataacaaatatttctagagaccatcttgattatcacaaaaacttatcagaatataaaaaagcaaagatcaaattatttaccaaacatctttctaataaagggcatgcaataatcaattcaagaataaagaatattttaacacttaaaagaaatttaaaaaataaaaaaataaatattaattattttggaaaaaattctattgtttttaaaaaaaaacagaattttatttcatttattgtaaataaaaaaatatataaaattaatgaattgagattaaatacggatatagaattagaaaacttagagtgtgctattgcttgttgtttagcattaaaaattaatcaaaaaaaaataatttcaatattaaaaaaaattactaatcctcctggtcgattgcaaactattaaatataagaaaaaaaaatctaaaattctaattgattatgcacatactccagatgcattaaaaagaattttaaaatcaacaactttaaaaaaaaggaagcctgttttattgtttggttgtggaggagacagagataaaagaaaaagaataactatgggcaagatagcaaataaatatgcaagcaaagtttatattacagatgata

SEQ ID NO: 311995 - DNA, 395 bp, Unknown
  Bacterial polypeptide expressing nucleotide sequence isolated from the Sargasso Sea
aatgaaaaatttagctatggcaatagaagcagcaaaattaacaggattgagtgagaatttgatttataaagctttaaaaaagatacgagacgttagtggtagactagagttagtccgaaaatattctaatggtataaaagtctttgttgattacgcacacacaccggatgccttactaaaaacattagagtctttaaagtcttattatggaaataacgtttctttagtttttggatgtggaggagatagagataaaaaaaaaagagcccttatggcaaagatagcggataaaaattgtaaaaaaatttatgtaacagatgataacccgagaaacgaaaatccaaaaaagataagaaatgaacttttaaaaaatattaaagacaaaaaagcgttca

SEQ ID NO: 311996 - DNA, 630 bp, Unknown
  Bacterial polypeptide expressing nucleotide sequence isolated from the Sargasso Sea
tcgtttgacattaataggccaatcactggagttcaactagatagtcgacttgtaaggaatggtgacttattcgtagccagttctggacgcaaccatgatgccagaaattatattgatcaagcaataagaagcggatgtgcagctgttgtctcggaatttactgcaggtatgcagaagctagagatgagaggaggtattccggttataggagcagaaaatttatcgtcaaaagtaagtgaaatagcaaatagattttatcaatacccgagctctaaattaaaaatagtcggtattacaggcacgaacgggaaaacaagttgtagtcagttcattgcagatgtcttgcaaagtcttggatttaaatgcggaatgatcggtactttaggttatggtttacctggtagtctcgaaccaacttcacttaccactccggatgcagtattttcccaaaaacagatagctcgcatggccaacaaaggctttgaatatgtttcaatggaagtatcatcagtcgggctcgatcagaagcgggttgaagctattgattttgatactgcagtttttactaatttgactcgtgatcacttagactatcataagactatggaagagtatgcgaaagcaagagaa

SEQ ID NO: 311997 - DNA, 592 bp, Unknown
  Bacterial polypeptide expressing nucleotide sequence isolated from the Sargasso Sea
tagtaaagtaatattggattatgcccatactcctgatgcattaaatattgttttagcaaatataaaagagcaatttccagaaaggaaaattagattagtttttggatgtggtggtgatagagataaagctaagagatttaaaatgggtagaattgcatcaaaatttgcaaatatgatttatttaacagatgataaccctagaagtgaaagtccaaaaaaaataagaagagatattaaaaaaggtattaagattaaaaatttaaaagaaatatccaatagaaaaatagcaatatcaaattgtattaatgatctttcttctggagatattgcaataattgctggaaagggtcatgagaaaactcaagattataatggtaaaaaaaaatttttttctgaccgtaaagaaataattgaatcaataagtcttaaaaataagaaattatttaaagacaaaagattaaatattattcaagaaaaaactagacccttatccaaaatgctaaaattaaataatgtttcaattaattcaagagagttaaaaaaaaatgatattttttttggaattaaaggaaaaaaacatgatgggaagtaa

SEQ ID NO: 311998 - DNA, 843 bp, Unknown
  Bacterial polypeptide expressing nucleotide sequence isolated from the Sargasso Sea
agatttcttttatcaaatttttagtttacaaaatataaaatcaggctttatagggacattaggttttagaaaagataattcacttaaggaaagaaatctaacaacattagattcattaacattaaataaagatctaaatgatatgaaaaaaagtggtattgataatgttattattgaagcctcaagccatggattaaaacaaaaaaggttagacttcctaaaaattaaagcgggaatttttacaaatctaagtcacgatcatttggattatcataaaaatatgaaaaattatttaaattctaaacttttgctctttaaacatattctaaaaaaaaaaagtacagtaattactgatactgatattcagcagtataaaagaattaaaaaaattcaaaaaaaaagaaaattgaaaattttaactataggatcaaaaagtaataaatttagaattttgaatcataaaatttacaagaactttcaatgcttagaaataaaatataataataaaatatatagtttgaaagttaatttatttggatcaatacaaattaaaaatttattaatggcaattttggcagctaatgtatgtggtttaaaaattaaaagtattttcaataatattcataaaatcagaagtgttgatggtagattacaattaatacgaactttgacgaataaatcaaaaatatttgtagattatgcacatactccagatgctttagaaaatgcaatactctctttaagagaacactttaaaaaaaaaattactgttatttttggatgtggtggagaaagagacaaaagcaagcgtagtttaatgggtaaagtagccaaaaaatattg

SEQ ID NO: 311999 - DNA, 767 bp, Unknown
  Bacterial polypeptide expressing nucleotide sequence isolated from the Sargasso Sea
taccaaatcaagttttgaaatattagatcatcaatttttaaaaaatgaacagaaaatattattcaggtttaataaaaagaaatatagtttttcaactaaattaattggaagagttcagactaaaaatttactaatggcaattatggctgcaatcaaaagtaaaatttcattggaaaaaattttaaaaattactcaaaaaataaagccagtgaatggtaggttagaaaaaattggaaaacttcacaataatggtattgttattcttgactatgctcatacaccagatgctttaaaaacttgcattaaaaacgtgaaggagcaatttaaattaagaaaaattaatctagtctttggatgtggaggagagagagacaggcccaaaagaaaaataatgggtataatagctaatagatattgtgataaaatatacctaacagatgacaatccaagaagtgaagatccaaataaaataaggcgagatataaagtctaatattttaaagaataaaataatagaaataccatcaagagaaagtgcaataaaatctgcaattttagatattaagtcaaacgagatagttatcattgctggaaaagggcatgaagtttatcaagagtatatctctagaaagtttttttcagataaaaaatgtattgaaaaatttatcaagattaaaaataaatctttaaatagaaattggaaatcaaacattatttcagagataactaaaaaaaaaatagaaaaaaatattaatattaatgaggctt

SEQ ID NO: 312000 - DNA, 589 bp, Unknown
  Bacterial polypeptide expressing nucleotide sequence isolated from the Sargasso Sea
cttgtcagttcatagtgagtttgaagtcgcgaacatagcagcagctttggctgcatttctaagcatgggtcacacaatcgataaacttatcgatttgttgcctcaattgtccagcgtacctggtcgcatgcaaaagatccctggaccaaaaggatgccccgctgtggttcttgattatgcgcatacacccgatgcacttgaacgcgtcctgagagcttgtaggcatcactgtgagggcagattaatatgtttaatcggttgcgggggtggacgggatgtagggaaacgaccgataatgggtcaggtcgcgattgagaattcggacgtttgttatttcacgagcgacaatccaagggatgaggatcctttagaaataataacaaatatgacctcttccatttccaccctagaaaaacgccgtgtgaacctgattatcgatagaagcgaggcgattagggcggctattgatttgggaagagagaaagattgggtggtaatcgctggtaaagggcatgaaactacccaagaggtccatggcagactcttgccactaaacgacttagaaattatttcggaagtttttgggtag

SEQ ID NO: 312001 - DNA, 628 bp, Unknown
  Bacterial polypeptide expressing nucleotide sequence isolated from the Sargasso Sea
tcccgttggatccggcgcattccattctccgctgctggggcgcttcaacctgatgaacctgttgcagtcggtgggggtcctgctgcaacggggtctgcccctcgatccgctgctggaggccgtcggtagcttccggggtgtgcccggccgcatggaacgggtggtcgttgagggggctgaagctgccgcgttgccgactgttctggtggattacgcccacacccccgatggtctcgagaatgcactggcggcgtctcgaccatttgcggcgggtcggctggtctgcgtgtttggctgcggcggcgacagggatcggggcaagcggcctcagatggcagcgattgcggcccggttggcggatcgggtcgtggtcacctccgacaacccgcgcacagaagatcctgatcagatcctggccgatgtggtggcgggcattccatccggcaccgaactcaggatcgagcgcgaccgggccagggcgattgcggagggcattgctgaagcatcaccagcggacctggtgctgatcgccggcaagggccatgaggactatcaaattctcggtacggagaaggtgcacttcgatgaccgcgaacaggcggagcaggccctggggcggcgactttga

SEQ ID NO: 312002 - DNA, 880 bp, Unknown
  Bacterial polypeptide expressing nucleotide sequence isolated from the Sargasso Sea
aatgattttatttaaaaaattaatgaaaaaaaaatctattgtgatatttgactcaaattcaaaatatggctctaaaattaaaaaaatcgccaaaaaaaatcattcaaagtgccttattattggagaaaaaggttctaatttaaaattaattaaacagatttcgtttaaagataagcaaaaagttttctttgagtataaaaaaaagatattttcatttgaaacatcgctgattggtaaaattcaaattaaaaatttattaatggctattattgcagcgagcaaatatgtacgaattaataaaattttaaaatcaattcataaaataaaagaagttaaaggaagaatggaaaatattggaaaattaaataataattcaaaagttattttagattatgcacatacacctgacgcattaagggtatgtctaagaaatttaaaaaatcattacaaattgagcaatatttctattgtatttggttgtggaggcgaaagagataagccaaaaagaaaaatgatgggagaagtagcaagtaatttttgtaataagatttatttaaccgatgataatccaagaaatgaaaaaccatttaaaataagaaatcaaataaaaaaaaaaataaataaatcaaaattatttgaaatatcatcaagagaaaaagcaattaagcaggcaatattaaatttaaattcaggggatgtattattagttgcaggcaaaggtcatgagaactatcaggaatatcgagaaaaaattttattttctgacagagcatgcatattaaaatatataaatgaaaaaaacaaaattatctcaaatgattggaaaataaatgttataaacgagtctttagataattttaaaattagcaattcaaaaaaa

SEQ ID NO: 312003 - DNA, 845 bp, Unknown
  Bacterial polypeptide expressing nucleotide sequence isolated from the Sargasso Sea
cttgatcaaatcttttcataatatagtaccattaggtcaagatgtgccaaacactctaattaatggtttgacagtgaactcaaatgatgtaaatgaaggtgacatatttattgcgatacctggaactagggtagacggtcataattttattgctgaggctatagataaaggcgcatcagccattatttctaacgggcgggatttaggtaagctacccgtaccgcaaataaaggtggcaaatccgcgcagagcagcatcaattgtcgcctcagagttttacgggcatcctacaaaacatttagtagttattggagtgacaggaaccaatggtaagacaaccacagcctcaattttaaaatctattcttgatactgtaggctataaagttgctcaaattggtacacttggtcttattgctgatgattttgaacatattaaaactctaactacaccagaccctataactcttcaaaaattattctcgaaattgaacaaagccaattattcacatgttgtcatggaggtctcatcacatgcgcttgaccaatttagagttgccgatgttgattttaatattgcagtttttaccaacttatctccagaacatcttgactatcatgcgtcagtagagtcttattttcaatctaaacttcgcttatttacaatgcttacacttaattcaacagcgattgtaaatatttcagattcatttggaaagagagtatcggaaaagtcccccgctccagttattccattttcaaaaaacaatgataattctattcattaccagaaaaaggaaacttcaattaaaggaataactggtgaaatcactgctggcaaaaaaa

SEQ ID NO: 312004 - DNA, 840 bp, Unknown
  Bacterial polypeptide expressing nucleotide sequence isolated from the Sargasso Sea
aatgttaaccaacacaactttagaccctattcaattaagttttatacttcaagatttaagaaaaaaaaaaatcgaatatgtaattatggaagcctctagtcatggtttaaaacaaaatagattagatggactattatttgatgtaggcatatttacaaacttatctcatgatcatttagactatcataagaatatgaaaagttatttaaaatcaaaattatatttatttgataaattaattaaaaaaaaaggaaatataattacagatgcaaatatcccacaaagtaaaaaaatacagaatatctcatataaaaaaaatattaatttaagtttaatttttaaaaaagaagggattgaattgatctcacacaaattttcgaatgaaaaacaaattttaaaaattcaatttaataaaaaaaaatataaagtagcactagacttaataggaaaaatacaaataaagaacattttaatgactgtattagccgcttacaaaagtggtcttaagtttgaaaaaataattaatgttattcataaacttaaacctgttaaaggacgacttgaaaaaattggagaaattaagaataatagtaaagttattttagactatgctcacacaccagctgcattagaattggctatattaaatattaaagaacagtttccaaaaaaaaagataagtttagtttttggatgtggtggtgagagagatttcaaaaaaaggcctatgatgggtaaaattgctgataaatattcagatagaatttatttaactgatgataatccaagaaatgaaaatccatcgaaaattagaaaagatattaaaaagggaattaaaaa

SEQ ID NO: 312005 - DNA, 862 bp, Unknown
  Bacterial polypeptide expressing nucleotide sequence isolated from the Sargasso Sea
aataaaattacaagattaaataaaatcaaaaaacttacattaggaagtactaaatcaagtttttcaataattgatcatcaatttttgaaagatcaacagaaaataacattcatatttgataacaaaaaatattctttttcaacatcattaatcggaagagttcaaattaaaaatttactaatggcaattatggcagcaatgaaaagtaaaatttcattagaaaacattataaaaattataccaaaaataaagtcagtaaatggaagattagagaagttaggaaatctaaataattatggaattgttattcttgactatgctcatacacctgatgccttaaagacttgcattaaaaatgtaaaggagcaatttaaattgagaaaaattaacttagtatttggatgtggaggtgagcgagataggtataaaagaaaaataatgggaagtattgctgataaatattgtgataaaatatatttaacagatgacaatccaagaagtgaagatccgacaaaaataagaagagatatcaagtcaaatatttcaaagagtaaagtattagaaataccctcaagagaaagtgcaataaaatcagcaattatggatattaagtcaaacgaagtagttatcatcgcaggaaaagggcatgaaatttaccaagaatatatctctaaaaaattcttttcggataaaaaatgtattgaaaaatttattaggattaaaaataaatctttaaatagtaattggaaaacaaatattgtttcagaaataactaaaaagaaaatagaaaaaaatattaatataaatgaggcttcaattgactcaagaaaaacaaaaaaaaataatatttttttggcataaa

SEQ ID NO: 312006 - DNA, 654 bp, Unknown
  Bacterial polypeptide expressing nucleotide sequence isolated from the Sargasso Sea
caagggaccatcttgattatcataaaacgtttaaagattacctgaattcaaaattaatactttttaacaagcttttaaaaaataaaggaaacattgtttatgatgaaaaaatttcacaatcaaaacagttgattaatattgcaaaaaaaagaaatttaaaaaaatataattttggtaaccaaaaatcgtttattagaattctgaatattcaaaaacttgatgactttaaaagagtagattttaagatgagtaataagaaatattcatttaaaacctcactaattggaaatgtccaaattacaaatttgatgtttgctgttgtggcagcatatttatctaaaataaacataaatgatattttaaaatcaattgaaaaaataaaaccaataaatggcaggctagaaaatgttggcaatttaaagaatagatcaaaagttattctagattacgcccatactcctgatgcactaaaaaccgcgatattaaatgttagaaaggaatacccaattagcaaaatttctttagtgtttggctgcggtggagacagggacaaacataagagacctgaaatgggagtgatagcaaaaaaatattgtgataaagtttatttaacagatgacaacccaagaaatgaaagcccgcaaattaattagg

SEQ ID NO: 312007 - DNA, 903 bp, Unknown
  Bacterial polypeptide expressing nucleotide sequence isolated from the Sargasso Sea
aattaaaaaaaataaaaaagcaatttttataaaggtaaaagatacaagaaagatcttagcaagattaagtacaaaatattacaaaaataaaccaaaaaatataattgctgttacaggtactaatggcaaaacatcagtatcagatttcttctatcaaatttttaagttacaaaataaaagatctggatttataggaacacttggttttagaaaaaataatttattaaaaaaaagggaattaacaaccttggattctttaactctaaacaaggatcttgaggaaatgaagaaaagtgggattaacaatgttattattgaggcttcaagccatggactaaaacaaaaaaggttagattttttagaaataaaagcaggcatctttacaaatttcagtcacgaccacttagattatcataagaacatgaaggactatcttaactcaaaacttttgttatttaaaaatcttttgaaaaaagaaggaacgataattaccgatagtgatattaagcaatataaattaattaaaaatatacagaaaagaagaaaacttaaaattttatccattggatctaaaaacaatttttttaaaattattaatcataaaattttcaataactttcagcttttaaaagtaaaatataacaacagaatatataaattaaaaataaaattatatggatctatacaaattaaaaatttatttatggcaattttagcatcaaaagtttgcggtcttaaaattgaaaaaatttttaacaaaattgaaaaaattaaaagtgttaatggtagactagatctaataaaaactctgccaaataaatcaaaaatatttttagattatgcacataccccagatgctttggagagtgctatactttctttaaaggaacattttaaaaaaaa

SEQ ID NO: 312008 - DNA, 836 bp, Unknown
  Bacterial polypeptide expressing nucleotide sequence isolated from the Sargasso Sea
gatgttgttaagggatctattagcgccttggttcccctacgcgggcgaacaaaccttcttagatttgactttagatagccgcgcaatacgtcgcggcgatgtgtttttagcgctgcccggccataaggtcgatggtcgtcaatttatcgataaggccttagcccaaggtgcgactgcggtattagtgcatacggataagattgatgagcaaggcaaagttattgcgactgagcaaggcgtacagatttatttttatcagttagctaagcaagtgtctgcggtcgccgccgtgcgttatcccgttgtccaaggccagtctatgggcattgtcgggatcaccggaaccaatggcaaaacctcgaccagtcagctctgcgcgcaattagtgaccctgctcgagggtaaagcggcggtgatgggcacgctcggcaatggcctctggggcgagttagtcgatagcggcaatacgaccgccgatgccattactttaatgcggcaactacatgagtttgcggacaaaggtgttaatacctgcgcgatggaagtctcaagtcatggtttagtccaaggccgagtcgatgccgtgcccttcgatgtggcggtattcactaacttgacacgtgatcacttggactaccacggcgatatgaaaaactatgccgcggccaagcaaatgctgttttgcttcgacgccctgcgtcacggcttagtgaatctcgatgatcccgttggcgctgcttggttatccgagctggcaaacgtcccggcgaagatgtggggctttagcattgaagcgcataccgaggcggcgttttacactaagaatgcccaattta

SEQ ID NO: 312009 - DNA, 912 bp, Unknown
  Bacterial polypeptide expressing nucleotide sequence isolated from the Sargasso Sea
atggaatatatcaaaagagagttgagggtatcagttttaaaggtatgatttttacaaatctcactcatgatcaccttgactatcatagttcatttagtgattatagagatactaaaaagttggttttcgattccttgagcaaaagctcattcgcattagtaaatagcgacgataagaatgcaaaatatatggttcaaaacaccaaagctagtatctatacttattcactaaaactaaaatcaaattttacatgtaaaattattgaacaacaactggacgggatgttgttaagtattgataacagcgagatttggactaaactaattggaaaatttaatgcatctaatatcctagcaatttattcaatcggtaaactatataatattgacaaaataaatttgctaactagtattagtaagcttgaaagtgttaaaggaagacttcagtcttttctatcaaataataaagtcactgttataatagattatgcacatactcctgatgcaattgaaaatgttatatcaactattaataatattaaaaaatcgaatcaaaatttaattactgtaattggatgtggaggcgatagagataaagctaagaggccaattatgggtaaaatatcatctgatctaagttcaaaagtaatttttacttcggataaccctagatctgaggatccaaaatctataattaatgatatgcttcaaggagtatcaaattttaatagcaaaaagatttcaattgaacttgaaagaaaaaaggcgataaggaaggcaaaagaaaatagtaatgagggcgatatagttttaatagcaggaaagggtcatgaaaattatcaagagcttagtaataataagagaatctactttgatgatttaaaaatagctaaagaaatttttaacaaataac

SEQ ID NO: 312010 - DNA, 799 bp, Unknown
  Bacterial polypeptide expressing nucleotide sequence isolated from the Sargasso Sea
gatttatttatagcaataccaggaatgaaatatgatggtcatgattttattaaagaggcaatgaggaatggtgcaagcgcagttattacaaacggaaggaatgcaaatattgatcctatacctcaaataaaagtggctaatcccagaagagcagtttctattgtatcatcaaaattatttaataacccatcaaaagatgttacggtaattggtattacgggtactaatggaaaaactacaacagcatatttaattgcaaatgctttgaataaagcaggttataaaacagcacaaataggtaccactggcatcattgcagagggttttaatcagaaaaaaacacttactactccagatgctattcatctccaagaattattttttgaatttaaaaatttaggatttactcatgttgtaatggaggtttcttcacatgcgctagaccaataccgagtggcagacataagtttcgattttgctgtttttaccaatctgacaccagagcatctagactaccacccatctatggaagcatattaccgggccaaatctcgcttgtttaaaatgttaactattgatggagtggcaataattaatagtagtgatctaaatggagagaggattgcaaaagagactattgctacggtattattttattccagaggaaatggcgatacaatacatttttctaatacagattcaaccttaaaaggaatcagggggactataaaagcaggcgattttagttacaatataaattcaagtttaattggagattttaataaggaaaatatattag

SEQ ID NO: 312011 - DNA, 964 bp, Unknown
  Bacterial polypeptide expressing nucleotide sequence isolated from the Sargasso Sea
atctaacgggaaggacttaggcaagctacctgtaccacaaataaaagtggcaaatccacgaagagccgcatcaattgtagcttcggagttttatggacatcctacaaaacatttaaaagttattggagtgacaggtaccaatggtaaaacaaccacagcctcaatcctaaaatctattctagatagtgcaggatataaagttgctcaaattggtacacttggtcttattgctgatgattttgaaaatattaaaacccttactacaccagaccccataactcttcaaaaactattctcaaaattaaaagaagccaattattcacatattgtcatggaggtatcctcacatgcgcttgaccagtttagagttgccgacgttgattttaatattgcagtgtttactaacttatctccagagcatcttgactatcacgcgacagtagagtcttattttcaatctaaacttagattatttacaatgctgacaattaattcaacagccatcgtaaatatttcagattcatttggaaagcgaatatcaaaaaaatccccagctcctgttgttccattttcaaaaagcaataaaaattctattcactaccgaaaaatggaaacttcaataactggaataactggtgaaataattgctggccaaaataaatattcaataaagtcaaaattaattggcgattttaatagtgaaaatattcttgctgcagtttcagttgctcatgcattaggagaaaataaaaaagatatagaaaatggtataaaagtttgtaattctatacctgggcgaatggaatcttattgtttatcctctggggcaattgtgattattgattatgcacatactccagatgcttatttaaaagtattaagtactataaaacaaaacctgagcgagtctggcgatttatacgccgtattttggtgcaggcggagacagagacaaaacaaagcg

SEQ ID NO: 312012 - DNA, 831 bp, Unknown
  Bacterial polypeptide expressing nucleotide sequence isolated from the Sargasso Sea
caattgcgaacaactaaaaataactctatagttattttagattacgctcacactcctgaggcgcttaaaacttgcatagaaaatgtaaaggaacaattttgtttgagaaaagttagtattgtatttggatgtggtggtgaaagagataaagaaaaaagaccaataatgggcaaaattgcaaacaatttatgtgattatatttatcttacagatgataatccaagaaatgaaaacccaaaaaaaatcagaaatagcattaagaggtcaattttaaagtccaaaatgattgaaataccatcaagaaaattagctataaaaaatgcgattttaaatagtaagtcagatgaggttttaattattgcaggaaaaggacacgaaaacattcaagaatatgttgagaaaaagaaattttctgacacaaacaatataagagaatctatacttttaaaaaataaatttttatcaaatgattggaaattaaatatttttaaagaaattttaaaaaataaaaaattagacagattaaaaaatttaaaattaagtactaactcaaaaaaaaataataaggataaaatttttttaggtattaagggcaaaacattgaatggaaatgattttgcagacgaagctttaaataatggagcaaaattagcaatacttcaaaattctaaaaatcttaacgataaaaaaattaatgtaaaaaatactacagaattactaactaaattatcacaaaagataagaatttcttcgaatgcatctcaagttgcaataacaggatcatcaggcaaaacttccctaaaagaattattaggccaatgtcttcaaaaa

SEQ ID NO: 312013 - DNA, 832 bp, Unknown
  Bacterial polypeptide expressing nucleotide sequence isolated from the Sargasso Sea
atgagatctataaaattacataaacttttagatttggtaggaattattccttcattagatttaatcgatcataaaatcaataatatttcttttaactctaaagaagtacaaaaaggaactttatttttaggtatgcctggtttaaatgttgatggaggaaaatattgtattgaggcaattgaaaatggcgcagaggctgccattattgggtctgctgcaaaagagaaaattggatctattgatcgagaaaggattttggttatagaggataatttagattatatttttggtcaaatagttgctgagttttggaataggccttcaagaaaacttaaacttattggtgttacgggtacaaatggaaaaacgacaattacttttttattggaatatcttttaaaaaaattagggaaaaagactgcattatttgggaccttgctcaatagatggcctggcttttcagaagtggctcttcatacaactgatttcgccgataaactccaaaagaaattaaatgctgctgttgaggcagaatctgaatttgcgatattagaggtaagttctcattctattgctcaaaacaggatatcaggatgcgaatttgaggcggctatttttactaatttaactcaagatcatcttgattatcactcagatatggaatcatattttcaaacaaaaagaaaattatttttcccaccttacttaaaagaaaaagatgggatttgtgtattaaattatgatgatcattggatatctaaattatcatctgatcatgaaaaaagatctttattagtctctacaaagattactgaaagtgaattgaaaatga

SEQ ID NO: 312014 - DNA, 934 bp, Unknown
  Bacterial polypeptide expressing nucleotide sequence isolated from the Sargasso Sea
atggaacatttagattaccataaaaatattaaaaattacttaaatgcaaaattatacctttttaaagaattgttagatttaaagggtaatataatttttgatgaaaaaataaatcaatcaaaacaacttgatattataacaaaaaaaagaagacttaaaaaatatacatttggttcctcaagatcttttattaaaataatcaaaattcaaaaagttaacaaccaaaaccaaattgattttactcttaacaaaaaaaactattcgtttaaaacttcacttttaggaaaaattcaaatcaaaaatttaatgtttgcaattatagctgcttatttatctaatgtagaaataaataaaattttaaaatcaatacaaaaaatcaaaccaattaacggaagattagaaaatattggaaatttaaaaaataactcaaaaattattcttgattatgcgcacactccaaatgctctacaaacagtaatatcaaatattaaagaagaatttcctttaagcaaaatttctttagtatttggttgcggtggaaaccgtgataaaaataaaagatcagaaatgggcgctatagcaaaaaagtattgtgaaaatatatatttaacagacgataatcctcgatcagaaaatcccaaactaataagaaatcaaatcaaaagaggtttaaaaaacaaaaaattttttgaaatttcatctaggtcaaaagctatttctatcgctattgataaattaaattctggtgatattttaattgtagctggtaaaggacatgaaaattatcaagaatttaaaaaaaaaaaaatatttttttcagataaattggaaattttaaagtcaattttccacaaaaataaaaatttgtcaaaatcaataaaaaataatattttaaaagaaactctagaaagtaaaattgttaataaaaaaaggt

SEQ ID NO: 312015 - DNA, 1450 bp, Unknown
  Bacterial polypeptide expressing nucleotide sequence isolated from the Sargasso Sea
actgcatgccgacacgcgcagcctcgaggcgggcgacgtgttttttgcgtatgcggtcgacggggccgacaaccgcgcattcattgccgaagcagtcgcgcgcggtgcggccgccgtgctgtatcagccggaagggctggacgctgcgccggcggtgcccgtctcactggccgtgccggcgctcgaccagctcgccggcgagatcgccagcggctggtacggcgatccgagcgacagcctgctcacggtaggagtgaccggcacgaacggcaagacctcgtgcacgcagtggatcgccaccgcgctgacggcgctgcaccagccgtgcgcggtgatcggcacgcttggcagcgggatgcccggccagctcgtgccgacgggtttcacgacccccgacgcaccgcaactgcagcgtagcctcgcgcaattgcgcgacgcgggcgcgaaggccgtggcgatggaggtgtcgtcgcacgcactgcaccaggggcgcgtgaacggtacggccttcgacatcgcggtgtttacgaacctcacgcaggatcacctcgactatcacggcacgttcgatgcatacgaggccgcgaaggcgaagctgttcgcgtggcgcggcctgcgcgcggcggtcgtcaaccgcgacgacgcagccggacagcgcttgctcgagaaactggccggccgcgtgcgcacgatcgcgtacgggatcggcgacgcaccggcaccggacgccgatcgcgaactggtcgcgctcgacgtgcgtgccaccacgaccggcacggcgttccgcttgcgttcgtcgtggggcgacgcggacgtcgaggtcggcacgctcggcacgttcaacgtcagcaacctgctcgcggtgctcggttcgctgctcgcgaccgacgtgccattcgacgcggcgctcgccgaaatcgcacggctcgagtccgtcaacggccggatgcagcggctgggcggccgtctgcagaacgacgaaccgctggtcgtgatcgactacgcacacacgcccgacgcgctcgaaaagacgctcgacgcgctgcgcccgatcgctacggcgcgcggcgggcggctcgtctgcatgttcggctgcggaggcgatcgcgatgcgacgaagcgcccgctgatgggcgcgatcgcggagcggcttgccgacgaaaccgtcgtcacgagcgacaacccgcgcagcgaggatccgcagcgcatcatcgaccagatcgtcgcgggcatgaccgcgcccgatcacgcacgccgtatcgaggatcgcgcgagcgcgatcctgcaggccgtgcgcggcgcggcacgcgaggatgtcgtcgtgctggccggcaagggccacgaggccacgcaggaaatcatgggcaagaagcgtacgttctccgaccaggatcacgcgcggctcgcgctggcagcgcgcgcgacgcacggcaagggaggcgcggaatga

SEQ ID NO: 312016 - DNA, 2083 bp, Unknown
  Bacterial polypeptide expressing nucleotide sequence isolated from the Sargasso Sea
atgttactcaaagactactttccaaatttacataaaaaatatcatgaattaagttttaaagggatagcttttaattctaaagaagttaaaaagggatacattttttttgcatttaaaggaaacaatacagatggaaatttctttataaaagatgctattaaaaatggatctgaaattattatcactgacaaatttaaaataaatggttggaaaaataacgttttatttttaaacgataacaatcctagaaatttactagctaaatttagctctaaaatatttaacaaaaaaccgaataacttaataggtgttactggtacaaatggtaaatcatcgatagcaaatttttattttcaaattcttactcttaacaggattaaagcagccgcaatcggaacattggggattactggtttaaaagttaaaaaaaatttttcaaatactacttttgatactattcaaataaacaaaattttaaaaaaattaaaaaaaaaaaatattgaaaatgttattttggaggcctcgagtcatggattaaaccaaaatagattagatggattagaatttgatattggcatatttaccaacttcactagggatcatttagattatcataaaacttataaaaattatttaaattcaaagttaatattgtttaaaaaattattgaaaaaaaattcttatgctatctatgacaacgaattaaaaatttcttctaatttaaataaaattactaaagtaaataaaatcaaaaaacttacattaggaaatactaaatcgagtttttcaataatagatcatcaatttttgaaagatgaacagaaaataacattcatatttgataaaaaaaaatattctttttcaacaacattaattggaagagttcaaattaaaaatttactaatggcaattatggcagcaatgaaaagtaaaatttcattagaaaaaattataaaaattataccaaaaataaagtcagtaaatggaagattagagaagttaggaaatcttaataattatggaattgttattcttgattatgctcatacaccagacgctttaaagacctgccttaaaaatgtgagggaacaatttaaattgagaaaaattaacttattatttggatgtggaggcgagcgagacaagcccaaaagaaaaataatgggaaatattgctgataaatattgtgataaaatatatttaacagatgataatccaagaagtgaagatccaataaaaataagaagagatatcaagtctaatatttcaaagagtaaagtgttagaaataccatcaagagaaagggcaataaaatcagcaattatggatattaggtcaaacgaggttgttattattgccggaaaagggcatgaagtttaccaagaatatgtctctaaaaaattcttttcagataaaaaatgtattgaaaaatttattaggattaaaaataaatctttaaatagaaattggaaaacaaatattgtttcagaaataactaaaaagaaaatagaaaaaaatattaatattaatgaggcttcaattgactcaagaaaaacaaaaaaaaataatattttctttggtataaaaggaaagaactttgatgggaataaatttgttaatcaagctttaaataatggagcctcaattgcaatcaatcaaaataaaccagtcaaccaagttaaaaataaaatttatgtaaaaaattctttaaaaattttttccgaaagcgctaaactggtaagaatatcttctaatatttcatctattgcaattacagggtctgcaggtaagacttctttaaaagagatgttgggtcaaatgctaggtaaattatgccaaacatcttattcaaaaaaatcttttaataataaatatggcgtaccaatttctttattcaacataaataaggaagataaaattggaatttttgaagttgggatggataaaaaaggtgaaattgactttttaaccaaaaaaataatgcctaatattggtgttattacaaatatttcttatgcacatattaaaaattttaaaaatttatggggtgtagctcaagccaaatcggagataataaacaaca

SEQ ID NO: 312017 - DNA, 1345 bp, Unknown
  Bacterial polypeptide expressing nucleotide sequence isolated from the Sargasso Sea
aagttaaaaaaggaaaaaattgataatgtaatattagaggcatctagtcatggtttaaaacaaaagagattagatggtttgaagtttaaaataggaatttttacaaatttatctcatgatcatcttgattatcataaatcttttaaagattatttagattctaaactatacttatttaaaaaattacttatgaaaaattcaagtattgttacagacttagatattcctgagtataagaaaattaaatctatagcaagaaaacgaaaaataaagttaaatactatatctaataaatatggagatttatcgatcatttctcataaatattttggcgaaaagcaatctttaaaaataaaatataaaaaaaagatttatacctttcaagtaagcttgattggtaaaattcaattaaagaacctcttaatgtcaatgattgcagcaaacatgagtaatattgattttaaaagtattataagtgttattaaaaaaataaaaccagtatccggaagattagaaaaaattggttttataaaaaataattcttcagtaattttagactatgctcatactccagatgctctacgtatttgtctacaaaatataaaagatcaattcaaaaatagaaaagtatcaattgtctttggatgtggtggaaatagagatcaatttaaaagatcattaatgggacggatagctaatgattactgtgataaaatttatttaactgatgataatcctagaaaagaaaatccaaagaaaattagacaaaatataaaaaaaaaaatagataattcaaaattatatgagattccaaacagagaaaaggctattaatctggcaatacaaaatcttttatcaggtgaaatcttagttgtagcaggaaaaggtcatgagaaaattcaagactatggaagttataaaaaaattttttcagataaagattgtataatcaaatatgttaagaaaaaaaacaaacttttaaaaaatgatctaaaatttaatataattaaagaagcgattagaaataataatctttcttcaaatacaaaaattagaaaggcgtcaataaattctaaaaatattagaaagaatgatattttttttgctattaaaggaaaaaaaaatgatggaaataaatttacaaatgaggctttaaataagggtgcaagtttagctattgtaagtaaaatttacgatttaaagaaaaaaaataaaaaaattatagtaaaaaatactttagactttttaacaaaaacctcagaaattattagaacaaattcatcttctaaaatcatcgccataactggaagctgtggaaaaacatctttaaaggaattactaaaag

SEQ ID NO: 312018 - DNA, 1933 bp, Unknown
  Bacterial polypeptide expressing nucleotide sequence isolated from the Sargasso Sea
atgcgtttaggggatcatttccaacaaataaaaaaaaaatatcataaaacttttttttctggggtttgttttgatcataggaaaataaaaaaaaattatattttttttgcaataaaaggaaataatttagatggtaataatttcataccatcagttataaaaaaaggttgtaaaataattgttacagagaaaaattttgatgaatggaaaaatggagttttatttatcaacacaaaaaatattagaaaattactagctcaaatttcatttagtatctttaaaaaaaaaccaaataacttaattgccgttactggtacaaacggtaaatcttcagtttcagatttttattatcaaattttgcgtctcaacaataaaaaagttgcttctataggaacactaggagtgagatctaacaactttaatttaaatttattaaatacaactattgaccctatttatttaggaaaaattttaaaccaattaaaaaaaagaaaaatagaaaatgtaattatggaagcatcaagtcatgggttacaccaaaatagattagatggattattgtttaattcagctatatttactaatttatcccaagatcatttagactatcataagaattttaaaaattaccttagtgctaaactatatttgtttgaaaatcttataaaaaaaaaaggattcgttataactgatgaaaaaatacccgaatttaaaaaaattaaaaatgtaagtctaaaaaaaaatttaaaattaatcacttttgaaaataaaagtttccaacttatctcccacaattacaaaaataagatccaaatactaaaaataaaacataataatttaatacataatattagagtcaatcttgtaggaaaaattcaaataaaaaatatcttaatggctgctattgcagcttcaaaaagtaatttagatttaaaaaaaatacttagtgtaattccaaaactgtctccagttgaaggtaggtttgaaaatattggaaaaattaaaaataaatctttggtatttcttgattatgcccatacacctgatgccttacaaacctgtgttctgaatattagagaacaattccctgataagcatatttctttgctatttggatgcggtggtgacagagataaaggtaaaagatcaaaaatgggtaaaatagctgataaatatgcgcataaaatttatcttacagatgataatccaagaaatgaaaggccaaagaaaattcgagaagatattaaaagaggtataaaaaagcataaagttattgaaatatccaacagaaaagaagcaattgtgaaagcaataagtaacttaaacacaggaaatgttttaatagttgcaggcaaaggccatgaaaaaactcagcagattggaaatagaaaagtttttttatcagataggcaaataattttaaattcaattaaaaaaaagaattttaacttatctaaaaatttaaaattaaacattcttaatgaaagatttgatcaaaatattctaccatttaaatcagtaattaataaagctagtataaactccaatagtgtacaaaaaaatgatattttttttgcaattaaaggaaaaaaaaatgatggtaataaatttgttaaacaagcaattcggaaaaaggcgtcaataactatagtaaataaaattcaaaagaaactacctgcaaataaacaagcaagctcaataaatcctttaggtttacttacagaaacagcaaaaatttttaggaaaaatatttctacaaaaattattgccataacaggcagttgtggaaaaactactttaaaggaattgttgggtagcaccttaagtaaagtatctaagacaacaatttctccaaaatcctataataataaatatggtgttcccttaagtctttttaatataaatcaaaatgatggattatggtgttattgaa

SEQ ID NO: 312019 - DNA, 1456 bp, Unknown
  Bacterial polypeptide expressing nucleotide sequence isolated from the Sargasso Sea
atgaataaatttttatcagaactagttaaaactgaagaaaatatttcttcaataaaaattaatggcatcacatctgatagtaggaatgtaatgccgggtttcatttttgcagcacttccaggttcaaagactaatggaaaaaaatttatatctgatgctataaataaaggtgctgttgtggtgattgcagaaactggaactaagattagttgttcagatactttattaattacttcagataacccaagatctaaatatgcaaaaattgcttcaaaattttatactgaaaagccaagttggttaggggctgttacaggtaccaatggaaaaacatctgtagcttgcttcacgtctcaattgtggaattcaatgaatttaaaaggggctgcgataggtactttaggcataaatagtattgaatataagtcaagtttagatttgactacacctgaacctgtgactttgcatagagaactctcagaaatatctacaagagggttagactatgcaattattgaagcttcgagtcatggcttagatcaatcaaggttagatggaattacatttgaggcggcagcattcactaatctatctcatgatcatttagattatcacattacatacgaaaagtataagaatgctaagcttagactatttagtgatctaataaataataatggaactgcagttttaaatagagatagtaatgaatttaaagaattcagtactgttgcaaaaagaaataatatatctgtaataagttacgggtcggatataagatcagatatatgtttggtttcatctattccaaaaagtgtaggtcaagaaattgaaataaatgttagtgggaaaagagaaagattattatttcctttatttggcgattttcaagcacataacgcgatgtgtgctcttgggctagtaattgcgtctggggcagatgctaataaagcaatacaatcattgggccatttgactggtgtaaaaggaagattggaattagtagccgagctttcgaatagagcaagaattttcatagattatgctcactctcctgaagcgctagaaaaaacattattgtctgtaaaaaactatactagaggtaaacttaatttagttttcggttgcgggggtaacagagatgaagcaaaaagaattactatgggacaaattgcatccaaatactcaaataaaatttatgtaactgatgataatccaagaaaagaaaaccctgaaaaaatacgtagggctattttatcaggttgtcctgatggtttagatattggtgatagacgtaaagctatttttttagccgtatcagagctagagccaggagatatattggtcattgctggcaaaggtcatgaaactgatcaactttataatgatagggtaaaaccatttgatgatagatatgaggtaaagaaggcaattgtttatgagagggtacaataat

SEQ ID NO: 312020 - DNA, 1054 bp, Unknown
  Bacterial polypeptide expressing nucleotide sequence isolated from the Sargasso Sea
aatattacacataaaataggagtcaccggaactaacggtaaaacatcagtcacattttatattaattatatattagataaaattaatattaaatcagcgacaattggcacattaggaaattctgctttcaaaaaaaacaaaggcaaccttaccacgccatcttcactagacctagccaggcagttatcagctatttatagaaaaaaaatagaccatgtatcaattgaagcttcgagtcatggtttagatcaaaagcgttttagcggattacaatttaatgttggaatactcactaatatttcacgtgatcatcttgactatcataaaacaatggacaattatatctcgagtaaagcaaaactatttaatgattatttatcccaaaatgcaaagataataataaattcggaaactaaatatttaactcagtttctaaaaaaaattaaaaatttaaaatccaaagaactaattttatttcaaaaaaataatgactataaacttctaaaattaaatttaagaaaaaatgatgtaaatgttagtgtaattattagtggaaaaaaatttaatttagtattttctaatcttccattatttcaaattaaaaactttttaattgctgcttcagcagtatcaggtatgggttacaacttagcaaacttatctacaatatctaaaaaatgtccaaacgtctcaggaagaatggaatatgtaggtctatctaaaaagggtggtaaggtatatgtcgattttgctcatactcctgatgcgcttttaaatgttttaaaagaaattaaacaaacaaatccctccaaaatcattcttatatttggttgtggcggtgacagagataaaggaaaaagatctaaaatgggtgtaattgcaaaaaaatatgccgatattgtaattgtaactgatgataatcctcgttatgaggatgcaactaaaattaggagagaaattattcaaaactcaaatttctttgtggaaataagcaatagaaaaaaagctattaagcatggaataagcaaattagaaaaaaaatctgtattattaa

SEQ ID NO: 312021 - DNA, 1222 bp, Unknown
  Bacterial polypeptide expressing nucleotide sequence isolated from the Sargasso Sea
gttgttaaaaaaactaattaaaaattgtcctgaaaaattagaaaatatttttataaaaggcttatcttcagacactagaaatctaaaaaaaggtgagctattttttgcgataccaaataaaaattttagtgtagaaaaactaatatatttagcaaaaaaaaaacgtgcagctgcgattgttacaagtcgaaagggtaaaaaatttgaaaaaattatttatatcaggaacataaaaaaagtactagctgacacctgtaaaaaattttttagtgaaaaaccaaaaaatatcatcgctgttacaggaacaaatggaaaaagttcagttgctgattttttctatcaaattcttaaactaaataatattaaatgtgctactatcggcaccttaggcataaaaaaaggagcgggctttgaaaaaacaaatttaacctctctagatataataagtttccataaagaattacaaaaaattaagaaactaaaaatagataatgttttagttgaagcatctagccatggtttggatcaaggaagattgggtggtgttaaattcagaggtggcatatttacaaattttagccaggatcatcttgattaccacaaaaaaatgagagattatttaaattcaaaactaattctatttaaaagccttttgcaacgtaataattatctaattacagataaatatattcctgaatttagaactttaaaaaaaattgcaaaaaaaagaaaattaaaaattaaaacaatcaatttaaaaaaaagttacgatgatttgagtaaatttaaattgataggcgatttccaaaagaaaaaccttcttatggctatctatgcaagtcaaattattggactaaaagaaaaaaaaattttaggtcaattagacaaaattcgtagtgtcactggtagattggatttagcgaaaattttaccaaacatgactaaaatcttcattgattttgcacatactcctgaagctattgagactgcaataaaatcattatcacttcatttcaatagagatattacagttgtttttggttgcggtggagaacgagataaaaagaaaagagctgagatggggaaaattgcaaataaatattgcaataaaatttacataacggacgataacccaagaaatgaaaatcctaaaaaaattagacactccataacaagattaatcaataaaaaaaagttaattgaaataggaaatagatttgaa

SEQ ID NO: 312022 - DNA, 1261 bp, Unknown
  Bacterial polypeptide expressing nucleotide sequence isolated from the Sargasso Sea
aatatttaataaaaaaccaaataacttgataggagttactggtacaaatggtaagtcatctatagcgaatttttattttcaaattcttaatcttaataaaataaaagtagcttcgataggaacattggggatcactggattaaaaattaaaaaaaattattcaaatactacttttgatactattcaaataaacaaaattttaaaaaaattgaaagaaagaaaaattgaaaacgttatcctagaagcgtcgagtcatggattaaatcaaaatagattagacggactagaatttgatattggtatatttacgaacttaacaagggatcatttagattaccacaaaacatataaaaattatttaaattcaaagttaatattatttaaaaaattattgaaaaaaaaatcatacgctatttatgataatcaattaaaaatttcatcgaatttaaataaaattactaaatttaaaaaaatcaaaaaacttacactaggaaataccaaatcaagtatttcaataatagatcatcgatttttaaaagatgaacagaaaataactttcatatttgacaaacaaaaatattctttttcaacaaaattaattggaagagttcaaattaaaaatttactaatggcaattatggcagcaatgaaaagtaaaatttcattagaaaaagtcattaaaataataccaaaaataaagccagttaatggaagattagaaaaagtaggaaatctttataatcatggaattgttattcttgattatgctcatacaccagatgctttaacaacatgtattaaaaatgttaaggaacagtttaaattcagaaaaattaatttagtatttgggtgtggaggtgagagagataaggccaaaagaaaaataatgggaaatattgcgaacaaatattgcgataaaatatatttaacagatgataatccaagaagcgaagatccaaaaaaaataagaagaagtataaaatcttatatttccatgagcaaggtgatagaaataccatcaagagaaaaagcaataaaatctgcaatattagatattaagtcaaacgaggtagttattgttgctggaaaaggtcatgaagtctatcaagaatatgtttctaaaaaattcttttcagataaaaaatgtattgaaaaatttattaagattaaaaataaatccttaaataaaaattggaaatcaaatattgtttcagagataactaaaaagaaaatagaaaaaaatatcaaaattaatgaagct

SEQ ID NO: 312023 - DNA, 1082 bp, Unknown
  Bacterial polypeptide expressing nucleotide sequence isolated from the Sargasso Sea
attgggtaaattaattaaaaatattaaaccagcatataaatctataaaatttaataatattagatttaacagcaaggattgcaaaaagaacgatatttttttttctatccaaggaaataaatttaacggaaacaattatattaaagacgctataaaaaatggctcaaaaattattatttcaaatttaaattttgagggatttaataaaaaaaaaattttatttattaaaaataaaaatccaagaaaagcattagcagaggctgcaaacaatttttataaaaaaaaacctaaaaatattatcgccttaactggcacaaatggcaaaacctcaattgcaaattttttttatcaaatattgtctttaaataaaaaaaaagttgcagccataggaactctaggtgttttatcaaaaaaaattaagttaaagacgaataatacaacaatagatccaattaaaatgcatcaaattttgcagaaattaaaaaatttaaatattgataacgtaattatagaagcatcaagtcatggtttaaaacaacatagattggatggattaaatttaaaaaccgctttgtttacaaacttgtcaagggatcatctagattatcataaaacattcaaagattatttgaattcaaaactcattctttttgataaattgttgcttaataaagggaatataattttcgaaaatggaatacctcaagaaaaagaacttaaaaagatttcaaaaaaaaagaaattaaagattcataaaataggtagtgaaaattccttcattaacttgaaaaaaatacaaaaaatcaacgataaaaaaagaatttattttagtcttttaaggaaagattattcattcaactcttatctaattggtagcattcagattaaaaatttactttttgcaattttggccgcatatttatcaggcataaagattgatgccattcttaggaacattaaaaaaattaaacctatcaatggaagattagagcaaattggtaagttaaagaataaatcaagagtaatacttgattatgcacatactccagatgcattaaaaaccagttatatcaaatataaag

SEQ ID NO: 312024 - DNA, 1111 bp, Unknown
  Bacterial polypeptide expressing nucleotide sequence isolated from the Sargasso Sea
tttaaaagttaaaaaaaatttttcaaatactactcttgatactatccaaataaataaaactttaaaaaaattaaaagatagaaaaattgaaaacgttattttagaggcctcgagtcatggattaaatcaaaatagattagatggattaaaatttgatattggtatatttaccaacttaacgagagatcatttagattaccataaaacttataaaaattatttaaattcaaagttaatattatttaaaaaattattgaaaaaaaggtcttatgctatttatgatgataaattaaaaatttcatcaaatttaaataaaattactaaattaaataaaatcaaaaaactcactttaggaaataccaaatcaagtttttcaataataggtcatcaattcttgaaagatgaacagaaaataacattcagatttgacaaaaagaaatattctttttcaacaaaattaattggaagagttcaaattaaaaatttattaatggcaattatggcagcaatgaaaagtaaaatttcattagaaaaaattataaaaattataccaaaaataaagtcagtaaatggaagattagagagagtaggaaatcttaataattatggaattgttattcttgattatgcccatacaccagacgctttaaaaacttgtattaaaaatgttaaggaacaatttaaattgagaaaaattaacttagtatttggatgtggaggtgagcgagacaagtacaaaagaaaaataatgggaaatattgctgagaaatattgtgacaaaatatatttaacagatgacaatccaagaggtgaagatccgataaaaataagaagagatatcaagtcaaatatttctaagagtaaattatttgaaataccatcaagagaaagagcaataaaatcagcaataatggatattaattcaagcgatgtggttattattgctggaaaagggcatgaagtctatcaagagtatgtctctaaaaaatttttttcagataaaaaatgtattgaaaaatttattacgattaaaaataaatctttaaatagaaattggaaaacaaatattgtttcagagataactaaaaagaaaatagaaaaaaatataaat

SEQ ID NO: 312025 - DNA, 2845 bp, Unknown
  Bacterial polypeptide expressing nucleotide sequence isolated from the Sargasso Sea
aatgttattaggcaattattttaccaatatagataatagtaaaaaaaaaatttttttctcagggatttcattcaattcaaaagatattaaaaaagataatattttttttgccataaaaggtaaccatttcgatggaaataaattcatttctattgcaataaaaaaaggctctaaaattattataagcgagaaaagaataacaaatcctcaaaaggatattttattcattcatactaaaaatataagaaaacttttagcagaaatcgcttttaaaatttataagaataaaccaaataatttaattgctgtaactggaacaaatggaaaatcatctgtttcagatttttattttcaattgttaaaacttaataaaataaaagtcgcctcaatcggaacattaggtgtaaaatcgaaaaatataagacgaaatttacaaaatactacgatagacccaattcgaatgggacaaatattatctaaattaaaatctcaaaaaattaataatgtaattatggaagcatccagccatggtctaactcaacataggttggatggtctaaagttttcatctggtattttcacaaatttatctcaagatcacctagattatcataaaaattttaaagattattttaaagcaaaacagtacttatttgaaaatttgataggaaagaaaggaaatgtaataacagatgaaacattaccagaatttaaaagaataaaaaaaatcgcaatttctagaaaattgaaattgcaggttttaaataatagcaaaaatcaatttcaaattttatctcatagttatagaggtgagaaacaaatattaaaaattagatactataatctaacaagagaaataaatttaaatcttattggaaaaatacaattaaaaaatattttaatggcgattattgcagcaaaaaatagcaatataagtttaatcaagattctaaatgttttatcacaacttaagccaatagatggaagacttgaaaaaataggtaaaatcaaaaataggtctaaagtaatacttgattatgcacatacaccagatgcacttagaatatgtctttcaaaccttagagagcaatttccaaataaaaaaataattttactctttggttgtggtggaaatagagatcaaaataaaagatttaaaatgggaaagattgcatgtgattattctaacgaaatttatttaacagatgataatcctagatttgaagatccaagaaaaataagagatgatattaaaaagggtattcatgacactttgataaaggaaattccaaatagaaaacaagctatatctgaggccatcaaaaatttaagcacaggtgatattttgttagttgctggaaaaggtcatgaaaaaacacaagatttcggtaaaaagaaaattttcttttcggataaaaaaattattttagattgtattaaacttaagaatacaaacttatcaaaaaactttaagataaatattattaaagaattatcgaaaatcaaaaataaaattcctttagtaaaagcagataaagcaagaattaactccaaagaggtaaataagaatgatatcttttttgctattaaaggaaaaaaaaatgatggaaataaatatattggagaggcatttaaaaataaagcatcattagttgtagtaaataaagttcaaaataaatttaatagcaaacgtcagataaaagtaagaaatacattaaaatttatgactgaaatttcaaaaatatttagacaaaatatcgatacaaatattatagctattacaggaagttgtggaaaaactactctcaaagaattattgggcaatgtgttaggaaagatttctagtgttagtatttctccaaaatcatataacaataaatttggagttccattaagtttacttaatttaaaacatagtgatgaatttggagttttagaggttggtatggataaaaaaggggaaatagataatttaacaaatattataaaaccgaatgttggcttgataactaacataaattatgcacatgcaaaaaatttcaaaaatatcaaacaaattgctttagctaaagcagagataattaaaaatatattacccaatggttttgttgtcttgaatgctgatgatagttttttcaaattacataaaaaaattgctgaaaataataatattaatgtgatttcttttgggattaaaactaaaaaagcaaatgttaagttgtttaatattaaaaaagttaaaaaggcatttaaaattaaagttaaacttaatgataagtttaaatattttataatttctaataattttcaaagtaatatttataatattttaagcgctttaagtgtaataagtatttacaaagatgtgcttaaacttaatgaaaaaattttcttagattttagaagtccagcaggaagaggagatcattctacaataaagataggtaacaaaaaaataaacttaattgatgaaagttataattctaatcctctatctttaaaatcagccttaaaaaattatgacaatatagatacaaaaaaatatcgtaaatatcttttgcttggagatatgatggaacttggttcacattcaaaaaaacttcaccaatcaatagttcctttaataaacgagacaaatattgataaagtatttgttatgggaaaaatggtaagagaaatattctataatattgtgaaagtaaaaagaggaagaattttagaaaataaatcgggaatttttgaattaattaagaaagatttcaataataatgattatttaatgattaaagcctcaaatgcgacaggtttcaacagtatagtaaataacttgaagggtttaaattaa

SEQ ID NO: 312026 - DNA, 1119 bp, Unknown
  Bacterial polypeptide expressing nucleotide sequence isolated from the Sargasso Sea
acataccaaaaacatcagggaaagagtaatttattttgaagaacttaaaaaatatattggtatttttgcatcaaggttttataactctccaagttcaaaaataaaatccatatgtgttactggtacaaacggaaaaactaccgctgttgaaacttttgcaaatatgagtaatttacttggctataaatccggttttatgagttcgataaatttttctaaagatggattaatattagagaaatcagatctaactacccctgatgccatcaaaatacataaaaatattaatgattcattagaatctgatgctatttacattgccatggaggcatcttctcatggcttagaacaggatagactaattggccttgatatcgattatgctatattgacaagcttttcgcatgatcatttagattatcacggcgatatacaaagttatcaatcagcaaaagaaaaattatttttagatttaaatccaaaaaaaaatatagtctgcatagatagttctttcggcaaaaaacttcactcaaaacttttaaaaaatgataaggaaacttacagcatatctataaaagaaaatgctgattttcatgcttcatttgagaaatcaccaattggattgaaggttaatttaaaagctttcgagaaaaatcttacctttgaactaaaaacattctcaagatatcttgcttcaaacataatatgctcaatggctgttttgatcttggatggagttaagctttctgagatatcaaaaatagcaaaagatatagttctgcctcaaggtaggcttgaaagaataattaaaaatcagcaagttatttatatagattatgcacatacacctgaagctttagagtgcacactgaaagaattgaacaacatacataacgagccaatatggtgtctttttgggtgtggaggaaatagagatagagataaaaggcctttaatgggtaagattgcgcaaaaatattcaaaccacgtaatattaaccaatgataatccaagagatgaagatgaaatggatataattaatgacatcctttctgaagtaaaggaaatggaaaaaatatctataaatttagatagaaaggatgcaatagaatcatctat

SEQ ID NO: 312027 - DNA, 1337 bp, Unknown
  Bacterial polypeptide expressing nucleotide sequence isolated from the Sargasso Sea
aaattttgttgatgatgcggtatcccgcggcgcagtagcaatcattactcaaaattcatcaagatgccgggatatggctccaactatgccactcatcgaaacatgtaacccgcgactagaattagcaaagttagcagcttgtttttttaatggtcagccagattatgttgctgcggtcactggtacaaatgggaaaagctcggtagtagattttgctaggcaactttggctttcagttggatatagtgcgtctagtttaggaacactaggattaaaaactaaacaggttctcgagaactctagtttgacaacgccggatacggtcaggcttcataaagttttaaaaagtttgagcgatagagagattcattatctagcgcttgaagcgtcaagtcacggcctcgatcaatatcgcatcgatggggtgaaaattagtgcagcggtttttacaaatctgacgcaagatcaccttgattaccacaaagatatgaggacatatttcaaagcgaaagcacgtcttttttcagaactcctcagtgcaaacggcacagcagtattaaattttgactcaagtgaatttgaagcattaaagagcatctgtatttcaagaggagtaagcgtaattagctttggctcatcaaatggggcagatattcagcttctagatgtgaaaccttcgccagcctttcaggaaataagaattaaagtttttaaagccgaatatcaatttgtattgaaattgctgggaaagtttcaaatcctaaatgtgttggcatccttaggaattgtcgtggcttctaaaaaagacagtgatgttgaattttgggtagaccagcttagaaatttaaaaggcgtccctggtcgcctagaacgtgtcactgatagcaattctttggctcaagttatcgttgattatgctcacacgccggacgctcttagaaatgctctagtcgcgctacggcaacatacttctaaacgattaatatgcgtttttggtgctggcggagaaagggatagaggcaagcgaaaaataatggggcaagttgctgatgaattagccgacctttgcctgataacagacgataatccaagaaatgaaaacccaaaaagaattagagatcaaattttagagggttgtccaaatggcgaaagcattgcgtgcaggggggaggcaataaagctaggaatttcgaagctccaaagtggcgatctgttgttaatagctggtaaggggcacgaatctacacaagaaataaatggccaaaaatttgaatttagtgatgtcgaggtagtaaaaaacttaattaaaaatgctgagggcttaaatcatgagtaga

SEQ ID NO: 312028 - DNA, 1417 bp, Unknown
  Bacterial polypeptide expressing nucleotide sequence isolated from the Sargasso Sea
ttgactttagatagccgcgcaatacgtcgcggcgatgtgtttttagcgctgcccggccataaggtcgatggtcgtcaatttatcgataaggccttagcccaaggtgcgactgcggtattagtgcatacggataagattgatgagcaaggcaaagttattgcgactgagcaaggcgtacagatttatttttatcagttagctaagcaagtgtctgcggtcgccgccgtgcgttatcccgttgtccaaggccagtctatgggcattgtcgggatcaccggaaccaatggcaaaacctcgaccagtcagctctgcgcgcaattagtgaccctgctcgagggtaaagcggcggtgatgggcacgctcggcaatggcctctggggcgagttagtcgatagcggcaatacgaccgccgatgccattactttaatgcggcaactacatgagtttgcggacaaaggtgttaatacctgcgcgatggaagtctcaagtcatggtttagtccaaggccgagtcgatgccgtgcccttcgatgtggcggtattcactaacttgacacgtgatcacttggactaccacggcgatatgaaaaactatgccgcggccaagcaaatgctgttttgcttcgacgccctgcgtcacggcttagtgaatctcgatgatcccgttggcgctgcttggttatccgagctggcaaacgtcccggcgaagatgtggggctttagcattgaagcgcataccgaggcggcgttttacactaagaatgcccaatttaacgatcaaggcgtgcaggcgacattagtctggcccgagggcgaaatcgacattcgctcccctttattaggcgcctttaacctctcgaatttactcgctgctttatccgccttgtatttgcagggtatggatatgcgtgcgttggcagccaaggtgccttatttagtgcccgtggctggccgcatggaacgtttcaccaccgctgataacattaccttagtcgtcgattatgcccataccccggatgcgattgagcaggcgcttaatgccctgcgtcgtcactgcgcgggcgagttgtggtgcgtgtttggctgtggcggcgaccgtgataagggcaaacgcccgctgatgggacaagcggcggagcaatttgccgatcgtattatggtgactagcgataatgcccgcagcgaagatcctaaccaaattattaccgatattatccaagggctgactcacccagagcgtgcgctgaccgaggttgaccgtgtggcggcgattaagcatgtcgtcgcgcaggctaaacctggggatgtgattctgcttgcgggcaaaggccatgaaacttaccaagaggcggcaggtgtgcgtcatgactatgatgagcgcgccctggcacgtcagttatcggagcaaagccaatgat

SEQ ID NO: 312029 - DNA, 1381 bp, Unknown
  Bacterial polypeptide expressing nucleotide sequence isolated from the Sargasso Sea
tatgaattttgagaagagaaacttcgtttctcattcaaaatacataaaagatgatgatatttttatttctttaaaaaatgggatcaagtatctcagtcaagaagatatcaataaactttctttaattctagtagacagcaaatttgagcagtatgacaatccaaagattttaaaaataaataatcttgaagaaaactatctcaattggattgatgaaatttatgatattcaacaaacaacgtttaaaaatttttttgtgacaggaacaaatggaaagaccactacaatagagctacttagccaggctttttcatttaactccatccctaattctacaataggcacccttggaacatacttgaatggaaataagtacttcagtaataatttaacaactgaggagccgttatttgttagatcagttatgcgaaaatgctctgaaaacaacattaagaatatatttattgaggcatcatcaatagggttacatcagaatagacttaaaggtttgactgttgagcatgcagcattaactaatatttcaagagatcatcttgattatcataaaagttttgatgagtacttatcatcaaagcttaaactagctgaaaatactactctaaaaacattatcttataatttggatgaagagcatttctcaaatatagagactgcatttaagggtgaaaaaatttactcagtatctaataaacaaaagaatgctgatatttacttcgaaattaaagaatttaaagaaaatggcagaataaatttttctgcaaaaactccatggggcgagtttaattcaagccctaaactgcatgcagaatataacatatataatttgcttctttcattaccttactacttttccataacttcaaattgcacagaatttttttctgctgcagatgaaatgacattacctgatggaagacttcaaaaaattcctaatgaaaatatatttattgattttgctcatacgccagatgctctagatgcagtttgctctgaacttaaacgaaaaaattataaaggattaaagttagtttttggcgccggaggagatagagatcaaggcaaaagagaactaatgggaaatattgctcaaaaatacgcaaaaaagatttatattacatctgacaatccgagatttgagaaacctgatgaaattatagagatgatcgcagcaggaatttctgataaagaaaaagtgatcattgaactagatagagcagaagcaataagcatggcaattaatgaattaaaaaaagatgaaattcttttgataacaggaaaaggccatgaagaatatcagataataggagatgataagaaagcattctcagactatgaggaggttttgaagtgtatagagtaa

SEQ ID NO: 312030 - DNA, 1102 bp, Unknown
  Bacterial polypeptide expressing nucleotide sequence isolated from the Sargasso Sea
atgaaattaaaaaaaatatgtagtattttaaaaattaatacaaattatttaaattttgataaagatattgatatatattccgtatcagatgacagtagaaataccaaaaaaaaagatttatacatttcgctaaaaaaaaatcaaaataattcccatgattatcttaaagaggccattggtaaaggctgtaaagtagttttctctgattatcaaatagaaagctccttaaaaaaagaatataagaaagtcttttttttaaaagtgaaaggcctagaaaaaaaaattcctttaattacaaattctatttataaaaatccatctagaaaattaaaaattactgctgtaacaggtactaatggtaaaactagtgtaacccatttttcacaccaaattttaaaatttattggtgagaaatctgcagtaattgggacaaacggttatggagagctaggaaaattaaagaattcggggtatacaactcctcgcaatgttattttgaatagaactttaagcgaacttaaaaagcttaaatttgaaaaagtatacttagaggcttcttctcatgcattagagcaggaaagattaaaagatataaatattgaaaatgcagtttttaccaatttaacccatgatcatttagattatcataaaaacatgaaaaattattttaatgcaaaacgaagactttttgaggattttgatataaaaaatgcagtcataaatgtggatacccaatatggtgaaaaattagcaaaaaaaatagatagaaacatcaaactcttaactttttcaaataagaaaaaaacagcaaatgcttatattaaaaattataaacttaacgaaaatggtatagactttgtattagatctaggggtgaatcaaattaaatgttcactaaacctctatggtttttacaatattgaaaacttatccttagctatactgaatttaataaatcaagggtactctcctaaagaaatagaaaaatcattaaaaaagctaaagcctgtaaaaggcagaatggaatgtgtttataataaaaaaaataaaaaaatctttgtagattatgcgcatacaccaatatcaattgaaattctctaag

SEQ ID NO: 312031 - DNA, 1158 bp, Unknown
  Bacterial polypeptide expressing nucleotide sequence isolated from the Sargasso Sea
tatgcttctaggaaactactttaataacatcaataaaaattataaaaatttttctttttcaggaatttcatttgaaacgaagagtattaaaaaaaataatattttttttgcaatcaaaggaaatagtattgatggtaataaatttatacccaaagcaattaaaaaaggatctaaaattattgtaaccgaaagaaaaaaaaatcaataccaaaatggaattttgtatattcatacaaaaaatgtaagaaaattattagctgaaactgcttttaaaatttataataaaaaaccaaaaaatttaattgcagttactggtacaaacggaaaatcatcagttgcagatttttattatcaaatattaaaattaaataataaaaaaggtgcttcaattggcacattaggtgttaaatcaaaaagtattaatttgaatttatctaataccacaatagatccaatcaaattggctaaaatattaagtaagttaaaaaatcaaaaaatagaaaatgtaattatggaagcctcaagccatggtttaaagcaaaatagattagatggtttaaagtttaattcaggtatatttactaatctatcccaggatcatcttgattatcataaaaatttaaaaaactatttaaatgcaaaactttatttatttgaaaacctaatctcaaaaagaggaaatgtaattacagatcaattaatacctgagtttaaaaacataaaaaaaattgcaattaataagaaattaaaattgcatacacttaatgatgagaaaaataatctagagcttttatctcataattttaaaggagaggctcaatttcttagaattaaattaaatagttcaataaatgatataaatttaaatttaattggaaaaatacaattaaaaaatgttttgatggcaataattgcagcaaaatatagtggtattagtttagataaaattttaaatacaattccaaaattaaaaccagttgagggaaggtttgaaaaaattggtaaaattaaaaatcaatcaaaagtaattcttgattatgctcatacgcctgatgctttgaaaacgtgtcttttaaatcttagagaacaatttcataataaaacaatcacagttctattcggttgtgggggaaatagggatcaaaataaaagatcaaa

SEQ ID NO: 312032 - DNA, 612 bp, Unknown
  Bacterial polypeptide expressing nucleotide sequence isolated from the Sargasso Sea
tatttcaatatagtggtagacaattttctattcctcttaaggttgaaggttattttcaggctatgaatattttatgtgcagcaggattagcaatagcatctggttcgccatcggaaaaggtttttgagcatttaaaagatcttagaccaattcctggaagactagagttctgtggatttagcaaaacagaagcaaagatctatgttgattatgctcatactcctgatgcattaactgcagctttattttctcttagagagcttacagaaaataagataactctcgtttttggctgtggaggaggtagagatagatttaagaggcctatcatgggagaaatagcagaaaattttgcagatggtataattgttacagatgacaatcctagaaatgaagattctgataagattagaaagtcaatattagaaacttgtccgtcagctatagaaatacccaatcgaaaagaagctataattacggcaattaatcaaggtgaaaaaggtgattcaattttaattgctggtaaaggtcatgaaaagtttcaaattattagcgataaaaaaattcctttttctgatcaagagataataagagaagtgataggtgattaaa

SEQ ID NO: 312033 - DNA, 1459 bp, Unknown
  Bacterial polypeptide expressing nucleotide sequence isolated from the Sargasso Sea
atggaattaaaggaaatattatacaaagttccaatactagcgatagctggatcatcatcaagaagtgttaaaaatattcatacagattctagagatgttgaaaaagaaagtctatttgttgctttaaaaggaaataagtacgatggatataatttcattaactcagcaatcaaatctggagcttttgtaatcatatgtaataaaattccaaaaaaattaaacaagtcaattacctatgttaaagtttctgatccaggaaaagtattagcaactatttcatcaaacttttatcgtaatccctccaaaaaaataaagttaattggtgtgacaggcacaaacggaaaaacaactatcacaactttactatatgatatttttagtagtcaaaatcaaaatgctggtttgatatcaacaattaatattaagtatggaaaaaataatattttatccagaaatacaacccctgatattttaaaaattaactatttattatctgaaatggtaaaagaaaaaataaaatattgttttatggaggtttcctcccacggaatatctcaaggaagaatagatggactttatttttttggtggtgtttttacaaatttaacacatgatcatcttgattaccataaaagttttaataattatagaaatgtgaaaaaacaattttttgacttactaccaaaagatgctttttcattagttaataaggatgataaaaatgcaatttttatgcagcaaaatactgtctcaaaaaaagtaagttatgctattaatacttatgctgattttaatttaaaagttttagaatccacttttagcggaatgttacttaacataaataacaatgagatttggacgcacttattaggtgattttaatgcttcaaatttactagctgtatacgcagtttcagttataactggtaatgaaaaaatagaaatactaaaaaaaattagtcttttaaaaaatgtccctggtaggtttcagacatttaaatctgattctgactgttatgtgataattgattatgctcatactccaaaagcattagagagcataattaattcaattaatcaaataagaactaaaaatgaaaaactaattactgtaattggatgtggtggagaaagagacatagaaaaaagatttgaaatgggaagaatcgcatcagaaaaaagtgatactgtaattttcacttcagataatccaaggaacgaaaatccaatgtccataatagatcaaatgaatagtggagttggttttaaagataaaagtaaaatcatctgtattaaagaaagagagatggcaattaaaaagtcaaaagaaatttcaaaaaaatcagatataatattgattgcaggtaaaggtcacgaatcatatcaagagatatcggatgttaaaatcccttttgacgactttttgattgcaaaaaaatattttaataaaaaaatataaa

SEQ ID NO: 312034 - DNA, 2266 bp, Unknown
  Bacterial polypeptide expressing nucleotide sequence isolated from the Sargasso Sea
ggaaaaaaatatgaaaagacttttttttctgacatctgttttgatagttcaaaagtaaaaaaagatgatatcttttttgcaattaaaggcacaaatattgatggaaataatttcatattagatgcaataaacaaaggctcaaaaattatcgtaactgaaaaaaaaataacaaaatttccaaatggagtattaattattcattcaaaaaatgtgagaaaattattagcagaagtttcatttaaaatttataaaaaaaaaccaacaaatctaatagcaataacaggaactaatggaaagtcctctgtagctgatttttattatcaaatattaaaatttaataatagaaaagttgcatcaataggaactttgggtgttaaatcaaacaacaaatatatcaatttatctaatacaaccatcgacccaattcaattggggaagatattaaattatcttaaaaatcagaaagtagatgatgtaatattggaagcttcaagtcatggtttaagacaaaataggttggatggtttgaaatttaattcaggaatatttacaaatttatctcaagatcatttagattatcataaaaatttaaaagattatttaaaagcaaaactttatctttttgagaaacttctatctattaaaggcaatgtaattactgatgaaaaaatacctgaatttagaaacataaaaaaaattgcactaaagagaaatttaaagattttttctataaataatgcgaaaaatcatttcaaaattttatctcattattttgtaggtgagaaacaaatgttaataatcaaatataaaaacttaatcaaaaatattaagctcaatcttataggtaaaatacaactcaagaacataatgatggcaattatagctgctcaaaaaagtaatctaagtttagataaaattttgggagttattccaaaaataagatctgttgagggaagacttgaaaaaattggcaatattaaaaataaatctaaagttatcttagattacgcacacacaccagatgcattaaaaatatctcttctttcactaagagagcaatttcctaataaaagaattgttgttttgtttggttgtggtggaaatagagatcaaaataaaagatcaaaaatgggtaaaatagcgtcattgtatgctgatcaaatatatttgacagatgataatcctagactggaaaatcctaataaaattagaaaagaaattaaaagagggataaatagtaataaaatatcagaaatttctgatagagcaaaggcgatttctgaagcggttaaaaatttaactacgggcgatatcttattagttgctggcaagggtcatgaaaaagttcaagaaattggtaatagtaaaatttatttttcagataaaaaaataatcttaaacgcaattaaattaaaaaatttgaatttatcaaataatttgaaattaaatcttatcaaagagtcatctggtgataaaaaattaaatacaaatttaactttgggacaagctagaattaattcaaaagaagttaaaaaaaatgacattttttttgctatacgaggcaggaaaaatgatggaaataagtttgtagaagaagctctgaagaaaaaagcttccatagtagttgtaaataaaattaaaaaaaaattagattataaaaaacaaataaaagtaaaagattcattgaaatttttgaccgaaacatcaactattttcagagagaatatagatgcaaagataattgcaataacagggagttgtggaaaaactacactaaaggaattattaggcaaaactttaaaaaaaatttctaaaacaactatttccccaaaatcttataataacaaatatggggttccattaagcctttttaatttgagtgagaacgacaattatggagttttggaagtcggtatggataaaaaaggggaaattgattatttatcaaaaattatcaaaccggacataagcgttataactaatataaattacgctcatgctaaaaattttaagaatataaaagatattgcacttgcaaaatctgaaataatttcaaatacgaaaccaaatggttttttgattttaaatgcggatgataatttttttagattacatcaaaaaatagctgccaaaaataatattaacacaatttcatttggtatcaaaaatcacaaatctgatgtgaagttaattagtgttattaaaattaataataattttaagataaatatcaaagctaaagattttaacaaacagttttgtgatt

SEQ ID NO: 312035 - DNA, 1096 bp, Unknown
  Bacterial polypeptide expressing nucleotide sequence isolated from the Sargasso Sea
tggaaaattattcaagaatttacccaaaaaatattattcacataaatttaataatctaagtttagatagtagaaaatgtaaacagggtgatatttttttttcaataagaggggtgaaaaagaatggaaataaatttattaacaacgcaattaataacggtgcaaaaacaattgtttctgatttaacttttgaaggaaaaaaagaaaatattctatttataaataacaagaatgttagaaaattagtctcagaaattgcttcaagatattataaaaatattccacctaacttaaccgctgttacagggacaaatgggaagtcttcaatagcaaatttttattttcaaatacttaacaataaaaaaataaaggttgcagcaattggaactcttggtatcaaaactgacaaaagtaaaaagctaactgataatacaaccttagactctcttgctattcacaaaacattatcattattaaaaagaaaaaaaataaaaaatattatactagaggcatcaagccatggtttaaaacaatataggttaaatggaataaaatttaatactacaatttttactaatttatctcgtgatcacttagattatcacaaaacatacaaagattatttaaattctaaattaatactatttaataaacttacgaaaagaaaaggaactttaatttatgataatgatattgatcaatctaaaatacttaaaaaaatttgtataaaaaaaaaacttaaaccactgacaattggaaaaaaaaattctaatttattaattaaaaaacatgattatgtaggaaattttcaaaaagttgaaattgaatttaataaaaaaaagtactcattttccacaaatctaattggaaaaattcaagttaaaaaccttctattcgcagctttagcagccagtaaaagcaaagttagatttaataaaattatcgagttaatgagcgaaataaaaccagttgaaggaagactggaggtgataggtcgtataaaaaatgattcaaaagtaattttagactatgctcatacacccgatgcattaaagcatactttggaaagtttaaaagaacagtttagccacagttct

SEQ ID NO: 312036 - DNA, 1987 bp, Unknown
  Bacterial polypeptide expressing nucleotide sequence isolated from the Sargasso Sea
agagttaatcttgtaggaaaaattcaattaaaaaatattttaatggcagttatagcagcttttaaaagtaatttagaattaaagaaaatatttagtgttattcctagactatcttcagttgaaggtagatttgaaaaaatagggaaaattaaaaataaatctttagtattccttgattacgctcatacaccagatgccttacaaacttgtattctaaatataagagaacaattcactgacaaacatatttctgtgctctttggatgtggtggtgacagagataagggtaaaagatcaaaaatgggcaaaatagcagataaatatgcggataaaatttatcttacagatgataatccaagatatgaaaggcctaagaaaattagagatgagattaaaaaagggataaaaaaacgtcaaattattgaaatttctaatagaaaagaagcaattgtaaaagcaattaataacttaaatacaggagatattttaatagttgcaggcaaaggccatgaaaaaattcaacagattggaaatagaaaagtttttttatcagataggcaaataattttaaattcaattaaaaaaaagaattttaacttatctaaaaatttaaagttaaacattcttaacgaaagatttgatcgaaatgttctatcatccaaatcagtaattaataaagctagcataaactctaagagtgttaaaaaaaatgatattttttttgcaattaaaggaaaaaaaaatgatggtaataaatttgctgaacaagcaattcaaaaaaaggcattaataactgtagtaaataaaattcaaaaaaaactacctattaataaacaagcaagctcaacaagccctttaggtttactcacagaaactgcaaaaatttttagaaaaaatatttctacaaaaattattgccataacaggcagttgtggaaaaacttctctaaaggaattgttgggtaacaccttaaataaagtatataaaacaaccatttctccaaaatcatataataataaatatggtgttcccttaagtctttttaatataaatcaaaatgatgattatggtgttattgaagttggaatggataaaaaaggagaaatagatcaactctcaaaaattattcaacctgatataagtgtgatcacaaatattaattacgcacatgccaaaaattttaaaaacgttagacaaatagctttagcaaaagctgaaataattgataatactaaagataatggctatgtagtccttaacgctgatgacactttttttagtttacataagaaaatagcatataaaaagaaaatcaaagtattatcttttgggatgaataaccaatatgcagatattaaactacataatattataaaatccaaaaaaaaatacaaaatctgtattaaaataaataatataaaaaaaaatttttcaatttcaaatgattttcaaaattatatttataatattttagcggcgttaactgttaaaagtgttttctttaatattttaaaactagataaaaatatatttttaaattttaaaactccagagggaaggggtgatatcaaaaaaattaaagtgaataaaaaaatgataaacctaattgatgaaagttataattcaaatccattgtctttaaagactgcaatattaaattatgacaagatcaaaacaaaaaactccaaaaagtatcttatacttggtgatatgttggagcttgggcatcattcaaaaaaacttcatgaatctatagcgccagtaattaacagaacgaatattgataaagtttttgtcaaaggaaaggaaatttcctttttatataataaaatttctaaacttaaaaaaggcacagttttaaagaataaattgcaaataaacgatctaattgaaaataactttgataatgatgatttcttaatgataaaggcctcaaatgcgacaggtttcaataagattgtaaaagaattaaaaggtataaattaaa

SEQ ID NO: 312037 - DNA, 832 bp, Unknown
  Bacterial polypeptide expressing nucleotide sequence isolated from the Sargasso Sea
ttaaaagaaaaagatgggatttgtgtattaaatcatgatgaccattggatatctaaattatcatctgatcttaaaaaaagatctttattagtgtctacaatgattactgaaattgaatttgaaaatgatgatttttttttcgtaacagataaaaaatttactgaaagtggttccacttgtatttttcatacacctagggaaaaaattcaactttttgttccacttgttggtgaatttaatttaatgaatgcgattcaagcaataacaattttgtataaactgaatttttctttaaaagatttatcaaagttaatacaatctttccctggtgctcctgggagaatggagaaaatacaaattgatgataatgacgtttcaagatctcttccaacagtaattgttgattatgcccacactcctgatggattaaaaaaagttttgcaatcaattaaaaaactttgtgaagggaaactaataactgtttttggctgtggcggagatcgtgatcgtagtaaaaggcctttgatgggatcaatagctgaagagttgtctgatcaactttttataacttcagataatccaagatcagaagaaccccaaaagatagtaaatgatattttgatgggtataaaaaaaagagaaaaaataacaattgaaattgatagatttaaagcaataaatgaatctattaaatttgccaataaaaaagatattgttttaattgcaggaaaaggacatgaagactaccaaattctcaatgataaagttattaattttgatgatagaaaaatagcttataaattattaaaagaaaaaaataaatctcaataaa

SEQ ID NO: 312038 - DNA, 490 bp, Unknown
  Bacterial polypeptide expressing nucleotide sequence isolated from the Sargasso Sea
cttaacagtgtccaaggaagacttcaatcatttctttcaaatagtaaggtaacagtaataattgattatgctcatacaccagatgcaattgaaaatgtgctatctacaatcaataagattaaaaaatctaatcaaaacataataacagtaattggatgtggtggagatcgagatcgagctaaaaggtcaatgattggaaaaatatgttcagacctcagttataaagtaatttttacatctgataatccaagatcagagaatcctgaatcaataattgaggatatagtttcaggagtatcaaactacaacaataataaaatcttagttgaggtggaaagattaaaggcaattgaagaagcaagaaaaaatagtgcagaaggagacatagttcttattgcaggaaaaggacatgaagactatcaaatatttaaaaataaagtaatcaaatttgatgattttaaaatagctaaaaaaatttttaataagtaag

SEQ ID NO: 312039 - DNA, 955 bp, Unknown
  Bacterial polypeptide expressing nucleotide sequence isolated from the Sargasso Sea
tatggaggtttcttctcactcattagcattatcaagagttgaaggaataaattttaattcggctatatttactaatatctcacatgatcatctagattttcataaaacaatgaaaaattactatcagagcaaggcaaaattattttcatattatctaaatagcagtaaaaagaaaaataagctagctgtaattaatatagatgacaagtatggtgccatgattgcaaatcaaacaaaaaaaaatataaatttaataacttattctacaaaaaataaggatgctgatttttacttaaaaaaaataatcaaactagattcgattaatcgtttgataattaaaaataagaataaagaactaattttggatacaaaattatttggcttatataattttcaaaatattcttgcatctgttggattttcaaagaataaaggtttaaaaatcgaagatatatatagtggcgtgaaactattcaagggggcaccgggtagattagaacaaatttctgaaaaaaactcaaatatatttatagattatgcacatacacctgatgcacttaaaaaatctataatttcgttaaaggaaaactttaaaaataaaaaacttttaattttatttggctgtggcggagatagagataaaggaaaaagatctaaaatgggaaaaattgcagcaagccttggggataatattataattacatctgataatcctaggcacgaggaccctaatgaaattataaaagatataatttcgggtataagtctaaatcaaagaaataaaattatagttataagtgatagacggaaggcaatagaatattcagtcaaaaaattagaaaaagatgctcagctactaatagcaggaaaaggacatgaggactaccaagatataaaaggaaaaaaaattaaattctctgataaaatggaaataaaaagatgcctgaagaaataa

SEQ ID NO: 312040 - DNA, 1453 bp, Unknown
  Bacterial polypeptide expressing nucleotide sequence isolated from the Sargasso Sea
atgaaaaaaaaatcaaaaattatttttgataaagatttaaaaatttcaaacaaaattagaaaaattgcaaaaaccaaaaattgtgaagctttaagtttaggattaaataatgctgacttaaaaattattgaacataaatttataaacctaaatcagaaaataaaatttttatttaaaaaaaagatttatagttttacaacaaaattaattggaaaagtacaaactaaaaatctaataatgtcaattttagcagcttataaaagtaatataaattttaataatattttaaaaaatgtagaaaaagtaaaacctgttcctggaagattagagataattggtaatctaaataataattcaattgttattttagattatgctcatacgccagatgctctaaaagtttgcttagtcaatctaatagatcaattttcattaaaaaaaattagtcttgtttttggatgtggcggcgaaagagatatcccaaaaagaaaaattatgggaaacattgcaaatatttattgtaaaaaaatttatttaactgatgataacccaagacgagaaaacccagaaattataagaaatcaaattaagtcacaaataaataaaaaaaatttaattgaaattccatcaagaaaacttgcgataaaaactgcaattgaaaatgcaaaatcagatgaaattatagttgttgcgggcaaaggtcatgaaacctatcaagaatataaaaacaaaaaatatttttctgatagagattgtattttaaaatctattaaagaaaaaaatcgaaaattaagcaaaaactggaaaactaacttagtacaagaaaaactagaaaaaaaattaaataataaaacaattattaataaagcttgtataaattcgaaagaaattagaaaaaataatattttttttggaataaaaggaaaaaatattgatggtaataaatttgctaatttagctataaaaaatggggcatcaatttcaataattgataaaaattatgaaaaaaaaaataaaaaaaagatcaaagtaaaaaatacattaaattttttgactgagtgtgcgactaaaattagaacttcatcaaatattattgcaataggaataacaggctctgcgggcaaaacatctttaaaagaattattgggacaatcattaagtaaaatttatcaaaccacttattctaaaaaatcttttaataataaatatggagttcctgtttctttgtttaatatagataaaagagataaatttggtgtttttgaaataggcatggataaaaaaggagaaattaatcaattatcaaaaatggtaaaacctaatattggagtaataacaaatatttcttacgctcatagtaaaaattttaaaagtttgttcgatatagcaaaagcaaagtcagaaataatagacaatataatagaaaatggatcaattgtattaaatgcagatg

SEQ ID NO: 312041 - DNA, 1116 bp, Unknown
  Bacterial polypeptide expressing nucleotide sequence isolated from the Sargasso Sea
aatgcacattggaaaattattcaagaatttacctaaaaaatattattttcataaatttaataatttaaatttagatagtagaaaatgtagacagggtgatatttttttttcaataaaaggggtaaaaaaaaatggaaataaatttattaatagtgcaattaataatggtgcaaaaacaattgtatctgacttaaattttcaaggaaaaaaagaaaatattttatttattaataacaaaaatgtcagaaaattagtctcagaaatcgcttcaaaatattacaaaaatattcctgctaatttggttgctgtaacaggaacaaatggtaaatcttcaatagcaaatttctattttcaaatacttaataataaaaaattaaaggtcgcaacaatcggaactcttggtataaaaactaataataataataagttaacagataatacgactctagattctgttactattcacaaaacactttcactaataaaaagaaaaaaaataagaaacactattttagaagcatctagccacggtctaaaacaatatagattaaatggattaagatttgatacaacaatttttacaaatttatctcgtgatcacctagattaccataaaacgtataaagattatttaaattctaaattaatattatttaataaacttacaaaaaaaggtggaaatataatatatgataatgatatttctcaatctaaaatacttaaaaaaatctgtataaaaaaaaatctaaaatcactaactattggaaaaaaaaattctaatttattaataaaaaaacatgagtatttaggaaattttcaaaaagtcgaaattgaatttaataaacaaaaatactcatttatcacaagtttaattggaaaaattcaagttaaaaatcttttatttgcagctttagcagcaagtaaaagtaaaattaaattcaacaaaataattgagttaatgggcgaaataaaggctgttgaaggaagattggagaatgttggtaacataaaaaataactcaaaagtaattctagactatgctcacacacctgatgcactaaagcatactttggaaagtataaaagaacagttcagtcatagctctataacaatagt

SEQ ID NO: 312042 - DNA, 1675 bp, Unknown
  Bacterial polypeptide expressing nucleotide sequence isolated from the Sargasso Sea
ttgggagtaaaattaccagatggcataaagatatgccatgcaacaaataattcaaagagagtaaaagaaaattcaatattttttgctttaaaaggaataaattatcatggcagcaagtatattgaagaagctctcgaacgtggagcacctatagtagttcataacgatataaactttaaaagtgatgataaaaaagtaatctacataaaagatctagatgctattgaatttattcttgatgagagttgtaataaattaaaagatatcgggaagatatcaaattttttacaagaactatataaaatcgatatcacttcattaagctttattggaataacaggaacaaatggaaaaacaacaactgcatacctaacacatcaacttcttacaaaggcaaatagaagtagtttatatataggtacaaatggtatttcttataaatctgcagaaatagagtcttctgtttcaaacaaaacaacacctgatatttttgagctttatgaaatgataaacacttataaagatgatttagaatttgtatgcctagaaatttcatcacatgcattagatcaaaatcgtctagctagaatttttttagatacagtctgtatattaaatattgaaagtgatcatttggattatcacaaagatgaagaagaatatataaagtcaaaatttaagatttttaatgttccggctttaaagttagcccatgaacatcaatgtaaatttttaaattgtgattctaatttagcgcttgaacactatggagccaatttagaaaattttgaatccaataacttcagaagggtaaatttagtaagtaaagaatctaaaattaaatactatgttggaaggtcttttaaatataaaaaaatagatcttggtaactggataaaacatgagccgagtattttttataacattgagagttcaaaagaagacattttagataaagaatgtacttattctatagaaatcaaagagggaaaagattatatgcttactcatgaatgcccttatttaatgaatgatcaaaagacagattgcttttcatcaaacctatttctagatttcaacaacgaaaatttagtatttgcaagaatttgtgctgttagtgcagagacgtcgaataaaaattatttaaaagccaaaaaacagaatccaagagaatataaagatataaggcagcttataaattgcaatatgctatctcttccaaaaggcagaactgatcttgtaaaaaatataaatgcaaatgttgttatagattatgctcataatccagaggcattttttgttttactgactgaaataaaaagaaaattcaaagatttagttgttgtatttggttgtggtggggaaagagataaatataagagacctttaatgttaaaagtcgcaacaaatattgcaactaatataatttttacttcagataattcaagaggcgaagaatttaaagatatctttaaagatgcttcagatggtaacgatttagagaatgtttttgcaattgaagacagaaaagaggcaattattaaaggaagtaaattaatcggaaaggatgattgtttgcttatacttggaaaaggacatgaagaaacgcaagaaattaaggggaacgtttcatattttagtgattatgaggtaatcaatgaaatttataactaat

SEQ ID NO: 312043 - DNA, 751 bp, Unknown
  Bacterial polypeptide expressing nucleotide sequence isolated from the Sargasso Sea
tatgtattatgggattagactagtgaaacttaattcattaattaaaaatattgctcaaaatgaaggtatttttccaccaatagaaataaaaaagatttgcactaattctaaagatgtaaaaaatggaagtttatttattgctatagatggagtcgaaaatgatgggcacgactatattgaagaagctatcgaaaatggtgcatcggcagttatatctaatggtagagatattggcaaattacctgtacctaatattcaagttggaaatacaagactagcggcaagtagaattgctgctgaatattttaagcatccttcaaaagagctaacagttataggtattacaggtacaaatggaaaaaccacaactgcctcattaatttattcaatattaaacgccgcaaagctaaatgtagcgcagattggtactttaggagtcattgccaatggaatccaaaagcaaaaaacacttactacccctgaccccattacattacataaaacattcaatgaattaattgatagaaacttttctcatgttgtaatggaagtttcttctcacgccttagatcaatgcagagttgcagatgtcaattttgatattgcagtcttcaccaatcttactgaagagcatcttgattatcatcaaaatattgaagagtattttaaagcaaagtcaaaattatttagaatgatgcctataaccggcacatctataataaatactgatgatgaatatggcaaaaaaatg

SEQ ID NO: 312044 - DNA, 1123 bp, Unknown
  Bacterial polypeptide expressing nucleotide sequence isolated from the Sargasso Sea
gacgacgcgggtttcggcacgctgacggtcggcggcgtgatccagaagtcgagcaacatcggcgcgacgaagatcgcgatgacgatgcggcccgaggaaatgtggaatatgtatacgagcatcggcctcggccaggcgccgaaggtcggattcccgggggcggtagccggccgcctgcgtccgtggaagagctggcgccgcatcgagcaggcgacgatgtcgtacggctacggcctgtcggtgtcgctgttccagctcgcgcgcgcctatacggcgatcgcgcatgacggcgagctgatgcccgtgaccattttcaaaaccgaccccaaccagccggtcgcgggcacgcaggtgttcaacccgaccaccgcgcgcgaagtgcgcgcgatgctcgaggcgggcgacgtgttttttgcgtatgcggtcgacggggccgacaaccgcgcattcattgccgaagcagtcgcgcgcggtgcggccgccgtgctgtatcagccggaagggctggacgctgcgccggcggtgcccgtctcactggccgtgccggcgctcgaccagctcgccggcgagatcgccagcggctggtacggcgatccgagcgacagcctgctcacggtaggagtgaccggcacgaacggcaagacctcgtgcacgcagtggatcgccaccgcgctgacggcgctgcaccagccgtgcgcggtgatcggcacgcttggcagcgggatgcccggccagctcgtgccgacgggtttcacgacccccgacgcaccgcaactgcagcgtagcctcgcgcaattgcgcgacgcgggcgcgaaggccgtggcgatggaggtgtcgtcgcacgcactgcaccaggggcgcgtgaacggtacggccttcgacatcgcggtgtttacgaacctcacgcaggatcacctcgactatcacggcacgttcgatgcatacgaggccgcgaaggcgaagctgttcgcgtggcgcggcctgcgcgcggcggtcgtcaaccgcgacgacgcagccggacagcgcttgctcgagaaactggccggccgcgtgcgcacgatcgcgtacgggatcggcgacgcaccggcaccggacgccgatcgcgaactggtcgcgctcgacg

SEQ ID NO: 312045 - DNA, 1402 bp, Unknown
  Bacterial polypeptide expressing nucleotide sequence isolated from the Sargasso Sea
atgaatcctcttaaaaatcttctcttaaaaaacaaatcttttatttcaaatacttctcaacttgaagatggtgacacttttatatctataaattctggccacaaattcctaagtaaaaatgatgaaaaaaaagttaaatacattttgtgtgacacaagtgaagctgatagtgaatgctttattaaaattccgagattaaatgaaaattttattaagtgggtagatgaaatttacaatataaaacacaaaaagtttgaaaatttttttgttactggaacaaatggcaaaacaagcgcagttcattttttgagtgaaatttttaaaaaaaatgatgttgcttatgcttcaatgggtactttaggttcgtttttggaggaaaatgaaattgaaggccaaaaattgacaactgaaaatccactatacattagaaaatttcttaaaaaagttcaaaatcatactaagcatgttttttttgaagcttcttcaataggcattaatcagaaaagactagctggacttgaaatcaagcatgttggtttcacaagttttgcggaggatcatcttgactatcataaaaccacttataattatttaagttctaaacttgaacttttgtcaaatagaagtctagaaactttggctttcaatctagacatgaacatctcaaaagaaattaaacaaaatgcaaatgctagaagtattttttcaatatcctcatcaaataaaaaagcagaaatttattacgaaattttagatatcgatgaaaatggttggatcagatttgatacttttactccatggggtcaattctcttcaaatgtaagattatgggttgattataatgttttaaatttgcttatatctctaccttactattactactgcttcggtgagataaagtctttttttaggaaaatcgaaaatatcctccttcctaatggaaggtttgaagttttgaattttaaaacaaaacacaaaaaagtgattattgattttgctcatactcctgaagcaatggaaaaacttttatctcaactatcaaaaaattataaagaaaaaatttatttagtttttggatgtggaggcgatagggataaaggtaaaagaccaaaaatgggggctatagcagagaaatatgcaacaaaaatatttttaacttctgataattctagaagtgaatctccagatgaaataattgatatgattgcagcaggcattaaagataaattaaaaatacaagttaatatagatcgagaaaaggctattcaactagctataaattctatgagtcaagataatgttcttgttgttgcggggagaggacatgaaaattttcaaattgagcaaggtaataggttaaaattttctgatcgtgagattgtaaagaaatgtttagcgtaaa

SEQ ID NO: 312046 - DNA, 2827 bp, Unknown
  Bacterial polypeptide expressing nucleotide sequence isolated from the Sargasso Sea
ctgattaataaccttgatccaaaaattgccaacgagagagttaagggtatttcatcagatagccggaaagttaaaaagggagatctatttatttctattaaaggaaataaattagacggaaatagttttataaaagatgctatttctagaggagcgaaagctatcgtttattcagggacaattaaaaaaaaataccaaaatatcattttaattaaagtagctgactcaagaagtaaacttgctgaaatttcatctaaattttaccaaaaaaaaccaaaaaatatagttgctgtaactggtacaaacggaaaaacatctgtatcagatttcttttatcaaatactaaaactttttaaaaagccggtaggtatgattggtaccctaggatttaaaaaaaataataattttaggaaaagagaacttactacctcagatacaattggtctccatagggacttatacgaaatgaaaaactctaaaatagaaaatgttattttagaagcctcgagccatggtcttaaacaaaaaagattagattttttaaatataaaaacaggggtcttcacaaacttaagtcatgaccacttagattatcataaggacatgaatgattatttttctgcaaaattaatcttatttaaaaaaattttgaagaaaagatctactattataactgactcagaaataaaacaatattctacatttaaaaatttaaaaaaagcaagaaaattaaatttacttagtattggaaattcaggaaatacatttgaaatcttaagtcataatttctacaaagaatatcagataattaaaattaggtataaaaataaagtatataatcttaaaatatacttaattggatcagtacaaataaaaaatttattaatggcaatactggctagtgaaaaatgtggcataaaaatacaaagtatatttaaaaaaatacataaaataaaaagtgtaaatggaagattagagcaaataaaagaattacctaatcgatcaaaaatttttttggattatgcccatacacctgaggctttaaaaactgcaattaatgctcttaaagaacattacaaaaaaaaaatcactgtagtttttgggtgtggaggtgaaagggataaacctaaaagaaaattaatgggcaagatagctaatcagttatgtaataaagtaattataacagatgataatccaagaaacgagagtccaaaaataataagagagcaaattttaagtgcaattaaaaaaaataaatttaaagaaatccctggtagaaaaaaagcaataatttatgcattaaaaaattctgatccttatgaaataatcttgattgctggaagaggtcatgaaacttatcaagattttggtaaaagaaaagtacctttaagcgataaaaaaattattcaaaattttaattcaaaaaaaattaatactaaaattaattattttaaaaataataataccttaattaaaaagatattgaaaaataaaaagaatatttattttgagggggtttcaattaattcaaaaagtattaaaaaaaataatctatttgttgcaataaagggaaaaaaaaaagatgggcatgattttttaaaagaggcaataaaaaaaggtgcaaattatagtattgtatcaaaaaaagttaaaaaaaattacaaacccctaaaagtaaaaaatacactaaattttttaaaagatttttcacaaaaaaaacgtgaagactcctcagctaaatttatagctgtcactgggagtgcagggaaaacatcacttaaaactatgcttggtggtttattaaacaaatattcaaaaacttatttttctcctctttcgtataacaatcattatggagtacctttaagtttgtccaatattagtcccgatcatacctttggagtttttgaagtaggtatgagtaaatttaatgaaatctttcgactttcttctctggtaaaacctgacattggaataataactaacatttcagaagcacatctagaaaattttagaagtatttcagatatagctagagctaaaggagaaataatttcaaatatccaaaaaggtggaacaataatacttaatagagatgattcattctttaatttttttaaacaagaagctattaaaaataaaattcaaattaagtcattcgggtattcaaagaaagctgatataagatttttaaagtctaaaaagatcaaaaataatttttatattgaattatctataaataaagaaaaaattttattacctgttagaactatcaataagagtaatattatgaatattctaagttgtttgtcagtattagattgtcttgggttaaatcacgaaagtattaaaaattatttcaaaaaaaacaaaccattaaaaggaagaggaagtataaaaaaaatcaaaaaatttggcagaaaatttttccttatcgatgaaagctataacgcgaacccaatatcaattaaatcagctatagaaaatttttctaatattagtaagaatggcaagaaaaaatatttcttttttggggatatgatggaattgggaaaaaaatcacatatttaccataaaaaagtaacaaaatttattaataatagtgatattgataaaacatttgtttatggaaagagaagttctgcagcatttaaatttataaaaaaaaataaaagaggtgaaattttagataatattaatagatttaatcctaaaatttcaaaaattataaaaaacggtgatttattaatgataaaaggttcacatgcaactaagttacataaaatttctgaaaattatttgagaggaaataatcatgctttatagt

SEQ ID NO: 312047 - DNA, 1489 bp, Unknown
  Bacterial polypeptide expressing nucleotide sequence isolated from the Sargasso Sea
atgataagaaatattctcttttcgacaaaattaattggaagaattcaaattaaaaatttactaatggctattatggcagcgataaatagtaaaatatcgttagaaaaaattttaaaaatcaccaaaaaaattaaaccagtaaatggcagattagaaaaaattggaaggcttaataataatggaattgtaattcttgattatgcacatacacctgatgctttagaaacctgcataaaaaatatcaaggaacaatttaaatttagaaaaatcaatttagtattcggatgtggaggtgatagagacaaacccaaaagaaaaacaatgggtagaattgctaatagatactgtaataaaatatatttaacagatgataatccaagaaatgaggacccaaaaaaaataagaagagatataaaatctaatattttaaaaaataaatttttagagatcccttcaagagaaagcgcaataaaatcagcaattttggacattaagtcgaacgaggtagtaattattgcaggaaaagggcatgagacctatcaagaatatgctaataaaaaatacttttcagacaagaattgcatcaaaaaatatattaaagcaaaaaataaaactttaaataagaattggaagtctaatattatttcagaagtaacaaaaaaaaaaataggcaaaaatattaaaattaacgaagcttctattgactcaagaaaaataaaaaaaaataatattttctttggtataaaaggtaaaaattttgatggtaataaatttgttgatcaagctttacgaaatggagcatcaatctcaattatcgataaaaaattaaagaacaaaatcaaaaataaaatatatgttaaaaattctttaaaaatattttcggagagtgctaaattaataagaatatcatcttgtatttcttctgtagccataacaggatctgccggcaaaacttctttaaaagagatgctgggtcaaatgataagtaaattatgcaaaacatcttattcgaaaaaatcttttaataacaaatatggagtcccaatttctttatttaatataaatgaaaaagataaaataggtattttcgaagtaggcatgaataaaaaaggggaaatcgattttctaaccaaaaatatattacccaacattggagtaattacaaatgtatcgtatgctcatattgaaaattttaaaaatttaaatgatatagctcatgctaaatcagaaataataaataatatagtagaaaacggaacgataatattaaatgctgatgataaatattttaatttttttaaagtgaaagctgaaaaaaaaaagttaagaataatttcctttggaataaaaaataattcgaatttacgtttaattaaaattaaaaaagaaaaaaataattcaatacttttcataaattacaacaattctaccttaaaattttcaatcaaaaaaaatttagtaaattatatttataatattttatcaactt

SEQ ID NO: 312048 - DNA, 1483 bp, Unknown
  Bacterial polypeptide expressing nucleotide sequence isolated from the Sargasso Sea
aatgttattaagggatctactcgccccttggttcccctacgcgggtgaacaaaccttccaagatttgactctagatagccgcgcaatacgtcgcggcgatgtgtttttagcgctgccaggacacaaggtagatggtcgtcaatttattgataaagccttagcccaaggtgcggctgcggtgttagtgcatacggataatccccaagagcagggcaaagtaattgcaatgcccgctgagcaaggggtacagatttatttctatgagttagcgaagcacgtttcagtggtggctgcggtgcgttatcctgttatccaaggtcaatctatggccattgtgggtattacagggactaatggcaaaacttcgacaagccaattgtgcgcgcaattagtgacgctgcttgagggtaaagcggcggtgatgggcacgctcggcaatggcctgtggggcgagttagtcgatagcggcaataccactgccgatgccattaccttaatgcgccaactgcatgaatttgcagataaaggtgtaaatacctgtgcgatggaagtctcgagccatggtttagtccaagggcgagtcgatgccgtgcccttcgatgtggcggtatttactaacttaacccgtgatcacttggattaccacggcgatatggaaaactatgccgcggccaagcaaatgctgtttcgtttcaacgccctgcgtcacggcttagtcaatcttgatgatcccgtgggtgccgcatggttatccgagctggcaaacgttcctgcgaagatgtggggctttagcattgaagcgcataccaatgcgacgttttacactaagaatgcccaatttaacgaccaaggcgtacaggcgaccttagtctggcccgagggcgaaatcgatattcgttccccgttattaggcgcctttaacctctcgaatttactcgctgcactatcagccctgtatttacagggaatggatatgcgtgcattagctgccaaggtaccttacttagtgcccgtgtctggccgtatggaacgttttaccaccgcggacaacatcaccttagtcgtcgattatgcccacacccccgatgcgattgaacaggcacttaatgccctgcgtcgtcactgtgcaggggagctttggtgcgtgtttggctgcggtggcgaccgtgacaagggtaagcggcctttaatggggcgtgcggcggagcaatttgccgatcgcattatggtgactagcgataatgcccgcagcgaagatcctaaccaaattattaccgatattatccaagggctgactcacccagagcgagcgctgaccgaggttgaccgtgtggctgcgattaaacaagtcgtcgcacaggctaaatctggggatgtgattttgcttgcgggcaaaggccatgaaacttaccaagaggcggcaggtgtgcgtcatgactatgatgaacgcgccctggcacgtcagttatcggagcaacgctaa

SEQ ID NO: 312049 - DNA, 1191 bp, Unknown
  Bacterial polypeptide expressing nucleotide sequence isolated from the Sargasso Sea
cctgaccattggaaaaaaaaattctaatttaataattaagaaacatgaatattttggaaatcagcaaatagtagaaattgaatttaataaaaaaaaatactcatttagtacgaatttaattggtaaaattcaggttaaaaatattttgttttcaattttagctgcaagtagaagtaaaattaaatttaataaaatcattgagtccataaaggatataaaacctattgaaggaaggctagaaattattggcaaaattaaaaacaattccaacgtcatactagactatgctcatacacctgatgcattaaaatatactttagaaagtataaaagaacagtttggacaaagtgctatttcaatagtttttggttgcggaggagacagggataaagacaaaaggtctattatgggtaaaattgctaaccagtactgcaataagatatttttaacagatgataatccaagatatgaaaatcccaataaaattagaaaccagataaaaaaaaaaataaccagatctaagctagttgaaattccttctagaaaaaaagcaataaaaatagctataaaaaatttaaactcaggagatatattgctagttgcaggaaaaggacatgaaatttatcaagagtacaggggcaaaaaaaaaattttttctgataaaaaatccatattaaaagaaattaattctaaaaatttaaaattatttaaaaattggaaagcaaatatattaaatgaaaaatgcaacttaagtttagtaaataaaaagttaaaaataaataaagcgtctataaattcaaaaaatataaaaaaaaatgacatcttttttgcaatcaaaggtccaaagaataatggtaataattatgcagacgaggcaattacaaaaggtgcttctttagcattagttaataagttaggaaaattaaataaatcaaaaaaggttctagcaaataacacattaaaagttttaacagatgcatctaaagatgttcgaaaaatttcaagtgcaaaatttatatctattactggcagctcaggaaaaacatctttaaaagatttactatcattttctttaaataaattagcaccaaccacaaaatcaactcaatcttttaataataaatttggtgttccattgagtttatttaatgtaaaaaaaaatgataagtttgcagttcttgaggttggaat

SEQ ID NO: 312050 - DNA, 1399 bp, Unknown
  Bacterial polypeptide expressing nucleotide sequence isolated from the Sargasso Sea
aatgttaattggaaaattatttaataatatccctaaaaaatttaaacaccacgagttcagaaatttaagttttgatagtagaaattgtaaacttaaagatatatttttttctataaaaggaacaaatagcaatggaaataaattcattaaaaatgcaataaataatggagctaggacaattatctctgacttaaattaccaaggtttaaaaaatggagttctttatatcaatagtagtaatgttagaaaaactctatcctacgcaggatctaaaatttttattaaaaaaccaaaaaatttaattggaattactggtacaaatggaaagtcatcagtagcaaatttttattatcagattttaagtcaaaataaaaaattgtcagcatcaataggtacattaggtatcaaatctaaattgtataaaaaaaattttgaaataacaactttagatccaataactcttcatcacaatttacaaattataaaaaataaaaaaattaataatgtaatactggaggcttccagtcatgggttaaaacaatctaggctagatcatttaagatttaattgctcaatatttaccaactttagtagagatcatttggactatcataaaaattataaagattatcttaactcaaaattaaaattatttaaaaatcttactaaaaaaaatgcaacagtaatatttgataatgatttgtctatttcaaagatattaaaaaaaacatgtaatgtaaaaaaatttaaaataataactataggaaaaaaaaattcagatctaaatataaatagaatttcatactttaaagatttgcaggttgtagaatttgattataaaaaaaaaaaatattcaatcaatttaaaattagttggaaagcttcaggttaaaaatatattaatggcatgtttggctgctgagtgtagtggagtaaaattttcgaaaattatttctaatatacacaaaataaaaccagtagagggaagaatggagcaaattaaaacaattaaaaatggctccaaggtaatacttgattttgcacatactcctgatgctttaaaaagctctttaaaaaatttaaaagaacaatatccattaaacaatttaaatattgtttttggatgtggtggtaacagggacaaagcaaaaagacctttgatgggaaaaatagctgataaatattgcgaaaaagtttatcttactgacgataacccaagaaacgaaattccaaaaaaaataagatctcaaattaaattaaagatatctagaaaaaaattaatcgaaatcccttctagaaaaaatgctatcataaaagcaattaacaatttaagtagtggggatattttattaatagctggaaaaggacatgagacttatcaacaatatggttctacaaaa

SEQ ID NO: 312051 - DNA, 1375 bp, Unknown
  Bacterial polypeptide expressing nucleotide sequence isolated from the Sargasso Sea
tctgagttcaaatgaaaatctagttacaaattcaaaatatttaagaaaaaatgatatctttttatccttaagaggtggagcaaaataccttacaactgaacatgtaaatcttgttaaacatatttttctcgatagtaatgaaaatattgatttgccaaaagttacgaaaataaaagatctcaatagttcatatttaaaatggatagatgagtactttcagattgatcattcatattttaataatcttttcattacaggcacaaatggaaaaactacaactctaagctttttaagccaaattctggaaaataatggtatcaaacatgcttcatctggcacattaggaactttcataaatgaacaaaagatttttgacaatgagctcactacagaagagcctgttttcattagaaatcttatgtcaaaatgttttcgatcaagtatcaagaatattatttttgaagcctcatccattggagttgataaaaaaagattgcagggcttaatggtcaatcatgccatatttaccaatatttccagagatcatcttgattatcatggctcattacaaaattatattaatgctaagtttaagttagttagcaattcagaagttaagacagtagctgtaaattttgacgatgaaataatatccagtcaactgaaaaagatatgttcaaagaatatatttaagatttcgtctagaaataataaatcagatattttttttaaagttctaaagtcctatgaggatggaaatattgaatattcagtagaaacaccttggggaaaatttcgagctgcttctaaaattgaatccaaatttaatttatataatttatttttaactttaccttattatcaatttatccatgataattgcgaagatttttttgctaaagctcaggatctatcattgccatttggcagattaaataaaactgaaaaagagaatgtgtatattgattatgctcatacacccaaagctttagaatccgtatgtgaatgtctgtacaaaaagaaaaaaaataaattaataattgttttcggagctggaggtgaaagagacaaaggtaaaagggctttgatgggagaagtcgcagataaatattgtgaaaaaatttatataacttctgataaccctagaaatgaggaccctcagcaaatagcaaatatgatagcagaaggaatagaagaattagataagatttgtatggagcttgatagatctcgcgcaattaaaaatgctataaatgagcttagcgaaggagatatactccttattgctggcaagggccatgaaaataaacaaattattggtgatgcatgtttagatttttctgattatgaggaagtaaaaaagtgtatgttttga

SEQ ID NO: 312052 - DNA, 1422 bp, Unknown
  Bacterial polypeptide expressing nucleotide sequence isolated from the Sargasso Sea
tttaaagaaaaaattaaaattattagcaataaatgaaaataaaaataattttgaaataatatctcatagatatgataaagaaaatcagctaatcaaatttaaacataaaaatttaattaaggaaattaatttaaatttaataggtaaaatccaaataaagaatattttgatggccgcaattgcagcacaaaaaagcaatttaaattttgaaaatattttaaaagtcttgccagaattaaaaccagttgaaggtagattagaaaaaattggaacaattaaaaataattcaattgttatacttgattatgcacatactcctgatgctttaaaagtctgtcttttaaatattaaggagcaatttcctgataaaaagttaaatcttttatttggatgtgggggaaatagagatcaaaacaaaagagcaaaaatgggtaaaatagcaagtatttatgcagataatatctatctaactgatgataatcctcgttcagaaaatccctcaagaataagaaatgatattaaaaagggcactaaagctaagaaaattattgaaatttctaatagatcaatagcaatatcagaagccattaaaaatttaaaaagtggagatgttttagtagttgcaggaaaaggtcacgaaaacattcaagaaattgataaaaagaaaatcaagttttctgatagaaaaaaaatccttatagaaatcaacaaaaaaaacaaaagtttatccgatcaattaaaaataaatataattaaagaactttccaacactcaaaaattatcaaagtctatttctataaataaggcaagaattaattctaatgaggtacaaaaaaacgatgttttttttgctatcaaaggaaaagtaaatgatggaaataattttgtttcacaatcatttaagaaaaaagcatcattagcaattgtaaataagattcaaaataatcttgatattaaacggcagataaaagttaaaaacaccttaaaatttttaacaaaagtttcaaatatatatagaaaaaatttaagtacaaacattatagctatcacaggtagttgtggaaagactacactcaaagaattattgggaagtgtgttgggaaaaatttcaattacaagtatatcaccaaagtcttataacaataaatttggagtacctttaagtcttcttaatattaaagaaaatgatcaatatggagttttagaagtaggaatggataaaaagggtgagattgattatctaacaaaaataattgagccaaatgttggagttattacaaatataaattatgcacatgcaaaaaattttaaaaatataaaacagattgccttagcaaaatcagagattataaataatattaaattaaatggttctattatcttaaatgctgatgataaattttttaaacttcataggcaaat

SEQ ID NO: 312053 - DNA, 2520 bp, Unknown
  Bacterial polypeptide expressing nucleotide sequence isolated from the Sargasso Sea
atggtaaatcttcagtttcagatttttattatcaaattttacttctcaacaataaaaaagttgcttctataggaacactgggagtgagatcaaataattttaatttaaatttattaaatacaacgattgatcctatttctttaggaaaaattttaaccaaattaaaaaaaagaaaaatagaaaatgtaattatggaagcatcaagtcatgggttgcaccaaaatagattagatggattaatgtttaattcagctatatttactaatttatcccaagaccacttagattatcataaaaattttaaaaattatcttagtgctaaactttatttatttcaaaatctgataaaaaaaggcggatttgtcataactgatgacaaaatacctgaatttacaaaaattaaaaacatcagtttaaaaaaagaattaaaattatttacctttaaaaataaatattttcaaattgtgtcccataattataaaaatgaagctcaaatattaaaaataaaacacaaaaacttaatacatgaaattacagttaatcttgttggaaaaattcaattaaaaaatattgtaatggctgtcatagcagctttaaaaagtaatttagacttaaaaaaaatatttagtgttattcctagactatctccagttgagggtagatttgaaaaagtaggaaaaattaaaaataaatctttggtattccttgattacgctcatacaccagatgcattacaaacttgtattctaaatattagagaacaattctctgatagacatatttctgtgctctttggatgtggaggtgacagagataagggtaaaagatcgaaaatgggcaaaattgctgataaatatgcagataaaatttatcttacagatgataatccaagacatgaaaggcctaagaaaattagagatgagattaaaaggggtataaaaaaaagtcaaattattgaaatttctaatagaaaagaagcaattgtaaaagcaattagtaacttaaatacaggaaatgttttaatagttgcaggcaaaggccatgaaaaaattcagcagattggaaatagaaaagtttttttatcagataggcaaataattttaaattcaattaaaaaaaagaattttaacttatctaaaaatttaaagttaaacatttttaatgaaagatttgatcaaaatgttctatcatctaaatcagtaattaataaagctagcataaactctaagagtattaaaaaaaatgatattttttttgcaattaaaggaaaaaaaaatgatggtaataaatttgttgaacaggcaattcaaaaaaaggcatcaataactgtagtaaataaaattcaaaagaaactacctagaaataaacaagcaagctcaataaaccctttaggtgtactcacagaaactgcaaaaatttttaggaaaaatatttctacgaaaattattgccataacaggtagttgtggaaaaacttctctaaaagaattgttgggtaacactttaaataaagtatctaaaacaactatttctccaaaatcatataataataaatacggtgttcccttaagtctttttaatattaatcaaaatgatgattatggtgttattgaagtcggaatggataaaaaaggagaaatagatcaactctcaaaaattattcaacctgatataagtgtaatcacaaatattaactatgcacatgcaaaaaattttaaaaacataagacaaatagctttagccaaagctgaaataattgataatactaaagataatggctatgtagtccttaacgctgatgacactttttttagtttgcataagaaaatagcgcataaaaagaaaatcaaagtattatcttttgggatgaacaaccaatatgcagatattaaactacataatattgtaaaatacaaaaaaaaatacaaaatctgtattaaaataaataaaattaaaaaggattttatagttttaaatgatttccaaaattatatttataatattttagcggcgttaactgttaaaagcgttttctttaatgttttaaaattagataaaaatatatttttaaattttagaactccagagggaaggggtgatatcaaaaaaattaaagtgaataaaaaaatgataaacctaattgatgaaagttataattcaaatccattgtctttaaagactgcaatattaaattatgacaagatcaaaacaaagaattctaaaaagtatcttatacttggtgatatgttggagcttggtcatcattcaaaaaaacttcatgagtctatagcaccagtaattaatagaacgaatattgataaagtttttgtcaaaggaaaggaaatttcctccttatataataaaatttctaaacttaaaaaaggctcagttttaaagaataatttgcaaataaatgatttaattgaaaataactttgataatgacgatttcttaatgataaaggcctcaaatgcgacaggtttcaataagattgtaaaagaattaaaaggtacaaattaaa

SEQ ID NO: 312054 - DNA, 1414 bp, Unknown
  Bacterial polypeptide expressing nucleotide sequence isolated from the Sargasso Sea
ctgtctaatttatcaaaagttataagagtaaataaaacgtacaactttaataaaaataaatatttctctgcaattacctctaactcaaaatttactaataacaaaacgttgtttgtttatgacaaaaatacaaaggtaaaaaagatttatttagatgaagtacttaagaataaaactcctgctataatttcaaataaatatattaaaaacttaaaaattcctcaatttgttgtatctaatattaattttgagatacattatttattaactaagcttcatagcaatcttccctttaaaacactagcagttacaggtaccaatggaaagacatcagttgtttggtatatttcaaaaattcttaattcactaaaatataataatacaatggttggtactttaggacattttgtaaacggaaaaaaaataaatgatataaatttaacaacacctgcctatgaagaattatttagatatggatcttcgaataaaaaagaaaaaaatattttcatttttgaagcttcaagtcacgctctagaacaaaacaggttaagaaattatccaataaatattgcagctattacaaacatttcaaaagatcatcttgattaccataaaacattctcaaattataaaaaatctaaaattaaacttttctctaatcatttagtaaattctggatttgctataattaattcaagattaaacatcttatctgaattaaaaaaaacattgataaaaaaaaacgtaaaatttaaatattttggaaataaaaatataaaattaataaaaatcaatgattttgtatatttgaatattaacaatacaaaatataaactagaaaatctaaaacttaaaacaaatatagaattagaaaatttagaatgcgcgattacttgttgcttagcacttaatattagtcaaagtaaaattataagagtattatcaaaagttacaaatccatcaggtcgtttgcaaacaattgagtataagaaaaaaaaatcaaaaattattattgattatgcacatacaccagatgctttgaaaaaaattctacttgcttataaaatcaaaaaaatgaaaccatcaattttatttggttgtggtggtgatagagataaaagtaagcgaaaatctatggcattaattgcaaataaatatgctgataaaatttatataacggatgacaatcctagaaacgaaaatccatctaaaataaggaaaaatattctaaagtattgttctagagctatggaagtatctgatagaagaaaagcaattaaattagctattaaagaattaaaaatgaatgaaattttaatagtagcaggtaaagggcacgaaaaatttcaagttttaaaaaataaaacaattaagtttgatgattttacagttgttaaacaattattaaattaat

SEQ ID NO: 312055 - DNA, 1930 bp, Unknown
  Bacterial polypeptide expressing nucleotide sequence isolated from the Sargasso Sea
ccaagaaaaatcttagcagaaatatcgaataaaatttattcaaaaaaaccaaataatatcgttgcagtaactggtacaaacggaaaatcatctgtagcaaatttttacttacaaatttgcgaattaaataatattaaatcagcctctattggcactttaggtgtaaaaggaaaatcaattaatataaaaacaactaatacaacattagacccagttaatttaaataaaatattagaaaaattaaaaaaacgtaaaataaataatgtgatacttgaggcttctagtcatggattacatcaacaaagattaaatgggattagatttgatacaggtatatttacaaatttttctagggatcacttggattaccataagtcatatacaagatacctggactcgaaacttatattatttaaaaaacttttaaaaaaaaagggattagtagtatttgataacgaaatcagtgaagcaattaaattaaaaaatatatgtagaaacaaaaaattaaaacaagctatattaggtgataacgaaggatttaaaattttatctcatacgtttataaaaaataatcaaatcgtaaaatttaaatttaataataaagaatattcttttgaaactaagctgattggtaatgtacaaataaaaaacttaatgatggcaataatagctgcgagcagattaattccaatcagtaatattgtagataaaatcaaaaaaattaagcctgttaatggaagatttgagatgattggacaaataaaaaataattcaagggttattttagattattcacacactccagaggctttaaggacttgcattaaaaatataaaaaaacaattttcttttagtagaatatttttagtttttggttgtggtggagatagagacaaaattaaaagatcaattatgggaagaatagcaaatgaattgtgtgataaaatttttctaacagatgacaaccctagaaatgaagatccaaacaaaataagaaatcaaattaaagaaaatataaataaaaaaagattaattgaaatatcttcaagagaaagtgctataaaaaaatcaatatttgaacttaaatctggtgatgttttgatagttgcaggtaagggtcatgagaattatcaacaatataaaaaaaaaattaaattctctgataaatcactaattaaaaagtatattatattaaaaaataataaactttctagtgaatggaaaactaatattttaaaagaaaatttaaaaaatctaaaattaagcaataaattaaatattcaaaacgcatcaattaattctaatacaatttcaaaaaactcaattttttttgggattaagggcaaaaaacttaatggaaataaatttgcaaacgcggcaattaaaaatggagcagtgctatctataatagataaaaatttttctaaaaaaaataaaaaaaaaattaaagtaaaaaatagccttaaaaccttttcaaaagtttcaaaaataataagagaggtatcaaatattcaggcaataggcattacgggaagtgctggaaaaacaagttttaaagatcttttaggaaattcacttgtacaattaagacaaacaacttattcaaaaaaatcttttaacaacaagtttggcgtacctttatctctgtttcaaataaaaaaaaaacatgaatttggagtgtttgagattggtatggataaacatggagaaatagaaagcctaactaaattagttcgaccaaatgttgctgtaataactaatatttcccatgcgcacatcaaaaactttaaaaatataaatgatattgctaaagcaaaaagcgagataattgatcaaatcaaagaagaggggataattgtcttaaataaagacgataaattttataattatttcgctaaaaaagcaaaaaaaagaaatataaaaataataa

SEQ ID NO: 312056 - DNA, 1390 bp, Unknown
  Bacterial polypeptide expressing nucleotide sequence isolated from the Sargasso Sea
atggatagtaagatcactggaattcagttagacagtcggcttgtcaataatggtgatttattcattgcctgttttggtcgtaatcatgatgctagaaactttattgaccaagctataagaaaagggtgcggtgcggttttagcagaatttacctccggtatgaatagattagaggtgagggaaaatgttccgattgtaggagtagaaaatctatcaaaaaaagtaagcgaaatagctaatcgtttttatcaccatcctagttcgcaactaaaagtgattggtattacgggcacgaatggtaaaaccagttgtagtaaatttattgccactgcattgcaaaagctcgggtatcggtgtgggatgatggggaccttgggctgtggtgtgccagatgctcttgagagaacattgctaacaacgccagatgcagtgtttgcccaacggatattagcgcaaatggttagtaaaaattgtgagcatgttgcgatggaagtgtcttctgttggacttgatcaaaagagagttgaggcgattcggtttgacactgctgtttttactaatctgacacgtgatcatctagattatcataagactatgtctgaatatgctgagagcaagagggagttattccaatggcctgggctaaaatcagcagttcttaatttagatgatgaatttagtttatctctaatcaacagtattcgaaaagaggttgagatttttacgtatagcgtgagtaacagaaatgcttcggtttattctgagagtttgactttcagcaaatctgggtattcagcacttgtcaacactccctttggatgtaaaaaactatcaggagaactgttgggtcgttttaactttagtaatgtgttggctgttatagcaactataatttcactgatggctagggaaaattcgggaagcatagatttagcgaaaataattgatagtatttcttctctaagttccgcagatgggcgcatggaaattgttaatagcccaaatgaaatcacgacaatagtcgactatgcgcatacgccagatagcctaaagaatgccctagaaacattgaagtgtcattctaaaggtgaaatttggtgtgtatttggttgcggcggtaatcgggatgagggaaagcgtcccattatgggggaaatcgctgagctatttgcagatcatattgttattactgatgacaatccgcggaatgaaccgggagatcgaatagtttctcagattcttagcggtattcaaactcatcataatgtctctattattcgaaatcgagcaaaagctattagtcacgtaattgccagcgcctcgccagcggacctcatattgatagcaggtaaaggacacgaaacatatcaagaaatttcgggtagaagag

SEQ ID NO: 312057 - DNA, 1429 bp, Unknown
  Bacterial polypeptide expressing nucleotide sequence isolated from the Sargasso Sea
atgatttctttaaaagatattaaagacgattttccagaggatgtaactatcaatggagtaacttgtgacagcagagaagttaaaccaggttatatttttgtagcgatacaaggagagaagaatagaggagaggattttgtttatgaggcaattagtaatggtgcaagcgcaattgtaacctcagaaaattctaaattgatattagatatacctcttattaaagacaaaaacccgaggagatatttatctcatatttcatctactatatataaaaattcacctgaaatagtttgtgccattacaggtacgaatggaaaaacatcaactacaaatttcttacagcaaatatggagtttaatgggtttaaattcatctagtataggaactttaggaattataggtaatgaagaaattcaagacacaaacataaccacacccgatcctgttttgctacatcaaactcttgacagattatctagtgagaatattacacatcttgccttggaggcatcaagccatggcctgtcccaacatagaattgatagcgttaaagttagagctgcgggtttcacgaacattagtcaagaccatttagactatcataagactatgaaagattattttgatgcaaagaaaagactcttcactgaaatacttccaaaagatagttattccgtaatttgtatagataccgacgagggaagggagctttcatccattattaaaaatagtggtaaaggtgtcatagaggttggagaatcagcaaatgcgcttaatctaagaagaattgctacaacagagactggaatggaaatgatttttcagtatagcggaaggcaattttctattcccttaaaggtcgaggggtattttcaggctatgaatattttatgtgcatcaggtttagctatagcatctggctctccgtcagaaaaagtttttgaacatattaaagatcttagaccaattccaggaagactagaattctgcggtttaaacaaaagagaagcgaaaatttatgttgattatgcccatactccagatgcattaaccgcagtcttattttcacttagagaacttacagaaggaagattaataatcgtttttggatgtgggggagggagagataaatttaaacgtcctataatgggagaaatagcggaaaattttgcagatatcataattattactgatgataatccaagaaatgaggatccaaaagatattagagaatctatcttaaagtcttgcccttctggaatagaaataccaggacgtaaagatgcaattataaaagctatagatttaggtaaaaagggtgactcagttttaattgcaggtaaaggccatgagaaatttcaaataattggaagcaaaaaaacacctttttctgatcaagaaacaataagagaggtaataggtaattaaa

SEQ ID NO: 312058 - DNA, 888 bp, Unknown
  Bacterial polypeptide expressing nucleotide sequence isolated from the Sargasso Sea
caggattaaattttgacttggctattttcaccaacattactcatgatcatttaaattatcataagacatttaagaattacttaaatgttaaaaaaagattttttgatgatttggtcaaagattctatttcattaataaatgttgatgataagaacgcaaattatattgttcagaacactatttcaaaagtttatagactctctcttcttaaggacgctgattataaactaaaaattattgaaaatagttttacaggcttgatgataaaagttgataatgaattgataaacactcagcttataggaaagtttaatgcttataatttactaactgttctatcagcttctaaactattgaatcttgaaagcaaaaaaatattagttggtttaagtatgctgaaaaatccagatggaagatttgatgttgttcaaatgaataaaataatagggatagttgattatgctcacacgccagatgccttactcaatgttttagagacaatatctgacattaaaaacaatgagaactcaattattactgtggttggttgtggtggaggaagagataaggaaaagagatttaaaatgggaagaatagcttctaaatatagtaataaagtaatttttacatctgacaatccaagagacgaagacccaaaattgattattgatgatatgatcttaggtgttgatgatgaggataaaaagaaggttataaatattgtagatagaaaaaaagcaatagaaagggcatcaaagattgtaaagcctaatgatattttactaattgctggtaaaggacatgaaaattatcaaatcattaagtcaaaaaaaatagaatttaacgataaaaatattttgaaagaaactttaaaaatggcagtgtaat

SEQ ID NO: 312059 - DNA, 679 bp, Unknown
  Bacterial polypeptide expressing nucleotide sequence isolated from the Sargasso Sea
tatgagatctataaaattacataaacttttagatttagtaggaattattccttcattagatttaatcgatcatgaaatcaataatatttcttttaactctaaagaagtacaaaaaggaactttatttttaggaatgcctggtttaaatgttgatggaggaaaattttgtattgaggcaattgaaaatggcgcggaggctgccattattgggtctgctgcaaaagagagaattggatctattgatcgagaaaggattttggttattgaggataatttagattatatttttggtcaaattgtcgctgagttttggaataggccttcaagaaaacttaaacttattggtgttactggtactaatggaaaaacgacaattactttcttattggaatatcttttaaaaaaattagggaaaaagactgcattatttgggaccttgtttaatagatggcctggcttctcagaagtggcttctcatacaactgatttcgccgataaacttcaaaagaaattaaatgctgctgttgaggcagaatctgaattcgcgatattagaggtaagttctcattctattgctcaaaagaggatatcaggatgcgaatttgaggcggctatttttactaatttaactcaagatcatcttgattatcactcagatatgaaatcttattttcaaaaa

SEQ ID NO: 312060 - DNA, 1447 bp, Unknown
  Bacterial polypeptide expressing nucleotide sequence isolated from the Sargasso Sea
atgaaacatttgcctcaaattgtgcataatcttattccagataatacaaatctgccggatactcctattcatggtttaacaatgaattcaaataatgtgaatgaaggtgatatatttattgcagtacctggtataaatgccgatgggcatgattttatccatcaagccatcgatttaggtgcatcagctattatttccaatggacgcgatgttggtaaactacctgttccccaaattaaagtagcagacccacgtagggcagcatctattgtagcttcagagttctatggacatccttccaaacatttaacagtaattggtataactggtactaatggaaaaacaactacagcatcaatattgaaatctattctaaatcaagatgggcaaaaggttgctcaaataggaacacttggagtaatcgcagatggtctagatcatttagacactttaacaacaccggatcctataactttacataaattattttcggaattaaatgatgaggggttttcacatgttgttatggaagtctcttcacatgcgcttgatcagtatagagttgctgatgtggaatttaatatagcagtatttactaatctagcgccagagcatcttgattatcatggtacaatggagtcttattacaaagccaaacttcgcttatttactatgcttgcaattgatgcaacagcagttgtgaacatttcagatggttttggaaaaagaattttaaaaaagtcaagcgcaccagtaattacattttctaacagtgatcaaaattctatttactatcaatcaaaaaacatctcaataactggaataactggaaaaataatcgctgggcatgattcatattatataaaatcaaaattgacaggtgattttaattgtgaaaacatcttagctgcagtttcagttgcgcatgcattaggtcagagtaaaatagatatcgaaaagggaatacaaaattgcagcttagtacctggtcgcatggaaatttatggtattgcttctggtgcaaatgtaatagttgattatgcccatacaccggactcttatgagaaagtattatacactctaaagaatattatacctggctctagcaatatgtatgttgtatttggtgctggcggagatagggatgcaaaaaaacgtccagaaatggcaaagattgctgaaaaatttgcaaaccattgtttcataacgcctgataacccaagaacagaagatccagaaaatatttcaaatcaaatagctaccggtttcaaaggtaattcgtttacaatttttaccgatcgtggtaaagggttaagagcagcaatagaacgagcagataatgaagatattattgttgttttaggtaaaggccgtgaagaatatcaagaaattaagggtaaaaaagtattttattcagatattcaaataataaaagagtataaatgag

SEQ ID NO: 312061 - DNA, 343 bp, Unknown
  Bacterial polypeptide expressing nucleotide sequence isolated from the Sargasso Sea
ggtgtttggttgtggtggtgaccgcgacaaaggcaaacgacctttaatgggcgctatagctgaacgtttagcggatcaagtaattattactgcggacaatccccgcactgaagatgtgatggcgatttgtctggatatagctgcaggttgcgcccaacagcaatatcagctgagccccgatcgtaaaacggcaatacgcaccgctttagaacaagccaaagctggtgatctggtcttgatcgccggtaaaggccatgaagattatcaaatcattggccatgaagttttaccctacgacgaacgtgcctttgtcctacaactggtgacggagactgctttatga

SEQ ID NO: 312062 - DNA, 1423 bp, Unknown
  Bacterial polypeptide expressing nucleotide sequence isolated from the Sargasso Sea
atgttgttaaaaaaactaattaaaaatttaagtccagaaattggcgcgactcaaattaatggtatttgctttgacagcaggaaggccaaaaagggagatttatttattgctattaaaggtgaaaaacataatggtaataaatttgtatcccaggctgttactaaaggcgtcaaagtagtaatacattccgaaaaaataaaaaaaaacacaaaaactaaatttataaagttcgcggatactagagatatattagctaaaataagttcaaagttttttaaaaataagcctaaaaatataattgcagtcaccggaacaaatgggaaaacatcaatatcagattttttttaccagatttttaaattacaaaatcttaaatcaggtttcataggaacacttggttgtagaaaagataaattattaaaaaagagaaacctaacttctttagactcattaacattgaacaaagacctaaatgaaatgagcagaattaaaataaataatgtcattattgaagcatctagtcatggtcttaaacaaaaaagattaaattttttaaaaataaaagcaggtatttttacaaatttaagtcatgaccatttggactatcataaaaatatgaaaaattattttgaatctaagttgcttctttttaaagatcttttaaaaaaaagaggcacagtaataacagacactgatattaagcaatttaaagaaataaaaaaaattcaaaaaaaaaggaaacttaaaatgctcaatatagggtcaaagagcaatacatttgatattttagatcataagatatttgaaaattttcaatatcttaaaattaaatacaaaaataaaatatacaaactaaggataaatctttatggctcaattcaaattaagaatctatttatggcaattttagcttcaaaagtttgtggtcttaaagttgaaaatatattaaataaaattgataaaatcgaaagtgttgagggaagactacaattaaaaagaatattgacaaataattcaaaaatatttttagattatgcccataccccggaagctttggaaaaagcaatattatctttaagggaacactttaacaaaaaaatatctgttatttttggatgtggcggcgaaagagacaaaagcaaaaggaaactaatgggaaaaattgcaagcaggtattgtgataaaatttatattacggatgataatccaagaaatgaaaatgcaaaaaaaattagaaaggatattattaaaggaatcaatcactcttttgttagagaaatcggaaatagaaaaaaagcaattatttatgccttaaaaaattccgatccttatgaaataattttagttgcaggaaaaggacatgaaacgtatcaagaattaggaaataaaaaaattattttaagtgataaaaatatttattaaa

SEQ ID NO: 312063 - DNA, 1223 bp, Unknown
  Bacterial polypeptide expressing nucleotide sequence isolated from the Sargasso Sea
tatcaaaaacaagattctatttttaaattcaaaaaatataagaaaattacttgcagagacgtcttttaggattaataacaaaatcccaaaaaatttggttgcagttacaggaactaatggaaagtcatcaataagtgatttttattttcaaattctcaagttaaataaaaagaaggttgcatctattggtacattaggaattaaaacaaataattcttttaaaagcttacaaaatacaacaatagatccgcttaaactaagtcatatatttaaaaatttaaaaagaaaaaaaattgaaaatgttgttatggaagcatcaagtcatggattgaagcaacatagattggatggtttattttttgatgttggtatttttagtaatttatctcatgatcatttagattatcataaaaactttaaagattattttcactcgaaattatatttatttaaaaaattgataaaaaaaaatggttgtgtgataactgatcagtctatcgatcagtttagcaaaattaagaatatttgtaaaaataggaagcttaaacttaattttgtatcatcaaaaaatgataattttcagattaaagttaaatcgcacaaatattacaatgaaagtcaattagtcgaaatagtttataaaaagttaaaatttaaatttaagttgaatttaataggcaaagtccaattaaagaatattttgatggctgtaatagctgctgagaaaagtggtataaaactaaaaaatatatttaataaattaaataagattaaaccaatttatggtagactggataaaattggtaaaattaataataactcaaaaataatattagactatgctcatactccagatgctttaaaaactgttttagagaatttaaaaaatcaattctttaacagaaaagtttcaattgtctttggatgtggtggtggcagagatcaaaagaaaagagctccaatgggcaaaatagctaatttatattgtgataagatttatcttactgatgataaccccagggaagaaaatcccactttaattagaaatcagattaaaagaaatatcaataaaaaaaaattatttgaaattgcagatagaaagaaagcaatcgatgaagcagttttaaatttaaagagtggagaaattttattagtagctggcaagggtcatgaaaaaactcaaacctataaaaaaaaaatcagacatttttcagataaagaaa

SEQ ID NO: 312064 - DNA, 1045 bp, Unknown
  Bacterial polypeptide expressing nucleotide sequence isolated from the Sargasso Sea
atgcgtttaggcgatcacttccaacaagtaaaaaaaaaatatcataaaacttttttttctgggatttgttttgatcataggaaaatcaaaaaaaattatattttttttgcaataaagggaaataatttagatggtaataatttcataccatcagttataaaaaaaggttgtaaaataattgtcaccgagaaaaattttgatgaatggaaaaatggagttttatttatcaaaacaaaaaatattagaaaattactagctaaaatttcatttagtatctttaaaaaaaaaccaaataacctaattgctgtgactggcacaaatggtaaatcttcagtttcagatttttattatcaaattttacttctaaacaataaaaaagttgcttctataggaacgctaggagtgagatcaaataactttaatttaaatttattcaatacaactattgatcctattaatttaggaaaaattttaaacaaattaaaaaaaagaaaaatagaaaatgtaattatggaagcatccagtcatgggttgcaccaaaatagattagatggattattgtttaattcagctatctttactaatttatcccaagaccacttagactatcacaaaaattttaaaaattatcttaatgccaaactttacttatttcaaaatttgataaaaaaaggtggatttattgtaactgatgaccaaatacctgaatttaaaaagattaaaaatattagtttaaaaaaaaaattaaaattatttacccttaaaaataaatatttccaaattttatcccataattataaaaatgaagctcaaatattaaaaataaaacacgaaaacttaatacatgaaataagagttaatcttgttggaaaaattcaattaaaaaatattttaatggcagtcatagcagcttttaaaagtaatttagaattaaagaaaatatttagtgttattcctagactatcttcagttgaaggtagatttgaaaaaataagaaaaattaaaaataaatctttagtattccttgattacgctcatacaccag

SEQ ID NO: 312065 - DNA, 1159 bp, Unknown
  Bacterial polypeptide expressing nucleotide sequence isolated from the Sargasso Sea
aattaaattaaaaaattctattaaaaaagttaagcttaatttaataggtaaaatacaattaaaaaatttaataatggcaataattgctgcagaaaaaagtaatataaatataatgaaaattttgaaagttattccaaaacttaaatctgttgaagggagatttgaaaaggttggtgaaattaagaatcaatcgaaagtaatcattgattacgctcatactccagatgctctaaaaacatgtattttaaatttaaaagaacaattcccagataaaaaaattattctattatttggatgtggtggaaatagagatcaaaataaaagatcaaagatgggaaaaattgcagatgatttatctcataaaatttatcttaccgatgataatcctagattagaaaaaccaaataaaataagaaaagatataaaaaaaggaattaaaagaaaaaaagttatagaaatttccaatagagcagacgctatatctaatgccattaaaaatttaaatactggtgaaatcttattagttgcaggtaaaggccatgaaaaaactcaggatataggcaaaagaaaaattaatttctcagataaaaaaattattttagacactataaaaattaaaaataagaatttatcaaaaaatcttaaatttgagataattaaggaagtatccaattttaagaaattttcatcttctatagttttaaaaaaggcaagaatcaattctaaagaagtaaaaaaagatgatattttttttgcaattaaaggaaaaaaaaatgatggaaataaatttgtacaacagtctttcaaaaaaaaagcatctttagccgttgttaataaaatacaaagaaattgtagtattagaaaacaaataaaagttcaaaatacattaaaatttttaactgaaatttcaaaaatattaagaaaaaatattaaaacaaaaattattgctataacaggaagttgtggaaaaactactcttaaagaattattaggaaattcattaaaaaaaattgataaaacaagtttttctccaaaatcttataacaataaatttggagtacctttaagtctttttaatttaaatcaaaatgataaatatggagtgttagaaataggtatggacaaaaaaggtgaaattaataatttgtcaagaattatt

SEQ ID NO: 312066 - DNA, 1222 bp, Unknown
  Bacterial polypeptide expressing nucleotide sequence isolated from the Sargasso Sea
tttattatcagtagattctatggcaacccgtcaaaaaatattaaagtcacaggcgttactggaacaaatggtaaaacaaccgtttcatatcttattgcatatgttatgcatgaacttgaaaataatagtgcatttattggaacactaggatatggattatttggccagatagaaactggcagaacaaccaccccagacccagttaaattgcaatcacttttttcattatgggaaaatcaggttgattctgttgcaatggaagtttcatctcatgctctagatcaaggaagaacggaaggcaccgaatttaatactgccgtttttacaaattttagcagagaccatctggattatcataaaactgtcgatgattatattaatgctaaattttcattatttgaaaaaacaggtcttcaaaatgctgttgttaatattggtgatccatatggagttaaacttgttgaaaaattatcagaagatttgaatgtttttgcctattcaactaaaaaaactaatcttgaattttataaaagacaaaatatttcttttatttattgcgagaaaatagagactgaatcatttagaaaaagaataatagaagttcaaagtccttggggaaaagcaacgattaagatcaacctgctcggggaattcaatatagaaaatgttcttgcagctttcacagtcttatgtcttagtggggcttctactgaagcagtcgcagctaaattgtctgactttaatggccttcctggcaggatggaggttttttcttcagaggataaacctttaatcgttgttgattatgcccatacaccagacgcacttgaaaaagcattaactagtttgaagccttattgtaagggggaactattttgtgtattcggttgtggcggtggaagagattctggaaaacgtgctcaaatgggttcaatcgctgaatcactgtcagataaaatcattctaacaaatgataatccacgagacgaactacctgaaaaaatttttgaagatattctcaaaggaattgaaaacaaatcaaaagtgattattaaagaagatcgttcagacgcacttattagtagttttcttgaagcaaaaaaagacgatgtgattttgcttgctggaaaaggccatgaaattactcaaaagataggttcgatcacgattccattttccgatcgtgaattggctaaacgcttaacagaggagcatacatgat

SEQ ID NO: 312067 - DNA, 1159 bp, Unknown
  Bacterial polypeptide expressing nucleotide sequence isolated from the Sargasso Sea
atggatgtaaaaaaaatatgcaatcattcttctaacgcaactcacggaagtctattcatagcagttaaaggttttgcgaaggatggtcacgactacattaacgatgctattgaaaaaggagcgtctgcaatcatatctgattctgaagttttaaatactatttcagtaccaaatataaaagtaaaagattcaaggttggcccttagccatattgcttcaagatattacaattatccatccaaagaactgactatagttggaattacaggtaccaatggcaaaacgactacagcatcaattttttactcaattttgaaagccaatggctgtaattctgcgcagcttgggacaatgggaactataactgatagttataaatcaacaaaaacactaacaactcttgacccaatagatttacatcaaaaatttcgtgattttgtcaatgatggcattactcatgtcgtgatggaagtttcatctcatgctttagatcagttcagagtagctgatgtagactttgatattggcgtttttacaaacctagctcctgaacatctagattatcatattaatatggaaaattatttttcggcaaaagccaaattatttaaaatgcttaactcttcaaatacagctatagttaactatgaagacaaaatggcgccaaatatagtaaaaatttcaaaagctaaaataatttctttttcaaaggacagaaatacaacagtttatttatccgagctttctcatgatattaatggaataagatttattattaatactaaagagacaaagattccaattaattctcaccttataggagaatataatattgaaaatattttatgtgcggttagtatagcattatccattgggatagagccatgcataattcaaaaaggcgtaaatcaatgcgatattattcctgggagaatggaaagattcaatttaaacaacggagctaaagcaattattgactatgcccatactcccgatgcgtatgaaaaggtattaagtacaattcaaaatatcaaactagagaagtctaaaatacatgtattgtttgggtgtggaggtgatagagatagggagaaaagatctaaaatgggtcaaattgccgaaagatattctgataaaatgtggattactccagaataat

SEQ ID NO: 312068 - DNA, 1204 bp, Unknown
  Bacterial polypeptide expressing nucleotide sequence isolated from the Sargasso Sea
aaaaaaccaaataacctaattgctgtgactggcacaaatggtaaatcttcagtttcagatttttattatcaaattttacttctaaacaataaaaaagttgcttctataggaacgctaggagtgagatcaaataactttaatttaaatttattcaatacaactattgatcctattaatttaggaaaaattttaaataaattaaaaaaaagaaaaatagaaaatgtaattatggaagcatccagtcatgggttgcaccaaaatagattagatggattattgtttaattcagctatctttactaatttatcccaagaccacttagactatcacaaaaattttaaaaattatcttaatgccaaactttacctatttcaaaatttgataaaaaaaggtggatttattgtaactgatgaccaaatacctgaatttaaaaagattaaaaatattagtttaaaaaaaaaattaaaattatttacccttaaaaataaatatttccaaattttatcccataattataaaaatgaagctcaaatattaaaaataaaacacgaaaacttaatacatgaaataagagttaatcttgtaggaaaaattcaattaaaaaatattttaatggcagtaatagcagcttttaaaagtaatttagaattaaagaaaatatttagtgttattcctagactatcttcagttgaaggtagatttgaaaaaataggaaaaattaaaaataaatctttagtattccttgattacgctcatacaccagatgccttacaaacttgtattctaaatataagagaacaattcactgacaaacatatttctgtgctctttggatgtggtggtgacagagataagggtaaaagatcaaaaatgggcaaaatagccgataaatatgcggataaaatttatcttacagatgataatccaagatatgaaaggcctaagaaaattagagatgagattaaaaaagggataaaaaaacgtcaaattatcgaaatttctaatagaaaagaagcaattgtaaaagcaattaataacttaaatacaggagatattttaatagttgcaggcaaagggcatgaaaaaattcaacagattggaaatagaaaagtttttttatcagataggcaaataattttaaattcaattaaaaaaaagaattttaacttatctaaaaatttaaagttaaacattcttaacgaaa

SEQ ID NO: 312069 - DNA, 1459 bp, Unknown
  Bacterial polypeptide expressing nucleotide sequence isolated from the Sargasso Sea
gatgcgcccctttggcattactgccccggcgctcgcgcttaccgacatccagctggacagtcggcgggtcggacctggttgtctcttcgtggcgattcgcgggcatcaggtggatggcagacggtttatcgaacaggcggtggctcagggagcgaccgccgtactgtttgaagaggacggtgaattcgtggcgccggcgctgagcgtgccttgtctcgggatcccggatctgccagccaggctctccgagctggccggttattgctacgaccagccggccagcaagctggatctggtgggcatcaccggcaccaacggcaagagcaccacggcgctgctggtggccaactggcgcaccctgctggggggcaaggccggggtgatgggcaccatcggcaacggcctgttcggcgagctggtggaagcggaaaacaccaccggcagcgcggtgcaggtgcaggccaatctggccgctctgcaagcgcagggggcggatctggtggcgatggaggtgtccagccacggcctggtacagcatcgcgtcgcggccctgccgtttgctgccgccgtgttcaccaacctgagccgggatcatctggactatcacggcaccatggaggcctacggcgccgccaaggaagagctgctgaaactggtagacgaaccctgcgccgtgctcaatgccgacgaccggttgggtcgccagtggctggctgcctacccggctgcggtggcgttcagtgtgcacggcccggtggccggtcacccggggcgacagctgacggcgcaggatccccatttccaccagcaaggttttcgcacgcagattaactccagctgggggaatggtgtattatccgcccccttgctcgggcgcttcaacgtcagcaacgtgctggccgcgatgggcgccatgctggtgctcggttatgacttcgacgagttgctggccagcgcgccgcaactgcagccggtaaccggccgcatggagtgcttcggtggcggcaaggcaccgctcgccgtggtcgattatgcccacacgccagatgcgctggagaaggccttgcaggccctgcgggtgcactgtgaagggcggctctggtgcctggtgggttgtggtggcgacagggatcgcggcaagcgtcccatgatggccgccatggccgagctgcatgcggatcgcgtgattctgaccgatgacaatccccgtaccgaggagccggcccggatcatggccgacatggtggcgggtcttcgcgatcccggcgccgtgcagatcgagcacgacaggaccaaggcaatccagctggcactgagccaggcgagcaaacaggacatcatcctggtggccggtaagggtcacgaggattatcagatcattggaaccgacaagcggcactacagcgaccgggaaaccgttgcggccgccttgcacacattattggagtcattcacatga

SEQ ID NO: 312070 - DNA, 1069 bp, Unknown
  Bacterial polypeptide expressing nucleotide sequence isolated from the Sargasso Sea
aatgttactaggcaaagtatttaaaaatatcaatcaaaaatataaatcgattaaatttaaagaaattaaatttaatagcaaagaatgtacatacaatgatattttttttgcaataattggcaataattcaaatggtaacaactatattaatgacgcaataaataatggtgcaaaaataattatttccaatttaaagtttcaaggctttgataaaaataagatattgtttattcatagtaaagatccaagagagtcattagctcaagcagcaagtagtatttatttaaaaaaaccaaaaaatataattgctgttacaggcaccaatggaaaaacatctatagcaaatttttattatcaaatattaactctaaataataaaaaatctgccacaattggaactcttggtgttttatcaaaaaaattaaatttaataacaaataatactactgttgatccgataaatattcataaaatattaaaaaaactgcatgagctaaatgttaatgatgtgatattagaggcatctagtcatggactaaaacaacatagattaaattatataaactttaaaagtgcgttgtttactaatttatcaagagaccatcttgattatcataaaaaatttgaagattactttaattcaaaaatgatactgtttaatagacttttaaaaaaaagaggcaatataatatttgatgatgaaatcgcacaagctacacagctaaataaaatttcaaaaaaaagaaaattgaaaaagtatacttatggcaaagataaaagttttataaaaattttaaatgttcagaaaattgataataaaaaaaagatagattttttattcaataaaaaagcatattcttttcaaaccgaattaattggtgaaatacaaattaaaaatttattgtttgcaatcgttgcagcatatttatcaaaaataccaataaaaaatattttaaaatcaattcataaagttaaaccaatatcaggaagattagaaaaaattggaaaaataaaaaataaatccaatgtaattcttgattacgctcatacaccagaggctctaaaaaca

SEQ ID NO: 312071 - DNA, 1078 bp, Unknown
  Bacterial polypeptide expressing nucleotide sequence isolated from the Sargasso Sea
catgaggaaacttcaaaaatatacaactacttttgcggtccctttgcaggcaaaacttagggaagccgttcaggcaggagttgaatatggagcaatggaagtaagttcacatgcgttgtctcagaatagagtcgctggttgtgattttaatggggcaatatttacaaacctttcaagagaccatttagattatcacgattcaatggaatcttattttgaggctaaagctagtttgttccgatcacatctgatagacgatgatggtcctagatcagtaattaatatagacgataaatggggttcaatattagcaaaagagctcaacaaaaaatgttggacatgttcattaaaagagaactcccaaaccagagagaaaccagatttatatattagcaatcttcaaattatgcaagacggatacatgggaaaattgcatacgccatttggggtgggaaattttatttcaccactaataggtgagtttaatttaatgaatatgttgcaagcagtaggaattttagttcaaaggggactcccattaaatgatcttttagaagctttaaacaagttccctggagtgccagggagaatgcaactgataaacatggatggatttaaagtaaaagacggctatccactagtgatagtagattatgctcatacaccagatggtttacaaaatgctttaatcgcatcgagatcattgacgaaaaaaagattaatttgtgtctttggttgtggtggtgatagagataaaggtaaaagatctaagatgggggaagttgctgataagtttgcagattatatagttgtgacatctgataatcctcgacaagaagacccaatcgaaattattaaagatattgaaaaaggtataacaattgattctgaaatttctgttgagccagagagatccattgcaattcaagttgccatagcaaaagccaagaaaaacgatgttgttttaatcgcagggaaaggtcatgaggattatcaaattctaaaagatcagacaatttattttgacgatcgtgaacaagctagaaaagcactatctttaagaacagatgttatttga

SEQ ID NO: 312072 - DNA, 771 bp, Unknown
  Bacterial polypeptide expressing nucleotide sequence isolated from the Sargasso Sea
attgcagcatttacgcatcaatagttcagaagtacaaaaaggtgatgtgtttctggcgctgcctggtactaaaactcatggcaatcagtttattgaaaaagccttagcagccggcgctgtagtggtactgactgatactcaaagcgcgctgaatgatgaacgtattgtggttgtccctaagctagttgaattgctgagcgtcttggctgccgctttttatccacatcaggcgcagcaacttgtgggtattaccggcaccaacggtaaatccagtactgctatttttgtcaatcaactggcggtgttgttacagcaacaagctgctgtgattggcactttgggctatggtgattaccgcagcctgacgccattaaataacaccacaccacatctggtggatattcaccgaattctgtccaccgaagcagctaaaggctgttcgctggtggcgatggaagtgtcctctcatgccttagtgcaacagcgtgtggcgggcttgcagtttgaagtggcggtgtttaccaatttaacccgcgatcacctggattatcacggcactatgcaagcgtacggcgaagccaaggctttgttgtttaaagctgatttagccaaaaaagctgtgataaatgtttccgatgactttggccgccaattagcaactgactgcactctgcctgtgctggcttatggtcagctcaaagattgccagggctatagtgagtacctggcttacgaccaactggaaatcactccactgggttatcagttccg

SEQ ID NO: 312073 - DNA, 901 bp, Unknown
  Bacterial polypeptide expressing nucleotide sequence isolated from the Sargasso Sea
gatggaacgtaaaggccactggaagtatagcgaccctgaaataactggtgttgaaactagctcacttagaatagaaaaagggtatatttttgttgctaagcatagcattactcaaaccagccatggagcaatatttagtaatcaagcctttaaaaaaggcgcaagtcttattatcactgacctagaaggatatgaatatgccgttactaagggcttgaatttggatattccttttcttttggtcgaaaatgttgaacttaccttaggtaacattcttgagaatatttatccagataaaccagagtttattatgggagttacaggaacaaacgggaagacctcagtagtaaatttcagccaacagcttattgaacaaaaaaataaatcatgtgtcaccataggaactttgggagttgatggagttctaagtttaagaactgaaaacactacgcctgatcaaacgtttatttttagaattttgcaaatggccaagtcaaaaggagcaaattatgctcttttagaggtatcatctcattctatagtgcaaagacggataaaaggtgtggtatttaaggtgttctgcttcacaaatttatcacaggatcacttggattaccataatgacatggaaacctactttcaatccaagttaagcattcttgacaccttaagtttgaacacaaaaataatcgtaaatatagatgataaatatggagagctattttatgagaaggcaaagagtttaggtttccaaattgaaacaattggttttagcgaaaaagcaaatgtgaaacttagggcgcaccaagatacatctgatattcaatcagtcgagatcattaaagacggattgttacatagattcaaaacgcttttaataggtaagtttcaagccaataaa

SEQ ID NO: 312074 - DNA, 1727 bp, Unknown
  Bacterial polypeptide expressing nucleotide sequence isolated from the Sargasso Sea
aataaaaaatggcgcaagaataattgtatctaatttaaatttttcgggttttagtagcaaaaaaattttatatatacatgataaaaatcctagaaaattattatcagatgtatcgagtaaaatttataaattaaaaccaaaaaatataattgcaataacaggaactaatggcaaaacctcagtagcaaatttttatcaacaaattttgaattttaataataaaaaagtagcttcaataggtactctaggagttttgtcaaaaaaaataagaattaaaacaaataacacttcaatagatcctattagtatacataggattttacaaaaaataaaaaaattgaaaattgataatgtaatactggaggcatcaagtcatggattaaaacaatataggttaaataatattaaatttaaaactgcattatttacaaatttatcaagagatcacttagattatcacaaaacaatgaaaaattaccttaattctaagttatatctttttgataaattacttaatccaaaaggaaacataatatttgatgaaaagattaaacaaacagataaactaaatataatttcaaaaaaaagaaatttaaaaaaatacacatttggtaactcaaaatcttttataaaaatagtaaatattaagaaaatcaatgaacataataaagtagattttgtaatcaataaaaaaaattattctttcaaaacatcattgattggaagaatacagataaaaaatttaatgtttgcaattatagcagcctatttatctaatcttaaaattaataaaattgtaagatcaattcataaaattaaaccaattaaaggaagatttgaaaagattggttatttaaaaaacaatgctagtgtaattttagattatgcgcataccccaaacgcgttagaaactgcaatgttaaatctaaaagaagaatttcctttaagtaaaatttctttagtttttggttgtgggggcaacagagataaagacaaaaggccaattatgggctccattgcaaaaaagtattgcgaaaatatatatttaacagatgataatccacgatcagaaaatcctaaactgataagagatcaaattaaaaaaggattgcataataaaaaaatttatgaaattccatcaagatctaaagctattctctacgctattaatagattatcctctggagatgttttgattgtagccggcaaagggcacgaaaattaccaggcttacaaaaaaataaaatttttttcagataaattggaaattttaaaagcaatatctataaaaaataatcatttatcaaaatacattaaaacaaatatcttaaaggaagaattagatgaacaaattgtaaataagcataaaactataaattctgtatctataaattcaaaggcggttaataaaaattctatatttattggcattaagggaaaaaaatttaatggtggtaaattttccaacgaagcaattaaaagaggagctgttttagctatatcaaacaaaaataattctgactcaaaaatagtttttaagaaaaatccattacaatttttaaataaattaggcgaaatttacagaaaaactttaaaccctaacactatagcaataactggttcagcaggaaaaacctcagtaaaagaattgattggcttttgtttaaataaacttgaaaaaacctatttttcaaaaaattcatataataataaatttggcgttccca

SEQ ID NO: 312075 - DNA, 1459 bp, Unknown
  Bacterial polypeptide expressing nucleotide sequence isolated from the Sargasso Sea
gatggtaggtgttgagacgatcgattctctaggaaatctaaatatcccaatcaagcacatcgctttcgattccagaaaagtccaccctggtgcacttttcgttgcggtcccgggggacaagcataacggggaagcatttataaaagatgcttgggttaaaggtgcggttgcatttgtcacacagtctcctcttaaatctttaagtttaccctctatggagggtagaggttttactgctttgtacgttaaagattcacgaaaagccttgtctaaaattagtgcgaatttttataaccagccgtcagagtatttaaatttaacgggtgtaaccgggaccaacggaaagacaacattaacatatattctagaagctctttcaagggctgatggaaggcaaacaggagtaataggtactataaattgccattttggggaaacaattatcccggcggttatgactacgcctgaatctctagacctcaatcaaagtattaggcaaatggtggatgcaggaatttcagattgttttcttgaagtgtcttcacatgctttatctcagaaacgcgtttacgatatgagctttgaggtgggtattttcactaacttgagccgcgatcatcttgatttccatgaaaacatgaatgaatacaaaaactcgaaagctaaattattcagagagaacagagttaaggttccggtcataaatatcgatgaccctactggaaaagaattcgctgtagagttcaataggggtgttatttcaatcgggaaaaaccgtgctgctgatttttccgcagaagacataacccttgaagcaacaggtagccggttcactataaaaacacctaacggttctatgcaagtgcgaactaatcttcttggtgagcataatgtatacaatcttctttctgctgcggcagcggcgtcagctcaaggtatttcactcgatgtcatccagaatgtatttcagaaaatcccgaccataccaggaaggttcgaatcggtaaataacggtcaaaatttttctgtactggtcgattacgctcacacagaagatgctctttcaaaatcaatcactgcggctaaagcatttaccaagggaaaagtaatcgtcgttttcggttgtggcggagatcgtgatagaggaaaaagaaaagagatggggcaagttgcactaaaaaatgccgacttctccgtcatcacttcagataatcctcgcacagaagatcctgagcaaattattgctgatatttgcaaagatattacagataccgaatcttacaaaacaatcacaaatcgaagagaagccattggacatgccatcggccgggcagaaaaaaacgatctcgtattaattgccggcaaaggtcacgaggattatcagattttaggtaccaaaaaagaacattttgatgaccgggaagttgctaaagagtttttagggaaacgaacgcattga

SEQ ID NO: 312076 - DNA, 1264 bp, Unknown
  Bacterial polypeptide expressing nucleotide sequence isolated from the Sargasso Sea
gtagttgctcataaagactatactgaaaagctagcaataccattaataaaagtaaaaaatactcgaaagaaagtatcgcaaatagctgcagaattttataatcacccaacaaaaagaatgaatgtagttgggataacaggtactaatggcaaaacaacaacagcatcattactaacatctatacttcaatctgcaggaaacaaaacagctcaaataggtacattaggatttattgcagaaggaaactcaagcgaaaaagggttgactactcccgattccataacccttcatcaaagtttaaataatctatgtgatgatgggtttactcatatcgtaatggaggcaagctctcacgctttagatcagtatcgaatacatgacattgacttcaatttcacagtctttactaatctttaccctgagcatttagattaccatggaactataaataattattttgaagcaaaagttaaattatttacgtcttatcctaattcaagtgctgcaataataaatattgataatgaatatggtaaatctatggcttcgagatctaccgctccagtgattaatacctcgatgttttcacaagctgatatatcatttttggattataaaatttctctagagggtattgaaggtataataaaagctgaagataaaacttataatattaaatcttcaatgatcggttcatttaatgcagaaaatatcctttgcgccacagctacaggaaatgcaatgggtattgaaaaaagtgctatagaaaatggaattagcttatgtaaatcagttcctggtcgcatggaaaccttttctattcgttctggtgccatggcaatagttgattatgcgcatacccctgatgcatatgaaaaagttcttagcaccataaaagaattaatgatcgattcaaaagcaaacatttacattgtttttggatgtggaggtaatagagatacacttaaaagatctcaaatgggaactattgctgaaaaatatgcaacgcatagttttatcacgcctgacaatcctagaaatgagaaaatttctgaaataaataaagaaattattagtggttttaaaaataatcgttttgatttatttgttgatagagaggcaggattaagagctgcgttgaatatagcattaaataatgatatagttattgttttggggaaagggcgtgaagagtatcaagaaattgaaggaaaatttattccatactcagatataaagataataagtgagtattgtacgtgag

SEQ ID NO: 312077 - DNA, 1193 bp, Unknown
  Bacterial polypeptide expressing nucleotide sequence isolated from the Sargasso Sea
aatgcccgaattagtagacttaagtaattttgttgattgtgaagtctcaagcctacatcttgacagtagagaggtaaaggatggaggcgtattctttgcagttaatggaatcaaccaaaacggaatggattttattcaggaagcaaagtcaaaaggagctaaattaataatttctgaagaattagttgaagatagcagtgttatacattgttctaaccttaaaaaattattaggtaaatttacttcaaggttttactctaatcctagtgaagaattaactactttctgtgtaactggaacaaatggaaagacaactgctgttgaagcttattcaagcatgtgcagtagcttaggaaaaaaatgtggatatttaagtactgtcggaaaatcgattgatggtgtaaaggttaaagatccttatgccttaacaactccggatataatttctttaaatacaagcttatatgaaatgttattgaatggcgctactcatgctgcattcgaagcttcttctcatggattagatcagggaagattatctggtgtaagcgttgattatgcagttctaaccagtttctcacaggatcatcttgattatcataaatctattgaaagttatgctaaggctaaaagtatattatttaaagacctcaaccccatgacttcaattgttcagatagatagtgaatttggaagaaatttatatcaagaccttctaaatgaaggggctgaagtatttagtatctctttagaaaaagagtctgattatttggcttcttttagaaagaataaaaattctttagaggtttctttaaagtctccttatggagtttccgaatttgatctaaatacagtttcaagatttatagcatcaaatgtaatttgcgcaatggttgcattgaatttagaaggtataaagatagataagattgctgagtgtgcttctaatatagcttttccagcaggaaggatggagagtattaacataggcaaagacatttgttatgttgattatgcccatacaccagaagcccttaagcatagtttaaaagagattaagaattttcatggtggagaaatttggtgtatttttggctgcggtggaaatagagataaacagaagagacctatcatggggcaaatagctgaacattatagcgatcatgttgtaattacagatgataatcctagaa

SEQ ID NO: 312078 - DNA, 2026 bp, Unknown
  Bacterial polypeptide expressing nucleotide sequence isolated from the Sargasso Sea
atgcgtttaggcgatcactttcaacaaataaaaaaaaaatatcataaaacttttttttctgggatttgttttgatcataggaaaacaaaaaaaaattatattttttttgcaatcaaaggaaataatttagatggtaataatttcataccatcagttataaaaaaaggttgtaaaataattgttactgagaaaaattttgatgaatggaaaaatggggttttatttatcaaaacgaaaaatattagaaaattactagctcaaatttcatttagtatctttaaaaaaaaaccaaataacctaattgctgtgaccggcacaaatggtaaatcatcggtttcagatttttattaccaaattttaaatctcaacaataaaaaagttgcttctataggaacactaggagtgagatcaaataactttaatttaaatttattcaatacaactattgatcctatttatttaggaaaaattttaaacaaattaaaaaaaaaaaaaatagaaaatgtaattatggaagcatccagtcatggattacaccaaaatagattagatggactattgtttaattcagctatatttactaatttatcccaagaccatctagactatcataaaaattttaaaaattatcttaatgctaaactttacttatttcaaaatcttataaaaaaagatggatttgttataactgatgacaaaatacctgaatttaaaaaaattaaaaatatcagtttaaaaaaaaaattaaaattatttacccttaaaaataaatatttccaaattttatcccataattataaaaatgaagctcaaatactgaaaataaaacacggaaacttaatacatgaaataagagttaatcttgtaggaaaaattcaattaaaaaatattttgatggctgccatagcagcttcaaaaagtaatttagacttaaaaaaaatatttagtgttattcctagactatctccagttgagggtagattagaaaaagtaggaaaaattaaaaataaatctttagtattcctcgattacgctcatacaccagatgccttacaaacttgtattctaaatattagagaacaattccccgataagcatatttcggtgctctttggatgtggtggtgacagagataagggtaaaagatcaaaaatgggcaaaatagctgataaatatggggataaaatttatattacagatgataatccaagacatgaagtgcctaaaaaaattagagatgagattaaaagaggtataaaaaaaaatcaaattattgaaatttctaatagaaaagaagcaattgtaaaagcaattaataacttaaatacaggagatattttaatagttgcaggcaaaggccatgaaaaaattcagcagattggaaatagaaaagtttttttatcagataggcaaataattttaaattcaattaaaaaaaagaatctaaacttatctaaaaatttaaaaataaacatttttaacgaaagatttgatcaaaatgttctatcatctaaatcagcaattaacaaagctagcataaactctaagagacttaaaaaaaatgatattttctttgcaattaaaggaaaaaaaaacgatggtaataaatttgttggacaggcaattcaaaaaaaggcatcaataactgtagtaaataaaattcaaaagaaactacctagaaataaacaagcaacctcaataaatcctttaggtttgcttacaaaaactgcgaaaatatttcggaaaaatatttctacaaatattattgcaataacaggcagttgtggaaaaacttcattaaaggaattgttgggtaacaccttaaacaaaatatctaaaacaactatttcaccaaaatcatataataataaatatggtgttcccttaagtctttttaatataaatcaaaatgatgattatggtgttattgaggttggaatggataaaaaaggagaaatagaccaactctcaaaaattattcaacctgatataagtgtgatcacaaatattaactacgcacatgcca

SEQ ID NO: 312079 - DNA, 1456 bp, Unknown
  Bacterial polypeptide expressing nucleotide sequence isolated from the Sargasso Sea
ttgaaaaatttaaaagaaatattatttaaggttacggttgatgctatatatggagacacttcaacatcagtaaaagatatatgctttagttcaaaggaagtagatagggattctttatttgtagcaatcaatggctataatactgatggtcacaattttattgttgaagcaattaataacggggcttcaactattgtatgtgaagttcttcctaaagattttaaaaaattaaaatcagtttttgttaaggttacatgttcaaaatctgccttatcaattatctcatcaaacttttatgataatccatcttctaagatcgatctaattggtattacaggaaccaatggtaaaaccactatctcatcattattgtttgatctatttaatagattctcaattaattcaggacttatttctacaataaatataaagtatggcgaccaagatatagattcgacaaatactacgcctgattctaaatcgataaattattatttagcagaaatgataaaatctaatgttaagatatgttttatggaagtgtcttctcatggaattgatcaaaagaggattgaaggcttatcatttaaaggtataatttttacaaatctaacccatgatcatatagattatcataaatcttttgcaaactatagagatacaaagaaaaaaatatttgactctttacctaatagctccttttcattaataaatagtgatgatagaaactcaaaatatattattcagaattcaaaatctaaaaaatacacatatggtataaaaaataaatcagattttaattcaggcattttggagattcaacttgatgggatgcttttgaatattgataaaaatgaaatttggactaaactaataggtgattttaatgcttataatatattagcaatctactcattaggtaaaatatatgaactagacactatcagacttttaaagactataagtcaattagaaaatgttcaaggaagacttcaatcttttattactaaggatagagtaacagtaataatagattatgcccacacacctgatgcattagaaaatgttttaaaaaccataaataagattaggtctgtgaagcaaagattaataacagttgtagggtgtgggggtaatagagatacaaaaaaaagaccattaattggtaatctagtttctgaactaagttcatatgtaatatttacctcagataatccaagatcagaaaatccaaatgagatattgaagggagttctatcaggagtttcaaaaactaattttaagaaaacaaatataatagttaaaagagataaggcaatagaggctgctcataaatattctagggaaggcgatattgttctaatagctgggaaaggtcatgagaactatcaagaaataaatggggaaaaaattccttttgatgattttaaaattgcaaaacaaatatttaaataat

SEQ ID NO: 312080 - DNA, 1506 bp, Unknown
  Bacterial polypeptide expressing nucleotide sequence isolated from the Sargasso Sea
tcttgattatcataaaacatacaaagattatctaaactcaaaattaattctttttaaaaaattaatgaaaaaaaaatcatttattatatttgataatgacttaaaaatttctccaatactcaataaaatagcaaaatataataatcttaaaaatctgagcttaggatcaaaaaattctaaattaaagttgattgatcaaagatttattaatttaaatcaaaaagttaagttctcgtataatggtaaaatttttaattttacaactgatttaattggggaaattcaaataaaaaatcttctaatgtcaattttagcagctcacaaaagcaatatatctttaaaaaaaattacaaattgtatcaaaaaaataaaaccagtacctggtagattggaaaaaataggtaaattaaaaaataactcaatagtaattttagattatgcacatacaccagatgccttaaaaatatgcttagaaaaccttaaaaatcaattcagattgagaaaaataaatttggttttcggatgtggtggagaaagagatagaccaaaaagaaaaattatgggtgcaattgcaaaccaatattgtaataaaatttatttgactgacgacaatccaagaaaagaaaatccaaaaaaaatcagaaatgaaattaaaaagaaaataaataaaaataaactcattgaaattccatcaagaaaacttgcaattgaaaaagctatattaaatattcaatctgatgaaattgtagttgtagctggtaaaggtcacgaaaggtatcaggaatataatataaaaaaaattttttcagataaagattgtataataaaatctattaaaaaaaaaaatttaaatctaaaaaaagactggaaagtaaatattttagaggaatgtttagaaaaaaaattaaattataaaatcaaaattaataaaacaagcattaactccaaaaaaattaaaaaaaatgatatattttttgcaattagaggaaaaaaattaaatggtagcaagtttgcaaaagaagctataaagaacggcgcatcattagcaattgttgataatctacatggagaaaaaaatataaaaaaaattaaagtagcaaatgtattaaaatttttttcaaaaagttcaaacaaaataagaatttcctcagatataatggctatcgcaataacaggctcagctggaaaaacgtctttaaaagaattactggggcaatctttaattaaaattgataaagttacttattcccaaaagtcatttaataataaatatggagtacctctctctttatttaatattaataaaaatcataagtttggcattttcgaaattggcatggataaaaagggagaaatagattatctctcaaaaataatcaaacctaatattggcgttataaccaatatttcatatgctcacagtaaaaattttaagaatttgtttggtatagcaaaagcaaaagcagaaattatcaataatatagttgaaaatggatcaataatatt

SEQ ID NO: 312081 - DNA, 1511 bp, Unknown
  Bacterial polypeptide expressing nucleotide sequence isolated from the Sargasso Sea
taatttcataaatgatgccattaaaagaggggcccgaataattgtatcaaataaatttaaaactggaatcaacaaaggtgtattatatataaaagtaagcgatcctagattagccttatcaagttttgcaaataaatattataataaaaaaccaaataatataattgctgtaacgggtacaaacggtaaatcatctatagtcaatttttattaccagatattaaaacttaataaaaaaagagtagcctcaattggaactttaggcgtcaaatcgaatggtgttaacttaaaacttaataatacaactgttgatgctattacaattaataaaatacttgcaaatttaaagaaaaaaaaaattgaaaatgtaattttagaagcatcaagtcatggccttcatcaaaaaagattacatggtattaaatttagcacatctatattcactaatttaagcagagatcatttagattatcacaaaaattataaaaattattttaattcaaaattaattttatttaatgagttgacaaataaaaatggaaatttgatatttgataatgatttaaaatattcacaaatctttaaaaaaatagccaaaagaaaaaaattaaatttattaaacattggcacatcagatagtcatttaaaaattaattcaattaaaattttaaataactaccaacatataaagtttacttttcaaaataaggaataccaatttaaaacaagcctaattggaaaaatacaaattaagaatttgatgatggctattgcagcagcaattaaaagtaatctaaaaattgatgatattgttaaaaaacttaagtatattaaacccgcaaaaggaaggctcgagataatcggaacaaccaaagataattcaatttttattttagactatgctcatactccagaggctcttaaaacaagtatagaaaatattaaagaacaatttggtttaagaaaaattaatattgtatttggatgtggcggtgaaagagataaagaaaaaagaccaataatgggtaaaattgctaacaaactatgtaattatatttatcttacagacgataatcctagaagtgaaaatccagaaaatatcagagcaagcattaagaaatcaattttaccatctaaaatgattgaaataccatcaagaaaattagctataaaaaaagcaattttaaatagtaagtctgatgaggttttaattattgcaggaaagggacatgaaaacactcaagaatatattaagaaaaataaattttctgacaaagataatataaaaaaatcaataattttaaaaaatagaattttatcaaatgattggaaattaaatatacttaaagaaattgtaaataacaaaaaattagatagattaaaaaatttaaaaattagcactaattcgaaagaacagaataaaggtaaaattttccttggaattaaggggaaatcttttaatggaaatgattttgcagatgaagctctaaaaaatggagcaaaattagcaa

SEQ ID NO: 312082 - DNA, 857 bp, Unknown
  Bacterial polypeptide expressing nucleotide sequence isolated from the Sargasso Sea
tacaaacttaacacatgatcatatcgactaccacaagacatttaaagattatagagatactaaaaaagaggtttttgacactcttgataaaaattcatttgcattaataaatattgatgataaaaatgggaaattcatgactcaaaattcttctgcaagagtttatacatattcaattaagtctaagtcaaatttttcatgcagaatagttgagcaacaacttaatggaatgttgctaaatattgaaaatagtgaaatctggactaaactaataggtgagtttaatgcttataatgtattagcgatttattctgttggtaaaatttatgagatagattcattgaatctattaactaatatcagtgagcttaatagtgttcaaggaagacttcaatcctttctatcaaatagtaatgttacggtaataattgattatgctcatacaccagatgcagttgaaaatgtattatctacaattaataagattaaaaaatctaatcaaaacttaattacggtaattggatgtggtggagatagagacaaagctaaaaggtcaatgattggaaagatatgttcagatcttagttataaagtaatttttacatctgataatcctagatcagagaatccagaatctataattaaagatatagtttcaggagtatcaaactacaacaataataaaattatggttgagattgaaagatcaaaggctattgaagaagcaaaaaaaaatagtgaggaaggagatatagttcttattgcaggaaaaggacatgaagactatcaaatattgaaaaataaagtaatcaagtttgatgattataaaatagccaaaaaaatttttaataagtaag

SEQ ID NO: 312083 - DNA, 1190 bp, Unknown
  Bacterial polypeptide expressing nucleotide sequence isolated from the Sargasso Sea
tactggtacaaatggaaaaacgacaattactttcttattggaatatcttttaaaaaaatcagggaaaaagactgcattatttgggaccttatttaatagatggcctggcttctcagaagtggcttctcatacaactgatttcgccgataaactgcaaaagaaattaaatgctgctgttgaggcagaatctgaattcgcgatattagaggtaagttctcattctattgctcaaaagaggatatcaggttgcgaatttgaggcggctatttttactaatttaactcaagatcatcttgattatcactcagatatggaatcttattttcaaacaaaaagaaaattgtttttcccaccttatttaatagaaaaggatggaatttctgtattaaatcacgatgacccttggatatctaaattatcgtctgatcttgataaaagatcttcattagtgtctacaaaggttactgaaagtgaatttaaaaatcatgatttttttttcgtaacagataaaaaatttactgaaaatggctcaacctgcatttttcatacacccaaggaaaaaattcaactttttgttccacttgttggagaatttaatttaatgaatgcgattcaagcaataacaattttgtataaacttaatttttctttaaaagatctatcaaattcaatacgatctttccctggcgctcctgggcgaatggagaaaatagaaattgataatgatgacgtttcaagatcacttccaacagtaattgttgattatgcccacacgcctgatggattgaaaaaagttttgcaatcaattaaaaaactttgtaagggaaaactcattactgtttttggctgtggaggagatcgagatcttggtaaaaggcctttaatgggatcaatagctgaagagttttctgatcaactttttataacttcagataatccaagatcagaagaaccccaaaagatagtaaatgatattttgatgggtataaaaaaaagagaaaaaataacaattgagattgatagatttaaagcaataaataaatctattaaatttgccaataaagaagatattgttttaattgcaggaaaaggacatgaagactaccaaattctcaatgataaagttattaattttgatgatagaaaaatagcttatgaattattaaaagaaaaaagaaaatctcaataaa

SEQ ID NO: 312084 - DNA, 879 bp, Unknown
  Bacterial polypeptide expressing nucleotide sequence isolated from the Sargasso Sea
tattctggtcaaaatacctggttagatgaaggatttaatattattgataatatactagattgggctaaacctcatgaaatgtatgttattttagatcttcatgcagcaccgggaggacaaggaagaaatacagatatttctgattatgatccagataaaccttcactttgggagagcgagcaaaataaaagtaaaactgttgccctatggaaaaaaattgctgaaagatataaagacaatgagtggattggtggttatgatctattaaatgaacctaactgggaattaccaggcggagttgatttgaaagatttatatgtaagaattacaaatgcaataagagaggtggataataaacatataattatcattgagggtaacgactatgcaaataattttactggcttgacaccaccatgggatgataatttggtttatagttttcataaatattggaattctacaaacgctgatgatcttaactggattcttccaatgagagaacaacataatgtacctttgtggatgggtgaatctggagaaaattcaaacacttggtatactgatgcagttactttatttgaagataataatgttggatgggcatggtgggctatgaaaaaaataggaagtgtaaatagcccgtacagaatacgtgtgaatgagggctatcaaaaaatccttaattactggaaagacggtggagataagcctagtgaacaagatgcttacgatgctatgatgaaattagcagaaaatgcattatctgaaaattgtatttatagaaaaggtatttcagatgctttacttagacaaccacatacagacaacacaataccttttaaaaacacccaacaaataccaggtgttgtattttta

SEQ ID NO: 312085 - DNA, 454 bp, Unknown
  Bacterial polypeptide expressing nucleotide sequence isolated from the Sargasso Sea
aatgaactctgatattcgtattcatcatgagctaaatgaaatgaaaaaagatcctcctgtcaattgtagtgccggaatgaataatggtcaactacgtcattggaacgcatcgataataggtccggatgacagtccatatcaagggggaattttccacttagatatttactttgggagtgaatacccttttacaccaccaaaggtaaattttaaaactaaaatttatcatccgaatataagtaatactaatatatgtttggacatattaaaagataaatggagtccggccctaagtatatctaaagttcttttaagcttatgtagtctattaacagaccctaatcctgaggatcctttagataatgaaattggtcaactctataagactaatctagaagaatataataatatggcccgaacctggactctaacgtatgctacacatgagttataa

SEQ ID NO: 312086 - DNA, 285 bp, Unknown
  Bacterial polypeptide expressing nucleotide sequence isolated from the Sargasso Sea
aaattccagataattatccttttaaaccacctaaggttagatttaatactcgtattttccatccaaatattaataaacatggaagtatatgtttagatattttaaataaaaattggagtccagcattaacattatcaaaagttctgttaagtatttcttctttattaagtgatccaaatccggatgatccattagatataagagccgcggatatttataataaagataaagatgaatttttccaaacagcaaaaacttatactttaaaatatgccagtatttaat

SEQ ID NO: 312087 - DNA, 448 bp, Unknown
  Bacterial polypeptide expressing nucleotide sequence isolated from the Sargasso Sea
atgagtattaaaagacttaaaaaagaattagaagaaatacaaaaagaaccacctgtaaattgtagtgcgggaataattgatgatgatattcatacatgggaagcaacaattattggacctgaaaaaacaccatatgaatcaggtgtttttaaattaagtattctttttccagataattatccgtttaaaccaccaaaggtaaaattcgatacaagaatttttcatccaaatattaataaacaaggaagtatttgtctggatattcttaataaaaactggagtccagcattaacagttgcaaaacttttattaagtatttcatcattgttaagtgatcctaatcctgatgacccattggatattagagctgctgagatatataataaaagccgtgatgaatattttcaaacagcaaaaagttatacattaaaatatgctagttgttaat

SEQ ID NO: 312088 - DNA, 367 bp, Unknown
  Bacterial polypeptide expressing nucleotide sequence isolated from the Sargasso Sea
attagattattatgaatggaatgcaacaattacgggtccacagggtagtccttatgaaaatggtatatttaatctatctatcagttttccaccaaattatccatttaagcctccttatgtaaattttattactaaaatttatcatcctaatataagtagaaagggagaaatatgtttagatattttaaaagatcaatggagccctgcattaactataacaaaagtgctattatccatatgtagtttgttaacagatccaaatccagatgacccattaagaccagaagtagctgatttatatattaaaaataaattagaatatgatatgaatgctagagttcatacaagtaaatatgcaatgtattaa

SEQ ID NO: 312089 - DNA, 308 bp, Unknown
  Bacterial polypeptide expressing nucleotide sequence isolated from the Sargasso Sea
gaatggtatatttaaatttaatataatattttcagaagaatatcctttaaagccaccgaatataaaatttttaagtagaatgtttcatcctaatatttatacaaatggaaacatatgtttagatatattacaatctaaatggtcaccagtacaagatactaaaagtatattaatttcaataatatcattattaacagatcccaatacagattctccagcaaatacacaagcttcacaattatatatttcaaataggaaagaatataataaaaaagtaagacaatgctcagaagaatcaatttgttaat

SEQ ID NO: 312090 - DNA, 385 bp, Unknown
  Bacterial polypeptide expressing nucleotide sequence isolated from the Sargasso Sea
actgaccgatcgcgacgtttggtcgcgcgcgcgcgcagatttacagaaagacccgccgacctcgtgcagcgcgggtccgagatcggacgacgacatcttccactgggacgcgacgatcatcggcccgtccgagtctccgtaccagggcgggctcttcttcgtcgcgatccatttccctcccgattacccgttcaaaccgcccaaggtgaacttcaagacgaaggtgtatcatccaaatgtgaacagccaggggtcgatttgcttggacattttgaaggaacagtggtcgccggcgctcacaattagcaaggtgctcttgagcatttgctcgttgctcacggacccgaacccagacgatcctttggtgccggagattgcgcacgtg

SEQ ID NO: 312091 - DNA, 292 bp, Unknown
  Bacterial polypeptide expressing nucleotide sequence isolated from the Sargasso Sea
atggcatcgaagcgcatcaacaaggagctgcaggacttgggcaaggacccgcccgcaaactgcagcgccggtccggtgggggatgatctattccattggcaggcgaccatcatgggcccgcccgactcgccctaccagggcggcgtcttcttcctcaacatcaacttccctcccgactacccgttcaagccgccgaaggtgtcgttccagacaaagatctaccatccgaacgtgaacagcaacggcagcatttgcttggacatcctgaacgcgcagtggtcgcccgcgctga

SEQ ID NO: 312092 - DNA, 403 bp, Unknown
  Bacterial polypeptide expressing nucleotide sequence isolated from the Sargasso Sea
actgactcacgacctttcttacgattttgaggcccttaaatcatcttcagcgttttctgcactcagtgccattaaacgcggggttgaacgcgagtgcttgcggataaatccaaccggcatgctggcaatgacgcctcatccaaaggcgcttggagcagctcttactcatgagagtatcactaccgattactctgaatcgctgcttgaatttattactccgcctgagtctgacgttaataccacgctggcgcagttagaggacgtgcacaaattcaccatcgataatattggtgatgagcgcttgtggccgctgagcatgccttgctttattgaaaatgcgcaggatatccctatcgcttactttggcgagtctaatgttggcaaaatgaaaaaagcctatcgg

SEQ ID NO: 312093 - DNA, 862 bp, Unknown
  Bacterial polypeptide expressing nucleotide sequence isolated from the Sargasso Sea
tatgttcagaaaaaatgaaaaccttcttaaacacatcaatttttctccaaaaattgatttaaaaggaaaaattggaattgagaaagaatctttgagagttctggattgttatatttcagacgaaaatcataatgaaaatctgggttcaccattatgtaataaattcattactacagattttgcagaagcacagatagagctagtgacacctcccttctctaaatcagaaaacctttttagttttctggacaacattcagcattttgttacccacaatataaatgatgaatatctttggccatttagtatgcctgcgagaattaaaaatgaaaaagaaattaagactgcattctatgggatttctaatgaggctaagtttaaacatatttatagaagtggtcttgctaaaagatatggtaaacccatgcaaacaatctcgggtatccatgtgaacttttcatttagtgaggaattttggaattctctaaaaataaatttttcacaaataaatgaaaaagcaattaagaatgatatttatttcagactgattagaaattttcagaggaataattggttattgttatatctttttggcgcctcaccggttcttggtaagagtctaattgacgatgcttatgatttcatagaattgaataatgatgcctactatttgccatatgcaacttcactcaggatgagttcaatgggatattcaaatttaggtcaatctaaacttaatatttctttagacagtttaagttcttatgtttctgatcttaaagctgctactcaaaaacgatctaatgaattcaatgaaatcaaatcatctggagataatccatatcaattaaatcctaactta

SEQ ID NO: 312094 - DNA, 373 bp, Unknown
  Bacterial polypeptide expressing nucleotide sequence isolated from the Sargasso Sea
aatgatcagattttctttagatgaaataaagaaatcaaaagcatcctcagaactcaatttcattaataggggcatagagagggagagtcttagggttgactcatcaggaaaaatatctcaaacccctcatccatcaggattagggtcagctttaactaacccttacataactactgatttttctgaggctttgctggaattagtgaccccgactttcaatagcgcttcagaatgtttgaaatttttaagtgatttacatatttttgtgaatcaaaatctagaaggtgaatcactttggcctctaagcatgccttgtttcatagattctgaggacgatatacccataggaaactacggcacttctaatcaaggt

SEQ ID NO: 312095 - DNA, 815 bp, Unknown
  Bacterial polypeptide expressing nucleotide sequence isolated from the Sargasso Sea
caaagaattaattgaaggtgataaaggggatttcttaaaacttgattcgaacagcttttatttaccttatgcaacttctttaaggatgagtgattttggttatcaaaactcaaaaagatctttagatgtttctttaaactcaattgatgaatacattgctaatcttatggaagccactgcaacagtagatcaaaaatttttagaacttgagaaaaatggcttagaagttcaaatcagtccaaatatattacaaatagaagatgaattttatgcaatagctagagctaaaagtcaggatctttctaatgatagatccctaaaaaaactgaagaaatctggggttgaatttattgaactaaggtcgattgatattaatccatttagtgtattggggatagataaagattcagtttattttattgaaatgtttttgatctactgtttttttaaacctagtgcaccattgagcaaagcatctttagaaactttgaagagcaatgatctattagtttctaaattcggcagagataagaagttaaagatcaaaagagaagaaaatcctataaatctaaaagactggggaatagaaatactagatgagatgactgaaatcgctgaatctatggataataatgataaaaagtattcaaatgctatcagaaggtttaaaggcgagcttgaagatcctaataaaactttatcttcgaaattattagacaggatcttcacagaaaaaataagctattttgacctaggatttactttagctgagcaaaataaatctcactatgaaaacagaagagtatctgataatt

SEQ ID NO: 312096 - DNA, 822 bp, Unknown
  Bacterial polypeptide expressing nucleotide sequence isolated from the Sargasso Sea
gcatccccgcaatgccgtcgatttccagtccgaccgctacctcgcgctgatccgcaatttccgccgcaccaactggctgctgatgtacctgttcggcgcgtcgccggcactggatcgccgctttctgcgcgatcgcaagcacacgctcgagaccttcgacgccgacacgctgtatcgtccgtacgcgaccagtttgcgcatgagcgatctcggctactcgaacaccacggcacaggccgcgctgcacgccgactacgacacgctgccgggctacctcgacgcactcgcgaaggccgtgagccagccgtaccccgcgtacgaggcaatcggcacgcaacgcgacggcgagtgggtgcagatcaacacgaacgtgttgcaaatcgaaaacgagttctactcgacgatccgtccgaagcgcgtcacgtacccgggcgagcgtccgctgcatgcgttggctgcacgcggcgtgcagtatgtcgaagtgcgctgcatggacatcgacccattcgagccgaccggcatttcgctcgagacctcacgcttcctcgatgcttacctgctggtctgcgcgctcgacgacagcgcgccactgccgccggacgcctatgccgaggcgaaccagaacttcggcagcgtgacgatggagggccgcaaaccgggcctcgaactgacgcgcgacggcaagccgattgcgatgacggattgggcgaacgaactgttcatccagattgacgcagccgctgcgaagctcgacgcattgcacggcggcgacgcccacgcccgtgccgtggcggttcaacgcgcgaaactggcggatgcgtc

SEQ ID NO: 312097 - DNA, 639 bp, Unknown
  Bacterial polypeptide expressing nucleotide sequence isolated from the Sargasso Sea
cggtgcgcgactcgccccgtacactccgcgcaaatttatctctgcgggcggtatcactacatttcgaacaccgccaaagcctcttataggagcctctgtggctgatcactcaccaatctaccgcaagctactcgaggctgagcccacatggctaagccagattcgccgcggggtcgagaaagagagcctgagagtctcgcgacatcaagcaacgctcgcgcaaacgccacatcctgctggattagggtcggcactgacccattccgctatcacaacagattactcggaagcgttgctcgagttcattactcccgtatcgaactccatttctgacacagagcaagcgctcgccgatttgcaccgtttcaccgcccggcagctggacgcggagttactttggaacaccagcatgccttgcatcgttcatgcagatgccggtattccgatcgctgaattcggcagttccaatgtaggtcagatgaagcgcatttatcgcaacggattgagcgtacgatatggcaggaaaatgcaggctatcgccggtattcattacaacttctctctgcctgagacgttttgggtaagagccagcgaagtggcgggggataaccactcgcaggccgattttcagaccgcggg

SEQ ID NO: 312098 - DNA, 241 bp, Unknown
  Bacterial polypeptide expressing nucleotide sequence isolated from the Sargasso Sea
gttatttggatctgcattaaccaatcaatttatcaccacagatttctcagagtcacaaatggagtttgtgacacctcctttgaaaacaaattcagaagctcttaattttctcgaatccattcacttaaatgtttccaagaaaatagatgaagaaatactgtggcctttaagcatgcctccatttatagattgcgacacagatataccaatcgcatattatggtgaatctgaggttgcaatg

SEQ ID NO: 312099 - DNA, 874 bp, Unknown
  Bacterial polypeptide expressing nucleotide sequence isolated from the Sargasso Sea
cctgagaattgaaaatgatagaatttctaaatcttttcatccacagtctttaggttcatctctttgtaatagatttatcacaacagacttctctgaagctcaaattgaaatgattactccaccggagacagataggttaatcagctatcgttttttatctgaagttcatcattttgtttcaaaatctattaaagatgaatatttatggccctttagtatgactccaattatttcatcagataatgacgtaccaatcggcaactacggtacttcaaataaaggaatgtttaagagaatatataggaatggccttgcaaataggtacggtaaaataatgcaagctatatccggaatacatttcaattattctctccctgagtcattttggtcatcagaattgagtgaacgaaacgaatataaaaaatcaaaggattatttcaagattcttagaaacatttatagatacaattggattatactttatctttttggtgcctctcctgtgatatctgaaaaatttataggaggaaataataatgattttctcaagcttgatgagcatacattttatcttccttttgcaacttcgcttagaatgagtgacttgggctatcaaaatcagagcagagctaatttttctccatcactagatagcttagatgaatatattaaagatcttaatcgagcaacatctacgatagatacaaattttgctaaaatacctagatttggagtcgagccttcgcagcttaactcatatattcttcaaattgatgatgaattctatgctgtggcaagaccaaaaagtagctcaaattctgatcatcaaacgatttataagcttaagaatagtggtgtggactatatcgaaata

SEQ ID NO: 312100 - DNA, 655 bp, Unknown
  Bacterial polypeptide expressing nucleotide sequence isolated from the Sargasso Sea
ctgagtctgcttcataaatttctttatagtgaattgggcgatgagatactatggaacttttcaatgccttgtgcatttacaaatgaaaaagaaattcgaatagctgagtatggaaaatctaatagtgggatgcttaagcatatttatagaaaagggcttagattaagatatggttcgatcatgcaatgtatctcaggcatccactataatttttcatttacaaaaaattcttggaaaactatagataacaatccagatcaagattatataaatgaaaaatatcttggcatgattagaaatataaaaaggaatttttggtttatcttagaacaatttggcgcatctcctataacgcataagtcttatttatttgatagaaagcattctctgaaaaaacataatattaatgacttgtttttgccctatgcaacctccttaaggatgagtgatgtaggctaccaaagctacattcaagattccctcaaaattagttataacgacctagacgaatttataaatgcattagtaaaagggattaaaactcctgttaaaaaatttagtgatataggtatgtttgatgatgcaggagttgcacaacaaatttctacaggaatattacaaattgaaaatgagttatatgacattgttaggccta

SEQ ID NO: 312101 - DNA, 235 bp, Unknown
  Bacterial polypeptide expressing nucleotide sequence isolated from the Sargasso Sea
tttgacagcagacaacacttgtttcgacgcgcgcgttaaggcgcttaaatcgccagaatttttagcctcgttaaaagacataaagcgtggtgtagagcgagaggcgcttcgaatcaatccaaacggtacgttggcacaaacgccacatcctaagccgttgggctcggccctgactcacgaatctattacgacagacttttctgagtctttgttagagtttattactcctcccaga

SEQ ID NO: 312102 - DNA, 682 bp, Unknown
  Bacterial polypeptide expressing nucleotide sequence isolated from the Sargasso Sea
atgaatccgtcggatttcgatatcagcgagacctccttcaaccggggaatcgagcgcgaaacgcttcgtgtcacaaatgatggcgagcttgctctgacacctcatccgcaggcactcggcgcgaagctcacccatccttgtatcacaaccgacttctgtgaatcccagcttgaactcatcacacctgtcttccaaaccatcaaagacgttcttgcggaactgacacgaatacaccattacgtccaccatactctggaaaacgaactgctttggccagcaagcatgccttgcgtgctacctcatgagagtgacattccgttggctgactatggcaactccaacgttgctatacacaagaagacgtaccgcagcggactcggcatccgatatgggcgtagcatgcaaacaatctccgcggtgcactataatttctcaccggatgacaccgtctttgcccaactagcagaccatgagcaggcagcagacacaaagggatttcggagcgaacgctacttcggcctgatgaggaatttcagggaagtatcatggttgccggtctatctgtttggggcatcaccagcggtggcatcatcgtttgtgcttccgggtaagcacggcctgtcaaactttggcaaccaaacccttataaagccttatgcaacgtcccttcgaaacggcaacc

SEQ ID NO: 312103 - DNA, 674 bp, Unknown
  Bacterial polypeptide expressing nucleotide sequence isolated from the Sargasso Sea
aatgatcagattttctttagatgaaataaagaaatcaaaagcatcctcagaactcaatttcataaataggggcatagagagggagagccttaggattaactcatctggaaaaatttctcaaacccctcatccattaggattaggatcggctttaactaacccttatataacaactgatttttcagaagctttgctggaattagttaccccgactttcaatagtgcttcagaatgtttgaaatttctaagtgatttacatatttttgtgaatcaaaacctagaaggtgaatccctttggcctctaagcatgccttgtttcatagattctgaggacgatatacctattggaaactacgggacttctaatcaaggtatgatgaaaaccatttacagaagaggtttgtctaatagatatggaagtatgatgcaggctatagcgggaattcattataacttctcattttcagataaatttttgcaaatttttgctgatatcaattccattgatttaaaaaaattcaaaaatgaggtttatttaggtattgcaaggaactttcgaagatatggctggctatatcttctattatttggatcttctcctatagcaaacaagtcttttgcagaaaatagaagtcataatatggatgatcttaatactgaagatctttttcagc

SEQ ID NO: 312104 - DNA, 655 bp, Unknown
  Bacterial polypeptide expressing nucleotide sequence isolated from the Sargasso Sea
atggagaaaaaccttttttcagaactcaaagatcatctcagcgatgctaaagttggttttgaaaaagaaagcctaagagtcataaattcaaacattgctcagtcccctcatccagaatcattaggttcttccttatgtaaccaatacataacaactgatttttctgaggcactattagaattagtaacccctccttttctagacaaaaaaaaagctctgaggtttcttgatgacattcatcattttatttcatgcaatcttgaagatgagatcttatggcccttcagtatgccggtggcaattaacagagaagaagacattcctattgcatattatggtgcatcaaatttaggtgaattcaagcgcatttataggaatggcttatcacatcgctatggcaggatgatgcaaactatatcaggggtacattataactactcagttcctgattctatctggcaaagctcactctttggaaaaatggatatagattctaaaaaagtgcgttctgctgcatattttaatatgttgagaaatatttatagaatcaattggctaattctctatttatttggcgcatcacctatcctcaccaagaattttttaactgaagacactcaattatttaaacaactagacaaacaaacattatatt

SEQ ID NO: 312105 - DNA, 928 bp, Unknown
  Bacterial polypeptide expressing nucleotide sequence isolated from the Sargasso Sea
tttagtatgcctgtagacatcatagaagaagaaatacctattgcatattatggatcttcaaatttaggtgtattaaagcaaacttataggaatggcttgtcacatcgctatggcagaatcatgcaagctatatcaggcttgcattacaattactcagtaccagaggatttatggggcagcttatcattccataaaatggaaaaagactctaaaaaagctcgttctgctgcttatttcaatatgctgagaaatatttatagaataaattggctcattctctatttatttggcgcttctcctattctgatgaaaagttttctcgctgaggatactaaaatatttaagaagttagataaaaaaacactatatttgccttatgcaacatcgcttaggatgagtaattatggatatcaaaattcaaacagaaaaaaattagaagtatcagttaattcaatagatgagtatatatcagatcttagaaatgcagctaatgctgctcatcctgaattcctaaaaatacaagacacaaacacaaagcttcaagcacaaatcaacaagaatgtgttgcaaatcgatgatgaatattacgcagttgcaagagcaaaaagcaagatcgtttctgatgagcaaacaacatcaaaattaaacaaaggaggtgttgatttcattgagttaagatctttagatctgaatccttttagtcgcgttggaattgatagagaaacaagggattttattgaggtattgttaactgactgttttataagaaaaggtgagtattttacggatgatgagataaagactattaaccataatgatggtttagttgcaactaaaggaagatatcccaaacttgaattattaaaagatggagaaccaataagtctcaaggactgggggaaccaaattattgataggtgtgccaatg

SEQ ID NO: 312106 - DNA, 881 bp, Unknown
  Bacterial polypeptide expressing nucleotide sequence isolated from the Sargasso Sea
gatttgctctcccttaactaataaatttattacaacagacttttctgaagcactaatagagcttgtaactccaactttcaatagtgttgatgaagtttatgaattccttttagatcttcacatcttcacagctagcgctatggagtcagatgaagtcttgtggtcaaattccatgccctgttttattggggatgagtcagaaataagaattgctgagtatggctctagtaacattggtaaactaaaaaatatttatagaaaaggtttacgggttagatatggttcgatcatgcagtgtgtagctggtgttcattataatttttcaattgacgacgactcccttagattgtttaataaagatcttaataaagaaactaaatcagatatttatcttggccttattaggaattttaaaagaaatttttggttcttactttacttctttggtgcttctcctatctttgataaatcttttgtttctggaagaaatcattcaatcaaaaatacaaataaatcagacctatatgatgaatatgccacttctcttagaatgagtgaggttggttatcaaagctatcatcaaaaggctcttgatattaaatataactctcttgatagttttatagagtcgctgaaaaaaggaatattcgaagagtatgaagtttttgaaagcctaggtttgtatgatgaaaataatgaaaggcaacaaatatcatcaggaattctccagatagaaaatgaactatatgattctattagaccaaagcgaaaaggtgcttctgagactaggccaatagagcttctttcagctaaaggcattgaatatgttgaagttagaggaattgatctatccccaaattactcttacaggaatatctaaa

SEQ ID NO: 312107 - DNA, 751 bp, Unknown
  Bacterial polypeptide expressing nucleotide sequence isolated from the Sargasso Sea
atgatacacctcactgaggcagaaaactttaaccttgatgcatctctcattaagggtgggcttatagggattgagagggaatctcttagagtaggcaatggtaagatttcatcaggtcaacacccaagtgtgcttggaaaaaagttagagaattgttttataacaaccgatttttctgaatcacagactgagtttatttcgcctccgcttaataataagaatgatgctctggattttcttcatgatcttaattatttcttttataacaatgttgatgaggccctttggccattcagcatgcctccttttataagcaatcaagatgagattaatttggcagattttggtaatacaaatgaaggcattttcaaaagaatttataggcaaggactgtcaaatcgatatggaaaatatatgcaatgtatctcagggattcattttaattattcatttcctgagactatttttgaatatatttctgaaaaaaatggactaactaataataaaaaatttaaatcagaaatttatttcaaaacaatcagaaatatttccagatacaactggctattactatatttatttggcgcatcaccaattgtttcaaaaaacttttataatacaaataatctttttgtgaagcataagcaatccttttatctacctaatgcaacttcactaagaatgagtaatattggataccagactcccaagcagtcagactttttggtaagccttaactccttagacgaat

SEQ ID NO: 312108 - DNA, 939 bp, Unknown
  Bacterial polypeptide expressing nucleotide sequence isolated from the Sargasso Sea
cccagacttctcacccagaatcattgggttcttcattatgtaaccaatatataacaacagatttttctgaggcacaattggagttggttacccctcctttgaaagataagagaaaagctttaatgtttcttgatgacgttcatcattatatttctcataacattcaagatgagtatttatggccttttagcatgccgttagatattcactctgatcaagatattcctatcgcatcatatggaaagtctaatatagctaggtttaaagaaatctatcgcaatggtttatcagagcgatatggaaaaatgatgcaagctatttcagggattcattataactactcagttcctgatgctatatgggaaaatgaattgtttataaacctagatatcgatcctaaagagactcgttcagcagcatattttaatatgatgagaaatgtttatagagtgaattggcttgttttctatttatttggtgcatcgccagtcattagtaagagtttcttgaatcaagattctcaaccattcaaaaagcttgataaaaaaacattatatttgccttactcaacgtcactcaggatgagtaattatggttatcagaatgctcgtagaaaaaaattagaagtatctatcaattcaatcgccgaatatatctcagatctcaggaaagcgaccaacagaatccatgaagagtttagaaatatacaaccagaaaattctaacctccaagctcaaatcaatgaaaatattttacagattgacgatgaatattacgccattgctagggcaaaaagtaagattatttcagatcaacgaacaacatcgaagttaaatcaaggtggcgttgattttattgagctacgatctttggatattgatccattcagcagaataggtattaaagaagagacagcattatttttagaagtcttctgat

SEQ ID NO: 312109 - DNA, 619 bp, Unknown
  Bacterial polypeptide expressing nucleotide sequence isolated from the Sargasso Sea
aatgatcagattttctttagaagagataaagaaatcaaaagtatcctcagaactcaatttcataaataggggcatagagagggagagccttagggttgactcatctggaaaaatctctcaaacccctcatccattaggattaggatcagctttaactaacccttatataacaactgatttttcagaagctttgctggaattagttaccccgactttcaatagtgcttcagaatgtttgaaatttctaagtgatttacatatttttgtgaatcaaaacctagaaggtgaatccctttggcccctaagcatgccttgtttcatagattctgaggacgatatacctattggaaactacgggacttctaatcaaggtatgatgaaaaccatttacagaagaggtttgtctaatagatatggaagtatgatgcaggctatagcgggaattcattataacttctcattttcagataaatttttgcaaatttttgctgatatcaattccgttgatttaaaaaaattcaaaaatgaggtttattttggtattgcaaggaacttccgaagatatggctggctatatcttctattatttggatcttctcctatagcaaacaagtctttt

SEQ ID NO: 312110 - DNA, 822 bp, Unknown
  Bacterial polypeptide expressing nucleotide sequence isolated from the Sargasso Sea
cgggcgcgagcacgacttgctggagcgcttcgatcactccctgtatcgcccccaggccaccagcctgcgtatgagcgacctgggctaccagaacaacgcccaatcatcgctggcgattagctacaacaatctggatgaatacgtcagcacactcactcatgccatcaacaccccggagccggcctacgaaaaaatgggcgttaaagtcaccgacgccgatggcaacgtgaagtatcagcaactcaacgccaatattctgcaaatcgaaaacgagtactactcgtcgatccgcccgaaacgcaccatcaaacccggcgagcgccccactacagcgctgcaagaacgcggcgtggagtacattgaaatccgtgcgttggatttaaacccgttcgagccggtgggcatcaaccaacaagaaatccggttcttggatctgtttgccacctattgcctgctgcgcgaatcaccgcaactggaaaaatgcgacctgcatgccagcaaggaaaacctgcgcaaggtggtttacgacggtcgaaataccgacatccagctatacaactggggcaagtcggtgagcctaaaaaactgggcatcagaaaaactgacgcaaatgcagcccatcgccgagttgtttgatcgcgcccacggcggcaacaactatgccgaggcgctggcgcaccaacaggaaaaagtcgacaaccccagtgccactccgtctgcacagattttggaacaactggagagccgtaatcagggctttttccagttcgccatggagcaggccttggcccaccgcgatcatttcctgtccggtcagcgttg

SEQ ID NO: 312111 - DNA, 1409 bp, Unknown
  Bacterial polypeptide expressing nucleotide sequence isolated from the Sargasso Sea
gctgcagaggggaatcgagaaagaaagcctgcgggtaaagtctaatggcaatatatcgcaatcgccgcacccaaataggcttggttcagcgcttactaacccgtacattacaactgatttttctgaggcgctgctggaattaattactccagtttcacaaaccatcgacggttgtctagaagaactggaaaatatccatcgatacacgcagcaaaatatcgagaatgacgaaatactttgggctactagtatgccctgtccactgagcccgaatacagaaattcctatcgctcaatatggaaaatccaatataggcaaactaaaaactctctaccggcatggcctacaccataggtatggtagcctcatgcaggcaatagctgggattcattataatttttcaatgcctgactcattttgggagtcatataaacctctctgtaaatttaaaggctcaattcaagaatttaagacagagaagtatctccacttaattcgtaactttcatcgattttcgtggctacttttgtacttatttggcgcttcaccaactgcatgcaaatgctttgtagaagggcgagcacataatttgtcagaattagatgactcaactttattcaagccttttgcaacctgcttaagaatgggtaatctgggttacaaaagcgaagctcaacaatccctttttgtttgttataacgaccttgagacatacgtagagtgcctgggtggggcaataaaaaccccatacccggaatacgtaaagattggtcatgaaaaagacggcaagtataaacaaataaatactaacctactccaactggagaacgagttttattctacgataagacccaaacgtaacgtcaaaaatggagaaaaacctttggacgcgcttaccaatcgcggaatcgagtatgttgaggtaagagcacttgatctagatccatattctccggtgggtataaatagagaacaaattcatttcttagattcgtttttactccactgcctattggctgaaagccccgattgcaacaaagatgaattttttgaagtaggaaataatttaaatttagttgttaataggggtagagaggcaaatttacgtctttcgagtaagggcaaacaaagagtgttgggtgagtggtctatggaaataataaacgatattaaacacagcgcattcattttggataaggttaaccaaagcaacgaatattctctttcagccattaaacaagaggcaaaaataaaaaatccggaactcacaccatctggccgcatgcttgatcaaatgaaaaaagagggcgtgtcctttttcgaattttccatggaacattcaaagagacattcaaaaactctaagagaagcagaaatagacaaaaactttttggcacatataaaaaatg

SEQ ID NO: 312112 - DNA, 1558 bp, Unknown
  Bacterial polypeptide expressing nucleotide sequence isolated from the Sargasso Sea
aatgattaggttttctttagatgacgtaaagaaatcaaaagcaacttcagaacttaacttcataaatagaggtatcgagaaagaaagcttaagggtcgactcttctggaaaaatatctcaaaaaccacaccccaaaggtctagggtccgctctaacaaatccatacattacaactgatttctctgaagcattggttgagttagttacacctaccttcaacagtgccgaggagtgtcttgagttcttaagcgatcttcacgtctttgtgaatcagaacctagaggatgaatcactttggccgttgagtatgccttgttcaattgattctgaagaagaaatacctattggaaattatgggttatctaatcagggcatgatgaaaacaatttacagaagaggcctttcaaatagatatggcagtatgatgcaagcaatagcgggtattcactataacttttctttctccgataatttcttaaaaatccttgctgattccaactctcataatctcaaggagctaaaaaatgaagtttatctcggtatagctagaaactttcgccgctatggatggctttatcttttgctttacggttcttctccaataacaagcaaatctttcgccgccaatagatctcatgatctggacaacctaaattctaatgacctatacaaggtgaatgcaacttcattgagaatgggagatctgggttacattagccatgcacaggataatctcaatatttcatataactcattaaaagattacagctcagacttgaagagtgccctcaaaaccacctatcaagaatacaaagaactcggtgaatttaaagacggcgagaggattcaattgaatgactccattattcaaatagaaaatgagtattacagtactatcaggccaaaaagggtatgtccaagcggggaaagaccaatcaatgtgctcaatgatcaaggtattgattaccttgaagtgagatgtatagacctaaatcctaatacatttgtaggcatatcaagggagcaagtttacttccttgatttgttgattttatattgcttcttcacagaaagtcctgaaatacttgaagacgaatccaaagagttatttaaaaatcataaaaccatagttaatgatggaagagaccctagcgccaaaatcaaaactttgaatggagatgttttagtcaaggaagaggctatgaggattttagatggaatgagcgaagttgcgacatttatggacgaagaagtcttcaaagaagggaatatctggtcagaaactgtagggaatcagaaaaaaatcatagaaaattatgatttatctcttagtggatctctgttggaagaagttaataaaagtggcattacctttcaggaatacggcttgggtatttctcttactcataaaaaacaaatgaatgatctcgaaacagataacgataatgagtttagaaacaaggcttccgaatctctaaaaagtgcaaaaaaattagaagaagagcatcaaattagttttgaaaactacctagaggaatttttaaataagatttcttga

SEQ ID NO: 312113 - DNA, 946 bp, Unknown
  Bacterial polypeptide expressing nucleotide sequence isolated from the Sargasso Sea
ggcgcatctccaataacgcataaatcttatttatttgaaagagagcattctcttgaaaaatataatgcaaacgatttatttttgccatatgcaacctctttgagaatgagtgatgtaggctatcaaagcaatatccaagattccctcaaaatcagttataacaatttagatgaatttataaatgcattagtgacagggattaaaactcctgttaaaaaatttaatgatataggtatgtttgatgatgcaggaattgctcagcaaatttctacaggaatattacaaattgaaaatgaactctatgacattgttaggcctaaaagatccgggccgagtgggtttagaccagcatcattattgaaaactgggggtatagagtacttggaattaagaggaatcgatgtcaatccattcatacctgaaggcattgatgtaagcaaaatcaagcttctagatatttatataactcactctttaatctctgagagtcctttaatttcagataaagaaattgaggaaattaaagtaaaccaaaaaatcatggttagcaaaggaagattaaaaaatgtaatgttaagcaaaaatggagacttaatttctctagcagaattaagaaaaaattttctagctgaactagagcaaactgcagaggcattagatgaatattcagaaggttatttaaaggcattccatttggagataaataagaacatgcttttaagtgaaaaaatattaaccgaaatggatgtgaaaggttttgaatttcaagaatacgccttaaatcaaagcaaaaaaattgctgagaattatgattctagtgatacaagtgatttttatgcattaactaattctgctcagacttcaattgaaaatttaagaaatcttgaagaaagttcaagcatggacataaataaatatgtagaattatataactcaaaaatttagg

SEQ ID NO: 312114 - DNA, 778 bp, Unknown
  Bacterial polypeptide expressing nucleotide sequence isolated from the Sargasso Sea
aatgattaggttttctttagatgacgtaaagaaatcaaaagcaacttcagaacttaacttcataaatagaggtatcgagaaagaaagcttaaggatcgactctgctggaaaaatatctcaaaaacctcaccccaaaggtttaggttctgctctaacaaatccatatataactactgatttctctgaagcattggttgagttagttacacctaccttcaacagtgccgaggaatgtcttaagttcttaagcgatcttcacgtctttgtgaatcagaacctagaggatgaatcgctttggccgttaagtatgccttgttcaatcgattctgaagaagaaatacctattggagattatgggttatctaatcagggcatgatgaaaacaatttacagaagaggtctttcaaatagatatggcagtatgatgcaagcaatagcgggtattcactataacttttctttctctgataatttcttaaaaatccttgctgattccaactctcataacctcaaggagctaaaaaatgaagtttatctcgctatagctagaaactttcgtcgctatggatggctttatcttttgctttacggttcttctccaataacaagcaaatctttcgccgccaatagatctcatgatctggacaacctaaattctgatgacctatacaaggtgaatgcaacttcattgagaatgggagatctgggttacattagccatgcacaggataatctcaatatttcatataactcattaaaagattacagctcagactga

SEQ ID NO: 312115 - DNA, 743 bp, Unknown
  Bacterial polypeptide expressing nucleotide sequence isolated from the Sargasso Sea
cctgagcccagaaaatataatcactaaaaatattactagcgatataggatcaatatttaataagggaaagataggtattgaaaaggaaagccttagagttagagacttaagaatatccaagatcgatcatccgaataaattgggctctgctttatgcaataaatacataacaacagatttttctgaagcacaactcgagctagttacaccaccttttaaagataaaatgaagacacttcattttttagataatattcatcaattcgttaatttaaatattgatgatgagatcctctggccattttcttttcctccccagactaattctgaaaaagatatcagaattgctaagtatgggaaatcaaatgatgcactattcaaggagatatataggaaaggtttagcaagcaggtatgggagaagaatgcaggctatttcaggcattcatatcaattattcgcttccacctagattattagaggagatttccttacaagaaaggcaacattcttcatctagccatcattcagaggtttattttagaatgatgagaaatttatatagggtaaattggctaattctttatttatttggagcctcaccaattctgaccaaagatcaattgaataaagaatctaaggactttaagaaaatagataaaaatacattttatttgccatacgctacttccttaagaatgagcgatttaggatatcagaatgctgatagagttaaactagagg

SEQ ID NO: 312116 - DNA, 949 bp, Unknown
  Bacterial polypeptide expressing nucleotide sequence isolated from the Sargasso Sea
gttgcctagggtaaatctaaattcaattttaacctccgagcggctagccaagctaaaaaccgcaggtgtttacttaccaacgttacagagaggaatagaaaaagaggccttaagatctatgctagacggtggtctatcgcaagcggcacacccaagaatattgggctctcctctgactaatcccaacataacaacggacttttcagaagcacaagtcgaattaattacccaggtccatccatctattactaattgccttcaagagttagcggaaattcaaacttttgtctctgatagcctagaagaagaattgctttggccatttagtatgccctgcaatattaaggaagatgactcgatacccatcgctcaatatggctcaacaaaccttgccaaagcgaaaacaatctatcgaagaggacttagcaataggtacggatctaaaatgcaaaccatttcaggcatccactacaacttttccttatctgacgcttgctgggaagaactcggatattctgatcaagaatccagaacccgaggctacttcgatttaataagaaacttccgtcgttggtcttggctactggtatatctgttcggtgcgtcgcccaccattcctaaacaattagttccggcttctgatttagctagcttgagctttctggatgatcaaaactgttatatgccacacgctaccagcttgagaatgggaccgatgggctatcaaagtaccgctcaaaacaatctggcaatctcttataactctttggaagactatctagaaggaatgaccctcgccttaagccaaacacactctgaataccagaaggtcggtttgaagcaaaactctatctatcaacaactaaacacagcaattttgcagatcgaaaacgaattctatggttacattcgaccaaaacgcagcctttcagatggagaaaggccaata

SEQ ID NO: 312117 - DNA, 1615 bp, Unknown
  Bacterial polypeptide expressing nucleotide sequence isolated from the Sargasso Sea
atgtcgaacaccatgactcaccgccagtccgaactgctgctgaaacgcctcgacgcgctgagctcgggcccgacgcggcagcatctgcccgacggcctgcgcggcatcgaaaaggaaagcctgcgcgtgacgcgcgacgggatgatcgcattcacgccgcatccgcgcgcgctcggttcggcgctcacgcatccggcgctgacgaccgactattccgaagcgttgatcgagctgatcacgcccgcggaaggtgacgccgcgatcacgctcgagcgtctcgacgacctgcatcgctacgtctatgcgtcgctcggcgacgagatgctgtggaacgactcgatgcccggcctgctgccggccgacgaccagatcccgatcgccgactacggcacgtcgaacatcggccgcctgaagacggtgtaccggcgcggcctcgcgtatcgctacggccgcacgatgcagtgcattgccggtatccactacaactactcgctgcacgaggaagtgtggcggcgcctgcatgcggaagaaggctcgacggccacgctcgtcgattaccagtcggaacgctatctcgcgcagatccgcaacttccgccgccgcagctggctgctgatgtacctgttcggcgcgtcgcccgcgctcgacacgaagttcctgcgcggcaagccgcaccggctcgacacgttcgatgccgatacgctgtacctgccgtatgccacgagcctgcggatgagcgatctcggctactcgaacacgaccgcgcaggccgcgctgcacgtcgactacaacacgctgcccggctatctcgacgcgctgtcgaaggccgtgagcgagccgtatccggcctacgaggcgatcggcacgcatcgcgacggcgagtggatccagatcaacacgaacgtgctgcagatcgagaacgagttctactcgacgatccggccgaagcgcgtcacgtattcgggcgagcggccgctgcatgcgctcgcgtcgcgcggcgtgcagtacatcgaggtgcgctgtctcgacatcgatccgttcgagccgaccggcatcgcactggaaaccgcgcgcttcatcgacgcgttcctgctcgcgtgcgcgctcgacgaaagcccggcgctcgattgccccgcgtacaaggaagcgaacgcgaacttcggcagcgtgacgatggaagggcgcaagccggggcttacgctgcagcgcgacggcgagacggtcacgttgcaggcgtgggcggacgcgctgatggccgatatcgaaaccatcagccgccgcctcgacgaaatccgcggcggcgacgagcatgtgcgtgcaatcgccgcgcaacgcgagaagcttgccgatccggagcgcacgccatctgcgcgtgtgctgcgcacgatgcgcgagcgcggtcagtcgttcctcgagttcgcgctgacgcagagcgaagcgcatgccgcgcatttccgggcgaatccgccgtcggcggagacgctgcgtaccgagcaggcgctcgccgcgaaatcgctggccgagcaggccgagctcgaagcgaaggaggccggatcgttcgacgcgttcgtcgcggcctatcgcgcctatacgctgaaccgcttcagcgtgtgat

SEQ ID NO: 312118 - DNA, 1567 bp, Unknown
  Bacterial polypeptide expressing nucleotide sequence isolated from the Sargasso Sea
gttgaccgccctgggttcgccggaacggctgaccgccctcaaggggatccggcgcgggatcgaacgtgaatgtctgcgcatcaccccggaaggaaccctggcccagaccgatcacccccgcagtctgggctcggcgctgacccatgccaacatcaccaccgactactcggagagcctgctggagttcatcacgccggccaccgactccatcgacagcctgatggaacagcttggcgacatccaccgtcacaccatccatcatctcgatgatgagcggatctggccgctctccatgccctgcttcgtcggcgacgaggagaacatccggctggcccagtacggcagttccaacatcggccggatgaagaccctctaccggcaggggttgaagaaccgctacggcagcctgatgcaggtgatcgccggggtgcacttcaacttctccatgccggacagcttctggtgtgagtggcaggagctggtgtgcgaggggtgctgcagccagcgcttcatctccgacaagtacatggggctgatccgcaacgtctaccgcttcggctggttggtgccctatctgttcggcgcctcgccggccatctgcgactccttcctgaaggggcgcaagagcaatctgccgttccagaagaccggcaagggcaccctctacctgccctatgccaccgcgctgcggctgtcggatctgggctacaccaacagcgcccaggcggggctcaagatcagccacgacagcctgccggcctatgtgagcagcctgcgtcgtgccatcaacacccatgaccccgacttcgccaagatcggcgtcaaggtgaacggcgagtaccgccagctcaacgacaacgtgctgcagctggagaacgagctgtacgccccgatccggcccaagcgtaccccgcgcagcggtgagaagccgtcggacgcgctggagcagcgcggcatcgaatacatcgagctgcgcaccgtggacgtgaaccccttcaccccgtatggcatcgaggtggatcagatccgcttcttcgacctgttcctggtgtggtgcctgctgcgcccgtccccggtgctgggcgacgaggagattgcccgcaatcgccgcaaccagaccaaggtggtgctggaggggcgtcgtcccggcctcgagctggaagacgagcagggtcatgccatcggcctgaaggagtacggcctcaagctgttcgacgagctggccgaggtcgccgcgctgctggatcgctgctgcggtcgcaatcgctaccgcgagaccctggcaatgcaccgcgagaagctgctcaaccccgagctcacctactccgcccgcctgctcaagcagttgctggagagcggccaggacaacggctgcttcggcgacgagctggccaaccgctaccgggaagagatgctggccggtgagctgcagtactgggacgaggcctactttgccggcgaggcacgcgactcgctggccaagcagcgggaacgcgagcgcagcgacagcctgtcgttcgacgacttcctggccgactacttcgggaccagcaagaccccggcctga

SEQ ID NO: 312119 - DNA, 1543 bp, Unknown
  Bacterial polypeptide expressing nucleotide sequence isolated from the Sargasso Sea
tatgagccatggcactaaaataaatactttccattcgctgtcaagtgaggaaaaaaagagcttatcatctggaaaaaaaggcatagaaagagaagcgatcagagtacttaaaaatagattgatatcagatcaaagtcataagaattattttggatctgctctatgtcattcatactttacaacagatttttctgaatcccttcttgaaataataacaccaccatttagtgaaaactctgaactgataaactttttagaaaaatcgcatcaatatgtaagccaatctattaataatgaacaattatggccagcaagtatgccaccaaattttcatgatgatgatatacaaatagcaaaatacggagtttcaaatattgctaaatttaaaaccatttacagaaaaggtttgtcaaaaagatacggtaagcccatgcaggcaatttctggggtgcatttcaattattcatttcctgaaataatttggaaactaaaccataaagatggcagtgaaaataatacacaatcatttagaaatacattttattttcaaacaataagaaatatatctagaattagctggttaatactttacttatttggcgcttctccaatccttaataaatcattccttagaacggtcccaaatggtagtaaatgttttaaagataatatttattttccttatgctacatcattgaggatgagccacctaggctatcagaatgatagtcaggctgatattgaagtatcaattaattcaatagatgaatatatatctgatctaaaaaagctgacttctgaacaaagaaataaagtcaaaataaaattaccctcagaattgaatagtttagaagaactaaatgacttccaacttcagatagaagacgaatattattctatgataaggcctaaaagcatgtctaacgaggatataagacccacatctaagttaagaaaatttggtgttgaatatattgaggtcaggtctcttgatatagacccatggtcacccattggcataaatcaatcgacagtaagctttatagaagccctcattctttattcatcgttctgcgaaagcccgcctatttcagacagtgaatataaaacaataaggaaaaataatcatttggtagcaacgcttggtcgtcagccaaatttatatttagaaaaggataaaaagaatatatccctaaaagagtgggccagatgcataatcgatgagatggaaccatttctgcatattgtcaaagttgatagtgcacaaatagacaactataaagaaatgatcagcaatccagaatatactccatctgctcgactcattaatggagttttgaaaggctcttattccttggatgaatatatggcaaatatatccgaaaagaataaggagtattttttatctattgataaaaacacaaatgatatgtgggaaaaatttgatgcagagtttgagatttctttagataaacaaaaaaaacttgagcaattacaagaagttagttttgaagaatttctaaatagctatataaatagttga

SEQ ID NO: 312120 - DNA, 1147 bp, Unknown
  Bacterial polypeptide expressing nucleotide sequence isolated from the Sargasso Sea
tatgagtactattcttgagaagaaactaagacaactttctgagaacaatgagcctgtcgttttttgcggtggaaaaaaaggattggaaaaagaatcattaagggtaaacgaagaaggctcactctcacttaagaggcatccatcaagtttaggctcagcattaaaaaataaatacatcacaactgatttttctgaagcgctactggagttcgtaactcctgcttatgagaatagttgggaagtgattagcatgctcaatgatattcatcaatttacatataacaatataaatgatgagattttatggattgcaagtatgccttgtagattagatggcgataaatcaattccgattgcagattatggaagttcaaatatcggtaaaatgaaatctatatacagaagtggtctcggcttgagatatggaagaaatatgcaagcaatctccggaatacattttaattactcgcttccagagaatttttggcctgtatacaaaaaaattgaaaataataattctgctgcggaagactttatatcatcaagctacatggacatgataagaaatctcaagcgttttggatggctgatactctaccttttcggagcctctccagcaatatgcaagtcttttttgagcgataataatacgtctatgccatcacttgataaaaagactttatttcagccttatggtacttcactgaggatgagcgatctcggttataccagttctgttcagtccaatatcaatatctcactgaataatttagatcattatatcgaagatttaacaacagccatgaagaccccagagccttcttaccaaaattttggatttaagaaaaatggaaaataccaacaactttctttaaataaactacaaatagaaaatgagtattacagcactgtgagaccaaagagagttgccaattcaggcgagagaccaacaagcgctctaaaaagaggagggatagagtatattgaaataagatctttggatgtaaatgtttatgatcctgttggcattaatcaagataccatgagattcatcgagtctttcatgatattttgcttgcttgaggaaagccctttgattgatgaaatagagaacagagaaataatgaagaattattcagatacatct

SEQ ID NO: 312121 - DNA, 682 bp, Unknown
  Bacterial polypeptide expressing nucleotide sequence isolated from the Sargasso Sea
gctgccaatggctttctggcaggcgaagtgcggcgtaaccgaaggcgaagatgctaaagagaagatctccgcgggctacttccgtctgatccgcaactactaccgttttggttgggtgatcccgtatctgtttggcgcctctccggccatttgttcctcattcctgcaaggaaaaccgacaaccctgccgtttgaaaaaaccgactgcgggatgtactacctgccgtacgcgacatcgctgcgtctgagtgatttggggtataccaataagtcgcaaagcaatctcggaattacgtttaacgatttgcatgagtatgtggcaggattaaagcgtgcgattaagactccttccgaggagtacgcggcgatcggtctggagaaagacggtaagcgtctgcaaatcaacagcaacgttctgcagattgaaaatgagctgtatgcgcctatccgcccgaaacgcgttactcgtcgtggtgaaacgccgtctgatgcgcttctgcgtggcggtatcgagtacatcgaagtacgctcgctggatatcaacccgttctcaccgatcggcgtggacgagcagcaggtacgcttcctcgatctgtttatggtctggtgtgcgctggccgatgccccggaaatgagcagcgatgaattgctgtgtacgcgtaaaaactggaatcgcgtgatt

SEQ ID NO: 312122 - DNA, 893 bp, Unknown
  Bacterial polypeptide expressing nucleotide sequence isolated from the Sargasso Sea
caacttctcgctgccggaagcgctgtggcaactgcaacagcaggccgaagctgatacgcgcagcgcgcgggactatcagtcggcgcgttatatcgcgctgatccgcaatttccgccgctacagttggctgctgatgtacctgttcggtgcctcaccagcgctgcacaagggctttatgcgcggccgcccacatcagttgcaggaactggacgcagaaaccctctacctgccctacgcgaccagcctgcgcatgagcgatctgggctatcagagcactgcccagtccggtctgacaccctgctacaacgacctggccagctacaccgacagcctgcgccaggccgtcggcacgccctacccgccctatgtggaaatcggcgcgaagaaggatggcgagtggctgcaactgaacaccaatattctgcagatcgaaaacgagtactactcgaatatccgccccaagcgcgtcacctacagcggcgagcggccgatccaggcgctgatggcccgtggcgtgcaatacgttgaagtgcgctgcctggacatcaacccgtttctgccgctgggcattgatctgagcgaatcgcgcttcctcgacgccttcctgctgttctgcgcattggccgacagtccgctgctggaaagcggcgaatgccatgcctgcaccgacaacttcctggccgtggtcaaggaaggtcgccggccaggtctagagctgcagcgcaatggccagccagtggcgctgcaggcatgggccgatgagttgctggagcagatccgtccgctggccgaactgctcgaccagaaccacggcgacaacgcccatagcctggccttgcaggcgcaacaggccaaggttgtcgaccccagcctgacgccttccgctcaagtgc

SEQ ID NO: 312123 - DNA, 782 bp, Unknown
  Bacterial polypeptide expressing nucleotide sequence isolated from the Sargasso Sea
tctggctgcgcttggcaccacgtcatttaaaactgcgattaaagggatcagacggggtattgagcgggagacattgcggatcaaacccgatggtcaactggcacaaaccgatcatgcgaaagctttaggttcggctttaactcatcctttaatcactacagatttttctgagtctttgcttgagtttattactcctgcgcagactgatatagaagttacgctaaaacagctgaccgacatccataagtttgctctctctcacattggtgaagaacgactttgggctggctcaatgccttgttatatcgataatcaggacgagatccgcctggcgcagtacggcagctctaatgtcggtactatgaaaactgtctaccgtcagggtcttaaaaaccgttatggcagtatgatgcaggccatcagtggtgtgcattttaacttctctatcccacaagagttttggcagcagtatcaaaagttattagacgataccggttcgttacaggactttatttctgctcagtacctgcacttaattcgtaactacaaaagatatgtctggctggtggtgtatttgtttggtgcgtcacctgcaatgtgcagctcgtttttgcaggggcgtgaacctaaatacaagttccagaccttgggtaaaggctctttgtatttaccttatgctacctccttgcggatgagtgatttgggctacaccaacagtgctcagtccagtttgaatatcagttacaacaacctgcctgattatattcaaggcctgcgccagg

SEQ ID NO: 312124 - DNA, 1000 bp, Unknown
  Bacterial polypeptide expressing nucleotide sequence isolated from the Sargasso Sea
ctggctgcgcttggcaccacgtcatttcaaactgcaattaaaggtatcagacggggtattgagcgggagacgttgcggattaatccggatggccaactggcacaaacgggtcatgcaaaagctttagggtcggctttaactcatcctttaattactacagatttttcagagtctttgctggagtttattaccccggctcagaccgatattgacgtcactttaaaacaactgacagatattcataagtttgccttgtctcatataggcgaagagcggctttgggccggttctatgccttgttacataggccatcaggacgaaattcagctagcacaatatggcagttctaacgttggcaccatgaaaaccgtgtatcgtcagggccttaaaaaccgttatggcagcatgatgcaggccattagtggtgtgcattttaacttctcaattccacaagagttttggcagcagtatcagcagttattaggggatacaggttcattacaggattttatttctgctcagtacctgcaccttattcgtaactataagagatacgtctggctggtggtgtatttgtttggtgcctctccggccatgtgcagctcgtttttacaaggacgtgagcctaagtataagttccagactctgggcaaaggctccttgtatttaccttatgccacatctttacgtatgagtgatctgggttacaccaacagtgcacagtccagtttgaatatcagctacaacaatttgccggattatattaaaggcttacgtcaggccatttcgacgccttctgctgaatacgccaatattggcattaaagtggacgggcagtaccagcagctgaacagcaatatactgcaaatagaaaacgaattttattcaaccatccggcctaaacgtaccactcaaagtggcgagcggccaacctgtgctttaaaacgccgtggtgttgagtacatcgaagtgcgggctctggatgtaaaccccatttagt

SEQ ID NO: 312125 - DNA, 910 bp, Unknown
  Bacterial polypeptide expressing nucleotide sequence isolated from the Sargasso Sea
ttgacaacacaagatataacaaatgcgcttaacgcgttatcgactggtgaacaccaaaacgcaattaaaggcattaaacgtggcattgaacgagagtcgctaagaatacaaagcaacggtgctatatctcctacaggtcatcctaaaggggtagggagtgcactaaccaatggtcatataacgactgacttttctgaatctttacttgaatttattacaccggttagcgagtcatcaacgcaaacattaaagcaactgcgcgatcttcaaaagttcacgcttgaaaatatgggtgacgaactgctttggcctatcagtatgccgtgcttcatcaaccaccaagacgatatcgtacttgctcagtttggtagctcgaatataggcaaaatgaagacgctttaccgtgaagggctaaaaaatcgatacggcagtatgatgcaggctattgctggcgtgcattttaatatctcttttccagagtcactttggaagtctctgcattcgttaaagcaaagtaatacgagcttgcaggattttatatctgatggttatttatcgctgataagaaacttcaaacgcgagctgtggcttattagttatatgtttggcgcatcgcctgccctgtgtaactcatttttgcaaggtcgtaaaacagatttaccgtttaaaaagttaggtaaaggtaccttgtacttagaggtcggcactgcactgcgtttaggtaacttaggttacacaaacagcgcacaatcgtccttgcgtgtcatgtataactcgcttgatgaatatgttgctggtttgaaaaaggccatcaatacgccatcagatatatacagcgacattgacgactacactagcgaacagccaaaacagttaaataaaaatattctgcaaatagaaaatgaatttt

SEQ ID NO: 312126 - DNA, 1684 bp, Unknown
  Bacterial polypeptide expressing nucleotide sequence isolated from the Sargasso Sea
atggacaggtttagatttattttgaggcgtattttgaaagataagcctcaaaataaaggtctgactgttaaccttgtcgcgatagcgaaccaccaatcagagaagcgcaaattgaagccattcaatgaattagtacaacatttctcggacgctcaagggcgcgccgcactccttggcatgcaacgtggaattgagcgtgaggcgctacgtattgatgaatctggctaccttgcgctagatggtcaccccatcgagttagggtcggccttgactcactcgcgtattacaactgactacagtgaagcactgcttgaatttattactccggtgaataatcaggttgagccgctattgcaaggcttgacccagacccatgcctatagtgtgcggcatttgcatggtcagcgtctttggccagtgagcatgccctgctatgtaaaagatgaggcgaatatccccattgctcggtacggtacgtcgaacacgggtaagatgaaaaccttgtatcgtaagggcttaacttatcgttacggcgctttgatgcagattatttctggggtacattttaacttctcggtatcgcgggaattgtggcaacgcctctatgaactgagcgataaaggcttgagctttgaggattttatctccgagtcttacttcggacttatccgcaattatcgccgtttggtctgggtgttgccttatttgtttggtgcctctccagcgttgtgtagctcatttatcaagggtcaaaagaccgatttacgttttgaaaagtcgggacgcggcacactgtatctaccctatgcaacgtcgctacggatgagcgatttgggttataccaataaagagcaagaagatcttaacattagctataactccctgcccgagtatctggctggggtgagagccgcgattaagatgccatcggccaactttgccaatatcggcgtgaaagtggatggtgaatatcgccagctcaatgctaatgtgctgcaaattgaaaacgaattttactcgcctatccgcgctaagcgcgtcaccaaaagtggtgagaagccctccgaagcccttgcacgtgcaggggttgagtatattgaggtgcgtgcattagatgtgaacccttttagcccgattgggatagaggctagccaagtgcgtttccttgacttgttcttactctattgtttattaacagattctcctaaatcagatgcggcagaggaagctcgtttaagtgctaacttaaaatcagttgtacttgaaggccgcaagctagggcttgaactgatgaccgattcgggtacgcggccattgcagacgtggctcttggatctctttgagcatttggactcattggctaagttactcgatggtgataaacacgattaccaagtggccttagcccattggcgtgaagctgtaaatgacccacacaaaaccttgtcgggccaagtgcttcagcaattggtaaccaaggggcaagatcatgggcagtgggtgatgtcattggcacagcaatatcatcaatattttatggattaccccttatctgctgaggttgtcagcgattatcaagctgaggcacaagcatcgcttaacaagcaagcggacatcgaagcggcgcaaagtgcggtatcctttgatgattatctgactgactatttcggcgcgccagcctaat

SEQ ID NO: 312127 - DNA, 346 bp, Unknown
  Bacterial polypeptide expressing nucleotide sequence isolated from the Sargasso Sea
tatgtgtcaaaaatttttaaataaaattaagtttggagataaaagagtttttattataaatggtaaggtttgcggagccatatctagagttccaaaatcaggatcaatattgagcaatatgagcaaaggtgcaaaacctaaaatcgcatttttaagtaataaagagctaaaagtttcaaatataattgcaaaaaaaattaagaaagacggaatttactttgcaggaatagactttattgatggaaagttaaatggagatataaatgtaacatcaccaacgggtataaaaacatactttgatttatctcagataaacttggctaagactttttggaaaggtttatag

SEQ ID NO: 312128 - DNA, 663 bp, Unknown
  Bacterial polypeptide expressing nucleotide sequence isolated from the Sargasso Sea
ctgttgatgaagattataataatgctcttcatttacttgatttagcaaaacataatggcgcagttatccataacaatccatgcgcattaaagaaatttaatgaaaaagtatttgcaacacattttcctgaatttataccaaaaacacttatttcatcaagcattaacaaaataagtgcttttttcgattcgcataagaaaataattattaaacctctagatggaatgggaggtacttcaatatataaagtagatgatttaaacgaagataatttaaagataataagaactatgacaaattctgaaaaaacacagattatttgtcagagttttattgaggatgtttatgaaggagatttcagaattcttataattaacggtaaaccatttccaaaaacacttgcaaggattccaaaagatggagatttcaagggtaatcttgctgcaggagggaaaggagtcgctaaagatataacagaaaatcaaaagaagattgccgaggcaattgcaccaatattagttaaaaatgagattagttttgctggaatagatatagttggaaaatatttaactgaaattaatattacaagcccaacttgtgcaagagaaatttttgatcaaacaaagatgaatcctatagaagaatactttaaaggcttatgag

SEQ ID NO: 312129 - DNA, 151 bp, Unknown
  Bacterial polypeptide expressing nucleotide sequence isolated from the Sargasso Sea
tttgttggtatagatataataggagattatctaacagaaattaatgtaacgagcccgacatgtataaaagaactagataacatatataatataaaaattgctgataaattaatgaatgttatagagaaaaaaacaaaagaaattatataaa

SEQ ID NO: 312130 - DNA, 882 bp, Unknown
  Bacterial polypeptide expressing nucleotide sequence isolated from the Sargasso Sea
tatgaccaataaaattgttgctatacaaggtgataatttaaaaaaaataaatatcaaaacagatactactatttttttagctaatgaagctcaaaacaagggttataaattattttattattatccagaaaatttatcgaatataagaggaaaaactgtaagtgaaggatattttattaaaattgattattcaaaaaagaaattttataaaattataaaaaaatcaaaattagacttatcctttgcaaaatatattttaatcagacaggatccaccttttaacttggaatatatttctacaacattaatgctagatagaatcaaagataaaacaaaaattgttaatgatcctacttcagtaagaaatatttcagaaaaattttattctttaaattttaaaaactatatggcagattcaatatttactaaagatttgattgaaattaaaaaatttttcaaaaaacataaaaagataataattaaacctattcatagctatggtggtaatgatataaatcttatttcagggaagcttaatttacttaaaataaaacaaatattgaaaaaacacggtcacattatgtgtcaaaaatttttaaataaaattaagtttggagataaaagagtttttattataaatggtaaagtttgcggagctatatctagagttccaaaatcaggatcaatattgagcaatatgagcaaaggtgcaaaacctaaaatcgcatttttaagtaataaagagctaaaagtttcaaatattattgcaaaaaaaattaagaaagacggaatatactttgcaggaatagacttcattgatggaaagttaaatggagatataaatgtaacatcaccaacgggtataaaaacatattttgatta

SEQ ID NO: 312131 - DNA, 793 bp, Unknown
  Bacterial polypeptide expressing nucleotide sequence isolated from the Sargasso Sea
tattgatggaggtattgtttataccgcttctagagaaattctttctgcaggctctacgcaggttgaaggaattataaaacaggtcgtaagattgtctgattttaaattttcttttatgcgtaaagacccacctgtaaatgaaaattatatcaatgcccttcattttcttggattagcagaaaaacaaggagcagtcgtatttaataaaccaacatcaattaaagaatttaacgagaaaatttttgcattacattttaaagaatttataccaaagactttaataacttccgatatagataaaatagaaaatttttttgaactccataaagcaataataattaagcctatagatggaatgggcggggcttcaatatataagattaatgaattaaatgaagaaaataaaagtttattaataaaaatgacaaattcagaacaaacccatattatttgccaggaatttatagaagagatatatgatggtgattttagaatacttatcattcatgggaaacctttccaaaaaacgttagctaggattcctcaaggcgatagttttaaaggcaatcttgctgctggtggcaggggcgaagctagagatattacagattatcaaacaatgattagtaagaaggtcggagaatatttaatagaaaagcatattaattttgctggaatagatatgattggcaaatatctaactgaaatcaatataacaagccccacttgtgcaagagaaattcttgatcaaacaggattgaacccaattacagaatatttcaaaggtttatga

SEQ ID NO: 312132 - DNA, 661 bp, Unknown
  Bacterial polypeptide expressing nucleotide sequence isolated from the Sargasso Sea
tatgtcatatattactaatacgcatattttagaaactctgcatcctaatacatttgtggttaataatccatttgaagtgagaaatgcgcctgaaaaattattggtaaataaatttaaggattttattcctgaaacattaattactagagacttggtagaaattaataaattcaaaaaagagcataaagaaataatagtaaagcccctttatggtaatggaggaaagcagatttttcatattagagaaaatgacccgaatttttcatctttattagaaatgttttttgaatattctaatgaacctctaataatacagaggtaccttcctgaggtaagaaatggagactgcagagttattatgatagatggagaaatagccggcgctgtaaatagaattccgccagaagggcaagcgaggtctaatttacatgtaggcggtaaagcagagaaaaaaattctcaataatagagagctcgaaatatgtgaagcactaagtgaagagttaaaaaagaaagaattaattctagtaggcttagatataattgggaattatttaacagaaataaatgtgacctccccaactggagtgcaagaaatatctagatttgatgattctaatattagctcaatgttctgggatgctgtcgaaagttatatttag

SEQ ID NO: 312133 - DNA, 271 bp, Unknown
  Bacterial polypeptide expressing nucleotide sequence isolated from the Sargasso Sea
gctatatctagagttccaaaatcaggatcaatattgagcaatatgagcaaaggtgcaaaacctaaaatagcatttttaagcaataaagaacttaaagtttcaaatataattgcaaaaaaaattaagaaagatggaatttactttgcagggatagactttattgatggaaagttaaatggagatataaatgtaacatcaccaacgggtataaaaacatattttgatttatctaagataaacttggctaagactttttggaaaggtttatagt

SEQ ID NO: 312134 - DNA, 277 bp, Unknown
  Bacterial polypeptide expressing nucleotide sequence isolated from the Sargasso Sea
gcacgtattcataaagataacaatgttaaagataattttcatgctggaggacaaccacgtaaaactgatttaatgtatagagacaaagagatttgtgatgccttaaggagcgaccttaagaagaaaaatctttttttagtaggaattgatacaattggaaattatcttacagaaatcaatgttacctctcctactgggctgaaacaaataaatgaacttaatgataccaatcttgaaaaaatttattggaacaaacttgaggaaaaatttttttaat

SEQ ID NO: 312135 - DNA, 809 bp, Unknown
  Bacterial polypeptide expressing nucleotide sequence isolated from the Sargasso Sea
ttattatccaggaaatttatcgaatataagagggaaaactgtaagtgagggatattttattaaaattgattattcaaaaaagaaattttataaaattctaaaaaaatcaaaaatagacttatcctttgcaaaatatattttaatcagacaggatccaccttttaacttggaatatatttctacaacattaatgttagatagaatcaaagataaaacaaaaattattaatgatcctacctcaataagaaatatttcagaaaaattttattctttaaattttaaaaactatatggcggatacaatatttacaaaagatttgtttgaaattaaaaaatttttcaaaaaacataaaaagataataattaaacctattcatagctatggtggcaacgatataaatcttatttcaggaaagcttaatgcattaaaaataaaacaaatattgaaaaaacacggtcacattatgtgccaaaaatttttaaataaaataaagtttggagataaaagagtttttataataaatggtaaagtttgtggagctatatctagagttccaaaatcaggatctatattaagcaatatgagcaagggtgcaaaacctaaaatcgcttttttaagtaataaagagttgaaggtttcaaaaattattgcaaaaaaaattaaaaaagatggaatttactttgcgggaatagactttattgatggaaaattaaatggagatataaatgtaacatcaccaacaggtataaaaacatactttgatttatctcagataaacttggctaagactttttggaaaggtttatagt

SEQ ID NO: 312136 - DNA, 265 bp, Unknown
  Bacterial polypeptide expressing nucleotide sequence isolated from the Sargasso Sea
aggggaaataagggctaatttacatgtaggagcaaaaccagcaaagggagtattatcaaaaaaagaaatagagatatgtaatgctgttggaccagttctcaaaaaatataatctttattttgctggaattgacgttattggaggaaaatacctaacagaaataaatgtaacgtcacccacagggcttcaagaaatcaataaatttgaaaacaaaaggtgtgaaattgatatttggaaatttatagaaagcaatataagtagttga

SEQ ID NO: 312137 - DNA, 889 bp, Unknown
  Bacterial polypeptide expressing nucleotide sequence isolated from the Sargasso Sea
cgacacgtccgtggccttcatccgagaggcgtggcgacggggtcaagcggtcgacacctgtgaggtcggagacctgggtcagcgcgacggggcgccgttcgtccgcgcgacggcgacgagcgccggcgcggacgtcggcggctgggcgtcggtcacctccgcgcggcgcgagccgctggctgcgtacgacgccgtttggatgcgcaaggacccgccgctggacgacgcgtacctgttcgcgacgctgctgatgtcgcgcgccgagggcccggtcatggtcaacgacccgtcggcgctccgcgacgagaacgagaagctgttcgccctcgagttccccgagctgtgtccgacgacgctggtgagccgcgacgtcgaggagctgctcgcgttccgagacgagctcggcggcgagatgatcgtcaagccgctcgacggcaacggggggcgggacgtgttccacctcacgcccggtgaccgcaacgcgcgggcgatcgtcgaggccggcaccggccacggcaggcgcctgctgatggcgcagcagtacctcccggccgtacgcgagggcgacaagcgcatcatcttgatcgagggcgagcctgcgggcgcggtgctgcgggtgcccgccgccgacgaagcgcgcgcgaacctccacgtcggcggccgcgccgtgcacgccgagctgaccgaacgggaccgcgagatctgcgcgcgcatcggtccgcggctgcgtgagaagggcgtcatcttcgccggcatcgacgtggtcggcgaccacctcaccgagatcaacatcaccagcccgaccggcgtgcgcgagatcgagcagctgagcggcgtcgcgctcgaggcgaaggtcctcgacgccgtcgaggtgcgccgagggtcatga

SEQ ID NO: 312138 - DNA, 619 bp, Unknown
  Bacterial polypeptide expressing nucleotide sequence isolated from the Sargasso Sea
ccattttcaacaattgttgtcaatgatccaacagcagtcagaaattctactgaaaaattatttacatttaattttaaagaattcatgccacctactttggtaactaaagatttaaaaataattgaagaatttttagataaagaagaagatattataaccaaacctctttatggtaatggaggagagggtatacatagatttgataaaagtaatttcaattctaaaatattagaggaatatttacagttacctattatggtccaaaaatttatcaatgagatagagcatggtgatagaagaattgtttttttcgatggtgaatattttggttctgtttctagaataccccaagaaggtaatgtgaaggcaaattttcatgctggtggcaaggcagttaaaactggcctagtttatagagataaagaaattatcgaaaatttgggaccaaaactaaaagaacataatctattttttgttggaattgatataattggaaattatttaactgaaataaacgtaacttcgcctacaggattgaagcaaattaatgcattaaataatgtaaatttagaaaaagatttttgggataagcttgaagcaaaatataaattagtttaat

SEQ ID NO: 312139 - DNA, 530 bp, Unknown
  Bacterial polypeptide expressing nucleotide sequence isolated from the Sargasso Sea
cccacttttggtacaaaaagatttaaaaattattgaagaatttttagataaagaagaagatattataactaaaccactttatggtaatggaggtgagggtatacataggtttgataaaagtaattttaattctaaaatattagaagaatatctacacttgcctataatggttcaaaaatttatcaatgagataaatgatggggacagaagagtagtttttttcgatggtgaatattacggttcagttgctagaatacctcaggaaggtaatgtaagggcaaattttcatgctggcggtaaggcagttaaaactggcttagtttatagagataaagaaattattgaaattttgggaccaaaactaaaagagcataatctattttttgttggaattgatataattggaaattatctaacagaaataaacgtaacttcacctacgggattgaagcaaattaatgcattaaataatgtaaatttagaaaaagatttttgggataagcttgaagcaaaatataaattagtttaat

SEQ ID NO: 312140 - DNA, 583 bp, Unknown
  Bacterial polypeptide expressing nucleotide sequence isolated from the Sargasso Sea
taatgatcctacttcagtaagaaatatttcagaaaaattttattctttaaattttaaaaattatatggcggatacaatatttactaaagatttgattgaaattaaaaaatttttcaaaaaacataaaaagataataattaaacctattcatagctatggtggcaatgatataaatcttatttcaggaaagcttaatttgcttaaaataaaacaaatattgaaaaaacatggtcacattatgtgtcaaaaatttttaaataaaattaagtttggagataaaagagtttttattataaatggcaaggtttgtggagctatatctagagttccaaaatcaggatcaatattgagcaatatgagcaaaggtgcaaaacctaaaatcgcatttttaagtaataaagagctaaaagtttcaaatattattgcaaaaaaaattaagaaagacggaatatactttgcaggaatagacttcattgatggaaagttaaatggagatataaatgtaacatcaccaacgggtataaaaacatattttgatttatctcagataaacttggctaagactttttggaaaggtttatag

SEQ ID NO: 312141 - DNA, 832 bp, Unknown
  Bacterial polypeptide expressing nucleotide sequence isolated from the Sargasso Sea
taaaaaatataaaattttttattatgatccaaaaaacttatcagttgttaattcaaaagttatagccaagggttttttcattaaatttaactatagacaaaaaaaattctataaaatcttaaaaaaacaaaatttagatttaacaaaatgtaaatttcttcttattcgccaagatccaccttttaatcttgagtatatttcaacaacatatattttggataaaattaagagaaaagttaaaataattaataaccccacctcaattaggaatatttctgaaaaattgtattcatctaaatatcaaaaatatatgcctgctactatttttactcaaaatatggatgaaataaaaaaatttttcaaaaaaaacaaaaaagtaattttaaagcccattcatagtttcagtggaaatgatattcatttactaactaaatttaattcaaaattaattaataaatttataaaaaaaaatgatcatatcatgtgtcagcaatttcttcctagaataagtaaaggagataaaagagtctttattattaatggaaaagtatgtggtgcaatttcaagagtaccaaaaaaaggttcgattttaagcaatatgagtaaaggagcaaaaccaactaatatcagattaacaagtaaagaaaataaggtttcaaaactaattgcaaaagatttaatgaaagaaaatattttttttgcaggaattgattttatagatcaaaaacttaatggagacataaatgttacatctccaactggaatcaaaacactttatgatctatcagggataaatttagctaaaactttttggaaagaacttaaggcgtga

SEQ ID NO: 312142 - DNA, 839 bp, Unknown
  Bacterial polypeptide expressing nucleotide sequence isolated from the Sargasso Sea
tatgacagataaagttttatttataaccgatacctacaaggatttaaatataaaaaaagatacttcaatattgatgatggaggagacaattaagcttgggtttaatacctttcaatgtgagattaacgatctatatattgatgaaggtatggtttatgctgcctctagaaaaattctttctgcaggttctgctcaggttgaaggaatttcaaaacaagaaataagattatctgattttaaattttcttttatgcgtaaagatccgcctgtaaatgaaaattatatgaatgccctccatttgcttggattagctgaaaaacaaggagctgttgtattcaataaaccaacagcaattaaagaatttaatgaaaaaatttttgcgttacatttcaaagaatttattccgaagactttagtaacttctgatataaataaaatagaagatttttttgaacttcataagacaataataattaaacctgtagatggaatgggcggggcttcaatatataaaattgatgaattaaatgaggaaaataaagacctattaatgaaaatgacaaattcccaacaaacccatattatttgccaagaattcatagaagatatatacgatggtgattttagaatacttattatccatggaaaacccttccaaaagacattagctaggatacctcaaggtaatagttttaaaggtaatcttgccgctgggggtagaggtgaggctagagacatttcagattatcaaaaaatgataggtgaaaaggttggagagttcttgatagaaaagcatattaattttgctgggatagatgtgattggtaagcacttaactg

SEQ ID NO: 312143 - DNA, 346 bp, Unknown
  Bacterial polypeptide expressing nucleotide sequence isolated from the Sargasso Sea
atgtgtcaaaaatttttgaataaaattaagtttggagataaaagagttttcattataaatggtaaagtttgtggagctatatctagagttccaaaatcaggatctatattaagcaatatgagcaaaggtgcaaaacctaaaattgcatttttaaataataaagaacagaaagtttcaaatattatagcaaaaaaaattaagaaagatgggatttactttgcaggtatagactttattgatggaaaattaaatggagatataaacgtaacatcaccaacaggtataaaaacatattttgatttatcgcggataaacttggctaagactttttggaaaggtttatagt

SEQ ID NO: 312144 - DNA, 463 bp, Unknown
  Bacterial polypeptide expressing nucleotide sequence isolated from the Sargasso Sea
atgaaactagctgttgtgatggatcccattgagcgaatcaaaccagagaaagatggaacgctcgacttgctgctttcagctcaatcatttggttatgaactcacacgatttcactcagaagaactcaaaatcatagatggaaggcccttgggtatcgggcggtcaatcaccgtaaatgatgatgtaaaaaattggtttgcctatggaacagaaaatgaattctgcctgagtgactttgacgtaatactcatgagaaaggaccctccatttgatatggagtatatatatgcgacatatattctagatctggcaaaaatgggtggtgctaaagttatcaatgatccctctgcgatcagaaatttaaatgaaaaagtttcaattactatgtttccgagtgtcacacctcccaccttggtgacatccaatcaaagtgatctggaatcttttgtgaatcagcaagaaa

SEQ ID NO: 312145 - DNA, 829 bp, Unknown
  Bacterial polypeptide expressing nucleotide sequence isolated from the Sargasso Sea
aagggttataaattattttattattatccagaaaatttatcgaatataagaggaaaaactgtaagtgaaggatattttattaaaattgattattcaaaaaagaaattttataaaattataaaaaaatcaaaattagacttatcctttgcaaaatatattttaattagacaggatccaccttttaacttggaatatatttctacaacattaatgttagatagaattaaagataaaacaaaaattattaatgaccccacttcagtaagaaatatttcggaaaaattttattctttaaattttaaaaattatatggcggatacaatatttactaaagatttgattgaaattaaaaaatttttcaaaaaacataaaaagataataattaaacctattcatagctatggtggcaatgatataaatcttatttcagggaagcttaatttacttaaaataaaacaaatattgaaaaagcacggtcacattatgtgtcaaaaatttttaaataaaattaggtttggagataaaagagtttttattataaatggtaaggtttgcggagctatatctagagttccaaaatcaggatcaatattgagcaatatgagcaaaggtgcaaaacctaaaatcgcatttttaagtaataaagagctaaaagtttcaaatataattgcaaaaaaaattaagaaagatggaatttactttgcaggaatagactttattgatggaaagttaaatggagatataaatgtaacatcaccaacgggtataaaaacatactttgatttatctcagataaacttggctaagactttttggaaaggtttatagt

SEQ ID NO: 312146 - DNA, 252 bp, Unknown
  Bacterial polypeptide expressing nucleotide sequence isolated from the Sargasso Sea
aaatttttcatgctggtggtaaggcatctaaaactgacctagtttatagagacaaagaaattattgaaaatttgggaccgaaactaaaagagcacaatctcttttttgttggaattgatataattggaaattatctaacagaaataaacgtaacttcacctacaggattgaagcaaattaatgcattaaacaatgtaaaattagagaaagatttttgggataagcttgaagcaaaatataaattagtttaat

SEQ ID NO: 312147 - DNA, 286 bp, Unknown
  Bacterial polypeptide expressing nucleotide sequence isolated from the Sargasso Sea
gccaattgcagccttgagaaggatacctaagaataacgaaatacgctcaaatattcatgtgggaggaaattgcgaagcagtcaaaatatcaagacaagatttaaatatttgtaatgaaattaaagcttttttaaaagatgaaggacttttttttgtaggcattgatgtaattggtaaatatttaacggaaataaatgttacgtcaccaacctgcatacaagaaatcaaaaaacttcataagattgatatatcaaaaataatttgggatcagcttttaaaaaaataa

SEQ ID NO: 312148 - DNA, 803 bp, Unknown
  Bacterial polypeptide expressing nucleotide sequence isolated from the Sargasso Sea
tatgggcagctcaattttattcataacagacccctttgattctctaaaacaagaaaaagatacttctatatttattatgaaagaggcatttaagagaaattttgaagtttttcagtgtgagatgagtgatctcacgcttaatcaaagactatcatcacaatgctcacaagttattaataataataacaatctagagatagcaaaaagaaatctaattgatctagcaagtttttcattttgttttatgagaaaagatccaccggttgatcaagactatatgaattgtttgcatctattaaatatagcatcgcaggatggagtcaatataattaacagcccaaatgccattaaaatctttaacgaaaagatttttgcgatggaatttagcgatcttatgcctcccacaattatttcagcagattcaacaaaaatagaagaattcttaaaaattcatgaggagattgtcataaaacctctcaatggaatgggcggtgataatattcacaaggtttcaagtaatgacccagaaagtttaggaaaaataatagacctaacagaagactctaggatacaaattattggtcaaaaatttcttccaaagattaatgaaggagactttaggattctggtgatagatggaaaaccatttgagtattgcttggccagaataccaaaggaaggatcgtttctaggaaatttggctcaaggaggcaagggagttgcaaagaaaattacttctaatcaaagagaaattggagaaaaagttggagccagattaaaaagtgagaatatacttttcgctg

SEQ ID NO: 312149 - DNA, 199 bp, Unknown
  Bacterial polypeptide expressing nucleotide sequence isolated from the Sargasso Sea
agaaattatttgaaaattttgggaccaaaactaaaagaacataatctattttttgttggaattgatataattggaaattatttaactgaaataaacgtaacttcgcctacaggattgaagcaaattaatgcattaaataatgtaaatttagaaaaagatttttgggataagcttgaagcaaaatataaattagtttaat

SEQ ID NO: 312150 - DNA, 346 bp, Unknown
  Bacterial polypeptide expressing nucleotide sequence isolated from the Sargasso Sea
tatgtgtcaaaaatttttaaataaaattaagtttggagataaaagagtttttattataaatggtaaggtttgtggagctatatctagagttccaaaatctggatcaatattgagcaatatgagcaaaggtgcaaaacctaaagtagcatttttaagtaataaagagctaaaagtttcaaatataattgcaaaaaaaattaagaaagatggaatttactttgcaggaatagactttattgatggaaagttaaatggagatataaatgtaacatcaccaacgggtataaaaacatactttgatttaactcggataaacttggctaagactttttggaaaggtttatag

SEQ ID NO: 312151 - DNA, 688 bp, Unknown
  Bacterial polypeptide expressing nucleotide sequence isolated from the Sargasso Sea
atgactgagaaagtactattcataacagatacatttgaaaatttaaatttcaaaaaagatacttcgatccttatgatcgaagaagctcttaaaaaagaaatgaatgtttttcagtgtgaaataaatgatttattcgtagataacaatgatgttttagtaaattgcagagagataaactctttaattgaagatattgatacagaagttaaaaaaattgatattgaccttaaagattttaaatattgttttatgagaaaggatcctcctgttgatgaagattataataatgctcttcatctacttgatttagctaaacataatggcgcagttatccataacaatccatgcgcattaaagaaatttaatgaaaaagtttttgcaacacattttcctgaatttataccaaaaacactcatatcatctagcattaacaaaataagagctttttttgattcgcataagaaaataattattaaacccctagatggaatgggaggtgcttcaatatataaagtagatgattttaacgaagataatttaaagataataagaaccatgacaaattctgaaaaaacacagattatttgccagagttttattgaggatgtttatgaaggagatttcagaattcttataattaatggcaagccatttccaaaaacacttgcaaggataccaaaagatggag

SEQ ID NO: 312152 - DNA, 655 bp, Unknown
  Bacterial polypeptide expressing nucleotide sequence isolated from the Sargasso Sea
tgagaattatataaatgctcttcatcttctaggactggcagaaaagcatggcgctattattcataacaaaccaaatgctattaaagaattcaatgagaagatattcgcaattcatttttcagaatatatacctagtacattggttacttcaaaaaaaagcaaaattgagaatttttataagacccataaaagcatcataatcaaaccactcgatggaatgggcggaacttcaatttacaagattgaaaattgggacgaagaaaaaatagaattaattgaacagatgacagattctgaaaagactcaaataatatgccagaaatttattgaagatatttatgatggagattacagaattttaattatcaatggcaagccttttgagaagacattagctagaattcctaaagagggaagttttaaaggtaatcttgcagcaggaggctatggtgaagctcgagatattacagactttcaaaaaagaattggtgaggagataggaaagattttaatggaaaatggcataagttttgctggaatagatattattggagaacttttaaccgaaataaatattacaagcccaacctgcgcaagagaaattcttgatcaaactaaaatgaatccaattaaagaatattttgcaggattatga

SEQ ID NO: 312153 - DNA, 820 bp, Unknown
  Bacterial polypeptide expressing nucleotide sequence isolated from the Sargasso Sea
gtgggccaacagctttttctgattgatccagtggcgcgcctgcgcccggataaagacagcagcgtggcgctgatgcaagccggtcagcgcgctggcgagacgatctgggtagcggagcccagcgatctggccgccggcgcgggcggcccgcaggtgcgggccacggccatcaacaccgaaccctggtacagcgccggtcagtgctgctggctgcctttgaaccacttccagcgggtgtggatgcgcaaggacccaccggtggatgaggcctacctctatgccacccatctgctggagctggcggaagcgtcaggggtgcaggtgctcaatcgcccggcgggactgcgggcctggaatgaaaagctcggtgccctgcaattccccgagctgatggcaccaacgctggtggcctcccaggtggaactgctcagcagctttgccagagagcattgcgaggtggtgctcaagcccctgggcggtcgtgccggccagggggtggtgcgcgccagcggttcagcccctggcctgggggccctgctggagctggtcacccagcagcagcgcctgccggtgatgatccaggccttcctgcccgaggttgatgccggcgataaacgcatcctgctggtgcagggggaaccgctgggggcggtgaaccgcaagcccaaggccggcgaattccgcagcaacctggcggtgggcggccaaccggaagccaccgaactgaccgagcgcgaacgacagatctgcgcggcgctgcggccggccctgatcgatgccggactcttctttgtcggcatcgatgtgatcgccgggcggc

SEQ ID NO: 312154 - DNA, 835 bp, Unknown
  Bacterial polypeptide expressing nucleotide sequence isolated from the Sargasso Sea
tcaatatttattatgaaagaggcattaagaagagatttcgaggtttttcagtgtgagatgagtgatttaacgcttaagcaaaaattgtcatcacaatgctcacaagttattaataataatgacattctagagacagcaaaaaagaatgaaattgatttagcaagtttttcattttgctttatgaggaaagatccgccggtagatcaagactacatgaattgcttgcatctattaaatatagcatcgcaggatggagctaatataattaacaatccaaatgccataaaaatctttaatgaaaagatttttgctacggaatttagcgatcttatgcctcccacaattgtttcagcagattcatcaaaaatagaagaattcttaagaattcatgaagagattgtcataaaacctcttaatgggatgggcggtgaaaatattcataaagtttcaactaatgacccgaaacgtttggaaaaaataatagatctaacggaaaactctaaaacacagattattggtcaaaaatttcttccaaagattaatgaaggagattttagagttctcgtgatagatggagaaccttttgagtattgcttggccagaataccaaaggatggatcatttctaggaaatttagcccagggcggtaagggagttgcaaagcaaattacttctaatcaaagagaaattgcgaaaaaagttggtaccagactcaaaagtgagaatatacttttcgctggtatcgacataattgatgacaaactaactgaaataaatataaccagtcccacctgcgcagttcaaatcttcgaccaaactggtgaaaacccaataa

SEQ ID NO: 312155 - DNA, 553 bp, Unknown
  Bacterial polypeptide expressing nucleotide sequence isolated from the Sargasso Sea
ttgaattttaaagaatttatgccacctactttagtaacaaaagatttaaaaattattgaagaatttttatataaagaagaagatattataaccaaaccactttatggtaatggaggggaggggatacatagatttgataaaagtaatttcaattctaaaatattagatgaatatttacacttgcctataatggtccaaaaatttatcaatgagatagagcatggagacaggagaatcgttttttttgatggagaatattttggttcagttgctagaatacctcaagaaggtaatttaaaggcaaatttccatgctggcggtaaggcaagtaagactgacctagtttatagagacaaagaaatcatcgaaaatttgggaccgaaactaaaagagcacaatctgttttttgttggcattgatataattggaaattatctaacagaaataaacgtaacttcacctacaggattgaagcaaattaatgcattaaacaatgtaaaattagagaaagatttttgggataagcttgaagcaaaatataaattagtttaat

SEQ ID NO: 312156 - DNA, 925 bp, Unknown
  Bacterial polypeptide expressing nucleotide sequence isolated from the Sargasso Sea
tatgaaatttctatttgtgatagacccaataaaaaatataaatccattaaaagattcgtctgcagcattaatgcaagcttcttctaagaaaaagatagaagtatggacttgtactcctcaagatctagaggcaagaggagatgaagtatgggcatcatcttggagagctgaagtttgtccatgggtctcttttaaagaaaataaatgtatccctcttactgaatttaattgtatttggatgagaaaagatcccccagtaaacgaggggtatttatatgcaactcatcttttggaagtggccgaaagaaaaggagtaaaagttataaataagccttcctcattacgtgcatggaacgaaaaattaggcgcattgaggtacagccatttgatggctccaacaatagttgcaagtaaagtaaaagatcttattaattttgcacaaaataatcatgatgttgttgttaaaccacttggcgggaaaggaggacaaggcgttattcgtctaactaaggattctccaggtattaaagcaatgattgaattaataacatcgcaagaagaattaccagtaatgatgcaaaaattcattccagaagtaaaagaaggggataaaagaataattattgttaacggagagccaattggatcaattaatagaatccctcaagggggggactttaggagtaatttagctatgggaggtaaagcagaaaaaacaaacctaacagctaaagaaaaaaaaatttgtactgagttatctcaacatttcaaagaagagggtttattctttgttggtatagatgtaataaatgggatgcttagtgaaattaatgtaacaagtccaacaggattaagagagatagaaactttatctaacaaaagcgtttcaaatcaagtaattgaaaaattattagaaattatttag

SEQ ID NO: 312157 - DNA, 928 bp, Unknown
  Bacterial polypeptide expressing nucleotide sequence isolated from the Sargasso Sea
tatgacaaataaaattgttgctattcaaggagatattccttccaagttaaatcctgaaacagatactagtatttttttagctaatgaaattcaaaataaaagctataaaattttctattatgagccaaaaaatctctcaattattaattcaaaagtggtagctaaaggatatttcgtaactattaattataataaaaaaaaattctttaaagttttaaaaaaaaagactcttgaacttgtaaaatgtaagtttattcttattcgtcaaaatccaccatttaatcttgagtatatctcaacaacttatattttagactcgataaaaactaaggttaaaataataaatgatccaacatctattagaagtatttctgaaaagttatactcgtctaggtatcaaaaatatatgcctaacactatatttactcaaaacattaatgaaattaaggctttttttaaaaaaaacaaaaaggtaatcttaaaacctattcatggttacagtggaaatgatattcatttattaaccagatttaaattaaatctaattaaaagatttgttaaaaaaaatggtcatattatgtgtcaaaaatatcttccaaaaataagtaatggagacaaaagagtttttgttataaacgggaaactatgtggtgttatttcaagaattccaaaaaaaggatcatttttaagcaatatgagtaagggtgcgaaagtaatcaatacaaaattaactaaagtagaaaagcaaatttcaaatttaattgctaaagatttaaaaaaagaaaacattttttttgctggaattgacttgattgatcaaaaacttaatggtgatataaatgttacatcccccacaggaataaaaacttactatgatttatcaggtaaaaatctagcaaaaactttttggaaagaacttaaagcatga

SEQ ID NO: 312158 - DNA, 934 bp, Unknown
  Bacterial polypeptide expressing nucleotide sequence isolated from the Sargasso Sea
gatgcaaggtacatcctcactgtttatcaccgactctttggatgaattaaatccaaaaaaagatacaaccatcttatgtatgcaagaagctttcaatatgggaagtcaaatttttcagtgtgagatgagtgatttgacatacaaagataaacaaacttgtgctggcttctctgcaattaaagatcctaatgatcatccgcagattagtgaacatgttaatctaataaaagcactgagggattttgactatgtttttatgagaaaggatcctccagtagacgaaaattttatgaatgctttgcatttgttatctcaggctgaatctgagggagccaatattattaatcgaccctcagcattacagaagttcaatgaaaagatttttgcacttcgattttctaactggatgcccgactcaagcgttatctgtaaagtggaagactttaaacaattcaaacagaaatattcgacaattattttaaagcctcttaatggtatgggtggagagtctatctacaaatttgatgaaagctcaacagatcatttagaaatttttagatcactaaccaataattaccaaagcatggtaatggtccaaaatttcttacctgaaatttatgatggagactatcggattttgatcattcacggcaagccgtttcccatagcactcgcaagaattcctcagggaggaagtttcaagggtaatcttgctgctggcggtataggtgaagcccgggaattatctgatgatcaggctcgagtcagcacagaaattggcaagttactattggaggagggcattttgtttgcaggaatcgatatgattggaaactatctaaccgaaataaatataacaagtcccacaggcgcaagggagattctctctcaaactggcaaaaatccaataaagaccctacttcaatcaatataa

SEQ ID NO: 312159 - DNA, 922 bp, Unknown
  Bacterial polypeptide expressing nucleotide sequence isolated from the Sargasso Sea
atgggaaactcaattttatttataacagacccctttaattctctaaaacaagaaaaagataccactatatttattatgaaagaggcattaagaagagattttgaggtttttcagtgtgagatgagagatcttacgcttaagcaaagattatcatcacaatgctcacaaattattaataataatgacattctagagacagctaaaaagaatgaaattgatttagcaattttttcattttgctttatgagaaaagatccgccggttgatcaagactatatgaattgtttgcatctattaaatatagctacgcaggatggagccaatataatcaacaatccaaatgccataaaaatttttaatgaaaagatttttgcttcggaatttagtgatcttatgcctccaacaattatttcagcagattcaatgaaaatagaagaattcttaagaattcatgaagagattgtcataaaacctcttaatgggatgggcggtgacaatattcacaaggtttcaactaatgacccaaaaagtttaggaaacataatagatctaacggaagactctaaaacacagattattggtcaaaaattccttccaaagattaatgaaggagattttagagttcttgtgatagatggagaaccttttgagtattgcttggctagaataccaaaggatggatcatttctaggaaatttagcacaaggaggtaagggagtagctaagaaaattacttccaatcagagagaaattggggaaaaagttggcgctagattaaaaagtgagaatatactttttgctggtatcgacataattgatgacaaactaactgaaataaatataactagtcctacgtgtgcagttgaaattttcgaccaaactggtgaaaacccaataacaaagatttttgattccctatgag

SEQ ID NO: 312160 - DNA, 922 bp, Unknown
  Bacterial polypeptide expressing nucleotide sequence isolated from the Sargasso Sea
atgggaaactcaattttattcataacagacccctttaattctctaaaacaagaaaaagatacttctatatttattatgaaagaggcattaagaagggattttgaggtttttcagtgtgagatgagtgatctaacgcataagcaaaaactatcatcacaatgctcacaaattattaataataatgacattctagagacagcaaaaaagaatgaaatttatttagcaagtttttcattgtgctttatgagaaaagatccaccggtcgatcaagactacatgaattgtttgcatctactaaatatagcatcgcaggatggagccaatataatcaacaatccaaatgccataaaaatctttaatgaaaagatttttgctatggaatttaacgatcttatgcctcccacaattatttcagcagattcaataaaaatagaagacttcttaaaaattcatcaagagattgtcataaaacctcttaatggaatgggcggtgataatattcacaaggtttcaactaatgacccaaaaagtttgggaaagataatagacctaacggaagactctaaaacacagattgttggccaaaaatttctttcaaagattaatgaaggagactttagggttcttgtgatagatggagaaccatttgagtattgcttggctagaataccaaaggacggatcatttctaggaaatttagcacaaggaggtaagggagtcgcaaagaaaattacttctaatcaaagagaaattgggaaaaaagttggtgccagactaaaaagtgagaatatactttttgctggtatcgacataattgatgacaaactaaccgaaataaatataactagtcctacctgcgcagttgaaatcttcgaccaaactggtgaaaacccgataacaaagatttttgattgcctatgag

SEQ ID NO: 312161 - DNA, 925 bp, Unknown
  Bacterial polypeptide expressing nucleotide sequence isolated from the Sargasso Sea
tatgaaatttctattcgtaatagatccaattaaaaatataaatcccttaaaagattcaactgctgctttaatgcaagcatcatcaaaaaaaaatattgaaatctggagttgtactcctcaagacctggaagctagaggtgatgaagtatgggcatcttccgtaaaagttgaagtaattccgtggatttctttcaaagagaatgattgcatacctctcgccgaatttaattgcatttggatgagaaaagatcctcctgtaaatgaggcttatttatatgcaacccatcttttagaagttgccgaaagaaaaggagtaaaagtaattaacaaaccctcatcgttaagagcgtggaatgaaaagctaggtgctttaagatacagccacttaatggcacctacaatagttgcgagtaaggtaaaagatcttattaattttgcaaatataaataatgaagtagtcataaaacctcttggaggaaaaggtggtcaaggtgttataaggataaataaaaattctccaggaattaaatcaatcattgaattaatcacttctcaagaagaattacccgttatgatgcaaaaatttattcctgaagtcatagagggtgataaaagaataattatcgtaaacggagaagcaattggatcaataaataggattcctcaaggaggcgattttaggagtaatttagcgatgggaggcaaggctgaacccacattattaacagaaaaagaaaaaagtatctgctcagaattatctcaacacttcaaagatgagggtttattttttgtaggtattgatgtaataaatggaatgcttagcgagattaatgtaaccagtccaacaggtttaagagaaatagaaaatttatccaataaaaatgtttcagaggaagttattgaaaaattagtagaaattatctag

SEQ ID NO: 312162 - DNA, 925 bp, Unknown
  Bacterial polypeptide expressing nucleotide sequence isolated from the Sargasso Sea
atgaccaataaaattgttgctatacaaggtgataatttaaaaaaaataaatatcaaaacagatactactatttttttagctcacgaagctcaaaacaagggttataaattattttattattatccagaaaatttatcgaatataagaggaaaaactgtaagtgaagggtattttattaaaattgattattcaaaaaagaaattttataaaattttaaaaaaatcaaaattagacttatcctttgcaaaatatattttaatcagacaggatccaccttttaacttagaatatatttctacaacattaatgttagatagaatcaaagataaaacaaaaattattaatgatcctacttcagtaagaaatatttcagaaaaattttattctttaaattttaaaaattatatggcggatacaatatttacaaaagatttatttgaaattaaaaaatttttcaaaaaacataaaaagataataattaaacctattcatagctatggtggcaacgatataaatcttatttcaggaaagcttaatgtattaaaaataaaacaaatattgaaaaaacatggtcacattatgtgccaaaaatttttaaataaaataaagtttggcgataaaagagtttttatcataaatggcaaagtttgtggagccatatctagagttccaaaatcaggatctatattaagcaatatgagcaagggtgcaaaacctaaaattgcatttttgagtaataaagagctgagagtttcaaagattattgcaaaaaaaattaagaaagacggaatttactttgcaggaatagactttattgatggaaagttaaatggagatataaacgtaacatcaccaacaggtataaaaacatattttgatttatctcagataaacttggctaagactttttggaaaggtttataat

SEQ ID NO: 312163 - DNA, 690 bp, Unknown
  Bacterial polypeptide expressing nucleotide sequence isolated from the Sargasso Sea
tgagaaaggaccctccatttgatatggagtatatatatgctacatatattctagatctggcaaaaatgggtggtgctaaagttattaatgatccctctgcgatcagaaatctaaatgaaaaagtttcaattaccatgtttccgagtgtcacacctcccaccttggtgacatccaatcaaagtgatctggaatcttttttgaatcagcaagaaaagattgtggtgaaaccacttgatggaatgggaggacgttcaatttttatcgttgaaaaaggcgagccaaataccaagacaatatttgaagaaatgacgagaaataatagcaaaaccatcatggctcaaaaatatataccagaaattaaagatggcgataaacggatacatcttgtatttgggaatcacgtagacatggcattggcaagagtcccttctgaaaaggatcatcgaggaaatcttgtgatgggtgcagttggagaagtaagaaaactcacacagcgtgatatcgaaatatgcaaaaccataggtggaacattgcttaaaggtggagtctatttcgcaggcattgatgtaatcggcgattatctaagcgaaataaatatcaccagtcctaccggaatgagagagatatcaaaaaattctgatgtgaatgtttctgatcgtttttttgaagcactccaaaaatcgaattgat

SEQ ID NO: 312164 - DNA, 928 bp, Unknown
  Bacterial polypeptide expressing nucleotide sequence isolated from the Sargasso Sea
atggaccacatatctagtattgatataaaaacagattcaacctatttgcttgctcttgaggcacaaagaagaggacatacagttcttcattatcaagtaaaagatctttttcttgaaaacaatatagtttatgcaaatacccaaaagctattattaaaaaaaaataccaaaaaattctttcaacttttaccaataaagaaaactaaacttactgacgtagatataatcttgatgagacaagatccgccatttaatatgaattatattactgctacccatttattagaaaaattacaaccaaatgtattcattttaaatgatccaaaaagtgtaagaaactcgccagaaaagttattagttacaaaatttaataaattaatgccgccaacactagtatcttctgatgaaaaagagatactaaggtttaaaaataaatataaagatatcattattaagccattatttggtaatggaggtgaaggtataattagaataaaaaatggtgaccaaaatttttcttcgatattcgaagttttaaataagatatacaatgaacccttaatgattcaaaaatttattaaagaagtttataaaggagataaaagaatagttctattaaatggcgaaattattggagctataaatagaattcctgctaaaggtgaaataagagcaaatatgcatgtgggagggaaaccaaaaaaaactactttatcaaagcaagaaattgagatttgtaatattataagcccagaattaaaaaaacataatctttatttagcgggtatagatgtaattggagaaaaatatctaacagaaattaacgttacatcccctacgggactgcaagaaataaacaaatttgataaaaaaagatgcgaaattgagatttggaattatatagaaaaaacaataaaaactcattaga

SEQ ID NO: 312165 - DNA, 130 bp, Unknown
  Bacterial polypeptide expressing nucleotide sequence isolated from the Sargasso Sea
catcgatgtcattgacggcatgttgagcgagatcaatgtcaccagcccgacgggcatccgcgaggtggaacggctgatgcagcagccgcttgccgatcaggtgatcgagcggctgcgtggactgctctga

SEQ ID NO: 312166 - DNA, 928 bp, Unknown
  Bacterial polypeptide expressing nucleotide sequence isolated from the Sargasso Sea
tatgaaaatagctgttcaaatggatcatgttagcaagcttagtattaagggtgatacaactctagctctttgcctagaggcccaaaaaagaaaatttaaattatatcagtatttgccagacaacctcacttttattgatgggcggctaaaagttgttgttgaggaacttaaactttttgatgattgtgaagacttttttgaactagggaaaccttttactgatgatttgaatagttttgacacagttttaatgagacaagaaccgccttttgatatgcattatataacttatacacatttactagatcatttagataaaaaagttcgtgtaatcaataatcctgtaagcgttaggaacgcaccagaaaaattattagtaactcattttgctgacctaatgcctaaaacaataatttctaagaattttgatgaaataaaagaatttgttagcaagctaaataaagtcgttctaaaacctctttatggtaaaggtggcgaaggcataatacttctagaatccaatgacaaaatgttcgataagaaattagagaattttttattgggtgagcatgaacccataatggctcaagaatatctgccaatagttaaaaagggtgataagcgaattatattgattaatggagagcctgttggttgtttaaatagaattccagccgaaggtgaatttagatcaaatctcggagttggcggcttgcctgagctttccgaattatcaccaagggatattgagatttgtcaaagaattagtaaaacattgatagattatgacctttattttgtaggtattgatgttattggagattttttgacagaaataaatgttacatgcccaacaggtgttaggcaaattaaagaactgggtggtccagatattgcaaaattattttgggataatattaattcttag

SEQ ID NO: 312167 - DNA, 373 bp, Unknown
  Bacterial polypeptide expressing nucleotide sequence isolated from the Sargasso Sea
aaagagccattaatggctcaaaaatacattccagagattgtagaaggtgatagaagaattattttaattgatggtgaatattgtggttcagttgcgcgcgttcctgaaagtaataatcttaaagctaattttcatgctggtggaaaacctaaaaaaactgatttagtatacagagataaggatatttgtgatgctttaaaagcagatttaatagaaaaaaatctttttttagtaggaattgatgtaattggaaattatttgactgaaattaacgtcacatctccaactggtttaaaacaaattaactcacttaataatgtcaatttggaaaaaatttactgggacaaattagaaaaaaaattttttaattaat

SEQ ID NO: 312168 - DNA, 919 bp, Unknown
  Bacterial polypeptide expressing nucleotide sequence isolated from the Sargasso Sea
gggaaactcaattttatttataacagacccctttgattctttaaaacaagaaaaagatacctctatatttattatgaaagaggcattaaaaagagattttgaggtttttcagtgtgagatgagcgatcttacgcttaagcaaagactatcatcacaatgctcacaaattattaaaaataatgacattctagagacagcaaaaaagaatgaaattaatttagcaagtttttcattttgctttatgagaaaagatccgccagttgatcaagactatatgaattgtttgcatctattaaatatagcttcgcaggatggagccaatataatcaacaatccaaatgccataaaaatctttaatgaaaagatttttgctatggaatttggcgatcttatgcctcccacaattatttcagcagattcaataaaaatagaaggattcttaagaactcatgaagagattgtcataaaacctcttaatgggatgggcggagataatattcacaaggtttcaactaatgacccaaaaagtttgggaaaagtaatagatctaacggaagactctaaaacacagattattggtcaaaagttccttccaaagattaatgaaggagattttagagttcttgtgatagatggagaaccttttgagtattgcttggctagaataccaaaggatggatcatttctaggaaatttagcacaaggaggtaagggagtagctaagaaaattacttctaatcagagagaaattggagaaaaagttggcgctagattaaaaagtgagaatatactttttgctggcatcgacataattgatgacaaactaactgaaataaatataactagtcctacgtgcgcagttgaaattttcaaccaaactggtgaaaacccaataacaaagatttttgattcactatga

SEQ ID NO: 312169 - DNA, 399 bp, Unknown
  Bacterial polypeptide expressing nucleotide sequence isolated from the Sargasso Sea
aatctgaaatggagactttattaaagatgacaaataatgaaagtactcaaatcatcactcaggaatttatagaagacatctatgagggcgatttccgaatattaataatccatggcaaaccattcaaaaaaacgttagcaagaattcctcaaggtgatagctttaaaggtaatttagcagcaggtggtaagggagtggttaaagatatttcagattttcaatttgagatggcatctgaaatcggtgatttccttatacaaaaagatattaattttgctggtatagatgtgattggaaattttcttactgaaatcaacgtaactagtccaacttgcgctagacaaattctagatcagtctggagaaaatccaattcaagaatattttgaaagactatgac

SEQ ID NO: 312170 - DNA, 922 bp, Unknown
  Bacterial polypeptide expressing nucleotide sequence isolated from the Sargasso Sea
gatgggaaactcaattttatttataacagacccctttgattctcttaaacaagaaaaagatacttctatattcattatgaaagaggcattaagaagggattttgaggtttttcagtgtgagatgaacgatctcacgctcaagcaaaaactatcatcacaatgcttacaaattattaataataatgacattctagagacagcacaaaagaatgaaattgatttagcaagtttttcattttgctttatgaggaaagatccgccggttgatcaagactacatgaactgtttgcatctattaaatatagcatcgcaggatggagccaatataatcaacaatccaaatgccataaaaatctttaatgaaaagatttttgctatggaatttaacgatcttatgcctcccacaattatttcagcagattcaacaaaaatagaagaattcttaaaaattcatgaagagattgtcataaagcctcttaatggaatgggtggtgacaatattcacaaggtctcaactaataacccaaaaagtttgggaaaaataatagacctaacggaagattctaaaacacagattattggtcaaaaatttcttccaaagattaatgaaggagactttaggattcttgtgatagatggagaaccatttgagtattgcttggctagaataccaaaggatggatcatttctaggaaatttagcacaaggaggtaagggaatcgcaaagaaaattacttctaatcaaagagaaattgggaaaaaagttggtgccaaattaaaaagtgagaatatactttttgctggtatcgacataattgatgacaaactaactgaaataaatataactagccctacctgcgcagttgaaatcttcgaccaaactggtgaaaacccaataacaaagatttttgatcctctatga

SEQ ID NO: 312171 - DNA, 559 bp, Unknown
  Bacterial polypeptide expressing nucleotide sequence isolated from the Sargasso Sea
aaaaatctttgcagttcattttccagaatttattcctgatacactcgtgtcatcaaaaatatcagaaataaaaaagttttattcttctcataaagagataattattaaacctcttgatggcatgggaggaacttcaatatttaaaattaatgatttaaatactgaaagcttaaatattattaaagacttaacaaactcagaagaaactcaaattatttgtcaggaatttattgaggacatttatgagggtgattttagaatacttataattaatggaaagccatttcaaaagactttggcgagagtgccacaatctggaagtttcaagggaaatcttgctgcaggtggaaaaggtattgcaaaagatataacatcagttcagcaaaaaattgctgaaaagatcgctccagtcttagtaaaaaatggaattagccttgctggcattgatgttattggcaaatatttaactgaaattaatataacaagcccaacatgcgcaagagaaatatttgaacaaacaaaaattaatcctatatctgagtactttgaggggttatga

SEQ ID NO: 312172 - DNA, 607 bp, Unknown
  Bacterial polypeptide expressing nucleotide sequence isolated from the Sargasso Sea
tggcgcagttatccataacaatccatgcgcattaaagaaatttaatgaaaaagtatttgcaacatattttcctgaatttataccaaaaacactcatttcatctagcattaacaaaataagagcttttttcgattcgcataagaaaataattattaaacctctagacggaatgggaggtacttcaatatataaagtagatgatttaaacgaagataatttaaaaataataagaactatgacaaattctgaaaaaacacagattatttgtcagagttttattgaggatgtttatgaaggagatttcagaattcttataattaatggcaagccatttccaaaaacacttgcaaggattccaaaagatggagacttcaagggcaatcttgctgcaggagggaaaggagtcgctaaagatataacagaaaatcaaaagaagattgccgaggcaattgcaccaatattagttaaaaatgagattagttttgctggaatagatatagttggaaaatatttaactgaaattaatattacaagcccaacttgtgcaagagaaattcttgatcaaacacagatgaatccgatagaagaatactttaaaggcttatga

SEQ ID NO: 312173 - DNA, 1418 bp, Unknown
  Bacterial polypeptide expressing nucleotide sequence isolated from the Sargasso Sea
ggcaaagaatgagagcaaggccagctttggagacgacagaatttttgcagaaaaatttatcacagaaccgcatcacatagaaattcaaattcttgctgataaaaaaggcaatgctatcttcttaggtgagcgagaatgctcaatccaaaggagacatcagaaagtagtcgaagaggcgccctccccatttatcaatgatcaaacaaggcaagagatgggtgcacaagccatagcactagcaaaagcagtggattatgagtctgccggtactgttgagtttattgttgacaaaaatcagaatttttatttcctagaaatgaataccagattacaagttgagcaccctgttactgaaatggtaacaggtattgatttggtagaacaaatgatcaaggtagcttatggagaagagcttgaatttaaacaaagtgatataaaaaccaacggatgggcgattgaatcaagagtatatgctgaagatccatatcgagaatttatgccctcaattggaagattatcaaaatacttaaccccagatcattcagaaaatgtcagagttgatacaggcattcgggaaggcagtgaagtatccatgttttatgatcctatgattgcaaaattgattactcatggcgaaaacagagacaaggcaattgaaaatatgatgagtgcaatagatcagtacgtcattgatggcctgtctcataatctcaatttcctcagctcaatcatgcacaatgaaacctttcaatctggatacacaacaacagattttattgagcaagaatactctgatggcttcaaaggcgaggcgatcactgagaaagaatttgaagtttttgcatccatattgggtgcttgtcatcttttagatcaaatgaagcttaattttctttatgtgaatgagaaaaaatttattgtgagttttgaggagcaaaatattgaaatcaacataaaaaaagatggggataattttgtaactcatgtcgacaacaatgaataccatttatctctcaattcacaatccaatgatccaagaattacatgtttggttaatgggcaaaatatggtggttcaagtcagaaaagagaagcctagatatcagctagttcacaaagggaagattgcaatggcattgatatcagagcaaagggtcgcagaactcaatgagctaatgccggaaaagattcctcaagacatgtcaaaatttttactctcgccgatgccgggattattaataaaagtatgtgtaaaagaaggacaggaagtcaaagcaggagaagagcttgctgttgtagaggccatgaaaatggagaacagtcttagagcatcaaaagatctaaaaattaaatcgatattgggatcagaaggagataatctatcagtggaccaaaaaattctggagtttgaggactaac

SEQ ID NO: 312174 - DNA, 267 bp, Unknown
  Bacterial polypeptide expressing nucleotide sequence isolated from the Sargasso Sea
tcgcaggtgaaacaagatcaaatatgcacgttggtggacaagctcaacctgtaaaattaactgaacgagatagagaaatctgcaaagtgattggacctatattgaaaaataagggacagatttttgttggtatagatgtaataggtaaatatttaaccgaaataaatgtaacttcaccaacaggcatacaagaacttgaacgttttgatcatattaatgtagcagaaattatttggcaaacattagaagagaaatttaaaaattgac

SEQ ID NO: 312175 - DNA, 573 bp, Unknown
  Bacterial polypeptide expressing nucleotide sequence isolated from the Sargasso Sea
agcatattatgatgaattttccagagttaactccacctacattaatatcttcaaatatagaaataatcacaaagtttataaaaaaaaataaagaagtaattataaaaccagcctacggaaatggagggcttggaatacaaaaaatttattttaataaaccaaatctcaatctatttatcaaaaactatcttaaaaaattttttaatagcccaatcattgttcaaagatttttaaaaaattttaataaaggtgataaaagaattattttaattaacggaaaaatagctggtggagttttaagggtaccaaaaactaatagtattaaggctaattttcacgcaggtggtaagcctgtaaaaacgaatatcactttaaaagaaaagcttatttgtaagaaaataaagccatttcttataaaaaatggtttaatttttgttggtattgacgtaattgatggctatttaacagaaataaatattacatctcctacaggaattcaagaaatcaatagattgaataatagcaagattgaaaaagatattattgattttgtatctaaatcactgcagtaga

SEQ ID NO: 312176 - DNA, 937 bp, Unknown
  Bacterial polypeptide expressing nucleotide sequence isolated from the Sargasso Sea
atgcatttcctaatgatccctttagaaaaactgattcttaaaggagatacaacattgcttcttgcctttgaggcacaaagacgaaaacataagataagtttttttaaaccagatgatttgattttaaaatctaatgatgtgtttgcaaatatttgtaagttagaattattttctgaaaaatgtttaaatgaatttaaatattatgaaaaaacaataagatcgttaaaagagtatgatgtcgttatgatgagacaggatcctccttttaatatggcttatataactgcaacacatattcttgaaaaggttccatattcgacattagttgttaataacccttttgaagtaagaaattcaccagaaaaattatttgttactaatttttcacatttaatgcctcaaactttaataactagaaatattaatgctattagagactttagagaaaattttaaaaatattataataaaacccctatatgggaatggtggacaaggtgtctttcatgtccttcctgaagatgaaaattttaattcaatattagaaatgttttttagtcaaagtacggaacctttaatgatacaagaatatctaaaagatgttagagatggagataaaaggattattctgttaaatggagaacctgtcggagcaattaatagaattcccaaaaaaggtgaaagtagatcaaacatgcatgttggtggaaagcctgaaaaaacaaaattaaccaaaagagaccaatttatatgcaatgaaatttcagaatctctaaaacaaagaggtttatactttgttggaatagatataattggggattatataacagaaataaatgtaacttccccaactggaattgtggaaataaaaaatttagactcattagcaattgaggaaatgttttgggctttcattgaaaataagttagaagtctaag

SEQ ID NO: 312177 - DNA, 741 bp, Unknown
  Bacterial polypeptide expressing nucleotide sequence isolated from the Sargasso Sea
attatttaattggttatcctaaacaagtaagggttgataatttcaattttgttttcattcgacaggatccgccttataacatggaatatatttcttctatgcatctcttagaacaagtaaaagggcctactaagtttatcaatcgtccaaatgggattagaaacgcaccagaaaaaatttcaatgctatcttataaagaaataatacctccaacagttatcactagagaaaaaaaagaaataaatgattttataaaacaaaatggaaaatgcgtaattaaacccctctacggcaatggaggtgaaagtatatttttacttgataaacatgatgaaaactataatcaaattatcgaacgtttcatagaccagcttaaagagccatttataattcaaaaatttcttccagaaatcaaaaatggagataaaagaataattcttgtcaatggagaaccaattgcagctttgagaaggatacccaagaacaacgaaatacgctcaaatattcacgtgggcggcaactgtgaagcggtcaaaatatcaagacaagatttaaatatttgtaaggaaatcaaaggatttttaaaagatgaaggacttttttttgtaggtattgatgtaattggtaaatatttaacggaaattaatgttacgtcaccaacctgcatacaagaaatcaaaaaacttcataagattgatatttcaaaaataatttgggatcagcttctaaaaactaattaat

SEQ ID NO: 312178 - DNA, 166 bp, Unknown
  Bacterial polypeptide expressing nucleotide sequence isolated from the Sargasso Sea
ccaacgttaaaaaaacagggtctactttttgtcggaattgatgtgatagggagacacttgaccgagatcaatgttacatctccaacaggcattcaagaactcactcggtttagcggcattaatgtcgcaaaaattatatgggaggccattgaatcaaaactataac

SEQ ID NO: 312179 - DNA, 749 bp, Unknown
  Bacterial polypeptide expressing nucleotide sequence isolated from the Sargasso Sea
tttaagtgaagatatcgatacagaagttaaaaaaattgatattgaccttaaagattttaaatattgttttatgagaaaggatcctcctgttgatgaagattataataatgctcttcatttacttgatttagctaaacataatggcgcagttatccataacaatccatgcgcattaaagaaatttaatgaaaaagtatttgcaacacattttcctgaatttataccaaaaacacttatttcatctagcattaacaaaattagagcttttttcgattcgcataagaaaataattattaaacctctagatggaatgggaggtacttcaatatataaagtagatgacttaaacgaagataatttaaaaataataagaactatgacaaattctgaaaaaacacagattatttgtcagagttttattgaggatgtttatgaaggagatttcagaattcttataattaatggcaagccatttccaaaaacacttgcaaggattccaaaagatggagacttcaagggcaatcttgctgcaggagggaaaggagttgctaaagatataacagaaaatcaaaagaagattgccgaggcaattgcaccaatattagttaaaaatgagattagttttgctggaatagatatagtcggaaaatatttaactgaaattaatattacaagcccaacttgtgcaagagaaattcttgatcaaacagagatgaatccgatagaagaatactttaaaggcctatgag

SEQ ID NO: 312180 - DNA, 489 bp, Unknown
  Bacterial polypeptide expressing nucleotide sequence isolated from the Sargasso Sea
ataaagacatcataataaaacctttatatggaaatggaggcgagggtgtgtttcgaataaaaccaaaagatgaaaactttaacacaattattgagatgttcttaaaacaacataaagagcaatttatggttcaagagtatttggctgatgttagaaagggggataaaagaatcattttgatagatggggaaacaatcggtggtgttaatagagtgcctgctgttggggatagcagatcaaatatgcatgctggtggaacaccaaaaaaaactaaattaactgccaatgatcatttgatttgtaaaactatttctccttttttaaaagagaagggtcttttttttgttgggatagatattattggcaaatacatcacagaaattaatgtaacttcaccaacaggaatccaagaaataaataaatttaacaaaataaaagttgaacaaattttttgggataaattagaaaaaaaattacttaaccattaga

SEQ ID NO: 312181 - DNA, 827 bp, Unknown
  Bacterial polypeptide expressing nucleotide sequence isolated from the Sargasso Sea
ccatccaaatgatttatacattgataatggattagttaaggctagaggtttttatatagagttatttgaacacgataaaaactattttaattttttaacggaaaagattgaaataaatttggaagaattcaaatttatttttttaagacaagatcctccatttaatatgcattatataacatccacttacctattagattgtctttcagatactactgttgttattaataatccaacctctgtgcgcaattgtactgaaaaaattctcccttttaaatttaaagaatttatgcctccaactcttatttcacaaaatataaaagatatcgaaagttttttaaatattcacaaagatgtcattacaaagccactatatggtaatggtggagaaggtataaatagaagtaataagggtagtcttataggtatcgatacagcaagtgaatatttagatatgccaataatagcacaaaaatatattcccgaaattaaagacggagatcgaagaataattttctttgatggagaatatgctggttctgttgcaagaattccaacaaagggaagtataaaagccaattttcatgctggtggaatagcaaaaaaaacagatttagtttttcgtgatcagcaaataatagaagcagttgggcctgaattaaaaaaacttgatcttttttttgtaggtattgatatcataggtaattttcttacagaaattaatgttacttcaccaactggtataaaacaaatcaatcaattaaataatgttaaactagagcaagtattttgggataaacttgaagcaaaatataaaatagtttaaa

SEQ ID NO: 312182 - DNA, 592 bp, Unknown
  Bacterial polypeptide expressing nucleotide sequence isolated from the Sargasso Sea
gtcttcaattagaaattcatctgaaaaaatatatccccttgaatttgaaaagtttatggcaccaacaataattactcagaatattgcttctataaaagagtttttattagaacataaagatattgttacaaaacccctttatggcaatggaggagaaggcatcttcagatcaagaatagaaaataataaattacaaggaattgatgaaagtaaaacaaatttaaatgagcccattattgttcaaaaatacattccagaaataattgaaggagatagaagaataattcttatagatggagaatatgctggatctgttgcaagaatacctgaaaaaaataatcttaaagctaattttcatgcaggcggaacgccccaaaaaactgaacttataagaaaagatgaagaaatttgtaatgccctatccaaagatttaaaactaaaggatctttttttagtaggaattgatgtaattggtgattatctaactgaaattaatgttacctctcctactggtttaaaacaaataaatctcttgaataaaataaaactagaaaaaatttattgggataaattagaaaacaaatttttttaa

SEQ ID NO: 312183 - DNA, 312 bp, Unknown
  Bacterial polypeptide expressing nucleotide sequence isolated from the Sargasso Sea
tgatgatgggaaagcctgtggaatacgcgcttgcaagaataccggctcctggtgaaactagaggaaatctggcggcgggtgcagaagcagagggtcgcaaactaacagaacgagatcgatggatatgctctgaagtaggtccagttctaaaaaaacaaggaataatattcgcaggtctagacgtcattggtgactatttgacagaaataaatgtcactagtccgacaggaattcgtgaacttgataggcaatacggcatagacatcgctgctatgcttatagaagctattgaaagaaaactagagaactaat

SEQ ID NO: 312184 - DNA, 804 bp, Unknown
  Bacterial polypeptide expressing nucleotide sequence isolated from the Sargasso Sea
tatgagtcttatcgtagctattcaaatggatcctattgaggccatcgacatagatgtcgacagcacttttataatggctttggaggcccaggcgcgaggccattgcctctatcactatttgccgcaggatttggttcttaataatggcagggtgatcgcgggcgtgcggccattgctggtgcgtcgggaaatggggaatcactttaccctcggcgcgcaggagtggattgatcttgctctcgtggatgttgtgctcatgcgtcaggacccgccatttgatatggcctatatcactgcaacccacctcttagagcatgttcacccggataccttggtggtgaatgatcccgttagtgtccgaaatgctccggaaaagttgttcatcactcattttccggagcttatgccaccgaccctcattacgtcgagcaaggagcaagttttagaattccgagacgagcataaggacctcattataaagccactgttcggcaatggcggcgcaggtgtatttcacatcgggcctggcgacgagaacctaaacgctcttttggagctgttcacggagctttatcgcgaaccgaccattgtgcaacgttacgagcctgccgtccgggatggtgacaaacgcattatcctaattgacggcaaaccagcgggcgcgttgaatcgggtccccgcgaatggtgaatcgcggtcaaatttgcatgttggcggtacggcgcaaaaagctgcgctcacaaagcgggagcgcgaaatctgcgaggctattggcccggccctcgccgagcgcgggcttatctt

SEQ ID NO: 312185 - DNA, 655 bp, Unknown
  Bacterial polypeptide expressing nucleotide sequence isolated from the Sargasso Sea
tacataacatctacttacttattagattgtatccctaatagtactgtcgttgtaaataatcctacttcagttcgtaattgcacagaaaaaattcttccttttaaatttaaagaatatatgccaccaactctaatttcacaaaatattaaagatattaaaaattttttaaacatgcacaaagatgtaattacaaaaccactatatggcaatgggggagagggcataaatagaagtaacgatgacaatcttgttggcattgaaacagtaaaagaatatttagatatgcctataatagcacagaaatatattcctgaaattaaagagggggatcgtagaataattttctttgatggggaatacgttggttctgtttcaagaattccaattgagggtagtattaaagctaactttcatgcgggtggaatagcaaaaaaaacagatttagtttttcgtgatagtgaaataatagaaaaagttggagcagaactaaaagaactcgatcttttttttgtgggcattgatattataggtaattttctaacagaaattaatgttacttcaccgactggtataaagcaaataaatcaattaaataatgttaaactagaacaagtattttgggataaacttgaagcaaaatataaaatagtttaaa

SEQ ID NO: 312186 - DNA, 545 bp, Unknown
  Bacterial polypeptide expressing nucleotide sequence isolated from the Sargasso Sea
caaaaaaataatacctgaaacaataattactaggtcaaaaaaagaagtgaaaagtttcataaaaaaatacggaaagtccgttataaagcctttatacggcaatggaggcgaaagcatatttctacttgatcaagatgatgaaaattataatcaaatcattgaaacgtttatagataagcaaaaagaaccattcattgtacaaaaatttcttagggaaataaaaaatggagataaaagaataattttaatcgatggaaaaccaatcgcagcattacgtagaattccaaaaaacaatgaaatcagatccaacattcacgtaggtggtagttgtgaggtaaccgaaatatctaaaaatgacctaagaatttgtaatgaaatcaaaaactttttacagagcgaaggccttttttttgtaggtattgacattattggtgaatatttaacagagattaatgtaacctctccaacatgtattcaagaaatcaaaaaacttcatggaattgatatatctgaggtaatatgggaccaactttctaaaaaataat

SEQ ID NO: 312187 - DNA, 379 bp, Unknown
  Bacterial polypeptide expressing nucleotide sequence isolated from the Sargasso Sea
catgtcttttagcgcagagccattaatgatacaaaaatatttgcctgaagttcgaaacggagataagcgcattatcctgatagacggagaacccgcgggtgcaacaaatcgagtccctgcttcaggggaggcgagatcaaatatgcatgtcggtgggcgagcagaaaaatctaaaattacagagcgggattttgaaatctgcgcaacaataggccctgaattacgaagacgtgggcttgtttttgtgggaatcgatgtaattggcaaatatttaacagaaataaacgtaacttcaccgaccggccttcaagaaatcaatcgttttaataaaactaaccttgagacatcaatttgggacgccatcgagtttcgattgtaa

SEQ ID NO: 312188 - DNA, 298 bp, Unknown
  Bacterial polypeptide expressing nucleotide sequence isolated from the Sargasso Sea
atgataaaactcggcatagtgatggaccccatcagtgagatcaacattaagaaagactccagttttgccatgctgatggcggcgcaggaaaggggttaccaactgttttatatggaaatggccgacctcgccatggtcaacggcgttgccatgggcaatatgcgtccattaaaggtcatcaatgatgccaataaatggttcgaattgggcgacgcccaagatacgccgctgagcgagcttaacgtagtgttaatgcgtaaagacccgccgttcgataccgaatttatctacgccactt

SEQ ID NO: 312189 - DNA, 631 bp, Unknown
  Bacterial polypeptide expressing nucleotide sequence isolated from the Sargasso Sea
tctaaaaaaactttaatcattaataatccctatgaagttaggaatgctccagaaacaatttttgtgactcaatttgaacaaataatgccaaaaactatgattaccagagatgtagagtctataaagttatttagagacaaatataaagacattataataaaacctttatatggaaatggaggcgagggtgtatttcgaataaaaccaaaagatgaaaactttaacacaattattgaaatgttcttaaaacaacataaagagcaatttgtggttcaagagtatttggctgatgttagaaagggagacaaaagaatcattttgatagatggggaaacaatcggtggggttaatagagtgcctgctgttggtgatagcagatcaaatatgcatgctggtggaacaccaaaaaaaactaaattaactgcaaatgatcatttgatttgtcaaactatttctccttttttaaaagagaagggtcttttttttgttgggatagatattattggcaaatacatcacagaaattaatgtaacttcaccaacaggaatccgagaaataaataaatttaacaaaataaaagttgaacaaattttttgggataaattagaaaaaaaattacttaaccattaaa

SEQ ID NO: 312190 - DNA, 755 bp, Unknown
  Bacterial polypeptide expressing nucleotide sequence isolated from the Sargasso Sea
attcgatgatagtgtagacttttttgagcttggagaaccttttgtcgatgatttaaatagttttgatactgttttaatgagacaagaaccgccctttgatatgcattacataacttatacacatttattagatcatttggataagagggttcgcgtaatcaataatccggttagtgtcagaaattctccagaaaaattattagtaactcattttatcgatttaatgcctaaaacaataatttcaaagaattttagcgaaataaaggaattttctaaaaaactaaataaagtggttctgaaaccattatatggtaaaggtggtgaaggaataatactcctagaagttgatgagcaaatgttcgataaaaaattaggagattttttatcgaatgaatatgagccaataatggtccaagaatatcttcctattgttaaaaaaggcgataagagaattattttaattaatggggagccagttggttgccttaatagagttccagccgaaggtgagtttagatcaaatcttggagtcggaggtttgcctgagctttctgaactgtcatcaagagatattgaaatttgtcaaagaattaggaaaacattaatagattacgatctttattttgtgggtattgatgttattggggattatttaacggaaataaatgttacttgccccacaggtgttagacaaattaaagagcttggtggtccagatatagcaaagttattttgggacaatatccagatttaat

SEQ ID NO: 312191 - DNA, 667 bp, Unknown
  Bacterial polypeptide expressing nucleotide sequence isolated from the Sargasso Sea
attggggtatataacgaatacgcacttactcgatttggttgctaaagaaactttgatagttaacaatccgttctgggtaaggaatttacccgaaaagttgctggttttggaattccctgatttgataccaaatacactaatttctcgtgatttagaggagatcaaagaattcaaacgtaaatttaaggatataattgtcaaaccactttacggtaatggtggagccggtatttttcggctgaaagaagatgataaaaacctgacatccttgcatgaacttttttctagtatgtcttcagaacctataattgctcaagcatttttacctgatgttaaaaatggtgataaacgtattatattggttgatggcgagcccgttggtgcaatcaatcgggtgccaaaagctggagagatcagatcaaacatgcacgttggtggaaaagctgaaccagcaaaattaagtcaaagagatagggaaatatgtagtgcaatagggcccacattaaaaagtaaaggccaggtttttgttggtattgatgttataggagagtacttgactgaaataaatgtaacttcgccgactgggatacaagaactagagcggttcgataatgtaaatatagcagaaatgatttggtacgcagttgaagaaaagctgaagaaatga

SEQ ID NO: 312192 - DNA, 820 bp, Unknown
  Bacterial polypeptide expressing nucleotide sequence isolated from the Sargasso Sea
gatgaggttgatattactgggggatacaagcttcagacttgccttggaagcacagaggcgagaacatcttgttcacgtttatcagccagaggatttaagctggaaagagggtgtagttagcgcaaaagtacaggcggtaacattaagggatgtggttggcaatcacgtaacgattggcccttcaaaaaccaccccattagaaatgtttgacgtcatattaatgcgtcaggatcccccctttgatatggcttatattacagctactcatctactagaacagcttccaaaaacaacgcaagtaattaacaacccaagagaagttcgaaacgcgccagaaaaacttctcgttactaattttcttgatttaatgcctcctacattaatcagcagcgatcttaacgaaataatttcctttcgagcgaagtataaggatattattatcaagccactttatggaaatggcggtgctggtgtattcaggcttcaacctaatgaccaaaatctaaattctttgctggagatgttttctggcatcagtagagagcctttaatgattcaagcgtacctgccagctgtgcaaaatggtgataagcgcattatgattgttgatggtagggctgttggtgctattaatcgaattcctgcagaaaacgaagcacgctccaatatgcatgttgggggtagggcagagccgtgtgagcttacagacagagatcactatatttgtgagaagattggaccaacgcttaaggcgcgcgggctattatttgtaggaattgatgttattggtgattatttaacagaaattaatgttacgtca

SEQ ID NO: 312193 - DNA, 433 bp, Unknown
  Bacterial polypeptide expressing nucleotide sequence isolated from the Sargasso Sea
ttttctattagatataaatgacaaaaatttcaatcaaataactgaaaattttgtaaaatttaaatctgaaccttttataatacagaaatttttacctgaaattcgaaaaggtgataaacgaattatcctggttgatggacagcctattgcggcaattagaagaattccaaaaaataatgaaataagagcaaatattcacgttggcggaagtacagaggctgtagaaatttccaaacaagataaaattatttgcaacgagattggagggtttctaagaaatgaaggacttttttttgtaggaattgatatcattggcaattatttaacagaaataaatgtaacttcaccaacatgtatacaggaaattaaacgtttgcataagcttgatgtggctaaaataatttgggatagtttgacaaatcccaataagtaa

SEQ ID NO: 312194 - DNA, 757 bp, Unknown
  Bacterial polypeptide expressing nucleotide sequence isolated from the Sargasso Sea
ccacttttcactttctgaaccgataaaagtatcaattaaggactttaaatttttttttattaggcaggaccctccttttgattctaattatttgacaaattgttatattttagaattacaccaaattaataataaaagtccattttttgtaaacaatccatcagctatcaaaaatttcacagaaaaaatatttccactttattttaatgatttaataccaaaaacttttattacatctaacccttcggagtttaaaagaattctgaatgatttaaagatagttgtggtcaagaaattatataataagggaggtgaaggtgtttataaaattaggttagatgactcaaatgcacttgatatttttaaaatgtgctccacaaactttacagaactacttgtagttcaagagtacatggatgaagtaatctttggagacaaaagaataattcttgtagacggaatacctaaaggcgctgtaaatagagtcccaaggatgggagagtttaaagcaaaccttcatttaggagcaaaagctgatagaacagaacttacattaaaagaaaaaaaaatttgtaatacattaaagaatactcttaaaaaaaataaattatttctagttggtatagatgtaataaatgaaaaacttacagaaataaatgtaacctctccaacaggacttgtccaaattagcaggctagaaaagaaaaatctagccggaattgtttggaaaagcttacttaaaaaatttgcactataa

SEQ ID NO: 312195 - DNA, 517 bp, Unknown
  Bacterial polypeptide expressing nucleotide sequence isolated from the Sargasso Sea
ataactagatctagaaaagaaatagatctttttatgagcagttgtaagagatctgttatcaagcctctttatggcaatggaggacagggcatttttttattagataagaatgacaaaaattataatcaaatcatcgagaagtttatagatgaagatagtgttcctttcatagtacaaaagtttctcccagatataattaagggcgataagagaataatacttattaatggtgaacccatcgcagcactaaaaagaattccaaaaaaaaatgagttcagatcaaatattcatgttgggggaagtaccaaggcagttgcattaacaagaaatgacataaaaatatgcaatataatcaaggaaacattgataagtgaaaagttattcttcgtgggcatcgatataattggaaactatcttacagaaattaatgttacctcaccaacttgtatccaagaaataaaaagagttcataagattgatattgccaaaataatttttgatagattaggctattaga

SEQ ID NO: 312196 - DNA, 607 bp, Unknown
  Bacterial polypeptide expressing nucleotide sequence isolated from the Sargasso Sea
aataatccattttatgtacgaaactgtcctgaaaagatttttgtaaataaatatatgaaatttatgcctcacacactgataacccgaaatgtaaatgaaataataaaatttcgagataaacatgaaaaaataataataaaaccactttatggtaatggtggggctaatgttttttattctgatagtgctgatagaaacttcggatcaataattgaaaattttttggagtcgagtaacgagccttttataattcagcagtttattccaaaagtcaaagatggtgataagagaataattctcattgatggggaaattgcaggggcgataaatcggttaccccaagacggggaaattaggtcaaatatgcatgttggggggctacctgctaaaactgaaataacagagggagacgctaaaatatgcaatgccatatcgcaagacctaaaggattttggtttattttttgccggaatagacgttattgataatcttataactgagattaatgtcacttcaccaactggaataagagaaattctccaactcagtggcattgatgtcgcaaaaatattttgggatcaggccgaaaaaaaaataaataattaga

SEQ ID NO: 312197 - DNA, 682 bp, Unknown
  Bacterial polypeptide expressing nucleotide sequence isolated from the Sargasso Sea
ttgcgtcaagatccacctttcgatatgaattatattactacgacatacattttagacctcttaccagatacaacaaaaattattaataatccaacagcagtaagaaatgccactgaaaaattatttacatttaattttgaagaatttatgccaccttcaattgtaacaaaaaatattaatgatattcttatttttttagatgattttggtgagattattactaaaccactttatggaaatggtggcttaggaattcatagatttaataaacaaaattttaatcctgacatcttaaaacaatatcttcatttaccaatcatgatacaaaaatatattaaagaaattgatcaaggtgatagaagattaattcttattgatggagaatattacggatctgttgccagaattccaaaagatggctacataaaagcaaattttcatgcaggaggcattccaagtaaaacagctttagtttttagagacaaggaaattatcgataaacttggaccaaaactgagaaaaaatgatctatttcttgtaggaattgatattattggtgattacttgactgaaattaatgttacttctccaacaggaattaagcaaatcaatacattaaacaatgtaaatctagagaaagttttttgggataagcttgaagcaaaatataaattagtttaat

SEQ ID NO: 312198 - DNA, 865 bp, Unknown
  Bacterial polypeptide expressing nucleotide sequence isolated from the Sargasso Sea
gtttacaactacatcttcttcagttgtatttgtggcaacaggtgataatggggaaattttgagatctactaacaaaggttcatcttttgataatgcaacttctccaacaggaaatcgtcttagaggagttacctttggaaacgacatcatctcagcaggtggtgtctcaggaaacatagtgagatcaacagataatggatcatcttttgataatgtaacttctccaacatcaagtaatctaaatggattcagttttggaaacgatatcttcgtagcggttggtaattcaggaaatatattgagatcaacagacaatggatccacttttgataatgtgacttcaccaacaggaaaaaatctatttggagttacttttggaaacgatatcttcctaggagttggtcaatcaggaaacattgtgagatcaacagacaatggatcatcttgggataatacgacttctcctactgggaataatctcaggagtatcgaattcggaaacgatatcttcgtagcagttggtgtttcaggaaacatagtgagatcaacagacaatggatccacttttgataatgtgacttcaccaacaggaaacaatctatttggagttacttttggaaacgatatcttcgtagcggttggtaattcaggaaatatattgagatcaacagacaatggatccacttttgataatgtgacttcaccaacaggaaaaaatctatttggagttacttttggaaacgatatcttcctaggagttggtcaatcaggaaacattgtgagatctactgacaatggttcatcttttgataatgcaacttctcctactgggactactttatatggagtttccttctcagaataa

SEQ ID NO: 312199 - DNA, 729 bp, Unknown
  Bacterial polypeptide expressing nucleotide sequence isolated from the Sargasso Sea
cagaaaaaattgttataaatttagaaatttttaaatttatttttcttagacaagatccaccttttaatatgaattatataacttctacttatctattagattgtttaccaagttcagttattgtgattaataaccctgctgctgttagaaacgccactgagaaaatttttccaataaatttttacaaatttatgcctaaaactattatttcaaatgatataatagagttaaaaaattttctggataataataacgatattgttattaaaccactttacggcaatggtggcgaaggtatttttaggataaatcacaaaaattttgataatgttttaaaggattataattttttagatttaccaattgttgctcaaaaatttattcccgaaattaagtatggtgatagaagaattatattattagatggtgaatatatagggtcagtagcaagaataccagaggaaggcagtattaaagctaattttcatgcaggaggtagtgccaaaaaaaccgatttggtttttagggatgaagaaattattagagaagttgggaaagaattaaaaaacaggaaccttttttttgttggaattgatctaataggtgattatcttacagaaattaatgttacttcacctacaggtataaaacagataaattctcttaataatattaagattgaaagtattttttgggataaacttgaagcaaaatacaaaatagtttaat

SEQ ID NO: 312200 - DNA, 562 bp, Unknown
  Bacterial polypeptide expressing nucleotide sequence isolated from the Sargasso Sea
gctacactgattagtcgtgacagcgatgccattcacgcatttcgagcgaaacataaagatattattgtcaaaccgctctttggcaatggtgggactggagtgtttcgtattcagccaaatgatcaaaatctaaattctctacttgagattttttttaccaacagccgtgaaccaattatgttacaggcctatcttcctgccgtacgagacggcgataaacgagttattttagtgaatggcgagccggtcggcgtggtcaatcgaattccgagggatggagaagtccgttcgaatttccatgttggtggcacggcggccgcggcgagattgacagcgagagatagacatatatgcgctaccatcggtcccgaattaaaacgccgcggcttattgttcgttggtatcgatataattggtatttatctgaccgaaattaacgtgacgtcaccaactggaattagggaaatccagcggctgtctaacattgacatcgcggcgataacgattgatgccatcgaacagcaacacccactaaacgctagcaatagtgccgtccgttaaa

SEQ ID NO: 312201 - DNA, 754 bp, Unknown
  Bacterial polypeptide expressing nucleotide sequence isolated from the Sargasso Sea
catatctccaccgtcaagatcggcggcgattcgacctttgccatgagcctcgaggcgcagaaccggggctataatctgttccactacacgcccgaccggctgagcctgcgcgacggcaaggtgtttgccacggtcgagccgatgacgctgcgggacaaggaaggcgaccactacacgctgggtgccgcggagcgggtcgacctttcgaccatggatgtggtgctgctcaggcaggacccgcccttcgacatggcctatatcacctccacgcacctgctggagcgcatccacccgaagacgctggtggtcaacgatccggcctgggtgcgcaactcaccggaaaagatcttcgtcaccgaattcgccgacctgatgccgccgacgctgatcaccaaggacgaaaacgaaatcaagcgcttccgcgaggaaatgggcgatatcatcctgaagccgctttacggcaatggcggcgcgggcgtgttccattccacccgcgacgatcgcaatttcacctcgcttctggaaatgttcgcgcagatgttccgcgagccttatatcgcccaggcctatctgccggccgtgcgcaagggcgacaagcgcatcattctcgtcgatggcgaattcgccggggcgatcaaccgcgtgccggccgagaccgacagccgctccaacatgcatgtcggcggtcgcgccgaggccgccggcctgaccgaacgtgaaaaggaaatcgcgcccgcatcggccctgcgctgaa

SEQ ID NO: 312202 - DNA, 587 bp, Unknown
  Bacterial polypeptide expressing nucleotide sequence isolated from the Sargasso Sea
aaattcgccagaaaagttatttgttactaatttttcacatttaatgcctaaaactttaataactagaaatattgatgctattagagacttcagagataattttaagaatattataataaaaccactatatggaaatggagggcaaggtgtctttcatgtccttcctgaagatgaaaattttaattctattttagaaatgttttttacccacaataacgaacctttagtgatacaagaatatttaaaagatgttagagatggggataaaaggattattttgttaaatggcaaacccgtaggagcaattaataggatacccaaaaaaggtgagagtagatcaaacatgcatgttggaggaaagcctgaaaaaacaaaattaactaaaagagacaattttatatgtaatgaaatttgtgaatccttgaaacaaaaaggtctttactttgttggtatagatataattggagattatataaccgaaataaatgtaacatccccgactggaattagggaaataaaaaatttagattcaatagcaattgaggatatgttttgggattttattgaaaacaaggttaaagggtaat

SEQ ID NO: 312203 - DNA, 868 bp, Unknown
  Bacterial polypeptide expressing nucleotide sequence isolated from the Sargasso Sea
acatcttatcttttaattatggaagctcaaaagagaggttatgaagttttttattttaatcctatagatcttcaattcaaccaaggtataattcaagcttggggattttttattgaggttttaaacgatagtaataatcactttaaatatattagtaaaaaaaaagagctgcttaatcttgcagattttaatgttgttttaattaggcaagatccaccttttgatatgaattatatttcttcaacttatattttagaaaaattaccgtcctcaactattgttttaaataatcctacttcaattagaaatgcagctgaaaaattttatccttttaaatttgaaaaatatataccaccaacaatagttacacaaaatattgaaatgattaaaaattttttaaatgaacataaggatatagtaacaaagccactttatggaaatggtggagaaggaatttatagatcaaaatttaatgattcaaatttaaatggcatagatgaaagtaaaaattttttagatgaaccaataatggcacaaagatatattccagaaataatagatggagatcgaagaataattttaattgatggtgaatattttggttcagttgctcgtattcctcaaaataataaactaaaagctaattttcatgcaggagggaagccaaaaaaaactgatttaatatatagagatcaagaaatatgtaatgtattaaaaaatgatctcaaagaaaaaaacctttttttagttggtatagatataataggtaattatttaactgagattaatgttacttctccaactggattaaaacaaataaatgaacttaataaaattaatttagaaaaagatttattgggacaaatta

SEQ ID NO: 312204 - DNA, 456 bp, Unknown
  Bacterial polypeptide expressing nucleotide sequence isolated from the Sargasso Sea
tatatggtaatggcggagagggcataaatagaagtaacaatggcattcttgtaggtattgaaacagcaagtgaatatttacatatgcctataatagtacagaaatatattcctgaaattcaagagggggatcgtagaataattttctttgatggtgaatacgttggctctgtatcgagaattccaattgagggtagtattaaagccaactttcatgctggtggaatagcaaaaaaaacagatttagtttttcgtgataatgaaataatagaagcagttggagcagaactaaaagaactcgatcttttttttgtcggaattgatgtcataggtaattttcttacagaaattaatgttacttcaccaactggtataaagcaaataaatcaattaaataatgttaaactagaacaagtattttgggataaacttgaagcaaaatataaaatagtttaaa

SEQ ID NO: 312205 - DNA, 389 bp, Unknown
  Bacterial polypeptide expressing nucleotide sequence isolated from the Sargasso Sea
cttgaccgataacggctctactcaagttatggcccagaaatacatacccgaaatcgtagaaggcgacaaacgcatcttgatgatcgatggagaacctctaccctgggcactagctcgaattccagcggctggggaatcaagagggaacctagccgcagggggaactggaatcgggcaacctctttctcaaagggataaagaaatagcaaaacaattaggacccgagctacgaaagaggggtctaaccttcgttggcatcgatgtaataggcgactatctaaccgagattaatgtaacttgccccacatgcatcagagagctagatcaacagttcgatgcaaacatttctgcagacttaatgaattgcatcgaaaataaattgagttaag

SEQ ID NO: 312206 - DNA, 283 bp, Unknown
  Bacterial polypeptide expressing nucleotide sequence isolated from the Sargasso Sea
ggtgcaacaaatcgaattcctgcttcaggagaggctagatcaaatatgcatgtaggtggccaagcagagaaatctaaactcacagagcgggattttgaaatctgcacaacaataggccctgaattacaaagacgtggacttatttttgtgggaatcgatgtaattggcaaatatttaactgaaataaacgtaacttcacctaccggccttcaagaaatcaatcgtttcgataaaactaatcttgagtcatcaatttgggatgctatcgagtttagattgtaat

SEQ ID NO: 312207 - DNA, 511 bp, Unknown
  Bacterial polypeptide expressing nucleotide sequence isolated from the Sargasso Sea
tttagatccagaaaaatagataattttataaaaaaatataaaaaaataattctcaaacctttgtttgggaatggaggtaaagatgttttttatttatcatttaaggacctaaatgtaaaagttattgtagagaagcttctagaaaatgatgtacacattatagttcaaaaatttattccacaagttattaaaggtgataaaagaattttattaattaatggtgatcctgtaggtgctgtaaatagaataccaaataaaaatgaaattagagcaaatctgcacataggtgctaaatccaaaaaagttgttatatctaaaagtgatttgcatatatgcaaaaaattaaggccttttcttagagaaaaaggtttgtatttcgcaggtatagacataattgatggctttcttacggaaataaatgtgacttctcctacctgcattagggaaattgataaatataataaagttaatatagcaagcattttctgggatggattagaaaaaacgtgat

SEQ ID NO: 312208 - DNA, 369 bp, Unknown
  Bacterial polypeptide expressing nucleotide sequence isolated from the Sargasso Sea
tgccagtaatgatgcaacaatttttaccagaagtaaaaaatggcgacaaaagaatccttttggttaatggagagccattaggcgcaattaatagacgtccaaaaaaaggagacttcagaagcaacctcgcattaggtgggaaagctgagataactgaattaactcctaaagaaatagagatatgtgatcaaataaagcctgctttacaagatgaagggctcttttttgttggtatagatgttattggaggaatgcttagtgagattaatgttacgagtccaactggtattagagaagtagaaaacctaatgaatattccattagcagatcaagtgattaattatcttattgatcatttgaacaattaac

SEQ ID NO: 312209 - DNA, 690 bp, Unknown
  Bacterial polypeptide expressing nucleotide sequence isolated from the Sargasso Sea
tatgggcctctcaatagccattcagatggataaagttgaaactctgcaaattgctagagacacaacatttgctcttggtttagaagcacaaaaacgaggtcacagactgtggtattacacaccagatttactcagcctaaacgaaggaattatatatgcccgcggacaagagcttgcattttacgacaaagtcgggggtcattttaaaacggggatgactgagatcaagtcattgcaagacttcgacattattctgatgcgtcaagacccaccttttgatatggcttacatcacagcaacttatttgctggaaatgttgagcccaaagacaatggtggttaacaacccagctgaggttcgcaattcgccagaaaaacttctcgtcacattatacccagatttgattcccccgacattaattagccgtgatcccgaggccataacggcatttcgacataaacacaaagatataattgttaaaccactttttggtaatggcggggcgggagtgtttcgaattcagcccgatgatctaaatttaaattcacttcttgagatgttttttaacctcaacctagaacccgtggtagtacaagcctacctgcccgcagtgcgcaatggcgataaacgcattatcttgattgatggagacccggttggcgcggtaaaccggattccgaatgacggcga

SEQ ID NO: 312210 - DNA, 596 bp, Unknown
  Bacterial polypeptide expressing nucleotide sequence isolated from the Sargasso Sea
atcactaagagcttggaatgaaaagttaggagctttaagatttagtgatttaatggcgcccactcttgtcgcaagtagggtggaacaattaattacatttgcaaaagagtatggagaagttgtgttaaagccacttggagggaaaggtgggcaaggagtcatacgaattgcaaaggatgctccaggcttagaagcattactcgaactggttacttcacaagaacatttgccagtgatgatgcaacaattcctaccagaagtaatcaatggcgataaaagaatccttttggttaatggagagccattaggtgcaattaatagacgtccaaaggaaggagactttagaagcaacttggctttaggtggaaaagctgagacaactaaattaactcctaaagaaatagagatatgtaatcaaataaagcctgctttacaagaggaaggcctattttttgttggaatagatgtgatcggaggaatgctaagtgagattaatgtgacgagtccaactggtattagagaagtagaaaatctaatgaatgttccattagcagatcaagtaattgattaccttatagatcatttgaacaattaac

SEQ ID NO: 312211 - DNA, 364 bp, Unknown
  Bacterial polypeptide expressing nucleotide sequence isolated from the Sargasso Sea
tatggctcaaaaatatattaaagaaatcaatcaaggtgataggagattaatactgattgatggtgaatactgtggatctgtagctaggattccaaaagatggtgatattaaagcaaattttcatgctggtggtaaagcaaaaaaaacagatttagtttttcgtgatagggaaattattgaatctgttggacctcaattagcaaagaataacctattttttgtaggaattgatattattggagattacctaaccgaaattaatgttacttctccaacaggaattaagcaaatcaatacactaaataatgttaatcttgaaaaacttttttgggataagcttgaagcaaaatataaattagtttaa

SEQ ID NO: 312212 - DNA, 916 bp, Unknown
  Bacterial polypeptide expressing nucleotide sequence isolated from the Sargasso Sea
aatggataaaattgaaactatagactatgagtttgatacttcttttttaattggttatgaagctcaacaacgaaactacaaaattttttattataatccaaatgatttaactattaaaaatggtaatgttgaagcaactggttactatataaaattaaacttggataaaaaaaattattttaaatatatttcagaaaaaataacagtaaatttaaaaaattttaattttatttttttacgtcaagatccaccttttgatatgaattatattacttcaacatatattttggatcttttaccagaaacaacaaaggtaattaataatcctacatctgttagaaattctactgaaaaattatttacatttaattttaaagaatttatgccgcctacgattgtcacaaaaaatattgatgatatttataattttttagaaaacgtacaagaaattatcacgaaaccactttatggaaatggcggagtaggtattcataaatttaataaacacaattttaatcctaaaattttagaaaaatatctacatttaccaattatgatacaaaaatttattgaagaaattgatgaaggagacagaagattgattctaattgatggagaatattgcggatctgttgctcggattcctgaaaaaggaaacataaaagcaaattttcatgcaggcggcattccgtataaaactgatttagtttttcgcgataaggaaattattgatgtggttgggccaaatctgattaagaataatctattttttgtaggaattgatattataggtgattatttaactgaagtaaatgtgacttctcctactggaattaagcagatcaatactctaaacaatgtcaatttagaaaaagttttgtgggataagcttgaagcaaaatataaattagtttaa

SEQ ID NO: 312213 - DNA, 559 bp, Unknown
  Bacterial polypeptide expressing nucleotide sequence isolated from the Sargasso Sea
agatttaaaaaatttattgccccaacattaattacacaagatattgaaactttaagaaaatttttatctaagcataaggacattgttaccaaacccttatatggtaatggtggagaaggaattttcagatcaacgattaaaaataataaattaaacggtattaatgaaagaaaaagaattttaaaaaatccaataatggctcaaaaatatatcccagaaattaaaaaaggagatagaagattgatattgattgatggtgactatgtaggatctgttgccagaatacctaaaaaagggaaacttaaggccaattttcatgcgggaggatttcctcaaaaaacaggtttggttaggcgtgataaagaaatttgtagagctttaaaaaaaatattaaaagacaacaaccttttttttgtaggtattgatattattggagattatttgacagaaattaacgttacatctcctaccggaattaaacaaattaatataattaataacactaatttagagaaaattttttgggacaaacttgaaacaaaatacaatatagtttaat

SEQ ID NO: 312214 - DNA, 393 bp, Unknown
  Bacterial polypeptide expressing nucleotide sequence isolated from the Sargasso Sea
tgacccagcacggtaagacgccgatcatggcgcaacgctttgtgccggaaattactgaaggggacaagcgcattctgatgatcaacggagagccggtgccctatgcgttggcgcggattcccaaagaaggcgagttacgaggcaatctggcggcgggggggactgggcagggccgggagttgagtgacagggatcgctggatttgtgaacaggtggggccgacgctgaagcgcaaaggactttattttgtggggctcgacgtaattggtgactacctcacagaaatcaatgtgactagccctacttgtgtccgagagttggatgcgatttttgatatcaacattgccgggcagttatttgacgctctgctcgagttgcggtcgacatcataga

SEQ ID NO: 312215 - DNA, 619 bp, Unknown
  Bacterial polypeptide expressing nucleotide sequence isolated from the Sargasso Sea
aacaatccaaagggtattaggaatgcgccagaaaaaatatctatgttagcttttaaaaaaataatacccccaaccatgattacaaaatcaagttcagaggtggcaaaatttataaaaagattcggtaaggcaattatcaaacccttatatggaaatggaggagagagtatatttttattagatgcaaatgataaaaattataatcagatcattgaaaattttattaattgcagaactgaaccgtttataatacaaaaatttttaccagaggtacgtaagggagataaaagaattattcttttagatggagaacccattgcagctataaaacgaatacctcccgttaacgacataagagcgaatattcatgttggaggaaaatcccaggcagtaaaaatttcaaagcaagatataattatatgtaatgagattagaggttttcttaaaaaagagggcttattttttgttggaattgatataataggaaattttttaactgaaataaatgtaacatctccaacttgtattcaagagataaaaaaattacacaaattagatatttcgaaattaatatgggaccggcttactaaaaaaaataattcattaaatttcaaatgag

SEQ ID NO: 312216 - DNA, 724 bp, Unknown
  Bacterial polypeptide expressing nucleotide sequence isolated from the Sargasso Sea
gatgaagttaggtgtggtaatggatccaatagaaactatcaattttaaaaaagatagtaccttggctatgatgatagaggctcaaagaaaagagcatgaaattttttatatgaccccagaatccttatttattgattctggtatggcttttgctagaacctctaaagtacaggtaaggaatgatccatcagattggtttagtcttgataaagagcaacttataaacttatcagaactggatgtgatcttgatgagacaagatcctccattcaattcatcttatatctacaatacatatgttctagaaatagcttctcgtgaaggagcaaaggtcttaaataatcctcaaagcttaagagattgtaacgaaaaagtttacgctactgaatttccgcagtgctgtactaaacatcttgtctcaagcgataaggagcttttaaagaatttcgtattagacaaaggggacacagtcatcaaacccttggatggcatgggtggtgcatctatctttagactaaaagaaggggatgctaatttaaatgtgatactggaaacaataacctatcatttcacagagaaagttatgattcaggaatatatacctgagataaccgaaggagataaaagaatactagttatcaatgggaagcctatgtcagctgctattgccagagttcctgctaaaggagaactaagaaggcacccttgcggcgggtgcctcagc

SEQ ID NO: 312217 - DNA, 925 bp, Unknown
  Bacterial polypeptide expressing nucleotide sequence isolated from the Sargasso Sea
aatgaataaagttctttttataacagatacatttaaagacttaaatgttaaaaaagacacctcaatattaatgattgaagaggctattaaaagagattttaatgtttatcagtgtgagactagtgatttattcataaatgatggagttgtttatgcaagttcaagaaatattctttcagctggatcaacccagatcgagggcattataaaagaagatataaaagtttgtgattttcatatgtcttttatgcggaaagatcctcctgtagatgagatttatattaacgctttgcatttacttggccttgctgagaaacaaggagcatctatttataataaaccaaattcaataaaagagtttaatgagaaaatttttgccttacattttaaaaaatttacacccaaaactcttgtaactgccaagatagataaaataaatgaattttttaaattgcacgaaaaaatagtcgtaaaacctcttgatggaatgggtggactgtcaatatataagtttgatcaaatgaatgaagaaaacttaaatattttaaagaatatgacagatgtggagcaaactcagattatttgtcaggaatttgttgaagatatatatcaaggagattacagagtattaatcattcatggaaagccctttagcaaaactttagcgagaattccccaagaaggtggttttaaaggtaatttggcagctggaggaaaaggtgtcgcaaaagatatcacagaatttcagagacaattaggtgaggagattggtgactatttaatgaaagtaggaattaattttgcaggaatagacattattggagaatatttgaccgaaataaatattacaagccctacctgcgcaagagaaattttagatcaaacagatatgaatccgatttcagaatattttcaaggactatga

SEQ ID NO: 312218 - DNA, 928 bp, Unknown
  Bacterial polypeptide expressing nucleotide sequence isolated from the Sargasso Sea
aatgaataaaaaagttttatttattactgatacgctcgaagagttagatcttaaaaaagatacttccattttaatgatggaagaatccataaaacttggctttgatgtctatcaatgtctggttgaagatctttatgctgaaaatagtgaagttattgtctttgcaaaaaaaataactacagccggctcatctgaaattaagtttgaggatgcctcaacacattcaataaaaacttttgaatattctttcatgagaaaagatcctcccgttgatgaagattatataaatgcacttcatttattaggtttagcacaggcaatgggaactaaggtttttaataatcctgtttctatcaaggaatttaatgaaaaagtatttgcgattcactttgcaaaatatattcctgagaccctaatatcgagcaaaatagataagataaagagttttataaaagataagaaagagattgttgttaaacctcttgatgggatgggaggtaaatcaatttataaaatggataaaattcagaactctgaaattaagactttattaaaaatgacaaataatgaaagtactcaaatcatcactcaggaatttatagaagacatctatgagggcgatttccgaatattaataatccatggcaaaccattcaaaaaaacgttagcaagaattcctcaaggtggtagctttaaaggtaatttagcagcaggtggtaagggagtggttaaagatatttcagattttcaatttgagatggcatctgaaatcggtgatttccttatacaaaaagatattaattttgctggtatagatgtgattggaaattttcttactgaaatcaacgtaactagtccaacttgcgctagacaaattctagatcagtctggagaaaatccaattcaagaatattttgaaaaactatga

SEQ ID NO: 312219 - DNA, 940 bp, Unknown
  Bacterial polypeptide expressing nucleotide sequence isolated from the Sargasso Sea
atgaaaaaaagtatagcaattcaaatggataatattgaaaagattgattatgaattcgatacatcttttttaataggttatgaggcacaagaaagagattatgatattttttattacaatccaaaagatttattcataaaagaaaatactattcaagcatctggatattatttagagctacagttagacgaaaaaaattattttaattttaaatctaataaaataattgccaaattagaggattttcaatttgtctttttaagacaggaccctccttttgatatgaattatattacatcgacttatattttggacttacttccatcttcaacaattgttgtaaatgatccaacagcagttagaaattctactgaaaaattatttacatttaattttaaagaatttatgccaccgactttggtaacaaaagatttaaaaattattgaagaatttttagataaagaagaagatattataaccaaaccactttatggtaatggaggagagggtatacatagatttgataaaactaatttcaattctaaaatattagacgaatatttacacttgcctataatggtgcaaaaatttataaatgagatagaacatggtgacaggagaattattttttttgatggtgaatattttggttcagttgccagaataccacaagaaggtaatttaaaggcaaattttcatgctggcggtaaggcaagtaaaactgacctagtttatagggaccaagaaattatcaaaaatttgggaccaaaactaaaaaaacataatctgttttttgtcggaattgatataattggaaattatctaacagaaataaatgtaacttcacctacaggattgaagcaaattaatgcattaaacaatgtaaaattagagaaagatttttgggataagcttgaagctaaatataaaatagtctaaa

SEQ ID NO: 312220 - DNA, 724 bp, Unknown
  Bacterial polypeptide expressing nucleotide sequence isolated from the Sargasso Sea
atgaaactaggtgttgttatggatccaatcgaatctatcaattttaaaaaagatagcactttagcaatgatgatcgaagctcaaagaaaaggtcacgaaattatttatattacctctgattctttgttcatcaaatcaggtattccctacgcaagttccaataaaattgaggttagaaatgatccgtcggactggttcacgaaagaagaggaaatagtaattgagctttgcaaattagattcaattttaatgcggcaagaccctccttttaattcaggatatatttataacacttacgttttagaaatggctgcaagacagggagttaatatctttaacaatcccagaagcttgagagactgtaatgaaaaggtttacgctaccgaatttcctcaatgttgcactaagcacattgttacaagccgcaaagatttgctaaccaattttgtaatggaaaataaagatactgtcattaagccgctagatggaatgggtggagcttctatttttagagtgaaggccaatgatccaaatctaaatgtcattttagaaacaataacccatcgattcactcaaaaggtaatgatccaagagtttatacctgaaatatctgaaggagataaacgtgttctaattgtgaatgggaaacctatgagcgcttccattgccagagttcctgcggagggtgaactccgaggcaacttagctgcgggtgcttctgcgg

SEQ ID NO: 312221 - DNA, 949 bp, Unknown
  Bacterial polypeptide expressing nucleotide sequence isolated from the Sargasso Sea
tatgaagttaggtgtggtgatggatccgatagaatccataaattttaagaaagacagtactttgtctatgatgctagaagcacaagctagagagcatcaacttctctatatgactcccgattcactttatttaaatacaactggcgcacatgccttagcaagcgctataactgttaaaaacgatccaatggggtggtttgagtgcgatgagaagaaacaaataaggttatctgaattagacgttatacttatgaggcaagaccctcctttcaattctaatttcatatacaacacatatgtattagagtctgcagaaagagaaggtgtattggtcataaataaacctgcaagtcttagagattgtaatgaaaaagttttcgctactgaatttcctgaatgttgtactccatttcttgtttccagtgaagcttctttattgaaatcttttatagaagaccataaagatacagtgataaagcctttagatggaatgggaggatcttcaatttttagattgagaaatactgacccaaatttaaatgtgattcttgagactattactgattcatttaagacaaaagtaatgatacaaacctacataccagaaataaccgatggcgataaaagagtattattaattaatggaatgcccatgaatgctgctgttgctagagtgcctgcagcaggtgaactcaggggaaatttagctgctggagcttctgcagtagcaagatcactaaccgaaaaggatttatggatttgcgaacaagtcggaccaaaactcaaagaccttggtttagtgcttgtaggattagatattattggagattatttaacagaaataaatgttactagcccaacatgttttagagaatacgaaaatttgtgtgatattaatgtagctttaagttttttagatgctgtagaagatttacaaaaaaatgtttaa

SEQ ID NO: 312222 - DNA, 808 bp, Unknown
  Bacterial polypeptide expressing nucleotide sequence isolated from the Sargasso Sea
atgaaactagctgttgtgatggatcccattgagcgaatcaaaccagagaaagatggaacgctcgacttgctgctttcagctcaatcatttggttatgaactcacacgatttcactcagaagaactcaaaatcatagatggaaggcccttgggtaccgggcggccaatcaccgtaaatgatgatgtaaaaaattggtttgcctatggaacagaaaatgaactctgcctgagtgactttgatgtaatactcatgagaaaggaccctccatttgatatggagtatatatatgctacatatattctagatctggcaaaaatgggtggtgctaaagttattaatgatccctctgcgatcagaaatctaaatgaaaaagtttcaattactatgtttccgagtgtcacacctcccaccttggtgacatccaatcaaagtgatctggaatcttttttgaatcagcaagaaaagattgtggtgaaaccacttgatggaatgggaggacgttcaatttttatcgttgaaaaaggcgagccaaataccaagacaatatttgaagaaatgacgagaaacaatagcaaaaccatcatggctcaaaaatatataccagaaattaaagatggcgataaacggatacatcttgtatttgggaatcacgtagacatggcattggcaagagtcccttctgaaaaggatcatcgaggaaatcttgtgatgggtgcagttggagaagtaagaaaactcacacagcgtgatatagaaatatgcaaaaccataggtggaacattgcttaaaggcggagtctatttcgcag

SEQ ID NO: 312223 - DNA, 937 bp, Unknown
  Bacterial polypeptide expressing nucleotide sequence isolated from the Sargasso Sea
atgaaactagctgttgtaatggatcccattgagcgaatcaaaccggaaaaagatggtacgctcgacttacttctttcagcgcaatcatttggttatgagttaacacggtttcactctgaagaactcagaatcagcgatggaaaacctctgggcattggacgctcaatcagcgtattcgatgatatcaatagttggtttaactatggcagcgaaaatgaattctgcctcaatgattttgatgtgatcctaatgaggaaagatcctccattcgatatggaatatatttattcgacatatgttctagatctcgcaaaaatgaatggcgcaaaagtcatcaatgaaccctctgcaattagaaatctaaacgaaaaggtttcaatcactctgtttccgaatgtgaccccgcctacactggtttcatccagccaacaggacttaagatcatttctgaatgagcataagaaaattgttgtaaaaccgctcgatggaatgggaggacgctctatttttattgttgaaaaaggcgaaaaaaatacaaacacaatatttgaggaaatgacgaaaaacgatagtaaaaccatcatggcacaaaaatacattccagagatcaagaacggcgataagcgaatacatcttgtctttggcaaacatgttgatatggcgctcgccagagttccttctgaagaagatcatcgaggaaatttagtcatgggtgcagttggagaagtaagaaagctcactcaaagagataaagaaatatgcaatcagattggagcaacattgctcaaggcaggggtttatttcgcaggcattgacgtgattggtgattatttaagcgagatcaatatcacgagtccaacaggtatgagagaaatttcaaaaaattctgaagtgaatgtttcggatgtttttttcaaggcgctgcaaaaaaattaat

SEQ ID NO: 312224 - DNA, 630 bp, Unknown
  Bacterial polypeptide expressing nucleotide sequence isolated from the Sargasso Sea
aaaaagaaggtgggttggttgtaaataaaccctctagtcttagggattgtaatgaaaaagttttcgcgacagagtttcctgaatgctgtacgccatttctagtaactagcgatctaaatttattgaaatcttttatagaagatcatagagatactgtaattaaacctttagatgggatgggaggttcttcaatatttagattgagatattcagatcctaatttaaatgtgatccttgaaacaataactgagtcttttactacgaaagtgatgattcaaatatacataccggaaataactgatggtgataaaagaattttattaatcaatggcaatccaatggatgctgctgttgctagagttcctgctgaaggtgagcttagaggaaacttagcagctggagcttcagcagttgcaagatcactaactgaaaaagacttatggatttgtgagcaagttggaccgaagctaaaagacttaggattagtgcttgtcgggttagatatcattggcgattatctaactgaaattaatgtcactagccccacttgttttagggaatatgaaagtctatgtgatattgatgttgcgcatagctttatagaagaagtagaaggtttacttaaatgac

SEQ ID NO: 312225 - DNA, 928 bp, Unknown
  Bacterial polypeptide expressing nucleotide sequence isolated from the Sargasso Sea
tatgacagataaagttttatttataaccgatgcttataaagatctaaatacaaagaaagatacttcaatattgatgatggaggaggcaataagcctgggttttaatacatttcagtgtgagattaacgatttatatgttgatgaaggtattgtttatagcacctctagagaaatactttctgccggctctacacagattgaaggaatttcaaaacaagaaataagattatctgattttaaattttcttttatgcgtaaagacccccctgtaaatgaaaattatatcaatgccctccatttgcttggattggcagaaaaacaaggagctgttgtattcaacaaaccaacagcaattaaagaatttaatgagaaaatttttgcattacattttaaagaaattactccaaagactttagtcacttctaatataaataaaatagaaaatttttttgaactccataagacaataataattaaacctttagatggaatgggcggggcttcaatatataaaattgatcaattaaatgaggaaaataaagacttattaatgaaaatgacaaattcccaacgaacccatattatttgccaagagtttatagaagatatatacgatggcgattttagaatacttattatccatggaaaacccttccaaaagacattagctaggatacctcaaggtaatagttttaaaggcaatcttgccgctggaggaaggggtgaggctagagacatttcagattatcaaaaaatgataggtgaaaaggttggagaattcttgatagaaaagcatattaattttgctgggatagatgtgattggtaaacacttaactgaaattaatataactagcccaacttgcgcaagagagatttttgatcaaacaggattgaatccaattgcagaatattttaaaggcctatga

SEQ ID NO: 312226 - DNA, 793 bp, Unknown
  Bacterial polypeptide expressing nucleotide sequence isolated from the Sargasso Sea
cttgggtatcgggcggtcaatcaccgtaaatgatgataaaaaaaattggtttgcctatgggacagagaatgaattctgcctgagtgactttgatgtaatactcatgagaaaggatcctccatttgatatggagtatatatatgcgacatatattctagatctggcaaaaatgggcggtgctaaagttattaatgatccctctgcgatcagaaatttaaatgaaaaagtttcaatcactatgtttccgagtgtcacacctcccaccttggtgacatccaatcaaagtgatttggaatcttttttgaatcagcaagaaaagattgtggtgaaaccactcgatggaatgggaggacgttcaatttttatcgttgaaaaaggcgagccaaataccaacacaatatttgaggaaatgacgagagacaatagcaaaaccatcatggctcaaaaatatataccagaaattaaagatggcgataaacggatacatcttgtatttgggaatcacgtagacatggcattggcaagagtcccttctgaaaaggatcatcgaggaaatcttgtgatgggcgcagttggtgaagtaagaaaactcacacagcgtgatatcgaaatatgcaaaaccataggtggaacattgcttaaaggtggagtctatttcgcaggcattgatgtaatcggcgattatctaagcgaaataaatatcaccagtcctaccggaatgagagagatatcaaaaaattctgatgtgaatgtttctgatcgtttttttgaagcactccaaaaatcgaattga

SEQ ID NO: 312227 - DNA, 931 bp, Unknown
  Bacterial polypeptide expressing nucleotide sequence isolated from the Sargasso Sea
tatgaaagaaaaactactttttataaccgatacatacaaagaacttaatttaaagaaagatacttctattttaatgattgaagaagctttaagaaataattttttagtctatcaatgcgaattaaatgatctctttgttgatcaagaaaaagtctatgctcaagcaagaaaaataattgctgcaggcgcgactcaagtcgaaggtatctcaaaagaagatatcagttttaaaaattttaaatatactttcatgagaaaagaccctccggttgatgagaactatattaatgctttacatcttttaggtcttgctgaaattcaaggagcaaagatttttaataaacctaattcaataaaagaatttaatgaaaagatttttgcaattcattttaaagatttgatacccagaactttaattacatcaaacctctctaaaatagaagattttcataaggaacttgaggaacctattgtggtgaaaccattggatggcatgggcggtaagtctatttatatgatggaagaaatcaatgaagaagaatatgtaatcctaaaggaattaactaataattataaaactcagatagttgttcaagaatttttaccagatatttatgatggtgatgttagggttttgataattcatggcaaaccttatgaaaaaactttggctagaattccacaaggaggaagttttaagggtaatttagctgcaggaggtaaaggagaggttagagatatttcagatatacaaatgagaataggctcagttgttggtgaatttttaatggagaaagatataaattttgcaggtatagatattattggacaaaagctgacagaaataaatataacaagcccaacatgtgctcgtgaaatttttgaacagtctggcatgaatcctattgaagaatattttaaaaaactatga

SEQ ID NO: 312228 - DNA, 857 bp, Unknown
  Bacterial polypeptide expressing nucleotide sequence isolated from the Sargasso Sea
tgaatcacaaaaaagaaagaataccaattatatatttcatccaaatgatctttattttcaaaaaaataaagtcttagctcaatcaagtcagatcaaatttacatccgccaatttcaaagcatataaattagggtcaaaaaaaacattagacttaggttctttagatataattttcgttcgtcaagatcccccgtacgatatgtcttatatttcctcaatgcatttacttgagcaggtaaattctaaaaccaaaattattaatcacccaagaggtattcgcaatgctcctgaaaagttattaatgctaaagtatcctaaattaattcctccaacaatcatcacaagatctgagaaagaagttaatcaatttatgaggatatataaaaattgtgtaattaagcctctttatgggaatggaggagagggaatattttttttaaataagtctgacagaaactataagcaaatattggaaatttttctaaacaaaagtaatgagccttttatagttcaaaagtttttacccgaaatacaaaaaggagataaacgaattattttagttaatggtaatcccgtaggagccgttaaaagaatgccacaaggcaatgaaattaggtcaaatattcacgttggaggaaaatgtattaagactaagctttctaaaagagaccttgaaatatgtaattttttaaaagatgatttattagaaaatggtcttttttttgtaggaattgatgtaataggcaattttttgacagaaataaacgtaacttctcctacatgtatacaagaaattaaaagactatataaaattgatatcgcaaaaattatctggaataatcttaataataaataaa

SEQ ID NO: 312229 - DNA, 553 bp, Unknown
  Bacterial polypeptide expressing nucleotide sequence isolated from the Sargasso Sea
tttgaaaaatacattgccccaaccattattactcaaaagataagttctttaaaaaaatttttagagacaaatcaagatattattaccaaacctctttatggtaatggtggtgaaggaatatttagaaccaaaataagcgatgaaaaattacaaggaattgatgaatcaaatgaatttttagaagaacccttaatggcacaaagatacatacccgaaattagagaaggagatagacgtataatattaatagatggagattacgctggctctgttgcacgcattcctcaagagaacaatataaaagcaaattttcatgcaggcggaaagcctgaaaaatcagaactgatatatcgcgacaaagaaatatgtgaagccttacaaaaagacttaaaggaaaaaaatttatttcttacaggtatagatgtaataggaaattatctaacagaaataaatgtaacttcaccaactggtttaaaacaagttaataaactgaatgagattaatcttgaaaaaatatattggaataaactagaagagaaattttttaattaaa

SEQ ID NO: 312230 - DNA, 934 bp, Unknown
  Bacterial polypeptide expressing nucleotide sequence isolated from the Sargasso Sea
atgcaagggacttcctcactatttattactgaccctctaaatgaactcaatccaaaaaaagatacaactattgtatggatgcaagaggtctatgagatgggcggccaaattcttcaatgcgagatgaaagatttaatttataaagaccaacaaacttttgccaactgcgttgaaattcaagatcccaatcagcatccgcaaattagtgagagagttgatgatactaaacggctaaaagacattaattatatatttatgagaaaggacccaccagtagatgaagactatatgaatgccttgcatttattatctcaggctgaatctgagggtgctaatgttattaatcgacctacagctttaaagaaatttaatgaaaagatttttgccctccaattttctaattggatgcctgatacaagtgtgatttgcaaagaggaagactttaaactgtttaaaaataaatactctactattattttaaagcctcttgatggcatgggaggagagtcaatttataaatttgatgaaagttcaacagatcatatagaaatttttaaatcactcaccaatcattatcaaaccatggttatggttcaaaatttcttgcctgaaatctatgctggggattatcgaatacttatcattcacgggaaaccttttcctattgcattagcaagaattcctcaaggaggaagctttaaaggtaatcttgcagctggcggcataggtgaggctcgtgaattatctgatgatcaactgaaagtcagtctagagattggtaaggtgcttatggatgagggcattttgtttgcaggaattgatatgattggtaattatttgactgaaattaatatcacaagccctacaggcgcaagagagattcttgctcaaacgggaaaaaatccaatcaaaacattgctccaatcgatataaa

SEQ ID NO: 312231 - DNA, 946 bp, Unknown
  Bacterial polypeptide expressing nucleotide sequence isolated from the Sargasso Sea
aatgagaaaacataataacataaatgcactttttcaaatagacagtttatctcaattaaatcctgagacggattcgtccttagatatcataaaagaaggattgaaacttggtttgaatatttggataacaaatccagataatttaactttttatgctggaagaatttctttcacggcatctaaagtaaaagactcaagtttaaaattatataaatcaaaaaaaatctttttagaaaagttcgactttttttttatccgacaagatccgccatttgatatgaaatatatctctaattgttatttgcttgagcttcaccaaaaatttaacaagaaacctttttttataaacgatcccacaggaataaagaattttacggaaaaaattttccctttatattttcacagttttatgcctaaaactatggtgtcatcaagtgttaaggatttagtttatatgtttgaaaaacacgatacgttggtctttaaacctctttattgcaagggcggcgaagatatatacaaattctcaagaaaagataaacattatttgcgaacttttcaaatgttgctgacgaaatataaatcaccagttgttatacaaaaatttattgaaaaagtgaaatatggtgacaaacgcgtgatattagttaatgggaaagcagttggagctgttaatagaattccccaaagtggggcttttaaggcaaatttgcatttaggcggaacggcctcttcaaccaagctcaccaaaaaagaaattgatatatgcaatttgttgggaagtgttttaagagaaaacaaacttttttttgtcggtattgatctaatagatcaaaaactaacagaaatcaatgttacatcgccaactggaatagtccagctcagggaattgtacaatgtgaacgtatccaaactactttgggaagagttaatgagtattgtataa

SEQ ID NO: 312232 - DNA, 794 bp, Unknown
  Bacterial polypeptide expressing nucleotide sequence isolated from the Sargasso Sea
ccgaggggatgagcccatggcggtggcgttgcctgtgacaccggacccctggatcgctgttggagcgccagaacgtcagtctctggccgggtttgacgtgatctggatgcggaaggatccacctgttgacgaggcgtatctctatgccacccatctcctggaggtggcggagcgggctggtgttcgtgtgttgaaccgtcccagtgccctgcgggcctggaacgaaaaactcggtgccctgcgcttcagccgctggatggcgcccaccctggtggccggccgggtctccgagttgatggcctttgcccgggagcagggcgacgtggtgctcaagcccctcggcggtcgagcgggacttggcgtgatccgcgtgcaggccgaggcaccgggcctcaaggccttgttggagttggtgacggagcaggaacggctgcctgtgatggcccaacgctttctgcctgacgtgacggagggtgataagcggatcctgctggtggacggcgacccccttggtgcggtgaatcgtcgcccgtcggagggggagttccgcagcaatctggcggtgggtggacaggccgaagcaacggaattgagcgagcgtgagcgtcagatctgtgcagcgttggcaccggctctgcgggcagaagggttgttcttcgttggcatcgatgtgatcggcggcatgctcagcgagatcaatgtcaccagtcccaccggcgtgcgggaagtggaacgcttgatgcagcagcccttggcggatcagacgatcgaacggttgcgctcactggtctgaa

SEQ ID NO: 312233 - DNA, 904 bp, Unknown
  Bacterial polypeptide expressing nucleotide sequence isolated from the Sargasso Sea
tcaaaaaagacaccaagctttgccatgctattagagatgcagcgccgtggctataccacgcattatctcgagccccatgacatctgggtacaagacggcatcatctggggaaaaatgcacaccattgatgtgcaagacaaccccactcaatggtataccgtgggaaacgccatcgctcaaccgttagccgagctcgactttctattaatgcgaaaagatcccccggtagatatggatttcttttatctgacctacttactcgatctcgctgaacagcaaggcctgaaggtgttcaatcgcccaagcagcattcgggatgccaacgaaaaactcttcgcgtgccacttccctcaatgcacaccaccgcacgtggtcacggcccaacacgatctcattcgcgcatttctagagcaacacccacatgcagtcattaaaccgcttaatggcatgggcggccaaggcatcttccaattgcaagcaaatgaccctaatctcaccgcgttattggacaccgccaccgatgggggcaccacacgcgtcatggtacaacaatacctggatgacattcagcaaggcgataagcgtgttattgtcattaacggcgaacccatcccctacggcatagcacgcgttcccgctcccggggattttcgtggcaaccttgctgcaggcgcaacagccaaagacatcgaattaagtgagcgcgaccgctggattgccaacgaagtcggcccacgtttgatggaacaaggcctggtgtttgtcgggctggatatcatcggcgattaccttactgaaatcaatgtcaccagccccactggggttcgcgaaatcgagcgctttcgtcaaatcaatgtccttgaaacgctgttcgatcacatcgagaacacatgtcaatgctaag

SEQ ID NO: 312234 - DNA, 427 bp, Unknown
  Bacterial polypeptide expressing nucleotide sequence isolated from the Sargasso Sea
catggcaattaaattaggtattatttcagatcctattagtgggtttaacatcaaaaaagacaccggctttgcaatgatgatgcaggcgcaagagcgtggctacgaaatttactatatggagatggatgatttatcacttcgtaaaggtaagtcttatgccaccgctgccaaagcgcgtgtatttaacaacgaagaaaaatggtacgaactagaagaaaaaaccaccattgcccttgccgatcttgatgtaattttaatgcgcaaagatccgccgtttgacactgaatacatttacgcaacgtatcttttagagcgcgctgaagatgaaggcacgttaattattaataaaccacaaagcttgcgtgatgctaacgaaaagctgtttactgcatggtttagcgaacacacgccagataccttagttacg

SEQ ID NO: 312235 - DNA, 415 bp, Unknown
  Bacterial polypeptide expressing nucleotide sequence isolated from the Sargasso Sea
tgctgatagaaacttcggatcaataattgaaaattttatgaatataagtaatgaacctttcattattcaaaaattcataccaaatgttagtcatggtgataaaagaatcattttaataaatggtcaaattgctggtgctattaatagattaccccaaaatggagaaatacgctcaaatatgcatgtgggtgggcaggcagttaaaactgatataacccccaatgagagagaaatttgtgaagtgttatcaaaggaccttataaattttggtctcttttttgttggtattgatgtaattgacaattttattactgaaattaatgttacatctccaacggggataagagaaattcataagcttacgggccaaaatatcgctgaaaatttttggaatgaggcagaaaagcttttataa

SEQ ID NO: 312236 - DNA, 580 bp, Unknown
  Bacterial polypeptide expressing nucleotide sequence isolated from the Sargasso Sea
taatcccacagaaaaaatttatacttttcagtttaaacaatatatggcacctactattgttacacaaaaactggaagatataaaaaaatttattttagatcacaaggatataattattaaacctctttatggaaatggtggcgaaggaatttatagatgcaaggatggtattataaatggagttgatataaataaaaattttttagatcaaccaataatgattcaaaaatttattcctgaaataactgaaggagatagacgcattatattaattgatggagaatacgttggctctgttgcacgcatacctgaaaaaggtaatataaaggctaattttcatgcgggaggtaaagcaaaaaagattgatttagtttttagagatgaagaaattattggagtagttggacctgaattaaaaaaaaggaatctattttttgttggtatagatataataggaaactatttaaccgaaattaatgttacatcacctacaggaatcaagcaaattaatgctcttaataatgtttctattgaaaaaatattttgggataagcttgaagcaaaatatgatatagtctaa

SEQ ID NO: 312237 - DNA, 935 bp, Unknown
  Bacterial polypeptide expressing nucleotide sequence isolated from the Sargasso Sea
gatgagtggttatcttaaaatagcattcttaatggatcctttagaaacattggatcttcaaggtgacacaacttttgctctagctttagaggctcaaaaaagaaagcatgatattagtttttttaaacctgatgatataatattcaataataatgatgtattagcaaacatttgtaaatttgagttatcatcatcaaatgatgtgcatgagtttaaatatcacgaaacttttataaaaccattatcaaaatatgatgtaattatgatgagacaagatcctccatttaatatggcttatattagtgcaactcatattctcgaaaagcttccaagttcaacactagttgtaaacaatccttttgaagtgagaaactgtccagaaaaaatctttgttacaaatttctcacatttaatgccaaaaacattaataactcgcaatatcagtgctattaaagaatttaggagagagttcaaggacattattataaaaccactttatggaaatggtggacaaggtatatttcatattcttccggaagatgaaaatttaaattcgattttagaaatgttttttaatcaaaacaaagaacctctaatgatacaagagtatttaaaagatgttagatacggcgacaaaagaattattttattgaatggaaaggcagttggagcaattaatagagttccaaaattaggtgaaagtagatcaaatatgcatgtcggtggtaaaccagaaaaaacagaattaactaaaagagacaagtttatatgtaatgaaatctcacattatctggtagaaaaggaacttttttttgttggaatagatattattggtaactacatcactgagataaacgtaacttctcctactggaataagagagataaaaaatctggactcagtagcaattgaagaaatgttttgggatttcattg

SEQ ID NO: 312238 - DNA, 928 bp, Unknown
  Bacterial polypeptide expressing nucleotide sequence isolated from the Sargasso Sea
catgactaagaaagtactattcataacagatacatttgaaaatttaaatttcaaaaaagatacttcgatccttatgatcgaagaagctcttaaaaaagaaatgaatgtttttcagtgtgaaataaacgatttattcgtagataacaatgatgttttagtaaattgcagagagataaactctttaagtgaagatattgatacagaagttaaaaaaattgatattgaccttaaagattttaaatattgttttatgagaaaggatcctcctgttgatgaagattataataatgctcttcatttacttgatttagctaaacataatggcgcagttatccataacaatccatgcgcattaaagaaatttaatgaaaaagtttttgcaacatattttcctgaatttataccaaaaacactcatttcatctagcattaacaaaataagagctttttttgattcgcataagaaaataattattaaacctctagatggaatgggaggtacttcaatatataaagtagatgatttaaacgaagataatttaaagataataaaagccatgacaaattctgaaaaaacacagattatttgccagagttttattgaggatgtttatgaaggagattacagaattctaataatcaatggtaagccatttccaaaaacacttgcaaggataccaaaagatggagatttcaagggaaatcttgctgcaggagggaaaggagtcgctaaagatataacagaaaatcagaagaagattgccgaggcaattgcaccaatattagttaaaaatgagattagttttgctggaatagatatagttggaaaatatttaactgaaattaatattacaagcccaacttgtgcaagggaaattcttgatcaaacacagatgaatccgatagaagaatactttaaaggcctatga

SEQ ID NO: 312239 - DNA, 510 bp, Unknown
  Bacterial polypeptide expressing nucleotide sequence isolated from the Sargasso Sea
tatgaaactagctgttgtaatggatcccattgagcgaatcaaaccggaaaaagatggtacgctcgacttacttctttcagcacaatcatttggttatgagttaacacgatttcactctgaacaactcagaatcagagatggaaaacctctgggcattggacgcacaatcagcgtattcgatgatatcaatagttggtttaaatatggcagcgaaactgaattctgcctcaatgattttgatgtgatcctaatgaggaaagatcctccattcgatatggaatatatttattcgacatatgttctagatctcgcaaaaatgaatggcgcaaaagtcatcaatgaaccctctgcaattagaaatctaaacgaaaaggtttcaatcactctgtttccgaatgtgaccccgcctacgctggtttcatccagccaacaggacttaagatcatttctgaatgagcataagaaaattgttgtaaaaccgctcgatggaatgggaggacgctctatttt

SEQ ID NO: 312240 - DNA, 652 bp, Unknown
  Bacterial polypeptide expressing nucleotide sequence isolated from the Sargasso Sea
atgaaactagctgttgtaatggatcccattgagcgaatcaaaccggaaaaagatggtacgctcgacttacttctttcagcgcaatcatctggttatgagttaacacggtttcacagtgaacaactcagaatcagcgatggaaaacctctgggcattggacgctcaatcagcgtattcgatgatatcaatagttggtttaactatggcaacgaaaatgaattctgcctcaatgattttgatgtgatcctaatgaggaaagatcctccattcgatatggaatatatttattcgacatatgttctggatctcgcaaaaatgaatggcgcaaaagtcatcaatgaaccctctgcaattagaaatctaaacgaaaaggtttcaatcactctgtttcctaatgtgacgccgcctacactggtttcatccagccaacaggacttaagatcatttctgaatgagaataaaaaaattgttgtaaaaccgctcgatggaatgggaggacgctctatttttattgttgaaaaaggcgaaaaaaatacaaacacaatatttgaggaaatgactaaaaacgatagtaaaaccatcatggcacaaaaatacattccagagatcaggaacggcgataagcgaatacatcttgtctttggcaaacatg

SEQ ID NO: 312241 - DNA, 943 bp, Unknown
  Bacterial polypeptide expressing nucleotide sequence isolated from the Sargasso Sea
gatgaaaatcaaaattgcaattcagatggatgatataaagacaattgattatgcttttgactcatcctttatgattggacttgaaggccaaaaaaggaattatgaaatattttattaccatccaaatgatttatacattgataatgggttagttaaggcaagaggattttatatagagttatttgagcaagataaaaactattttaaatttttatcggaaaagattgaaatcaatttggaagaatttaaatttatttttttaagacaagatcctccatttaatatgaattatataacatctacttacttattagattgtctttcagatactacgatcgttattaataatccaacttctgtgcgcaattgtactgaaaaaattctcccttttaaatttaaagattttatgcccccaactcttatttcacaaaacataaaagatatagaaaattttttaaatattcacaaagatgtcattacaaagccactatatggcaacggtggagagggtataaatagaagtaatgagggtaaccttataggtatcgaaacagcaaatgattatttagatatgcccataatagcacaaaaatatattccagaaattaaggacggggatcgaagaataattttctttgatggagaatatgctggttctgttgcaagaattccagcggagggaagtataaaagcgaactttcatgctgggggaatagctaaaaaaacagatttagtttttcgtgatcagcaaataatagaagctgttgggcctgaattaaaaaaacttgatcttttttttgtgggtattgatattataggtaattttcttacagaaattaatgttacctcaccaactggtataaaacaaatcaatcaattaaataatgttaaactagaacaagtattttgggataaacttgaagcaaaatataaaatagtttaa

SEQ ID NO: 312242 - DNA, 925 bp, Unknown
  Bacterial polypeptide expressing nucleotide sequence isolated from the Sargasso Sea
atgaatgaattgttatttattacagatacatataagaatctaaatattaagaaagatacctcagttttaatgatcgaagaggctataaaaaataattttattgtttttcaatgtgagttaaatgatttatttgttcaagatggaatagtgcatgcgagttcaagaaatattatttctgcaggcttaactcaagtcgagggaattttaaaagaggataagaaaatatctgattttaaattctcttttatgcgaaaggacccccctgtagatgaaaattatttaaatgctcttcatttattgggtcttgctgagaaacaaggcgctactatttttaataaaccaaattctattaaagaatttaatgaaaaaatcttcgcattacattttaataaatatgttcctaaaactttgataacttctaatatcgaaaagataaaagatttttatgaattacataagaaaataatcgtgaaacctcttgatgggatgggcggcatttccatatacaaaattgatgatcttaacgaagataatttaaatattatcaatgaaatgacaaattcagaacaaactaaaattatctgtcaggaatttcttgaggatatatatgatggagatttcagagtacttatcattcatggagaaccttttgaaaaaacattagctagaataccccaaaagggtaattttaaaggtaatttagctgctggaggaaagggtattgctatggatatttcagattttcaaagaaagcttggagaggagattggagagtatttaataaagatgggtattaattttgctggaatagatattattggagaatgcttaactgaaataaatattacaagcccaacttgcgcaagagaaatatatgaacaaactggaataaatccaataacaagatattttgaaggattatgag

SEQ ID NO: 312243 - DNA, 943 bp, Unknown
  Bacterial polypeptide expressing nucleotide sequence isolated from the Sargasso Sea
tatgaagttaggtgttgtgatggatccaattgaaactataaatttcaaaaaagatagcacattagcaatgatgattgaggcacaaaagaggaatcatgaaatcttttatataactccaaattccctatttataaattcaggaatttcttatgctactacttcaaacattgaagttagaaatgatcctttagactggttttcattagaggaagagaaaataataaagctatctgagttagatgctattttaatgagacaagatcctccctttaattctgattacatctataacacctatattttagaaatggcttccagagaaggtgtaagtgtttttaatgatccaagaagcttgagggactgcaatgaaaaggtatttgcctcagaatttcctcaatgctgtaccaaacatttagtaacaagtaataagcagcttttatcagattttgtagaagagcacagagacactgtaataaagccattagacggaatgggcggtgcatctatttttagattaaagaaaaatgaccctaacttaaatgttatcttagagacaataactcatcacttcactcaaaaggtcatgatacaagagtatattcctgagatttcggaaggggataagcgagtgcttttggttaatggacagcctatgtctgcagctattgcaagaatcccagcagaaggagagctcagaggtaatttagcagcaggtgcttcagcagtagctaaatcattatcagagagagatatgtggatttgtaaagaggttggtccttccttagttgaaaaaggattattattggttgggttagatatcattggagattatctgactgagataaacgttaccagtcccacttgttttaaagaatataaagaactttgtgacatagatgttgcgaaaacttttatagaagcagtagaagaacttactccatga

SEQ ID NO: 312244 - DNA, 925 bp, Unknown
  Bacterial polypeptide expressing nucleotide sequence isolated from the Sargasso Sea
atgcgccagctgttcgtgctggatccgctcgcacagatccggccggagaaggattccaccgccgccttgatgcaagcgtcccagcgcgccggggatgacatctgggcctgtacgccgtcggatctgatcgcccgtggcgatgagcctctggcgatggcggtgccggtcacgccggacccctggatcaccgtaggagcaccggaacgtcagtccctggctgggttcgatgtgatctggatgcggaaggatccaccggtggatgaggcttatttgtatgccacccatctgctggaggtggccgagcgggccggcgttcgtgtgttgaaccgtcccagtgcgcttcgggcctggaacgaaaagctgggtgccctgcgcttcagccgttggatggcccccaccctggtggccggtcgggttagcgagctgatggcctttgcccgggatcagggtgacgtggtgctcaagcccctgggtggtcgggccgggctcggtgtgattcgcgtgcaggctgaggccccaggcctgaaggcgttgctggagttggtgacggaacaggagcggttgccggtgatggcccagcgctttttgcccgatgtgaccgagggggacaagcggatcctgctggtggatggtgaacctctcggtgctgtgaaccgtcgcccgtcggcaggggaattccgcagcaatctggcggtgggtggccaggccgaggcgacggaactgagcgagcgggaacgtcagatctgttccgccctggccccggcgctgcgggcggagggcttgttctttgtcggcatcgatgtgatcggcggcatgctcagcgaaatcaacgtcaccagccccaccggcgtgcgcgaggtggaacggttgatgaaccagccattggcggatcagacgatcgagcggctccgatctctggtctgaa

SEQ ID NO: 312245 - DNA, 949 bp, Unknown
  Bacterial polypeptide expressing nucleotide sequence isolated from the Sargasso Sea
aatgacaattaaaaaagtagcaatacaaatggatcctattgaaaaaattgatttggattttgatacttcttttttattagcaaaagaagctcaagacagaggatatgaaattttttattataatcctaaagatttagagtataaaaacagatcaatatttgctttaggtcattttgttgaattatttaacgacaaaaataaatattataattatttaagtagtaaaaaagaaatattcaatcttgaaaatgctgatgtcatacttattaggcaagacccgccttttgatatgaattatattacatctacttatcttcttgaaaaattatcaccttcaactacagtactaaataatccatcttcaattagaaattcatctgaaaaaatatatccccttgaatttgaaaagtttatggcaccaacaataattactcagaatattgcgtctataaaagagtttttattagaacacaaagatattgttacaaaacccctttatggcaatggaggagagggcatctacagatcaagaatagaaaataataaattacaaggaattgatgaaaataaaacaaatttaaatgaacccattattgttcaaaagtacattccagaaatagttgaaggagatagaagaataattcttatagatggtgaatatgctggatctgttgcaagaataccggaaaaaaataatcttaaagctaattttcatgcaggcggaaagcctcaaaaaactgaacttataagaaaagatgaagaaatttgtaatgccctatccaaagatttaaaactaaaggatctttttctagtaggaattgatgtaattggtgattatctaactgaaattaatgttacctctcctactggtttaaaacaaataaatctcttgaataaaataaaactagaaaaaatttattgggataaattagaaaacaaatttttttaa

SEQ ID NO: 312246 - DNA, 909 bp, Unknown
  Bacterial polypeptide expressing nucleotide sequence isolated from the Sargasso Sea
tatgaaactagctgttgtgatggatcccattgagcgaatcaaaccagagaaagatggaacgctcgacttgttgctttcagctcaatcatttggttatgaagtcacacgatttcactcagaagaactcaaaatcatagatggaaggcccttgggtatcgggcggtcaatcaccgtaaatgatgatgtaaaaaattggtttgcctatggaacagaaaatgaattctgcctgagtgactttgatgtaatactcatgagaaaggaccctccatttgatatggagtatatatatgcgacatatattctagatctggcaaaaatgggtggtgctaaagttattaatgatccctctgcgatcagaaatttaaatgaaaaagtttcaatcactatgtttccgagtgtcacacctcccaccttggtgacatccaatcagagtgatttggaatcttttttgaatcagcaagaaaagattgtggtgaaaccactcgatggaatgggaggacgttcaatttttatcgttgaaaaaggcgagccaaataccaacacaatatttgaggaaatgacgagagacaatagcaaaaccatcatggctcaaaaatatataccagaaattaaagatggcgataaacggatacatcttgtatttgggaatcacgtagacatggcattggcaagagttccttctgaggaggatcatcgaggaaatcttgtgatgggcgcagttggtgaagtaagaaaactcacacagcgtgatattgaaatatgtaaaatcataggtggaacattgcttaaaggtggagtctatttcgcaggcattgatgtaatcggtgattatctaagcgaaataaatatcaccagtcctacaggaatgagagagatatcaaaaaattctgatgtgaatgtttctgatcg

SEQ ID NO: 312247 - DNA, 928 bp, Unknown
  Bacterial polypeptide expressing nucleotide sequence isolated from the Sargasso Sea
tatgaaatttggctttcaaatagatcctgtgcatacactcaatcatgatactgacagtactttgccaatgatattggagtcacaaaaaagaaaaaatagaaattttattttctctccaagttctctcacattcaaaaaaaatactgtatatgccttagtaaaagaaattaaattcaagaataacaaattgaacagttatattataagtagcgaaaaaatattaaatttaaattcgttaaattgtatttttatacgtcaagacccgccttataatatggaatacatatcatcaatgcatttactggagcaattgaatccaaaaacaaaagtaattaatagtccagcaggcatacgaaatgctccagaaaaaatactgatgttgaaatttaaagacatcattcctccaacgttaataactagatctagaaaagaaatagatctttttatgagcagctgtaagagatctgttatcaagcctctttacggcaatggaggacagggcatttttttattagataagaaggataaaaattataatcaaatcatcgaaaagtttatagatgaagatagtgttcctttcatagtacaaaagtttctgccagaaataataaagggtgacaaaagaataatacttattaacggtgagcctgttgcagcattaaaaagaattcctaaaacaaatgaattcagatcaaacattcatgttgggggaaatactaaggcagtaaaactctcaaaaaatgacagaaaaatatgcagtattatcaaagaaactttaataaacgaaaagctgttcttcgctggcattgatgtaataggaaattatcttacagaaataaatgttacttcaccaacttgtattcaagaaattaaaaaacttcataagattgatgtcgcaaaaataatctttgataaattagttgaatag

SEQ ID NO: 312248 - DNA, 914 bp, Unknown
  Bacterial polypeptide expressing nucleotide sequence isolated from the Sargasso Sea
ccctatggagtcgattgatatagctggagatagtagctttgcgctagcgctagaagctcaagaacgaggacacaaactgtttcattatgagccaaaaaatttatccctatcacagttgaagccagtagctaagttgcgatctctgactgtccaaaacattaccggcaatcatttttctctcggcgaacaacgagctgccgatctcaaaacagatattgatgtgatactgatgcgtcaggacccgccgtttgacatgtcttatattaccgcgacccatattcttgagcacgtgcatccccatacattggtaataaataatcctacaaacgtccgaaatactcctgaaaagctatttgttactcattttgaaaatgtaatgccgccaacattaataacttctgatgaggaagaaatatttggctttcgaaaagaatttaaggacataattgtaaagcctctttttggaaatggaggagcgggagtatttcacataaagccagacgatgagaatttaagctcacttatagaacttcacaaaacgttttacagagaaccactcatgatccaagaatacgtccccgctgtcagacagggcgacaaacgtattatccttatagatggtacgcctgttggtgcagtaaaccgagttccagcgaagggtgaagctcgatcaaatatgcatgtaggcggaaaaccaatgcaatgtgaattgactggccgcgatagagaaatatgtgaaattattggacctagcttaaaagagaaaggcctattgtttgtcggtattgatgtaataggaaactatttaaccgaaataaacgttacttcaccaacggggatccaggagttaagccgatttgaagataccaatattgctagcttgatctgggacgcgatagagaagaagctataaa

SEQ ID NO: 312249 - DNA, 364 bp, Unknown
  Bacterial polypeptide expressing nucleotide sequence isolated from the Sargasso Sea
ggccaggcctacctgccggcgatcaaggatggcgacaagcgtatcctgatgattgacggcgagccggtggattattgcctggcgcggatcccggcagccggcgagacccgtggcaacctggccgccggtggtcgcggtgaagcgcggccgttatcagaaaaagaccgctggattgccgctcaagtcggtccaaccctgcgggaaaaaggtctgctatttgtcggactagacgtaattggcgagaacctcactgaaatcaacgtcaccagcccgacctgtattcgcgagatcgacaacgcatttggcacgaacatcggcgaaatgctgatggccgccattgaacgcaagctacaagccaagtgac

SEQ ID NO: 312250 - DNA, 602 bp, Unknown
  Bacterial polypeptide expressing nucleotide sequence isolated from the Sargasso Sea
gatccttttctgggtgcgcaactaccccgaaaaactgctggttctggacttcccggagctgacaccgccaactacgatcgcgcgcgatctcgacaccatcaaggcgttcaaggccaaacatggtgatgtgattctgaagccgctttacggcaatggcggggccggcgtgttccggctggatgccaatgatcgcaacctgtcgtcgctgcatgaactgttcactggtttcagccgcgagccgctgattgtgcagaaattcctgcccgatgtgtccaatggcgacaagcgagtgatcctcgtggatggcgagccggtgggcgcgatcaaccgcgtgcccgctgcgggcgaaacacgttccaacatgcatgtgggcggacggcctgagaaaatcggcctgaccgaccgtgaccttgaaatctgtgccgcaattggcccgctcctgaaggagcgggggcaagtgtttgtgggcatcgacgtcattggcgattacctgaccgaaatcaacgtgacctcgcctactggcattcaggagctggagcggttcaacggcgtcaatatcgctgaaaaggtctgggaggccattgaggcacgtgttgcgtgag

SEQ ID NO: 312251 - DNA, 445 bp, Unknown
  Bacterial polypeptide expressing nucleotide sequence isolated from the Sargasso Sea
gatcttccgcgcgcaaccgggtgacccgaatgttagcgtcattttggagacgctcacccaatccagtagtcaaacgatcatggcacagcagtatctacctgccatccaagagggtgacaaacgaattctgatggtcaacggtgaagcggtaccgtggtgtctggcacgaatccctctggcaggcgagagccgtggcaatctcgccgccggtggttcgggaatagtgcaaccgctcacagagcgagatcaatggattgccaatcaggttgggcctaccctcagggagcgcggtctctactttgttggcctcgatgtgatcggcgactacctcaccgaaattaacgtcaccagcccgacctgcctccgggaaatcgaggcggaaaccgacctagatattgccggccagctgctcgacagcttgcccctgacaggagcggcctcctga

SEQ ID NO: 312252 - DNA, 782 bp, Unknown
  Bacterial polypeptide expressing nucleotide sequence isolated from the Sargasso Sea
catgctgatggcggcgcaggaaaggggttaccaactgttttatatggaaatggccgacctcgccatggtcaacggcgttgccatgggtaatatgcgtccattaaaagtcatcaacgatgccaataaatggttcgaactaggcgacgcccaagatacgccgctgagcgagcttaacgtagtgttaatgcgtaaagacccgccgttcgataccgaatttatctacgccacttacatgctagagcgcgccgaagagcaaggcgtgttaattgtgaataagccgcaaagcttgcgcgatgccaacgagaaactattcaccgcatggtttagcgaatttacgccagaaaccatagtgacccgcgatgccaaccgcatccgcgcgttccaccaagccaagggcgatattatcctcaagccattagacggcatgggcggcacctcgattttccgcgtgaagcaggacgaccctaaccttggggtgatcatcgaaaccttgacccaatacggcaaccaatacgccatggcacaggcttttattcctgaaatcaccaagggcgacaagcgcattctggtggtggacggtgagcccgtgccctacgctttagcgcgtattccgaaaaaaggtgaaacccgcggtaacttggccgcaggcggcagcggtgttgctcagccgttatcggactctgattggaaaatcgcccgcgccattggccctgagctgaaaaaacgcggcctgatatttgtgggtctggatgtgattggtgacaagctgaccgagattaacg

SEQ ID NO: 312253 - DNA, 775 bp, Unknown
  Bacterial polypeptide expressing nucleotide sequence isolated from the Sargasso Sea
ctggactaccgccagctttccccagaggccgtgaggaactgtgactgggcagagatcggtgaggcccagcgccaacccttagcgaacatggatatcatcatgatgcggaaggaccctcccttcgacatggagtacatctatacgacctatctgctcgaacgtgtccaggctgagggtgcccttgtggtcaaccgacccgagtccctacgggactgcaacgaaaaattgtttgcaacccagtttccacagtgctgccccaacctgattgtcagccgaaacatggagctgcttcgagaatttcacctccaacatggcaacgtggtcttcaagaagctggacggcatgggcggcgcatcgatctttcgggtcatgcaggatgacccgaatttatccgtcgttatcgagaccttaactcgcggcggccaagagcaggtcatggggcaggtttatttgccccaaatcgtagacggcgacaaacgcatcctattgattaacggcgagcccattccctacgccttggcaagaattccctctgctggggaaactcggggtaacctcgcggcaggcggccatggtgagggccgtcgcctgacggatagagacctctggatcgcagagcaggttgggccggagctggctcgtcgcggcctttactttgtcggaatcgacgtcatcggtgactatttgaccgagatcaacgtgacctgcccaacctgcatcagggaacttgatgagcaatttgatctcgatattgccggcccagctgatggatagt

SEQ ID NO: 312254 - DNA, 808 bp, Unknown
  Bacterial polypeptide expressing nucleotide sequence isolated from the Sargasso Sea
gcgcaggaaaggggttaccaactgttttatatggaaatggccgacctcgccatggtcaacggcgttgccatgggtaatatgcgtccattaaaagtcatcaacgatgccaataaatggttcgaactaggcgacgcccaagatacgccgctgagcgagcttaacgtagtgttaatgcgtaaagacccgccgttcgataccgaatttatctacgccacttacatgctagagcgcgccgaagagcaaggcgtgttaattgtgaataagccgcaaagcttgcgcgatgccaacgagaaactattcaccgcatggtttagcgaatttacgccagaaaccatagtgacccgcgatgccaaccgcatccgcgcgttccaccaagccaagggcgatattatcctcaagccattagacggcatgggcggcacctcgattttccgcgtgaagcaggacgaccctaaccttggggtgatcatcgaaaccttgacccaatacggcaaccaatacgccatggcacaggcttttattcctgaaatcaccaagggcgacaagcgcattctggtggtggacggtgagcccgtgccctacgctttagcgcgtattccgaaaaaaggtgaaacccgcggtaacttggccgcaggcggcagcggtgttgctcagccgttatcggactctgattggaaaatcgcccgcgccattggccctgagctgaaaaaacgcggcctgatatttgtgggtctggatgtgattggtgacaagctgaccgagattaacgtcactagcccaacctgtatccgtgaaatccaagcggcat

SEQ ID NO: 312255 - DNA, 481 bp, Unknown
  Bacterial polypeptide expressing nucleotide sequence isolated from the Sargasso Sea
atttaaggatataattgtcaagcctttatttggaaacggaggcgccggggtatttcatataaagccagacgatgaaaatttgagctcactagtagaactatacaaaacattttatagagagccgcttatgatccaggaatacctccctgcagtacgacaaggtgataaacgtatcattcttatcgatggtgaggctgttggtgcaataaaccgagttccggccgatggtgaagcgcgatcaaatatgcacgtaggcggaaaaccgatgaaatgtgaattaacagaccgtgatagagaaatttgtgaaattattggacctagcttgaaagaaaagggcttactgtttgttggcattgatgtaatcggcaactatctgaccgagatcaatgttacttcacccaccgggatccaagagctgagccgatttgaaaatgtcaacatcgctaagttaatttgggaagccatcgaaaaaaaattataa

SEQ ID NO: 312256 - DNA, 900 bp, Unknown
  Bacterial polypeptide expressing nucleotide sequence isolated from the Sargasso Sea
ggtgttgttatggatcccatcgagactattaattttaaaaaagatagtactttagcgatgatgatagaagctcaaagaaaaggtcatgaaatcatttatatcactcctgattctttattcattgattcgggtattccctatgcaagttccaataaattagaggttagaaataatccctctgactggtttaccaaagaagaggaaataataattgaacttagcgaactagattcaattttaatgaggcaagatcctccttttaattcaggatatatttacaacacttacgttttagaaatggctgaaagacaaggagttaatatctttaataatcctagaagcttgagagactgtaatgagaaggtttacgcctccgaatttcctcaatgttgcactaggcaccttgttacaagccgaaaagattttctaaccgattttgtactggaaaataaagatactgtcattaagccattagacggaatgggtggagcttctatttttagagtgaagtctaatgatccaaatttaaatgtcattttagaaacaataactgatcaattcactgaaaaggtcatgatccaagaattcatacctgaaatatctgaaggagataaacgtattctcattgtgaatggaaaacccatgaatgcttcaattgctagagtgcctgcagaaggtgagcttcgaggtaatttagctgcaggcgcttctgcggttgcaaagtctctatcagaaagagacttgtggatatgtgaagaactaggcccatcattagtgaaaaaaggacttttattagtaggtcttgatattattggagattatttaacagagataaatgtaacaagtccaacatgctttaaggaatacaaagagctttgtgatattgacgtagccgaaatt

SEQ ID NO: 312257 - DNA, 613 bp, Unknown
  Bacterial polypeptide expressing nucleotide sequence isolated from the Sargasso Sea
aatagttaataatccattttgggtgaggaattttccggaaaagttactggttctggaatttcccgatttgataccagacacactaatttcttgtgatttagaggagatcaaagagttcaaacgcgaatttaaggacataattatcaaaccactttacggcaatggtggggccggtattttccggttaaaagaagatgacaagaacttgacatctttgcatgagcttttttctagtgtttcttcagaacccctgatcgcgcaagaatttttacctgatgttaaaaatggtgataaacgtataatattggttgatggcgatcccgttggtgcaatcaaccgagtaccaaaagctggtgaaataagatcaaatatgcatgtaggtgggaaagctgaacgagcaaaaataagccaaagagataaggaaatctgtagtgcgatagggccaatactaaaaagtagaggacagatttttgttggtattgatgttataggtgactacttgaccgagataaacgttacctcgccaacggggatacaagagctagagcgtttcgataaagtaaatatagcagaaatgatttggcaggcagtagaaaaaaagctgaatagttga

SEQ ID NO: 312258 - DNA, 724 bp, Unknown
  Bacterial polypeptide expressing nucleotide sequence isolated from the Sargasso Sea
attgaactcagcgaactcgattcaattttgatgaggcaagatcctcctttcaattcgggatatatttacaacacttacgttttagaaatggcagcaagacaaggagttaatatctttaatgatcctagaagcttgagagactgtaatgaaaaggtttatgccaccgaatttcctcaatgttgtactaaacaccttgttagtagccgaaaagatttcttggtcaattttgtattggaaaataaagatactgtcattaagccactagatggaatgggtggagcttctatttttagagtgaaggctaatgatccaaatttaaatgtcattttagaaaccattactgatcatttcactgaaaaggtcatgatccaagaattcatacctgaaataaccgaaggagataaacgtattctaattgtggatgggaaacctatgagtgcttccattgccagagtgcctgcggaaggtgagcttcgcggtaacttagctgcaggtgcttctgcggttgcaaagtctctatcagatagagacttatggatatgtgaagaagtgggcccatcattagtagaaaaaggacttttattagtgggtcttgatattattggagattatctaacggagataaatgtaacaagtccgacttgctttaaggaatataaagagctttgcgatatcaacgtagctgaaatttttattgaatcggtcgaagaattttctaaatgag

SEQ ID NO: 312259 - DNA, 808 bp, Unknown
  Bacterial polypeptide expressing nucleotide sequence isolated from the Sargasso Sea
atgggcctggaggccgaacggcgagggcatcagctgtaccactacacgccgcgagaactagccatgctcgacggacgggtcgtcgccgaaatgcagcccatgtcgctgcgccgcgaggtcggcaaccactacacgctgggcgacacagcgacggtcgacctgaccgacatagacgtggtgctcctacgccaggacccaccctttgacatgtcatacatcaccacgacacactttttggaacgcgtgcatccagacaccctcgtggtcaataatccgggcgaggtgcgcagcgcgccggagaagttgttcgtaaccgagttcgctgatttcatgccgccgaccctgattgccacggaccaggatttgatccgcgccttccgggacgagcaccaggacatcatcctgaaaccgctatatggcaacggaggtgcgggagtgttccacgtgacgcccggcgacgagaacatgaattcccttctcgagatgttcgccgaacgcaaccgcgagccgctgatcgcccaggcctacctgagggacgtgcgcgagggcgacaagcgtatcatcctcatcgacggcgaaccggtcggcgccaccaatcgagttccccaggaaggcgaggcacgctccaatatgcatgtaggtggccaggccaagaagacggtcctgaccaggcgcgaacgcgacatctgctcagccatcggcccggctctcaagaaacgcggcatgattgtcgtcggcatcgacgtcattggcggttacataaccgagatcaatgttacctctccgacgggcctccaggaaataaacg

SEQ ID NO: 312260 - DNA, 680 bp, Unknown
  Bacterial polypeptide expressing nucleotide sequence isolated from the Sargasso Sea
tcctccatttgatatgggatacataacgaatactcacttactcgatttggttgcgaaagaaactttgattgtaaataacccattctgggtaaggaatttacccgaaaaattgctggttctgcaatttccagatttaataccagacacattgatttctcgggatttagaggagatcaaagaattcaaacgcgaatttaaggatataattcttaaaccactttacggcaatggtggagctggtatttttcggttaaaagaagatgacaaaaacttgacatctttgcatgaacttttttgtaatatttcttcagaacctttaatagctcaagcttttttacctgatgttaaaaatggtgataaacgtataatattagttgatggtagcccagttggtgcaatcaaccgagtaccaaaagctggtgagataaggtcaaacatgcacgttggtggaaaagccgaaccagcaaaattaagtcaaagggatagggaaatatgtagtgcgatagggcccacactaaaaagtaaagggcaggtttttgttggtattgacgtaataggtgattacttgactgaaataaatgtaacttcgcctactgggatacaagaactagagcggttcgataatataaatatagcagaattgatttggcaggcagtagagaaagagctgaagaattgag

SEQ ID NO: 312261 - DNA, 642 bp, Unknown
  Bacterial polypeptide expressing nucleotide sequence isolated from the Sargasso Sea
aaggcaccttgattgtcaacaaaccacaaagtttgcgtgatgccaacgaaaagctctacaccagctggtttgcacagcatacgccaaaaactctggtcacccgagatgcggctcgcttaaaagccttttaccagcaagaacaggacgtgatcttaaaaccgctggatggcatgggcggcgcctccattttccgcttaaaaccagaggatgcaaacgtcagcgttattattgaaactctgacagaacacggcagtcgttatgctatggcgcagcgctttatcccagaaattaaagacggagataaacgtgtactggtcgtcaacggcgaacctgtcccctattgtttagcgcgaattccggctagcggtgaaacccgcggtaatttagccgctggtggtcgtggtgaagcccgccctttaagcgaaactgactgggctatagcccgtgccgtaggtcctacgttaaaggccaaaggtctgatttttgttggtcttgatattattggtgaccgactgactgaaattaatgtcaccagcccaacctgcatcagagaaattgaagcagcttttccggtcagcatcacaggcatgttatttgaccagattgaactactgttaaagcagaagcagcaacagtcctaag

SEQ ID NO: 312262 - DNA, 769 bp, Unknown
  Bacterial polypeptide expressing nucleotide sequence isolated from the Sargasso Sea
tccgcagcgctggttccccttggtacggaacaggacacgccgctcgccgaactggacgtggtcctgatgcgcaaggacccgcccttcgataacgaattcgtctactccacctacctgcttgagcaggccgagaacgacggcgtactggtggtcaatcggccgcagagtctgcgcgactgcaatgaaaagttcttcgccacccagtttccccaatacacaccagcgactctggtaagccggcgtcccgacattgtgcgccagtttgccgatgagcaccgtgacatcattctcaaaccccttgatggtatgggcggatcgcagatatttcgccaccgcgaaggcgatccgaatctctcggtgattctggaaaccctgaccctgcacggccaccagcagatcatggcgcaggcctacctgccggctatcaaggacggcgacaaacgcatcctgatgatagacggggaaccggtaccctattgcctggcacgcattccggctgccggggagactcgcggcaacctggccgccggcggccgcggcgaggcgcgcccgctgaccgagcgcgatcgcgaaattgccgcagcagtcgggcctaccctacgcgaaaagggtctgatcttcgtcggactcgatgtgattggtgatcatctgacagaaatcaatgtcaccagcccgacctgtatccgcgagatagatgccgcattcgacacccgtatcggcgaacaactgatggactgcattgcgcgcaaacgtgggttaaaagcttgac

SEQ ID NO: 312263 - DNA, 899 bp, Unknown
  Bacterial polypeptide expressing nucleotide sequence isolated from the Sargasso Sea
ggactccagcttcgccatgctcgaagaggcgcaaaagcgcggctacgagctgttctatctggagatgaaagacctctacatggaggccggtcgcgccttcggtaccatgcgtccgctcaccgtcaaatatgactatgccgactggtacagcctgggcgaggtggtggatcagccgctctccagcctggacgtgatcctgatgcgcaaggatccccccttcgacaccgagttcatctacgccacctacatgctggagcgggccgaggatgaaggctgcctcatcgtcaacaagccccagagcctgcgcgacgccaacgagaagctctacaccgcctggtttgccgagcacaccccgaccacgctggtgacccgccgtgccgacaagctgcgcgcctttcacgccaagcacaaggacgtcatcctcaagccgctggacggcatgggcggcgcctccatcttccgcatgaaggaggatgacgccaacgtcggcgtcatcatcgagacattaacctctcacggcagtcagtactgcatggcgcagacctatctgcccgccatcaaggatggcgacaagcgggtgctggtggtggacggtgagccggtaccctactgcctggcccgcattccggcccagggggagacccgtggcaacctggcggccggcggccgtggcgaggcgcgccccctgagcgaagcggactgggccatcgcccgcgcggtaggcccgacgctgaaagagaagggtcttatcttcgtcggcctcgacatcatcggcgatcggctgaccgagattaacgtcaccagcccgacctgcatccgcgagattgaagcggccttcgacgtacacatcaccggcatgctgatggatgccatcgagcgccggctggccaaggcttgag

SEQ ID NO: 312264 - DNA, 876 bp, Unknown
  Bacterial polypeptide expressing nucleotide sequence isolated from the Sargasso Sea
tgatggcggcgcagaaaaggggttaccaactgttttatatggaaatggccgacctcgccatggtcaacggcgttgccatgggcaatatgcgtccattaaaggtcatcaatgatgccaataaatggttcgaattgggcgacgcccaagatacgccgctgagcgagcttaacgtagtgttaatgcgtaaagacccgccgttcgataccgaatttatctacgccacttacatgctagaacgcgccgaagagcaaggcgtactgattgtgaataagccgcaaagcctgcgcgatgccaacgagaaactattcaccgcatggtttagcgaatttacgccagaaaccatagtgacccgcgatgccaaccgcatccgcgcgttccaccaagccaagggcgacattatcctcaagccattagacggcatgggtggcacctcgattttccgcgtgaagcaggacgaccctaaccttggggtgatcatcgaaaccttgacccaatatggcaaccaatacgccatggcgcaggcctttattcctgaaattaccaagggcgacaagcgcattctggtggtggacggtgagcccgtgccctacgccttagcgcgtattccgaaaaaaggcgaaacccgcggtaacttggccgcaggcggcagcggtgttgcccagcctttatcggactcagattggaaaatcgcccgcgccattggcccagagctgaaaaaacgcggcctgatttttgtgggtctggatgtgattggtgacaagctgaccgagattaacgtcactagcccaacctgtatccgtgaaatccaagcggcattcgatgtggacattactggcatgctgttcgatgccatcgaagcccgtcttgcccagtaag

SEQ ID NO: 312265 - DNA, 958 bp, Unknown
  Bacterial polypeptide expressing nucleotide sequence isolated from the Sargasso Sea
atggacattctctttatcgccgacccgctcgagcgcttcaagatctacaaggattcgacctacgcgatgatggcggaggcggcgcggcgcgggcatgcggtgtacgcatgcgagccgcaccagctcgcgtggacgggttcgggcgtcgaggcggacgtgcagcgcgtgacgatcgtcggcgatacggccgatctgcaccgccatccgtggtacgaggcggccgcgcacgaatcccgtgcgctgacgtcgttcggtgcggtgctgatgcgcaaggatccgccgttcgacatggaatacgtgacggccacgtggatgctcgagcttgccgagcgggcgggcgcgcacgtgttcaacaagccgcagtcgatccgcgatcactcggaaaagctcgcgatcggcgagtttccgcaattcgtcgcaccgacgctcgtcacgcgtgatgcggcgcgcctgcgcgccttccacgccgagcatggcgacgtgatcgtcaagccgctcgacggcatgggcgggatgggcgtgttccgtgtgaaggccgacgggatgaatctcggcgcgatcatcgagatgctcggccacgacggcacgcgctcgctgatgatccagaagttcattccggagatcaaggcaggcgacaagcgcatcctgctgattgcgggcgaaccggtgccgttttcgctcgcccggattccgcagggcagcgaagtgcgcggcaatctcgcggcgggcgggctcggcgtggcgcagccgctgaccgcgcgcgatcgcgagatcgccgaaacgctcgggcccgtgctcgcggcacgcgggttgctgctggtcggcctggatgcgatcggcgactggctgaccgaggtgaacgtcacgagcccgacgtgcttccgcgagatcatggagcagacgggcttcgacgtcgccgcaatgttcatcgacgcgctggagcgggcagccgcgtagg

SEQ ID NO: 312266 - DNA, 943 bp, Unknown
  Bacterial polypeptide expressing nucleotide sequence isolated from the Sargasso Sea
atgaagctaggtgttgttatggatcccatcgagactattaatttcaaaaaagatagtactttagcgatgatgatcgaagctcaaagaaaaggtcacgaaatcatttatatggcccctgattctttattcattgattcgggtattccctatgcaagttctaataaattagaggttagaaataatccctcggactggtttactaaagaagaagaaatgataattgaactcagcgaactcgattcaattttaatgaggcaagatcctccttttaattcaggatatatctacaacacttacgttttagaaatggcagtaagacaaggagttaatatctttaataatcctagaagcttaagagactgtaatgaaaaggtttacgcaaccgaatttcctcaatgttgtactaagcaccttgttacaagccgaaaagattttctaaccgattttgtactggaaaataaagatactgtcattaagccattagacggaatgggaggagcttctatttttagagtgaaggctaatgatccaaatttgaatgtcattttagaaacaataactgatcatttcactgaaaaggtcatgatccaagaattcatacctgaaatatccgaaggagataaacgtattctcattgtagatgggaaacctatgagcgcttccattgccagagtgcctgcaaaaggtgagcttcgaggtaatttagctgcaggtgcttctgcggttgcaaaatctctatctgaaagagacttgtggatatgtgaagaagtgggcccatctttagtggaaaaaggacttttattagttggtcttgatattattggagattatttaacagagataaatgtaacaagtccaacttgctttaaggaatataaagagctttgtgatattgacgtggctgaaatttttattgaatcggtcgaagaattttctaaatgag

SEQ ID NO: 312267 - DNA, 943 bp, Unknown
  Bacterial polypeptide expressing nucleotide sequence isolated from the Sargasso Sea
atgaagctaggtgttgttatggatcccatcgagactatcaatttcaaaaaagatagcactttagcgatgatgatcgaagctcaaagaaaaggtcatgaaatcatttatatcactcctgattctttattgattaaatcgggtattccctatgcaagttccaataaaatggaggttagaaatgatccatcggactggttcaccaaagatgaggaaaaaataattgaactcagcaaactcgatataattttaatgaggcaagatcctccttttaattccggatatatttacaacacttacgttttagaaatggctgcgagacaaggagttaatatctttaataatcctagaagcttgagagactgtaatgaaaaggtttatgccaccgaatttcctcaatgttgtactaaacaccttgttactagccgcaaagacttcctaaccgattttgtactggaaaataaagatactgtcattaagccactagatggtatgggtggagcttctatctttagagtgaaggctaatgatccaaatttaaatgtcattttagaaaccatcactgatcatttcactgaaaaggtcatgatccaagaattcatacctgaaataaccgaaggagataaacgtattctgattgtggatgggaaacctatgagtgcttccattgccagagtgcctgcggaaggtgagcttcgcggtaacttagctgcaggtgcttctgcggttgcaaagtctctatcagatagagacttgtggatatgtgaagaagtgggcccatcattagtagaaaaaggacttttattagtaggtcttgatattattggagattatctaacggagataaatgtaacaagtccgacttgctttaaggaatataaagagctttgcgatatcgacgtagctgaaatttttattgaatcggtcgaagaattttctaaatgag

SEQ ID NO: 312268 - DNA, 958 bp, Unknown
  Bacterial polypeptide expressing nucleotide sequence isolated from the Sargasso Sea
tatgaaaaggacaaaatataagctaggtattgtaatggaccctatctctgctatagatccgaaaaaagatagctctttggcaatgcttattgaagccgataaaagagattatgaaatctactacatggaacaaaaagatttaaagttaatagatggatgtgcaactgcgcaggccactattattgaaattttcgatgatcaaaaaaaatggtacaagagcaaatcaaatgtctctatagacttaaaagaactgaatatcatactcatgcgaaaagaccctccttttgatatggaatatatttatacaacttatgtcttagacaaggctgaagaggatggggttcttattgttaacaaaccacagtcactaagagacatgaatgaaaaagtatacactgcctggtttccagaatgcacaccatccacattgatatctagatcaatggctgaaataaagttatttttaggacagcataaaaaaatagttgtaaaacctcttgatggtatgggtggaaagtcaatttttgtcgttgatgaaaatgatggtaatgccaatgtaattattgaaactcttacaaattatggaacatgctcagcaatggcacaggtttttattccagaaatcaaagatggtgacaaaagaatattattaattgacggcaagcctgtgccttatgcgctggctagaattccttcaaaagatgataatagaggtaatcttgtcatgggagcagttggtgaaggaagagagcttactgaaagagataaattaatatgcagtaagatctctgaaacattaaagaaaaaaggaattttgttttgtggaattgatgtcattggggattatctgactgagattaactctacaagccctacaggaattagggagctcgattcaatatataaccttaatatagcaagcgatctttttgacatgctcgagaaaaaaatcaattga

SEQ ID NO: 312269 - DNA, 955 bp, Unknown
  Bacterial polypeptide expressing nucleotide sequence isolated from the Sargasso Sea
atgcaatataccgttggcgtaattatggaccccatcgcgagcattaagccacataaagatacaagctttgcgatgatgcttgaagctcagcgccgcggtgcaaaggttgtatattttgaattaaaagacctgtatttagacaatggtaagcctatgggtttaggtaaaaccgtatcggtcaaggatcaagctacagatttctacaccattgaagacgagtctacgttgtatttaggcgacgttgatgtgttactcatgcgcaaagatcctccttttgacagcgagtttttgtatgcgactcaggtgctgtcgcttgcgcaggacgcgggagcgctagttgtgaataaccctcaagcgcttcgcgactacaacgagaagttgtttacgtcgtacttcccagaacacattcccaataccttagtcacgaacaaccaagcgcttatccgtgagtttcacgccaagcaccaagacattatttgcaaacccttagacggtatgggtggcgcgtctatctttagagtgaagcctgatggcaataacttaggcgttattattgaaaccctaaccaagttaggcacgcgctacatgatggtacaagagtaccttccagagattaaagacggcgataagcgcgtactcatcgttgatggtgaagtcatgccgtattgcttagcgcgactgcctacaaaaggggaaacccgaggtaacctagccgctggcggtacaggacgccctcagccaatctcagattctgaccgcgccctagccgaagccatcgcgccaacgctcaaggaaaataacattttatttgtaggacttgatgttattggcagcaaaattactgaaataaacattactagcccaacttgcgtaagagaaatagaagcagcttacgatgttaatataatgggtgcgctgtttgacgccattgaaaagcgcttagccagtaaataaa

SEQ ID NO: 312270 - DNA, 970 bp, Unknown
  Bacterial polypeptide expressing nucleotide sequence isolated from the Sargasso Sea
gatgattaaattaggcatagtgatggatccaatcgcggacatcaatatcaaaaaggactccagttttgccatgttattgcaagcacagtcccgtggttatcagctgcattacatggaaatgaatgacctgtatttaattgaaggtcaggctcgtgcccgcacccgtttgttatctgtgcagcaaaatggcgaacattggtacgattttggtggcgctcaggacatcgctttatccgatttagacgtgatcttgatgcgtaaagatccaccttttgacactgaatttatttacgccacttatattctggaaagagcggaagatgaaggcacgctgattgtaaataaacctcaaagcctgcgcgacgccaacgaaaagctttacaccagttggtttgcacaacatacgccaaaaactctggtgacccgcgacgcagcgcgcctaaaggcgttttatcagcaagagcaggatgtcattttaaaacccttggatggcatgggtggtgcttcgattttccgtttaaaaccggacgatgccaacgtcagcgtcattattgaaaccctgacagagcatggtagccgttatgccatggcgcaaaagtttattccggaaattaaagacggtgataaaagggtgctggtagtgaacggtgaacctgtgccttattgcttagctcgtattccggccagcggtgaaacccgtggcaacttagcggcaggtggtcgtggtgaagctcgtcctttaacagaaagcgactgggctatagccagagctgtaggtccaacccttaaagccaaaggtctgatttttgttggtcttgatattattggtgatcggttgactgaaattaatgtcacaagcccaacctgtatccgcgaaattgaagcagcctttccagtgaatatcactggcatgttatttgaccagattgaactactgttaaagcagaatcagttatcaaagcaaaactaa

SEQ ID NO: 312271 - DNA, 949 bp, Unknown
  Bacterial polypeptide expressing nucleotide sequence isolated from the Sargasso Sea
atgataaaactcggcatagtgatggaccccatcagtgagatcaacattaagaaagactccagttttgccatgctgatggcggcgcaggaaaggggttaccaactgttttatatggaaatggccgacctcgccatggtcaacggcgttgccatgggtaatatgcgtccattaaaagtcatcaacgatgccaataaatggttcgaactaggcgacgcccaagatacgccgctgagcgagcttaacgtagtgttaatgcgtaaagacccgccgttcgataccgaatttatctacgccacttacatgctagagcgcgccgaagagcaaggcgtgttaattgtgaataagccgcaaagcttgcgcgatgccaacgagaaactattcaccgcatggtttagcgaatttacgccagaaaccatagtgacccgcgatgccaaccgcatccgcgcgttccaccaagccaagggcgatattatcctcaagccattagacggcatgggcggcacctcgattttccgcgtgaagcaggacgaccctaaccttggggtgatcatcgaaaccttgacccaatacggcaaccaatacgccatggcacaggcttttattcctgaaatcaccaagggcgacaagcgcattctggtggtggacggtgagcccgtgccctacgctttagcgcgtattccgaaaaaaggtgaaacccgcggtaacttggccgcaggcggcagcggtgttgctcagccgttatcggactctgattggaaaatcgcccgcgccattggccctgagctgaaaaaacgcggcctgatatttgtgggtctggatgtgattggtgacaagctgaccgagattaacgtcactagcccaacctgtatccgtgaaatccaagcggcattcgatgtggacatcactggcatgctattcgatgccatcgaagcccgtcttgcccagtaag

SEQ ID NO: 312272 - DNA, 958 bp, Unknown
  Bacterial polypeptide expressing nucleotide sequence isolated from the Sargasso Sea
atggacattcttttcatcgccgatccgctcacgcagttcaagatctacaaagactcgacctacgcgatgatggccgaggccgcgcgtcgtggccacacgctttacacctgcgagccgaagcatctggcgtggactggcggcgacgtcgaggcgaacgtgcagcgctttgcgatcgtcggcgacgtaactgacctgcatcgcgacacctggtacgccgccgaagcagccgcgccgcgttcgctgaaacaattcagcgcggtggtgatgcgtaaagacccgccgttcgatatggaatacgtgacgtcgacctggctgctggaaatggccgagcgcggcggcgcgcgcatcttcaacaagccgcaggcgattcgcgatcattcggaaaaactggcgatcggcgagttcgcgcagttcgtggcgccgactttggtgacgcgcgacgccgcccgcttgcgcgccttccatgaagaacacggcgacgtgatcctgaagccgctcgacggcatgggcggcatgggtgtgtttcgcgtgaaggccgacggcatgaatctgggctcgatcatcgagatgctgagccacgacggcgcgcgctcggtgatggcgcaaaagttcatccccgaaatcaaggaaggcgacaagcgcattctgctgatcggcggtgaagcggtgccgttttcgctcgcgcggattcctcagggtaatgaggtccgcggcaatctggcggccggcggactgggcgtggcgcgaccgctcactgagcacgaccgcaagatcgccgacacgctcgcgccggtgctcgccgcacgcggtctgctgctggtcgggctggacgcgatcggcgactggcttaccgaggtgaacgtgacaagcccgacatgtttccgcgagatcatggatcagaccggcttcgacgtcgcggcgatgttcatcgacgctctggagcgcgcggcggcttgat

SEQ ID NO: 312273 - DNA, 788 bp, Unknown
  Bacterial polypeptide expressing nucleotide sequence isolated from the Sargasso Sea
agaaaatctggacggccaatcaagcagtgcaaccaactggtatgaactagctgatccgaaagaacagccgctagagatgatgcaggttattatgatgaggaaagacccaccatttgatatggaatacatctattcaacctattatctggaaagggctgaagcaaaagggtccttggttatcaataaaccatcttccttgagagactgcaacgaaaaattgtttgcaactcattttcctgaactgacccccgaattagtggtcagtcgtaacagtcagaccttaaaagaattcttttttcaacatgaggatgtcgtattcaagaaactcgatggcatgggaggaaaatctattttcagggtaaaaggcgatgactcaaatctcaacgtaatcatcgaaaccttgaccgacaacagctctactcaaattatggcccagaaatacatacccgaaatcgtagaaggcgacaaacgcatcttgatgatcgatggagaacctttgccctgggcgctagctcgaattccagcggctggggaatcaagagggaacctcgccgcgggaggaactggagtcgggcaacctatttctcaaagggataaagaaatagcaaaacaattaggacccgagctacgaaagagggggctaatcttcgttggcatcgacgtaataggcgactatctaaccgagattaacgtgacttgtcccacatgcatcagagagctagatcaacagttcgattcaaacatttccgcagacttaatgaattgcatcgaaaataaattgagttaag

SEQ ID NO: 312274 - DNA, 949 bp, Unknown
  Bacterial polypeptide expressing nucleotide sequence isolated from the Sargasso Sea
aatgataaaactcggcatagtgatggaccccatcagtgagatcaacattaagaaagactccagttttgccatgctgatggcggcgcaggaaaggggttaccaactgttttatatggaaatggccgaccttgctatggtcaacggcgtagccatgggcaatatgcgtccattaaaagtcatcaacgatgccaataaatggtttgaactgggcgatgcccaagacacgccgctgagcgatctgaacgtggtgttaatgcgtaaagacccgccgttcgataccgaatatatctacgccacttacatgttagagcgcgccgaagaacaaggtgtattaatcgtcaacaagccacaaagcttgcgcgatgccaacgaaaaactattcaccgcatggtttagcgaatttactccagaaaccattgtgactcgcgatgccaatcggatccgcgcgttccaccaagccaaaggcgatattatcctcaagccactagatggcatgggcggcacctctattttccgcgtcaagcaagacgaccctaaccttggggtgatcatcgaaaccttaacccaatatggcaaccaatacgccatggcgcaggcctttattcctgaaatcaccaagggcgacaagcgcattctggtggtggatggcgagcccgtgccctacgccttggcgcgcattccgaaaaaaggcgaaacccgcggtaacttggccgcaggcggcagcggtgttgcccaaccgttatctgactcagattggaaaatcgcccgtgccattggcccagagctgaaaaaacgcgggctgatttttgtgggtctggatgtgattggtgacaagctgaccgagattaacgtcactagcccgacttgtatccgcgaaatccaagcggcatttgatgtggacattactggcatgctgttcgatgccatcgaagcccgtctcgcccagtaa

SEQ ID NO: 312275 - DNA, 757 bp, Unknown
  Bacterial polypeptide expressing nucleotide sequence isolated from the Sargasso Sea
tataactggcgaccatttttgtttgggggaacaaatagctacagatctgaaaacggacattgatgtaattcttatgcgccaggacccgcctttcgatatgtcatatataactgccactcatattcttgaacatttacatccggatacattagtaataaatgatcccacaaatgtccgtaacgctcccgaaaagttatttgttactcattttaaaaatgttatgcccccgacattaataacctctgatgaaaaggaaatattcagctttcggaaggaatttaaggatataattgtcaaacctttatttggaaacggaggcgccggggtatttcatataaagccagacgatgaaaatttgagctcactagtagaactttacaaaacattttatagagagccacttatgatccaggaatacctccccgcagtgcgaaaaggagataaacgcatcattcttatcgatggtgaggctgttggtgcaataaaccgagttccggccgatggcgaagcacgatcaaatatgcacgtaggcggaaggcccatgaaatgtgaattaacaggccgtgatagagaaatttgtgaaattattgggcctagcttgaaagaaaagggcttactgtttgttggtattgatgtaatcggcaactatctgaccgagatcaatgttacctcacctaccgggattcaagagttaagccgatttgaaaatatcaacatcgctaagttaatttgggaagccatcgaaaaaaaattataa

SEQ ID NO: 312276 - DNA, 328 bp, Unknown
  Bacterial polypeptide expressing nucleotide sequence isolated from the Sargasso Sea
agtgttaccaataattaaaattgacacaaaaagagaattctataattacgaagctaaatatttggatgataatacctccttttcgtttcctgaatttagtactgaaaaagaattatctattaaagaggtttgtttaaaagcattcgaatcactaaactgtagaggatggggaagagttgatttttttatagacaaagatatcaatttaattgagataaatactattcccggaatgacaagtcatagcctggttcctatgtcagcaaaacatttaggcatgtcgtatctacagctagttgaagagttattaattaatgctaaaaaataa

SEQ ID NO: 312277 - DNA, 355 bp, Unknown
  Bacterial polypeptide expressing nucleotide sequence isolated from the Sargasso Sea
actgttacagtaattgataatgtatgttttccacccatagaaataatcacaaataacgaattctatgactatgaagctaaatatatctctaatgatacgcttcatatagaagcagatcttaatcaggatgagattaaagaaattaaagaaatctctttaaaagcttttaaatcattaggatgtaaagggtgggcgcgagtagatctatttcaagataccgataaaaacttatctattattgaaataaatacagtgccaggtatgacctctcacagcaatgttccaaaatcaggaagtttaataaatttatcatatagcgatgttgttcaaagaattattaatgcttcactttaat

SEQ ID NO: 312278 - DNA, 433 bp, Unknown
  Bacterial polypeptide expressing nucleotide sequence isolated from the Sargasso Sea
atggccctatggcgagacggtcatggtcgagcgcttcgtgcgcggacgcgaattcacctgcggcgtgatcgacggcaagtcgctttgcgtgaccgaaatcgtgcccgtggggcagaaattctatgatttcgacgcaaaatacaaacctggtggctcaaaacacattctgccggcggaagttaaaccgaatatttaccaaaagattcaatcattggccgttcaggcacatcagatcatgggatgccgcggcgtcagccgttcggatttccggtttgatgaggagaggggcgaggaagggctgatctggctggaaatcaatacccagcccggcatgacccccacctctctggttcctgaaatggcggctgaagccggtatgagttttagtgcttttctccgttggatggtggaggacgcttcgtgtttgcgttga

SEQ ID NO: 312279 - DNA, 826 bp, Unknown
  Bacterial polypeptide expressing nucleotide sequence isolated from the Sargasso Sea
tgcttgtttagaacttggatatgaaactacgcctgtagatttcaaaggggactttagctctattttaaatgatttaaaatgttcagatattgtttttaacgcgcttcatggaactgttggtgaggacggcactattcaatcctggttagatggggaaaatattggctatactggctcaggtcctgactcttctaaattatgtatgaataaaaataaaagtaaaaaaatcatccgcaaaaataattatctcactcccagctggttcacaattgataataaaagttcgaagctacctggcgaagttattaaatcaattgcttttccttgcattgtcaagcccaatgctcaaggaagtacttttggactttcaatagtaaatgacaccaatgagctggcagaggcaattaaattatcaggaaagtatgatgacacctcattagttgaagaatatattattggcagggaaattactgttggaatattagatgaaagggcgctaccaattgttgaaatagttcccgatcataaattatacgattatgaatgtaaatatagcccaggcaagagccagtatttatgtcccgccgatattggcttcaataaagaaaaacaaattaaaaaggatagtgaaaaaattttcaaattattaggctgtaatggatacggtaggctagactttttattggataataatggtagatatttttttctcgaattaaatacattgcctggtatgacatcgacaagtttattgccaatagctgctgctgaatcaggaaaatcctttcccgatttggttgatactattataaggcttagcatttaa

SEQ ID NO: 312280 - DNA, 703 bp, Unknown
  Bacterial polypeptide expressing nucleotide sequence isolated from the Sargasso Sea
gttttagaaagcttaaaaattaaatatacccattcaggagttttatcctcatcgattgcaatggataaaataatatccaaagaaatatttataaaaaataaaattttaacacctaaatattttaagtttatttttgaaggtaatactttaaaaaaaagcaaaataataaataaaataaaattaaagttgaaattccctgtaattatcaaacctataaatgaaggatcaagcgtagatgtatttatttgttcagaaaaaaacctaattaagaatttaaaaaaattaaaaaaatatgaagaaatattgattgaagaatatataggaggcagagaaattcaagttgcaatactgggtaaaaaaaagctaggtgcaatagaattaaaaccaaaacgaaaattttatgattataaagcaaaatatagtttaagcgcaaagacagaacacttaattccagtaaatttaagttcaaaaaatatgaataaagttttggatatttcgttaaaagctcataactgtcttagatgcagaggagttacaagatctgattttaaattttataatgataaattttatttattagaggtaaatacccagccaggaatgacaaaattatcattagttccagaaattgcagctcacattggaatgaattttttaaatttattagagtggattttgaatgatgcttcaacaaataagtaaa

SEQ ID NO: 312281 - DNA, 695 bp, Unknown
  Bacterial polypeptide expressing nucleotide sequence isolated from the Sargasso Sea
tcaatcatggttagataaaaataatattaattatactggctcaggttcttatgcttctagatcatgcatggataaaaatgagagtaagaaaattgtccgcaaaaataattatctcacccccgagtggactacaattgataataatgatacaataattaccaaagaaatcactagatcaattgattttccatgtattgttaagccaaattctcaaggaagtacttttgggctttcaatagtcaatgacaagattgagttaatggcggccattgaattagcagggcaatatgatgatattacattgatagaagaatatattgtcggaagggaaattactgttggtatacttgggaataaagcactgccaattgttgaaataattccagataatcaattatatgattatgaatgcaagtatagtccaggaaagagtcagtatttatgtccagcagaaatcgactccaataaagtaaagcaaattaaagaagatagtgaaaaaattttcaaaatattgggttgtcgtggatatgggagaatagactatatattagattcaaatgataggcatttttttcttgaattaaatacattgcctggcatgacctcaaccagcttattaccaattgctgcggaaaagtccggtaaatctttttcgcagctagttgatatcattattggattaagcattcaataat

SEQ ID NO: 312282 - DNA, 607 bp, Unknown
  Bacterial polypeptide expressing nucleotide sequence isolated from the Sargasso Sea
caaaaatatattaagacagcacaatcttcctactcccgatttttctgtgtataaaacatttcaagaaataattgagtctaaaaataaaatagaagagcagtttcaagaaggtgtttttataaaaccctgcaaagaaggctctagtatagatattattaaggtaacagatttctcaaaatctgatctagagaagataaaagtagatttagttgacagagaaagaaaatttttagtcgaaagatttgttgagggtagggagtttaccgtcggttttttaaatgatcatattcttgaacccttagaaataattactaaaagagaattctatgattatgaagctaaatatgatgatgatgaaactcagattattaaagctgatttaaacgaaaatgacttggatacattaaaagaaatagctaaaagttgtttcaaagtatttggactttcaagatggggcagagtagatattctgcaggatcaaaaaggaaatttttttgtattagaacttaatactgttccaggtatgactgatcatagtctttttccttatgctgcaagcttaaagggatttagttttgatgagctagtaaatgaaattacaaagtaa

SEQ ID NO: 312283 - DNA, 590 bp, Unknown
  Bacterial polypeptide expressing nucleotide sequence isolated from the Sargasso Sea
aagaacaccaaaatatttagtatttaattttgaatcaaataagaaagaaatatttgctaaaattaaaaaatatttaggatttcctgttgttattaaaccaataaacgaaggttcaagtgtaggtgtttatatatgcaaaaaaaaaaattttttatttaatctaaataagcttaaaaaatataaggaaatattaattgaagaatatattccaggacgcgaaatacaagttgcaatactaggtaaaaaaaaacttggtgccattgaattgaaaccaaaaagacagttttatgattataaagccaagtacaatgcttctgctggaacaaagcatataattcctgttcaaatagataaaaaaaatttaaaacaagttttatctatagctctcaaagcacatcaattacttaaatgtcgaggagtaacaagatcagattttagattttataataataagttttatcttctagaattaaatactcagccaggaatgactagcttatctttagtacctgaaattgcatcatattatggaattagttttataaaattgatagaaatactcataaatgatgcttcaattaaaaagtaaa

SEQ ID NO: 312284 - DNA, 386 bp, Unknown
  Bacterial polypeptide expressing nucleotide sequence isolated from the Sargasso Sea
attgcttttatctggtggatggtctgcagagagggaagtctcaataagatcgggtgccgcagtttctgcagctttagatcgactatctataggttacactcacatagatttaagttctgagcaagatgctaaaaatttatcagaagaatatgatctagcttttattgccttacatggaagaggaggagaagatggattcattcaggaaattcttgagtcaaaagatattaaatatacagggagcaactctagttcttgtaaaacttctcttaataagattgaagctaaaaaaatatggagagaattgttattacctactccagacttcgttgagataattaacgtaggtgatccggagatgaaattaacacctcatttatcaggag

SEQ ID NO: 312285 - DNA, 455 bp, Unknown
  Bacterial polypeptide expressing nucleotide sequence isolated from the Sargasso Sea
gctggaggccgcctaccgtcacgcgagcacatttggtgccgatgtgatggccgagcagttcgtctccgggccggaatacaccgtcgcgatcctcggcgacagagcactgccgagcattcgcattgacgtatccggtgatttctacgatttcgaagccaaatatcactccgaagaaacccgctttacctgtccgtcggacttggccacccaggaggaggcagcgctgtctgagctggcgctggccgcttttgccgcggtcggcggtgaggtgtgggggcgggtcgatgtgatgcgtgaggccggaggagactggcagctgctcgaggtcaataccgttcccggaatgacctcccacagcctcgtgcccctcgccgccaaagtggcggggctgagcctgctcgacctacttactgagatctatcaacacagcctggaggtgcgccatgccgactaat

SEQ ID NO: 312286 - DNA, 349 bp, Unknown
  Bacterial polypeptide expressing nucleotide sequence isolated from the Sargasso Sea
tttgggaaatgaaccactccctgttattgaaattgaaccaaaatctggtatatatgattacaaatcaaaatatacagctggcgaatcaagatatacatgtcctgctgatctcactttagaaaaatatcaatttgtgcaagattgcgcattaagtgttcacaagatgcttaaatgtgatgtttattcaagagttgactttaaattttatgacaataatttttattttttagaaataaatactcttcctggaatgactgaaactagtttatttcctatggctgctaaaagacatggattttcttttaaagatataatttataaaattattaaattgtctttacaaaaatga

SEQ ID NO: 312287 - DNA, 453 bp, Unknown
  Bacterial polypeptide expressing nucleotide sequence isolated from the Sargasso Sea
aaattagtgatgaagatagcttaagagccgcatataaaaaatgcacaaatcctaacagaggttttttgtttgaagaatatattcatggaagagagataacagtaactataattgacaaagaatgttacccgcctatagaaataattacaaaaaatgagttttatgactatgatgcaaaatatatctcagacgatactttgcatgttgaggcagaattaactcaaaaagaactagatgagattaaattaatagctgtgaatgcgtttgaagtattagattgtaaagcatgggcaagagttgacatgattcaagataaaaaaggtaaattttatgtaatagaaattaatactgttcctggaatgacaagccacagtaatgttcccaagtcaggcagtttattgggcttaacttataatgaggttgtgcaaaaaatcatagatgcttctctataaa

SEQ ID NO: 312288 - DNA, 218 bp, Unknown
  Bacterial polypeptide expressing nucleotide sequence isolated from the Sargasso Sea
aagtaaagcattaaaaattcacaagcttttagaatgtagacattattctcgcgtagactttatattggataaaaatcttaagccttggtttctagaggtcaataccttaccaggaatgactgaaactagcttagtccctaaatcagctgcagttgctggattaagttttgaagaattaattgaaaaaatcattatggaatcattaattgatgaataaa

SEQ ID NO: 312289 - DNA, 553 bp, Unknown
  Bacterial polypeptide expressing nucleotide sequence isolated from the Sargasso Sea
acattttcgagaaataattgagtctaaaaataaaatagaagagcagtttcaagaaggtgtatttataaaaccctgcaaagaaggctctagtatagatattattaaggtaacagatttcacaaaatctgatctagagaagataaaagtagatttagttgacagagaaagaaaatttttagtcgaaagatttattgagggtagggagtttaccgtcggttttttaaatgcccatattcttgaacccttagaaataattactaaaagagaattctatgattatgaagctaaatatgatgatgatgaaactcagattattaaagctgatttggatgaaaatgacttggatacattaaaagaaatagctaaaagttgtttcaatgtatttgggctttcaagatggggcagagtggacattctgcaagatcaaaaaggaaatttttttgtattagagcttaatactgttccaggcatgactgatcatagtctttttccttatgctgcaagcttaaagggatttagttttgatgagctagtaaatgaaattacaaagtaa

SEQ ID NO: 312290 - DNA, 709 bp, Unknown
  Bacterial polypeptide expressing nucleotide sequence isolated from the Sargasso Sea
aatgggaaacataaataaaattgcagttctatatggaggctcttcctctgaaagagaagtttctatacaaagtggaaagggtgttcataatgcaatctgtgatttaggctatgaatcagatctaattgattttaaagatcttaacaatttgaatgaattaaagatgtatgactttatattcattgctcttcatggttttgaaggcgaagccggtaaacttcaaagagatttagatgatttaaatattttatattctggatcaggtcatgaagcttgcatgaaaacatggaacaaaaaagtcacaaaagaaactttaaaagaaaataatataaatactcctgtttccctgagtatttctgagttttctctagaagatgcaaatcaaagtttaaatacatcattatttgatcgattcagaccatttaattatttatttttaaaacctgaggaagatggctttagtattgatatttttaaaataagtgatgaagaaagccttaaaaatgcatataaaaaatgtactaatcgtgaaagaggttttttatttgaagaatatattgatggaagagagctaactgtgaccataattgataaagaatgttatccgcctattgaaataattacaaaaaatgaattttatgattatgatgcaaagtatatttcagacgatacattgcatattgaagcagaattaacgcaaagtgaatta

SEQ ID NO: 312291 - DNA, 208 bp, Unknown
  Bacterial polypeptide expressing nucleotide sequence isolated from the Sargasso Sea
catatttgcttaaaaacacttgatatctttcaagcaacgggctggttaagagttgatcttatgcaagataataatcaaaacttttacgtacttgaggtaaatacagttcctggtatgacatctcatagtttatttcctaaatcagcagaatcaattggcatatcatatgatgaactcgtaaatagaattcttaatgctaaaaattaga

SEQ ID NO: 312292 - DNA, 538 bp, Unknown
  Bacterial polypeptide expressing nucleotide sequence isolated from the Sargasso Sea
aattgagtctaaaaataaaatagaagagcagtttcaagaaggtgtatttataaaaccctgcaaagaaggctctagtatagatattattaaggtaacagacttctcaaaatctgatctagagaagataaaagtggatttagttgacagagaaagaaaatttttagtcgaaagatttattgagggtagagagtttaccgtcggttttttaaatgatcatattcttgaacctttagaaataattactaaaagagaattctatgattatgaagctaaatatgatgatgatgaaactcagattattaaagctgatttggatgaaaatgacttggatacattaaaagaaatagctaaaagttgtttcaatgtatttgggctttcaagatggggcagagtggatattctgcaagatcaaaaaggaaatttttttgtattagaacttaatactgttccaggtatgactgatcatagtctttttccttatgctgcaagcttaaagggatttagttttgatgagctagtaaatgaaattacaaagtaa

SEQ ID NO: 312293 - DNA, 796 bp, Unknown
  Bacterial polypeptide expressing nucleotide sequence isolated from the Sargasso Sea
tatgaaaaaagtctgcatactctatgggggtaattcctccgaaagagaggtttcacttaaaagtggtaaatttattcataaatctcttgtaaagaatggatataaatctcaattaattgattatgcagatctaactgaattggaaaagttaaaagattttgatcttgtatttattgcattacatggcgaagagggcgaaagtggcattctccaatccaaaatggatgaactaggaatatactataccggctctggttttgaagcttgtaagaatagttgggataaagaaatttgcaaaaatatattaagacagcacaatcttcctacacccgatttttttgtatataaaacatttcaagaaataattgaatctaaaaacaaaatagaagagcagttccaagaaggtgtatttataaaaccatgtaaagaaggctctagtatagatattattaaggtaacagatttctcaaaatctgatctagataagataaaagtagatttagttgacagagaaagaaaatttttagtagaaagatttattgagggaagggaatttaccgttggttttttaaatgatcatattcttgaacctttagaaataattactaaaagagaattctatgattatgaagctaaatatgatgatgatgaaacgcagattattaaagctgatttggatgaaaattacttggatacattaaaagagatagctaaaaattgtttcaatgtgtttggactttcaaagtggggcagagtggatattctgcaagatcaaaaggaaatttttttatattag

SEQ ID NO: 312294 - DNA, 538 bp, Unknown
  Bacterial polypeptide expressing nucleotide sequence isolated from the Sargasso Sea
atgagaaataaaaatatacaatttccgatagtaatcaaaccaatcgatgaaggttcaagtttaggagtttatatttgtaaaaataaaaatgaatttaaaaaaaattacaataaattaaaaaaaaaatatgataaaattttaattgaagagtatattccaggaaaagaagttcaggttgctgttatgggcaataaacctttgggtgcaatagaacttgttcctaaacgtaagttttatgattataaagctaaatattcttcaaaagcaaaaaccaaacatataatgccagccccacttacaaagaaaaaatatcaagaagtacttcgtatagctaaaaaagctcacaaggctcttgggtgcagaggtattacaagatcagattttagattttttagaaataggttttatttacttgaaactaatactcagccaggcatgactagtttatctctagttcctgaaatagcaaatcacgaagggattatatttgaggatctagtttgttggattgcgaaggatgccagcattaatagatgaa

SEQ ID NO: 312295 - DNA, 576 bp, Unknown
  Bacterial polypeptide expressing nucleotide sequence isolated from the Sargasso Sea
aacaaatattaatcaaaaaaaatcaaaatatttctactaacgaaaaaattaaaagaattacttttccttgtataattaaaccaaataatggtggaagtagtattggcctctcgaaagtttataaagaggtggatctgaatgataaaatacaaattgctttcaaagaagataaagaagttttaatagaaaattttcttgatggtcaggaagtatcagtaggtgtaattcaaaataaaaatgagagaattatcttaccaataactgagattattagcgataacgaactttttgattacaatgctaaatatttgggtgaatcacaagagattacaccaggcaatatctcagataaatcaaaaaagttgatttttaaatatttgaatatgatttatgataatataaatttaaatggtataacaagatctgagtttattattatagatgaagttcctcatattttagagacaaatacaatacctgggtttactgctcagagtattattcctcaacaaattaaagctcataatcttaaggttaaagatgtaattaataatcttgtaaaatctattatttaaa

SEQ ID NO: 312296 - DNA, 640 bp, Unknown
  Bacterial polypeptide expressing nucleotide sequence isolated from the Sargasso Sea
atgaaaaaaaagtatggaaaagttcttgttttaatgggtggttggtcaaacgaacgtgagatatctttgatatcaggtaaatatgttttggagtctttaatatcatctggtgttaacgctataagttttgatttaaataaagataatcttcatgaaataaaacaaataaatcctgatagagttttcattatcttacacggcaaaggtggcgaggatggagaaattcaattatttttagataatttaaatataccatatacaggaagtgggagtaacgcttcaaaaatatgtatgaataaaagaatctcaaaagatattttattagacaacaatatatctacaccattttacaaaaaatttgacaataaagatgatatcgaagatcttgaaaaaatattcaaatacccttttattgtcaagccctcttcggaaggatcaagtataggagtaaatattgttgaaaacagacaagattttcatcaagcaattaaagataacaaattaattagcaatgatattcttatagaagaatatatagatgggattgaatatacagtgggtattcttcacgatagagcacttcctgttataaagttaatcccaccaggaaaattttatgattttaatgcaaaaatataaa

SEQ ID NO: 312297 - DNA, 679 bp, Unknown
  Bacterial polypeptide expressing nucleotide sequence isolated from the Sargasso Sea
aaaatatactcattctggggttttgtcttcatcacttgccatagataaagaaatatcaaaaaaaatttttattagaaataatattttgacaccaccttacttcaaattaacttttaacaatattattaaccacaaaaaaattataaaaaaaattgaacaaaaactaaaattcccagttgtgctaaagccaattaatgagggatctagcgtaggtatatacattagtaaaaaaaaaaattttagtcaaaatttgatgaagttacaaaaattcaaagagattttaattgagaaatatatcccagggagagaaattcaagcagccatactaggtaataaaaaattgggtataatagagttgaggccaagaagaaaattctatgattataaagcaaagtatagtgctagtgctaaaactgaacatataattccagtcaatattagcaacaaaaattttaaaaaagttaattcaatagccatgaaggcgcataagctattaaagtgcaggggtgtatcaaggtccgatttcagattttataataacaaattttatttattagaacttaatactcaacctgggatgacatctctatctttggtacctgaaattgctagatataaaaaaattagttttataaaccttatagaagaaataatgaaagatgcttccatcaacaaataa

SEQ ID NO: 312298 - DNA, 721 bp, Unknown
  Bacterial polypeptide expressing nucleotide sequence isolated from the Sargasso Sea
acatggcgaagagggcgaaagtggtattcttcaatccaaaatggataaagcaggaatagactacatcggctctggttttgaagcttgcaggaatagttgggacaaagaaatttgcaaaaatatattaagacagcacaatcttcctactcccgatttttttgtgtataaaacatttcaagaaataattgagtctaaaaataaaatagaagagcagtttcaagaaggtgtatttataaaaccctgcaaagaaggctctagtatagatattattaaggtaacagatttctcaaaatctgatctagagaagataaaagtagatttagttgacagagaaagaaaatttttagttgaaagatttattgagggtagagaatttaccgtcggttttttaaatgatcatattcttgaacccttagaaataattactaaaagagaattctatgattatgaggctaaatatgatgatgatgaaacgcagattattaaagctgatttggatgaaaatgacttagatacattaaaagaaatagctaaaaattgtttcaatgtatttggactttcaagatggggcagagtggatattctgcaagaccaaaaaggaaatttttttgtattagaacttaatactgttccaggtatgacagatcatagtctttttccttatgctgcaagcttaaagggatttagttttgatgagctagtaaatgaaattgcaaagtaa

SEQ ID NO: 312299 - DNA, 739 bp, Unknown
  Bacterial polypeptide expressing nucleotide sequence isolated from the Sargasso Sea
atgcatggcgttggaggtgaagatgggactgtacaaaaatatcttgaaaaaataccggtatcatcaataggttctggctcagaatcatctagattatcatttaataaaataactacaaaagaaatttggttagagaatggtcttcagactccaaaatactgtgctatttcccaagatatttttgaaaataatatacttgacacttttggagataaagtcgtgcttaagcctattgaatcaggatctagtgttggaataaaaatattaaataaaaaagatttgattacaaaaaaaaatacatcaccttttgattacttatgttcattcatggacatcaatatagatccagataaatattttatcgaggagtacattaactgccctgagtataccgcaccaataataaaagatgttgtttatcctattattaaaatcgaaacagatagagagttctataactatgatgctaaatatatagatgaagatacatcttttatatttcctgaattctcgagagatattcaagaactaattaataatgtagctctagatgcatttcattcactgggttgtaaaaattggggtcgcgtagatttttttatggatgacagctataatattaatctaatcgaggtcaactctatacctggtatgaccagccatagtttagtaccaatgtctgctaataaggcagggttaagttatcatgatttaattatgcttattctgaataattaat

SEQ ID NO: 312300 - DNA, 817 bp, Unknown
  Bacterial polypeptide expressing nucleotide sequence isolated from the Sargasso Sea
atggacaaaataaataatattgctgtaatttatggtggaacttcttcagagagggagatttcaattaaaagtggaaacggagttcataatgctttactagatcttggttaccaatcaaagttaattgattttaaagacttagaatattttgatgaactcataaattttgattttgtttttattgcgctacatggttttgaaggtgagggaggattccttcaacaagaattagacaaattaaatattttatattctggatcaggcccagcagcatgcgcaaatacttgggacaaaggattaacaaaaaaaatacttgatctaaataaaattaatacacctaattccattgaaattgatcaatttaccgaagaaatctcagaggctggtttacattcctcaatttttgatccattaagaccttttgattcaatatttttgaaacccaaggaggatggatcaagtgttgatatatttaaaatctttgatgacgattctttaaaacaagcatacaagaaatgtttaaatccaaatagaggttttttatttcaagagtttattaaaggtaaagaattaactgttacagtaattgataatgaatgttttccgcctatagaaataattacaaataacgaattctatgactatgaagcaaaatatatttctaatgatactcttcacatagcagcagatttaaatgagattgaaattaaagaaattaaagaaatctctctaaaagcatttaaatcattaggatgtaaagggtgggcgcgaatagatttatttcaagataccgataaaaacttttctattatgaaat

SEQ ID NO: 312301 - DNA, 856 bp, Unknown
  Bacterial polypeptide expressing nucleotide sequence isolated from the Sargasso Sea
gattcgtatatgaacacggagcaattattgaaggtggccaaggaagtaggggcagacgctatccatcctggctatggctttctatcggaaaatgccgacttcgccaaacaggttcgttctgcaggtatgcattttattgggcctagcccagattggatagagcgaatggccgataaggttgaggccagaaaattgatgaagagcgcgggggtgcctaccttccccggtagtggacaaataaccaatgagaaagaggcccgtgaattcgtatcggagaatggattgcctgtcatcgttaagccctctggcggcggaggcggtatagggatgaaggtcgtattcgatgagagtgaactgggtgaagcgatatcgaacgcgtcggagatggcagaaaagtccttttctaacggttcggtatatttagaacgctggatggaggattcccgtcacgttgaatttcaaatactagctgacttgaaaggaaacgtgatgcatttattcgagcgggattgctctgtccaacgcagaaatcaaaaattaattgaagaagctcctgcttttggaattgatcgagctgaatgtgaaaaccttgcagatagaatagcagggacggttagcaaattgggttacgacaatctaggaacaattgaaacgcttcgatcctcgagtggcgagtatgggtttttagagatgaatacaaggatacaggtagagcatggcgtaacagaagaggtgacgggcgttgacttggtcgctgctcagatccgtctggctgccggagaaggtttgcctgaaacgacggatttggacggatttgcagtggaggctcgggtttatgcggaagacccagtctccc

SEQ ID NO: 312302 - DNA, 724 bp, Unknown
  Bacterial polypeptide expressing nucleotide sequence isolated from the Sargasso Sea
tttgattgatataaatgatcttgaaggattaaaggaacttagagcatatgattttgttttcattgctctgcatggttttgagggtgagggtggcacactccaaaaatgtttagatgatttaaatattttatattcaggctcgggttcaaaatgttgtaaaaacacatggaataagaaacttacaaaaaaaattctaaaacaaaacaatataaatactccactttggtctgaagtaagtaaattaccctcttatgatagtcctgatgctaaatttagtgctaaatattttgataagtttaggccttttgatgcaatatttttaaagcctcaagaagatggatctagtatagacatttttaaaattacgaatgaggagagtaatagaaatgctattaaagcatgttcaaatccaaatagaggatttatttatgaagaatacatagaaggaaaagaattcactgtaactattgttgatgatgagtgttttcctccaattgaaataatctcaaaaaacgaattctatgattatgatgcaaagtatctttcagataagaccattcttaaagaggctaagctaaataggaatgaattaattgaaataaataaaatagcaaccgatgcatttaaggcacttaattgtgatggatgggcaagagttgatttaatacaaggcagtgatggcaaattttatgtaattgaaattaatacagttcctggaatgaca

SEQ ID NO: 312303 - DNA, 299 bp, Unknown
  Bacterial polypeptide expressing nucleotide sequence isolated from the Sargasso Sea
aaacgaactttttgactatggcgcaaagtatttaggtcaatccaaagagattacacctgcaaatatttctaatgaagaaataaatctaatacataagtatatcaatataatctatgataatattgaattcaatgggtttactagatcagaatttataattgttgatggaatacctcatattcttgaaacaaatacaattcctggatttacaaaacagagtattatacctcaacagatagaagctcatggattatctgtaagggatgaaataaattatcaaatagaatcaattttataaa

SEQ ID NO: 312304 - DNA, 133 bp, Unknown
  Bacterial polypeptide expressing nucleotide sequence isolated from the Sargasso Sea
atgctggaggtaaacactttacccggcatgaccgaaaccagcctttatcccgatggtgctctgcacattggatatacgtttcctgcattaatccaactactcgtcgaagaggcctacagcagatcaaattgac

SEQ ID NO: 312305 - DNA, 653 bp, Unknown
  Bacterial polypeptide expressing nucleotide sequence isolated from the Sargasso Sea
tttgaccggaagcagtgtaggaatagtaagtggtgctagcggagtagtatctagccttgatcttgcagataacaagttcgacgttagtgttatagaagagagagactccatatcaggagaaggaaatttcggctctgtagaattattattacctttcgatggctcgaatggagctacaagcacttctgattcaagcgacagaggtaattcaatcactttcaacggagacgctcaaatttcaacagctcaaagtaagtttggaggaagcagtcttggccttgatggcactggagattatttagatgtaggggacacttattggaataccgctctcaacaatactgattttactattgagttctgggttagatttgacagtgtgaccggtatacggaggatcatagttaataacagcggttcaaatggtcttggtgtttatctgaattcaagtgggtatgtagatgcctttttctattctggcacttggcgctacatgcagtatgacgatggatcagcaactaaaacggctgtgtctgcagatacttggtatcacgttgcttggacaagaagcggcgacgtttggactttttttctaaatggaaacatagagagacaaaaaactatgtcgtatactatagcggcaagctctcttg

SEQ ID NO: 312306 - DNA, 169 bp, Unknown
  Bacterial polypeptide expressing nucleotide sequence isolated from the Sargasso Sea
tgtttatggcagaattgactatcttattgataaggatggttgccattactttttagaggtcaatacgctgccaggtatgacccaaacaagtttgttgcctaagtctttagcatcgattggcattgctttcgattccttgataaaaaacattgttgatcttagcatataa

SEQ ID NO: 312307 - DNA, 746 bp, Unknown
  Bacterial polypeptide expressing nucleotide sequence isolated from the Sargasso Sea
tgctgtatttaatataatacatggtgatcccggggaaaatggagatcttgccgagatactagagagaaataaaattcctcagaccgcatgtgatgtttatgtatctaagctcacatcaaataagaaaaaatatatagaatttgttaattctcttggtattccttcatcaaaacaagtattaattacaaataatgatatcaataacctatcttcactctcaagttcaatcacattcccatgtattgttaaaccaaacaatggtggaagcagtattggtgtgtcaaaagtttacaaatcagatgaactaaatgaaaaggttcaaattgcttttaaagaagacgatgaagtattgattgagagtttcctagatggccaagaggtatcagtgggagtcattcaaaataaaaatgatagaataatacttcctattacagaaataattagtgacaatgaactttttgactacagtgcaaagtatttaggtaaatctcaagagattaccccaggaaatgtttctgaaaaatcaaaaaaattgattcatgaatatttgaataatatctatgataatataaacttaaatgggattacaagatcagaatttataatagttgataatataccatatattttagaaactaatactattcctggatttactgagcagagtattgttccccaacaaattgaggctcaaaaactaaatgttaaagatgtaataaatgatattctaagatctattctttaaa

SEQ ID NO: 312308 - DNA, 822 bp, Unknown
  Bacterial polypeptide expressing nucleotide sequence isolated from the Sargasso Sea
aatggatgatataaaaaaaattgctgttatatgtggcggctcatctctagaaagagagatttctttgcaaagcgggagtggtgttggaaatgctttaattgaattaggatatcaaacatccataatagattttcaagatcttaatgatttaggtattttaaaaaattatgacttagtctttattgcattgcatggttttgaaggagagggcggagatcttcaagagagtttggataatttaggaattaaatatactggttccaataagcttggatgtaaaaatacttggaataaggctaaatgtaaaaatattttatctcaaaatgatgtaagctcaccaaaagcaatcatatctagttctttggataatgaagactttaatcctttcattaaatttgagaaagaatttggttacaagaagaacttatttatgaaaccttctgaagatggttccagtattgatatttacaaaatttcaaataatgatgattttattagcgcaagaatgtcttgtattaacaaatcgagagagtttatatttgaagaagagatcaaaggtaaagaatacaccttaacaattattaacaatgaatgctttccaccaattgaaattcaaacaaagaatgatttttatgattatgatgcaaaatatatatctaatgaaaccattcttgcagaagccaaactatcagataaagaactagatttaatgaataagatttcactaaaagcatacaaagcattaaattgcagcggatgggctagggttgatattcttgaagatgaagatggtaatttatatgtacttgaaataaatactgt

SEQ ID NO: 312309 - DNA, 679 bp, Unknown
  Bacterial polypeptide expressing nucleotide sequence isolated from the Sargasso Sea
caaaataagattccgtataccggaagtgattatgaggcttgtaaaattacttggaataaaaatacctttaaaaaaatcttaagagaaaatagaattcctaccccaaattggatttctgttccctctttacatgaatttaagagcaatttagatgattcaatttttgatcaattcaggccattcaatgaaatttttttaaagccgacggaagatggatcaagcatagatgtttttaaattatcaactaatgatgatctccaaaaagccattagcgatagcatggactcaaaaagacaatttatatttgaagaaagtatagattttaaagaactcaccgttcctattcttaacggaaaatgtttaccgccagtagagataataaccaaagaatctttctataattttaatgccaaatatgtcaatgacgacactgagcttaatgaatttataatatctgataaaaagaaaattgaacttgagcagatttgcttaaaaacactagatatcgtcaaagccaggggctggttaagagttgaccttatgcaagacagcaatcaaaatttttatgttcttgaagtcaatacagttcctgggatgacatctcatagtttgtttcctaaatcagcagaatcaattggcctatcatacgatgagcttgtaaatgaaattatcaatgcta

SEQ ID NO: 312310 - DNA, 517 bp, Unknown
  Bacterial polypeptide expressing nucleotide sequence isolated from the Sargasso Sea
gaagagcagtttcaagaaggtgtatttataaaaccctgcaaagaaggctctagtatagatattattaaggtaacagatttctcaaaatctgatcttgagaagataaaagtagatttagttgacagagaaagaaaatttttagtcgaaagatttattgagggtagggaatttaccgtcggttttttaaatgatcatattcttgaacccttagaaataattactaaaagagaattctatgattatgaagctaaatatgatgatgatgaaacacagattattaaagctaatttggatgaaaatgacttggatacattaaaagaaatagctaaaaattgtttcaatgtatttggactttcaagatggggtagagtggatattctgcaagatcaaaaaggaaatttttttgtattagaacttaatactgttccaggtatgactgatcatagtctttttccttatgctgcaagcttaaagggctttagttttgatgagctagtaaatgaaattacaaagtaag

SEQ ID NO: 312311 - DNA, 409 bp, Unknown
  Bacterial polypeptide expressing nucleotide sequence isolated from the Sargasso Sea
cgtgttatggctgaaacttgggttgaaggagatgaatataccgtacctattttaggtgagacgatcttaccagtaattaaattagaaactaaacgtaaattttatgattacgatgcaaaatataatgatgataagacaaaatacatttgtccctgtggtttagatcaagtctctgaatctgcaattggtgaagtatcaaagaaagcttgttcattgttaggagtaagtggatggagtcgtgtcgatttgatgattgactcaaataaacaagaatggttaatagaagtaaatacaatcccgggtatgacaagccatagtcttgtaccaatgtctgcaaaaaaagctggaatatcttttgaagtactagtaactcaaatattagctacgagttttaaaaagggattatgat

SEQ ID NO: 312312 - DNA, 673 bp, Unknown
  Bacterial polypeptide expressing nucleotide sequence isolated from the Sargasso Sea
agcaggaattgactataccggctctggttttgaagcttgcaagaatagctgggacaaagaaatctgcaaaaatatattaagacagcacaatcttcctactcccgatttttctgtgtataaaacatttcaagaaataattgagtctaaaaataaaatagaagagcagtttcaagaaggtgtgtttataaaaccctgcaaagaaggctctagtatagatattattaaggtaacagatttctcaaaatatgatctagagaagataaaagtagatttagttgacagagaaagaaaatttttagtcgaaagatttattgagggtagggagtttaccgtcggttttttaaatgatcatattcttgaacccttagaaataattactaaaagagaattctatgattatgaagctaaatatgatgatgatgaaactcaaattattaaagctgatttaaacgaaaatgacttggatacattaaaagaaatagctaaaagttgtttcaaagtatttggactttcaagatggggcagagtagatattctgcaggatcaaaatggaaatttttttgtattagaacttaatactgttccaggtatgactgatcatagtctttttccttatgctgcaagcttaaagggatttagttttgatgagctagtaaatgaaattacaaagtaa

SEQ ID NO: 312313 - DNA, 492 bp, Unknown
  Bacterial polypeptide expressing nucleotide sequence isolated from the Sargasso Sea
caatcaatgagggctcaagtgtgaatgtgtttatttgtaatcaactcaatataaaaaaatttcttaaaaaacttaaaatttataaagaaattttaattgaagaatatattcctggtcgagaaatacaagcggcgatattaggtaatagtaaattgggagccattgaactcaaaccaaaaagaaagttctatgattatgaggcaaaatataattctaaagcaaagactgaacacatcattccagttaatttaactaaaactaaatttaaagaattaatgaatatttcattaaaggtacataatttattaggatgtagaggtgtaacaagatctgattttaaatattataaagataagttttatcttttagaaacaaatacccaaccaggtatgacaaaactttctctagttcctgaaatttgcttacataaagggattaattttatgaaattgattaaattacttttagatgacgcatcaacgaacaagtaaa

SEQ ID NO: 312314 - DNA, 653 bp, Unknown
  Bacterial polypeptide expressing nucleotide sequence isolated from the Sargasso Sea
gatggcgtctgcgctgaccatgacaaaggttcgcaccaagtgcttctggcagggtctgggtttacccacgcccgcttttcagcaactgacgccagagaccaattggcaggcagtgattgaggcactgggctccgtgtttgtgaaacccgcgcttgagggctcctccctcggtatgagcaaggccgataacgcccaggagctggaggccgcctaccgtcacgccagcacatttggtgacgatgtaatggccgagcagttcgtctccgggccggaatacaccgtcgtgatcctcggcgatatagcactgccgagcattcgcattgacgtatccggtgatttctacgatttcgacgccaaatatcattccgaagaaacccgctttacctgtccttcggacttggccgccccggaggaggcagcgctgactgagctggcgctggccgcttttgccgcggtcggcggtgaggtgtggggccgggtcgatgtgatgcgtgaggccggaggagactggcagctgctcgaggtcaataccgttcccggaatgacctcccacagcctcgtacccctcgccgccaaagtggcggggctgagcctgctcgacctactcaccgagatctatcagcacagcctgaaggtgcgccatgtcgactaat

SEQ ID NO: 312315 - DNA, 438 bp, Unknown
  Bacterial polypeptide expressing nucleotide sequence isolated from the Sargasso Sea
tgtccaatttaaataaacttaaaaagtacaaggaaatattaattgaagaatatattccaggacgtgaaatacaagttgcaatactagatgaaaaaaaacttggagcaattgaattgaaaccaaaaagactgttttacgattataaagcaaagtataatgcttctgccggaacaaagcatgtaattcccattcaaatagataaaaaaaatttaaacaaagttttatctatagccctcaaagcgcataaattacttaaatgccgaggagtaacaagatcagattttagattttataataacaagttttatcttctagaattaaatactcaaccaggaatgactagcttatctctagttcctgaaattgcagcatattatggaattagttttataaaattgatagaaatactcataaatgatgcttcaattaaaaagtaaa

SEQ ID NO: 312316 - DNA, 223 bp, Unknown
  Bacterial polypeptide expressing nucleotide sequence isolated from the Sargasso Sea
acgcgaaatattttaaataataccattagaaaagcatataatgttattgggtgctcatgttggggtagattagatttttttattaaaggtaagaaaataattcttttagaaattaatacaataccaggtatgacagaccatagtttagttcctaaggctgcaaaagaaaaaggtattagttactatcaacttattttaaagatattagatattaatggctaga

SEQ ID NO: 312317 - DNA, 544 bp, Unknown
  Bacterial polypeptide expressing nucleotide sequence isolated from the Sargasso Sea
atttctttttaataatcaaacatatgatgatataaaaataaaatttggctcttctttttttgtaaaagatacatgctcaggatcaagcaacaatatctatctgataaataatatcaatgactttaaaaactttttaaaaactaaagataatagagagtatatgattgaagaaaaaatagaagcggatgagtatacagcagcgattcttaacgatgatgttttgcctattattaaaattatttcatctaataaattttatgattttgatgcgaaatacaattcaaatgaaacaaaatttttatttcccattctcgatgaaaagattgttaactatataaataatattattttgcaggcattcaaagcactaggttgcaaaacatgggccagaatagatttttttattgataaagataaaattgttctacttgaaattaatactatccctggaatgacggatcatagtctagtaccgaaggctgcaaaaaaaataggtttaacttattatgatcttatattgaaaatcttaggtataaatgcctaa

SEQ ID NO: 312318 - DNA, 264 bp, Unknown
  Bacterial polypeptide expressing nucleotide sequence isolated from the Sargasso Sea
catggaagaaataaaaaaaattattgttatatgtggcggttcgtcatcagaaagagagatatctttgcaaagtggtaagggagtctatgatgccctgaaaaaattaggatacgaaacaactattgtagattttaaaactattagtgatcttaatatttttaaaacatatgatcttatttttatagcattgcatggatttgagggtgaaggaggtaatcttcaagaaaaatttgatgatttatctataccttatactggatcagg

SEQ ID NO: 312319 - DNA, 770 bp, Unknown
  Bacterial polypeptide expressing nucleotide sequence isolated from the Sargasso Sea
aataaatcaaataattataaaaaatgattataagctttatttagatgactttaaaagttgtgatattgtttttaatgcattacatgggccgacaggcgaagatggaactattcagctatggtttgaaaaaaataatattacctataccggttcaggcccgaggtcctcatcgatttgcatggacaaaaataattcaaaaaaaataatcaaagacttaggtctttctactccaaaatgggacttagtcggtccgcaaattaattataatttaatcaaatatccctgcattattaagcccaattcccaaggcagtacatatggattatcaatagtaaataacgtggacgaattaagcgacgctatcaattttgctagaaagtatgattctgatgttttaatagaagaatacattaatggcagagaaattactgttggcgtgttaggcagtaaggcgctgccaattgttgaaataaaacctcagaatgatatctatgattatgattgcaaatacaaacctggaatgagttcatatttttgtcctgcaaaatttaatgatcaaattgcgagtaagataaaaattgatagtgagttaatttttaaagcattgggctgtaagggttacggtaggatagattatattattgataaaaatatgaattattattttcttgaattaaatactttgcctggtatgacctctacaagccttttaccgattgcagcgaaagctttaaatatatcttttaatgatttagtgcataaaattataa

SEQ ID NO: 312320 - DNA, 769 bp, Unknown
  Bacterial polypeptide expressing nucleotide sequence isolated from the Sargasso Sea
aatggaaagcataaaaaatataattgttgtatgcggaggaagttcttctgaaaggacaatttcattggatagtggccaaggtatctatgaatcattattgcgacttggctttgatgcagaaatagtagattttataaatattaacgacttaaatatatttaaaaattatgatttagtttttattgctttacatggacatgaaggagaagcaggcttgcttcaaaaaaagcttgaattattagagataaaatatacaggttccgcatctgaagtatgtagactgacatgggataaatcagcaactaagaaatttttaaataaaaaacaaattagtactcctaaatctattgatgtttctgagattaaaaaactcgaattaaaatttagtgacatcccttttgatcattttttcattaaaccttcaatggaaggatctagcattaatattttcgagataaaagataataatgattatgaaatcgcattagaaaaactaaaggaatgctcaggcttatttataattgaagaagcaataaattataaagaatatacagtaagcataattggtgataagtgttatcctccaatagaaattattactgaaaataatttctatgattatgatgcaaaatatatttctgataaaactcaattaattgaagtttcaaaagataatttacagttccgatcaattgttgatttatcaataaaaacatttaacgcacttggatgttctggatggtgtaggatagatatcttagaagagaaa

SEQ ID NO: 312321 - DNA, 430 bp, Unknown
  Bacterial polypeptide expressing nucleotide sequence isolated from the Sargasso Sea
atgaaaatagctgtattactgggtggtactagtatggagcgagatgtatcagttgccagtggaactcaagtaattagcgcgctgaggtctgtcggtcataaggtaatagtagtggagtcttcacgaggggtgctatctactacagaagagagagagcttttagcttatggaatcaatacagaacctccgagaaatatggaggatactgaaggttggcttcctgtcttagccaataaacttcagatggcagaagtggacctggtgtttttagctcttcatggtggttggggagaggacgggactattcaggcagtttttgaaaaggtgggattgccctacacaggcagtaataaactgggtagtaggttagccatggataaaaatatggctaagaaaatattttgtgcaagtgaggtacctactccaaaaa

SEQ ID NO: 312322 - DNA, 457 bp, Unknown
  Bacterial polypeptide expressing nucleotide sequence isolated from the Sargasso Sea
aatgatagagaattaaatgtggctattgctttagctcggaaatttacgaggattgttttaatagaagattttgttaaaggtagggagattacggtaactataattggcaataaaccttatccaatagttgaaattattccaaaaaaagggctatatgattatgagtcaaaatattcaaaaggtttaaccgattatttttgtccggctgacataaaaagtgatttgacaacaacaattcaagctacagcgctaactatacatcaattattaggatgtagacattattctcgagtcgattttatactggataaaagtcttaatgcttggtttcttgaggttaataccttaccaggcatgactgagaccagcctagttccaaaatcagctgcaggagcaggcttgagctttaaaggattgattgaaaagatcatcatggagtgcatgattgatggataag

SEQ ID NO: 312323 - DNA, 709 bp, Unknown
  Bacterial polypeptide expressing nucleotide sequence isolated from the Sargasso Sea
ggtgaactgcaagctaggttagacaaaatgaatattatatttactggctctaaatattcagcctgcagcaatacatggaataaaaatttatgtaaaacaattttaaatgaaaactctataaatacacctaactctattttgctaaataatttaaaaaattgttcaaataatccatttgattgctttgaaaaaaagtttggctacaaacctaatttatttatgaaaccttgtgaggatggttcaagtatagatatttttaaaatatcaaacgatgaagattataaaaaagcaaaactcaattgtttgaacctagaaagggaatttatctttgaggagtcgatcgaaggaagagaatttactgttacgattatcggaaataaatgttatcccattatagaaataaaaacacaaaatgatttttatgattatgatgcaaaatatatatctgacgatacgattcttgatcaagcgaaactttcggataatgagttaaatattataaatgatattgctcttagagcatttcatgtacttaaatgtaatggctgggctagagttgacataattcaagataaaaatggtaactttaacgttattgaaataaatactgtgcctggaatgacctcacatagctgtgtcccgaaatcggcgagttttatgggcttatcttatcaagatgttattaaagaaattttaataaatgtataaa

SEQ ID NO: 312324 - DNA, 421 bp, Unknown
  Bacterial polypeptide expressing nucleotide sequence isolated from the Sargasso Sea
tcagaacttatattgatagagtcatttatagatggaagagaaattacagttcccattattggaaataaggcatattcaatagttgagatcatcccaagtcacgatttttatgattatgagtgcaaatatacaaagggaatgtctgaatatatttgcccagcagagctaggtatcaatctttctgagtcaattaaagatcaagcattaaaagtccataaaatccttgattgtaggcattattcaagagttgattttattttggacaaaaataatgatccatggtttttagagataaatactttgcctggaatgaccgaaactagcttactgcctaagtcacttaaagctagtggtgttgaattcaaagatgtaattcaaaaaataataaatgaggcaatcaacagccctcggttttactaag

SEQ ID NO: 312325 - DNA, 1012 bp, Unknown
  Bacterial polypeptide expressing nucleotide sequence isolated from the Sargasso Sea
atgtcaaaaatcaatttacttttgctgtgcggcggtggaagtgcggaacacgatatttccctactgtcggctaattattttgaaacctcattagcaaaatccgagcagtttaatgtactgcgtgtggtactggacaagtttggccaataccaaaccgccgcaggcgatgactgtgagctgaccaataaccgcgaaattcgcttccgtgatgagaccaaggcaccttggcctgtggattatgtgatcccttgtattcacggctatccgggtgagacgggcgatattcagtcttactttaatcttatccagctgccctactttggttgcgaatccgaagccagcagcaactgctttaacaagatcaccgctaaaatgtggttcagcgccttaggcattcctaacacaccttatatcttcttaaatcaatacgatgatgaagcgattgcccaaacccaagcggcgctcaaaaactggggttcgattttcgttaaagccgcatcccaaggctcatcggtcggttgctataaagtcgatgacaacagcaaagtggctgacgtgttaaaagatgcctttggctacgcgccctatgtgattgttgagaagaccattaaggcccgtgagctggaagtcgccgtctatgagtatcaaggcgaagtggtcgccaccctgcctggggaaattatctgtgataccaacaccttctacacctttgatgaaaagtacgccagcagcagtaaggcacgcaccgatgtagtggcgcaaaatgtccccactgaaattagtgagcaaattcgccaatacgctattaaagcctttaagggcatgaagctgagacatctttcgcgtatcgatttcttcttgactgcagataatgaaattctgctcaatgaaatcaacaccttcccaggttctacgccaatttcgatgttccctaagatgttgcaaaaccatgggcatgattttaccgaatacttaagtttagtgattaacggccagttagcggctaagtgat

SEQ ID NO: 312326 - DNA, 787 bp, Unknown
  Bacterial polypeptide expressing nucleotide sequence isolated from the Sargasso Sea
aaaaattttataaaaaatttaaaaaaaattaaaccaaatgtaatttttaatgctttgcacggtacttttggagaagacgggttcgtacagtcgattttagaaaatttaaaaattaaatatacacattcgggagtaatctcttcatcaattgcaatgaataaattgctatctaaaaaaatatttataaataacaaaataagaacaccaaaatatttattatttaattttgaatcaaataagaaagaaatatttgctaaaattaaaaaatatttaggatttcctgttgttattaaaccaataaacgaaggttcaagtgtaggcgtttatatatgcaaaaaaaaaaattttttatttaatctaaataaacttaaaaaatataaggaaatattaattgaagaatatattccaggacgtgaaatacaagttgcaatactaggtaaaaaaaaacttggtgccattgaattgaaaccaaaaagacagttttatgattataaagccaagtacaatgcttctgctggaacaaagcatataattcctgttcaaatagataaaaaaaatttaaaacaagttttatctatagctctcaaagcacataaattacttaaatgtcgaggagtaacaagatcagattttagattttataataataagttttatcttctagaattaaatactcagccaggaatgactagcttatctttagtacctgaaattgcatcatattatggaattagttttataaaattgatagaaatactcataaatgatgcttcaattaaaaagtaaa

SEQ ID NO: 312327 - DNA, 880 bp, Unknown
  Bacterial polypeptide expressing nucleotide sequence isolated from the Sargasso Sea
aatggtaagaaagtatggaaaagtcctagttttaatgggcggatggtcaaatgaaagagaaatatctttgatctctggcaagagcgtattagattccttgatttcttcaggtgttgatgctcatgaactaatattagataaaaaaaatatagaattaataaaagagatttctcctgatagggtattcattgctttgcatggcgaaggcggagaagatggagaaattcaatcttatttagatagattttcaattccatatacaggaagtagcagcagctcttcagaaatatgcatgaataaaagaaagacaaaattaaagcttttagaaaataaatttcaaacacctaaatatttaaaaattgaaaataatacagaaataaaatttatagagaaaaacttttcatacccttttgttgtaaaaccatcgtcagaaggatcaagtattggagtttttatagttgataataaatatgaattttatgatgccgttgaggaaaatcgaaaaattagtgaagatttcattgttgagcaatatatagatggagaggaatatacggtaggtattattaatgatttggctttaccctctatcaaactaaagccaccaggaaaattctatgactatgatgcaaaatataaatcatctgaaatgcaatatatttgcccttcaggcctggacatagaaaaagaaaaagaaataaaagagatatcaattaactgttttaaaactctagagtgcagaggatggggaagagtcgatataatattagacagaaaatataacccatggataattgaaataaatacagtaccaggaatgacaaagcacagccttctaccaatggctgcaaaagagtttggtatagattttagtgaatta

SEQ ID NO: 312328 - DNA, 1117 bp, Unknown
  Bacterial polypeptide expressing nucleotide sequence isolated from the Sargasso Sea
atgaagaaaaaattatgtattgtttttggtggaaaatctgttgaacatgaaatatcaataatatcagctaatgctattttgaatcacattgaccagaaaaaatatattgtatatggagtatttgtggggaaaaatggtgtcttctatgagtcaattgccaaaaagtataacaaaaagctaaagttcgaaaataaaaaacaaaataaagttacttttctatatggtgataccaaggatataggaataataaaagacaataaaattatggataaaagaaaaattgatattttttttcctttgattcatggaactgggggtgaagacggatcaatccaaggattattggaaactattaacaaaccttacattggatgcaatgtagagagttcttctatctgtatgaataagattttaacaaagaaaattttgtctaatgagtcaataaggacaactaaattctatagttatgcaaaagatgagtggaaaaccaataaaacaaatataattaaaaaaattgtcagtgatataaaatttccttgttttgtaaaagcgtcaaatttaggttcaagtgttggcgtttataaagttaaaaataaaagtgatttaaaatctaagattcaaaatacatttaaattcagcaacaaagtcctagttgaagaagctgttatcaatccagaagaagttgaagttagcgtattgcaaggcgatcaaaccatagtctctaagccaggaagagtcatatcctcagatgaattctatacttataaggcaaaatatttggatggaaaatccagcatggaaattccatataaaaggagcttggaaaatcgtactttatcgaatgaaattaaggaaacgtctattaaaatttataaaattctacaatgtactgggatggcaagaatagactttctttttggtaaaactagtagtacaaaaaaatcgaagctttatctcagcgaagtcaatactattcctggattcacagaaataagcatgttccctaagcttttgaatgaagagggtttagagctaaaagaaattatcaatattttgattcaatcttctgaggttgaatttaaaaaaaagcaaaagttaattacaaactttgtttaat

SEQ ID NO: 312329 - DNA, 664 bp, Unknown
  Bacterial polypeptide expressing nucleotide sequence isolated from the Sargasso Sea
aatggaaagcataaaaagaatagcggttttatatggaggctcttcttctgaaagagagatatccttatcaagcggacagggtgtatatgctgctttatgtgaaattggttatcagtgccaattaatagactataaaaacttaaaggatttaaatgagctaaaaaattatgattttgtatttattgcacttcatgggtttgagggcgaaggaggcgaacttcaaaaagacttagatgacttaaatatactctattccggttccaaatcagaagcttgtagaaaaacttggaataaaggcttaactaaaaaaattcttaaagcaaataatattgatactccaagttttattgaattagaaaaatttgatccagaaattgttagaaataagattaaagatgcttcttttgatttatttcaaccaaatgataatttatttttaaaaccaaatgaggatggctcaagtgtcgatatttttataattcataatgaagatagtataaaaaaagcttatgaaaagtgctcaaatcctcatcgaagttttttaattgaagaatacatagatggcagagagataacagttactgttataggtaaagactgctttcctcctattgaaataattaccaataacgaattttatgattatgatgctaaatatatctct

SEQ ID NO: 312330 - DNA, 943 bp, Unknown
  Bacterial polypeptide expressing nucleotide sequence isolated from the Sargasso Sea
catgagcgggattgatccgaaacgtttcggcaaggtggcggtgttgttcggcggtgagtcctcggagcgcgaggtgtcgctcacgtcgggcaagctcgtgctgcagggcctgcgcgacgcgggcatcgacgcgcacccgttcgatccggccgagcgcccgctgtcggcgctgaaggacgaagggttcgtgcgcgcgttcaacgcactgcatggcggctacggcgagaacggccagatccagggcgcgctcgatttctacggcattcgctacacgggcagcggcgtgctcggatcggcgctcggcctcgacaagttccgcacgaagctcgtgtggcagcagacgggcgtgccgacgccgccgttcgagacggtgctgcgcggcgatgatctcgcggcgcgcgcgacggacatcgtcgcgaagctcggcctgccgctgttcgtgaagccggcgagcgaaggctcgagcgtggcggtgctgaaggtgaagacggccgacgcgttgcccgctgcgctcgcggaagccgcaaagcatgacccgatcgtgatcgtcgagaagagcatcgagggcggcggcgagtacaccgcctgcatcgccggcgatctcgacctgccggtgatcaagatcgtgccggccggcgagttctacgactatcacgcgaagtacgtcgccgacgacacgcaatacctgattccgtgcgggctgcccgccgacaaggaagcggagctcaagcgcgtcgcgcgccgggcgttcgacgtgctcggctgcaccgactggggccgcgcggatttcatgctggatgcggccggcaatgcgtatttcctggaagtgaacacggcccccgggatgaccgaccactcgctgccgccgaaggccgcgcgcgcggtcggcatcagctattcggagctggtcgttaaggtgctgtcgctcacgctcaacgactga

SEQ ID NO: 312331 - DNA, 475 bp, Unknown
  Bacterial polypeptide expressing nucleotide sequence isolated from the Sargasso Sea
aggcttaacagtagtaaataatgatagagaattaaatgtggctattgcttcagctcggaaatttacgaggattgttttaatagaagattttgttaaaggcagggagattacggtaactataattggcaataaaccttatccaatagttgaaattattccaaaaaaagggctatatgattatgagtcaaaatattcaaaaggtttaaccgattatttttgtccggctgacataaaaagtgatttaacaacaacaattcaagctacagcgctagctatacatcaactattaggatgtagacattattctcgagtcgattttatactggataaaagtcttaatgcttggtttcttgaggtgaatactttaccaggtatgacagagactagcttagttccaaaatcagctgcgggagcaggcttgagctttaaaggattaattgaaaagattatcatggagtcgatgaatgatggataa

SEQ ID NO: 312332 - DNA, 910 bp, Unknown
  Bacterial polypeptide expressing nucleotide sequence isolated from the Sargasso Sea
atgaataaagacaaaaaaattatgcttttgtatggaggcatttctgcagaaagagaaataagcattatcacctcaaaagaaataagcaaatctcttaaaaacatgggctacaatattgtagaaattgatgcaaatgagaatctgttagctgaccttgaactgcataaacctgacatagtattcaatggattacacggaacatggggagaagacggaagtgtgcaagaaatacttgaaaaatatggagtgccttacactcattctggaattgagtcatccaaattagcaatggataaatacaaatctgctgaactatttattgaaaatgggttcaatcatcctttaacgaaattgatgaagatagaggaagtgaaagatcaaaatatatttgattttccctatgtcttaaaacctagaaatgaaggatctagtgttggagttagcattattagaaaccatgaggaattaaataaatacttgtctgagaataaatttcgaaatgaattattgcttcagcaatttatagagggtcctgagataaatgttgctgttataggaacaaataaaactggttctattgaaattgatccaaaaaacgaattctatgattacgaatcaaagtactttgatgcagggaaaacaaaacatataattccaccaagattagagagcgacctgattaaaaaagttgaaggtttaggtttagatgctcataaattattgggttgtaagggaatcagccgaaccgaatttatattagataaagtgacaaaaaaattttatatattagagcttaatacccaacccggcatgacaccaacttcattagtccctgaaattgcaaattataaaggtataaactttgataatcttattaattggatcctattagatgcaacgcaaaattaaa

SEQ ID NO: 312333 - DNA, 481 bp, Unknown
  Bacterial polypeptide expressing nucleotide sequence isolated from the Sargasso Sea
ctgcaagaaggctctagtatagatattattaaggtaacagatttctcaaaatctgatctagagaagataaaagtacgtttagttaatagagaaagaaaatttttagttgaaagatttattgagggtagggaatttaccgtcggttttttaaatgatcatattcttgaacccttagaaataattactaaaagagaattctatgattatgaggctaaatatgatgatgataacactcagattattaaagctgatttggatgaaaatgacttggatacattaaaagaaatagctaaaaattgtttcaatgtatttggactttcaaggtggggtagagtggatatactacaagaccaaaaaggaaatttttttgtattagaacttaatactgttccaggtatgacagatcatagtctttttccttatgctgcaagcttaaagggatttagttttgatgagctagtaaatgaaattgcaaagtaag

SEQ ID NO: 312334 - DNA, 970 bp, Unknown
  Bacterial polypeptide expressing nucleotide sequence isolated from the Sargasso Sea
tatggtaaacattgctgttgtttttggtgggtattcctctgaatatgaggtatcagttaaaagtggaaaatttatctatgaaaatttgaaagacaactcggattggaatgtatacgaagtttgtatttcaaatgataaaaactttgttaggtataacgaaaaagtttatgacttagattatgaaagtttttcatttagggtcaatggaaagtttgtaaaacccaatgccgtatttaacataatacatggtgatccaggggaaaatggagatcttgctaagatccttgagagaaataaaattccacagaccgcatgtgatgtctttgtatctaagctcacattcaataagaaaaaatatatagaatttgttaattctcttggtattccttcatcaaaacaagtattaattaaaaggaatgagattgatagtctttcttcattcttaagctcaatcacattcccatgtattgttaaaccaaataacggcggaagcagtattggtttgtcaaaagtttacaaatcaaatgaactaaataaaaaggttcaaattgcatttaaagaagatgatgaagtattgattgagagttttcttgatggtcaagaagtatcagttggagtcattcaaaataaaaatgaaagaataatacttcctattacagaaataattagtgacaatgaattttttgactacagtgcaaaatatttaggtgaatctctagagattaccccaggaaatgtttccgaaaaatcaaaaaaactgattcatgaatatctgaataatatctatgataatataaacttaaatggtattacaagatcagaatttataatagttaatgatataccatatattttagaaactaatactattcctggatttactcagcagagtattgttcctcaacaaattgaggctcaaaaactaaatgttaaagatgtaataaatgatcttataagatctattctttaa

SEQ ID NO: 312335 - DNA, 508 bp, Unknown
  Bacterial polypeptide expressing nucleotide sequence isolated from the Sargasso Sea
aataaacctatagtagttaagccttgcagggaaggatctagctttggaataagcattgttcaagacacttcaaatggagtaaacgaagaaatccttgcagcaaggagttatgacaacagagttatcctagaagaattcatagagggtacggagctcactgttcctattctagatggaaaagcattagctcctatttctataaaaccaaattctaaattttatgattacgaagcaaaatacgaaagaacagatactgtttatgaagcatctaaacttgacaaacagaggatgaaagaggttaaaggcttagccttaaaagcttatagcgttttaggatgcaaaggctgggcaagggttgatttaatagaatctaaagaagagaatttttatcttatagagattaatacagttccaggacttacaaatacaagtctttttccaaaatcagctgctttagaaggtatttcctttactgagttagtaattagaatgcttaaaacagcttgat

SEQ ID NO: 312336 - DNA, 304 bp, Unknown
  Bacterial polypeptide expressing nucleotide sequence isolated from the Sargasso Sea
ataattactaaaagagaattctatgattatgaagctaaatatgatgatgatgaaactcagattattaaagctgatttggatgaaaatgacttggatacattaaaagaaatagctaaaagttgtttcaatgtatttgggctttcaagatggggcagagtggacattctgcaagatcaaaaaggaaatttttttgtattagaacttaatactgttccaggtatgactgatcatagtctttttccttatgctgcaagcttaaagggatttagttttgatgagctagtgaatgaaattacaaagtaag

SEQ ID NO: 312337 - DNA, 973 bp, Unknown
  Bacterial polypeptide expressing nucleotide sequence isolated from the Sargasso Sea
aatggatgaattgaataaaattgcagttttgtatggaggtacttcatcagaaagaaatatatcactcaaaagtggagaagcagtatatcgatctatgttggatttaggctataagtcaaatttaatagatttcaaagaactcagttctattaatattctaaaaaaatacgattttatttttatagctcttcatggttttgaaggtgaaggaggagaattacaaagaaaattagacgatctaaatgttccatattcgggttcttcccccgagtcttgttttaatacatggaataaagcattaacaaaagaaattttaagaaaaaaaaatataaaaactcctaactggaaactagttgaaaataatcataaattagaaagtttagatgatgactctaatttgttaccattcaaaaaacatagcgataaggaatcccaaacctctctcattaatatatttggaaaaaatggatcaatatttttgaagccaattactgacggctctagtttagatatctataaagtttctagtaacaaacaattcttagagtctattaaaagctcaagtgatcccaatagaacatttatgattgaggaagctatcgagggaagggaatttactatgactataattgatgaaaaatgctaccctccaattgaaataatcacaaaaaatcaattttatgattatgatgcgaagtatctgtccaatgagactcgtctcgaaaaagcaccattaaataaggaagaaatggaaaaaataatggaaatatctctttctgccttcaaagccctaaattgcagggcatggggaagagtagatcttatgcagaataaaaaagatggtgaattttacattatagaaattaatacggtcccaggaatgacaaagcacagctgtgttcccagatcaggtcaatttgcaggcgtgtcatttaatgagatagttaaaagaattataaatgcatctctatag

SEQ ID NO: 312338 - DNA, 340 bp, Unknown
  Bacterial polypeptide expressing nucleotide sequence isolated from the Sargasso Sea
aatgaatgcttacccaccaattgagattatttataaaaatgatttctatgactacgatgcaaaatatctttctgatgatactattttaaaacaagcaaatttgaacagtaatgaattggaagaaattaaaatggcatccattaaagcatttaatgcattaaattgcagtgcatggggcagggttgatttaattcaatgtagtaaaactagagaattctatgtaatagaaatcaatacagtaccaggcatgacaagtcatagctgtgttcctaagtctgcaagttttatagatttatcatatgtagaggttgttgaaaagattatcgatgcgtccacataa

SEQ ID NO: 312339 - DNA, 901 bp, Unknown
  Bacterial polypeptide expressing nucleotide sequence isolated from the Sargasso Sea
gatgaaggtagggttattatctggtggaaactcaaccgagagagaggtttctttagcttctggtaaatcaatttacaaagcttgtagagacttaggctatcaagtgaaaattcttgacccaattgatggtattcgttctataaaagattctattttatctgttgatattatttttaatggccttcatggtggggatggcgaaaatggcgaagtggctaaatatttagaatcgttaaatattccctacacaggatctgaccaattatcttcagccacatgtatggataaaaacaaaacaaagaccattgtttttgaaaataattttctaacacctggatgggtaatgaaaaataaagattctgatgatataattgatatagatttaacctttccattagttgttaaaccaaatgatcaaggtagtactatcggtctgtcaattgtaaaaaataaaaaagaattgagaaaagcatttgaacttgctgggaagtatacaagttcaatactattagaatcatttattaatggaagagaaattacggtccctgtagttgcaaataaagcgtactcaattgtagaaattattccaagccatgatctttatgattatgagtgtaaatatacaaagggaatgtctgaatatatttgcccagctgacctaagcatcaatctttcagaatcaattaaagacttagcattaaaagtccataaaatccttaattgcagacattattccagagttgattttcttttagataaaaataatgatccatggtttttagaaataaataccttacctggcatgactgaaactagcttactccctaagtcgcttaaagctagcggtattgaatttaaagatataattcaaaaaatattaaatgaggctattaaaagctaa

SEQ ID NO: 312340 - DNA, 310 bp, Unknown
  Bacterial polypeptide expressing nucleotide sequence isolated from the Sargasso Sea
tttgatgtttatgattacagatctaaatacactaaaggagagtctgattatatatgtccagcaaagcttgatgactctttatcaaaagatatccaagatactgcattgagaattcacaatttgctagactgtaaagtatactccagagttgattttcgactagataaagacaataggttttggctattagaaatcaatactttaccaggaatgacagaaacaagcctatttcctatggcagcaaaagttattggtttaaattttgaagatttgattgataagattattaaattatctttagaaaaatgat

SEQ ID NO: 312341 - DNA, 1012 bp, Unknown
  Bacterial polypeptide expressing nucleotide sequence isolated from the Sargasso Sea
atgtcaaaaatcaatttacttttgctgtgcggcggtggaagtgcggaacacgatatttccctactgtcggctaattattttgaaacctcattagcaaaatccgagcagtttaatgtactgcgcgtggtactggacaagttcggccaataccaaaccgccgcaggcgatgaatgtgagctgaccaataaccgcgaaattcgcttccgtgatgaaactaagtcgccttggcccgtggattatgtcattccttgtattcacggctatccaggggaaacgggcgatattcagtcttactttaatcttatccaactgccctactttggttgcgaatccgaagccagcagcaactgctttaacaagatcaccgctaagatgtggttcagtgccttaggcattccaaatacgccttatatcttcttaaatcaatatgatgatgacgcgattgcccaaacccaagcggcactcgaaaactgggggtcgattttcgtcaaggccgcatcccaaggctcatcggtcggttgctataaagttgatgacagcagcaaagtggctggcgtgttaaaagatgcctttggttatgcgccctatgtgatcgttgagaagaccattaaggcccgtgaactggaagtcgcggtctatgagtatcaaggcgaagtggttgcgaccctgccgggcgaaatcatctgtgatagcaataccttctacaccttcgatgaaaaatacgccaagagcagtaaggcacgtaccgatgtggtcgcgcaaaatgtgccaactgacattagcgagcagatccgcgcctatgcgattaaagcctttaagggcatgaagctgcgccatctgtcacgcatcgactttttcttaacccaagataatgaaatcctgctcaacgaaatcaataccttcccgggttcgacgccgatttcgatgttccctaagatgttgcaaaaccatgggcatgattttaccgaatacttaagtttagtgattaacggccagttagcggctaagtgat

SEQ ID NO: 312342 - DNA, 673 bp, Unknown
  Bacterial polypeptide expressing nucleotide sequence isolated from the Sargasso Sea
tctggatcaaattcaatggcatgtagaaatactttggaataaaagattagcaaaagaaatattaaaaaaaaataatattagaacgccagtttggcttgaagttaaactcaccaaaacaattgttaataatgggcttcgtgtgtcaccttatgacaggttcagaccttttgaatatttatttctcaaaccagaggaagatggctcaagcgtagatatttttaaaattagtgatgaagatagcttaagagctgcatataaaaaatgcacaaatcctaacagaggttttttgtttgaagaatatattcatggaagagagataacagtaactataattgacaaaaaatgttttccgcctatagaaataatcacaaaaaatgagttttatgactatgatgcaaaatatatctcagacgatactttgcatgttgaggcagaagtaactcaaaatgaattagatgagattaaatcaatagctatgaatgcgtttgaagcattagattgtaaagcatgggcaagagttgacatgattcaagataaaaaaggcaaattttatgtaatagaaattaatacagttcctggaatgacaagccacagtaatgttcccaagtcaggcagtttattgggcttaacttataatgaggttgtgcaaaaaatcatagatgcttcattataa

SEQ ID NO: 312343 - DNA, 789 bp, Unknown
  Bacterial polypeptide expressing nucleotide sequence isolated from the Sargasso Sea
atgaagatttttttaaaaaagtaaaaacttttaaacctgatatagtatttaatgcattacatggtcaatttggagaagatggctatatacagaccatattagagtcccaaaaaataaaatatacacactcaggagtgcttgcatcctcaattgcaatggataaggaaatatctaaaaaaatttttttgaaaaataaaatccttacacccaaacatataaagtatgatttcaataaaaaaaataaaaatattatttcacaaattcaaaaaaaacttaaatttccagtagttatcaaaccaattaacgaaggatcaagtgtaaatgtttatatttgttcaaaacgaaactttttaaaaaacttaaaaaaattatcaaattacaatcaaattttaatagaagaatacataccaggtcgagaaattcaggtggcgataatgggaaaaaaaaaattaggtgccattgaacttaaaccaaaaagaaaattttatgattacaaggcaaagtatagtgtaaaagcacaaaccaaacatataatacctgttgatctaaaaaaaaataaaatgaaggaaataatgaatattgccttaaaagcacataaattaattggttgcaggggagtaactagatcagattttaaattctttaaaaataaattttatcttttagaaataaatactcagccgggtatgacaaatctttctttagttcctgaaattgcaaattactatggaattaattttgcaaatttaattgaatggattttaaaagatgcatcttccaatagataaa

SEQ ID NO: 312344 - DNA, 547 bp, Unknown
  Bacterial polypeptide expressing nucleotide sequence isolated from the Sargasso Sea
gataatctctcttcattctcaagctcaattacattcccatgtattgttaaacctaataatggtggaagcagtattggtgtatcaaaagtttacaaatcaaatgagctaaatgaaaaggttcaaattgcatttaaagaagatgatgaagtactaattgagagttttcttgatggtcaagaagtttcagttggagtcattcaaaataaaaatgaaagaataatacttcctattacagaaattattagtgacaatgaactttttgactacagtgcaaaatatttaggtgaatctcaggagattactccaggaaatgttactaaaaaatcaaaaaaactgattcatgaatatttgaataatatctatgataatataaacttaaatggaattacaagatcagaatttataatagttaatgatataccatatattttagaaactaacactattcctggatttactcagcagagtattgttccccaacaaattgaggctcaaaaactaaatgttagagatgtaataaatgatcttgtaagatctattctttaaa

SEQ ID NO: 312345 - DNA, 427 bp, Unknown
  Bacterial polypeptide expressing nucleotide sequence isolated from the Sargasso Sea
atgtcatcaagccccaccacggtcggtgttgtcttcggcggctgctccggtgagcacgatgtgtcgatccgctccgcacaaacggttgtcaagggcttgaaccttggcgccaaccttgagcgttatcggattgttctcgtttacatcgatcgcgacggacgttggtggggccccgatctcgccgagaaggttctcagcagcggctgtcctccagccgactcggatctcccccaaccgctacctgcccccgggttccgcggcctgccggcaggcaccgatgccgttgctgtctggtacccggttctgcatggaccgaacggtgaagacggcacgattcaggggctgttcgaactgatgcagcagccctacgtcggtgctggggttctcggttcagcggtgagcatggacaaacaggccagaaagcggc

SEQ ID NO: 312346 - DNA, 919 bp, Unknown
  Bacterial polypeptide expressing nucleotide sequence isolated from the Sargasso Sea
tttggctggtggttggtctgctgaaagagaaatttctttaaaatcgggcgctgcagtattagaagcactcagagaacttaagcttaattgctattttatcgatctacataccgaggagggagtgcttgaaatgccttcagagatagatctagcatttattgctttacatggcagaggcggtgaggatggatatattcaaaaaattcttgaggataagggagttgcttacactggaagtgacccgcaatcttgtgaattagcaatggataaacctcaggctaaaaagatttggagagatttactattacctacccccgactttgtagaaatcaaaaaaggaggcactcctcaaatgaagttaacaccttacctttcaggagaagaggacattacctctttagataaaagttttgttgtaaaaccatctagagaaggttcaagttttggaatttctatagttaaacctggtgaaggaagcttagaggaagcaatgaaagaagcgttaaagtttgatgaaaacctgatcatagaagcctttgttcctggtagagaacttacggtatccattcttggagaagaagtttttcatcccatccatattaaacctagcggacaattttacgattttgaatcaaaatacaatagtcttgaaactgaatacttaaaagcaagcttaaaggatgatgaaataaaagaaataaaagatattgcttggcatgcattttcttcattaggatgtaaaggatggggaagggtcgattttatgcaagacgaaaatggtaattttcaaattattgaagttaatactgttccaggactaacgaaaacaagtctttttcctaaagccgcttcttatgaaggagtaaattttaaagaattgatagccaaaatattgcttttagcttgcaatggtcattag

SEQ ID NO: 312347 - DNA, 562 bp, Unknown
  Bacterial polypeptide expressing nucleotide sequence isolated from the Sargasso Sea
ttggataaatttaagggcaatctagatgattcaatttttgatcaattcagaccattcaatgaaatttttttaaagccaacagaggatggatcaagtatagatgtttttaaattatcaactaataatgaattaaaaaaggccattagcgatagcttagattccaaaagacaatttatctttgaagaaagtatagattttaaagaactcaccgtccccattcttaacggaaaatgtttacctccagtagagataataactaaagaatctttctataatttcaatgcaaagtatgtaagtgaggatactgagcttattgaatttataatttctgataaaaagaaaattgagcttgagcagatttgtttaaaaacacttaatatagtcaaagcttgtggctggttaagagttgaccttatgcaagacagcaatcaaaacttttatgttcttgaggtcaatacagttccagggatgacatctcacagtttatttcctaaatcagcagaatcaattgggttatcatatgacgaccttgttaatgaaattattaatgctgaaatttaga

SEQ ID NO: 312348 - DNA, 452 bp, Unknown
  Bacterial polypeptide expressing nucleotide sequence isolated from the Sargasso Sea
aattagtgatgaagatagcttaagagccgcatataaaaaatgcacaaatcctaacagaggttttttgtttgaagaatatattcatggaagagagataacagtaactataattgacaaagaatgttacccgcctatagaaataattacaaaaaatgagttttatgactatgatgcaaaatatatctcagacgatactttgcatgttgaggcagaattaactcaaaaagaactagatgagattaaattaatagctgtgaatgcgtttgaagtattagattgtaaagcatgggcaagagttgacatgattcaagataaaaaaggtaaattttatgtaatagaaattaatactgttcctggaatgacaagccacagtaatgttcccaagtcaggcagtttattgggcttaacttataatgaggttgtgcaaaaaatcatagatgcttctctataaa

SEQ ID NO: 312349 - DNA, 1006 bp, Unknown
  Bacterial polypeptide expressing nucleotide sequence isolated from the Sargasso Sea
ttgcaaaggaaggggaataagatgtttacaccttcagtaagtattcactcacagaaaacccactcgccgaacgagtatggcaaagtagctgtgctgctcggcggtgactctgctgaacgggaagtatcgcttaattcgggcaatgcggtgttaaatgcattgttacgacaaggcgtagatgcgtttgcgtttgacccagcagagcgacctctgaccgaccttatcgaccttaacgtcgatagagcgctcattatgctgcacggtcgcggtggtgaagatggctctatgcaaggagcccttcagttcctaaaaatcccctacacgggaagccgagttttaggttctgcgctggcaatggacaaaattcatactaagcaagtgtggcaaagtttaggcttacccactgcaaaatatgaaattgctgataaaaggcactttgaagctggtaagtgcagcgctataatggataaattggggaatgaagtcatggtaaaaccggccagagaagggtcgagtattggcatggcgagagtgacaagcgctaaacagctcgaaactgccattcaggacgcctttaaatacgataatcaagtcctgttagagcagtatatagatggccccgaattcactgtttctgtattgcagggacaggcgttgccgtctattcgcatgtctactccacatacattctatgattatgctgcgaaatatcaggataatacaacagaatactattgcccaagcggcttgtctgaagagcaagaagcacagctagcaaaactagcatcccgtgcttttgatgctatttctggcagcggctggggtagaattgacgttatgcaggacaaccaaaggcagttttatttgctagaggcgaacacagtgcctggcatgacagaaaaaagtttggtgcctaaggcagccaaagttgcaggattaacttttgatgaactggtattaagtattctttctaccagttttgatgacgttgcaaacaaggcgtaaa

SEQ ID NO: 312350 - DNA, 1012 bp, Unknown
  Bacterial polypeptide expressing nucleotide sequence isolated from the Sargasso Sea
aatgtcaaagatcaatttacttttgctgtgcggcggtggaagtgcggaacacgatatttccctactgtcggctaattattttgaaacctcgttagcaaaatcagaacagttcaatgtactacgtgtagtactggataaatttggccaataccaaaccgccgcaggcgatgactgcgagctgaccaataaccgtgagatccgctttcgtgacgagagcaaagccccttggcccgtggattatgtgatcccttgcattcacggttacccaggtgagacaggcgacattcagtcttactttaatcttatccaactgccctactttggttgcgaatccgaagccagcagtaactgttttaacaagatcaccgctaagatgtggttcagcgccttaggcattcccaacacgccttatatctttttaaatcaatacgatgatgaagccattgcccaaacccaagcggcacttgaaaagtggggatcaattttcgtcaaggcagcctctcaaggctcctcagtcggttgctataaggttgatgacagcagcaaagtgcctggcgtgcttaaagacgcttttggttatgcgccctacgtgattgtcgaaaaaaccataaaagcccgagaacttgaagtcgccgtttacgaatatcaaggtgaagtgatcgccactctacccggcgaaattatctgtgatagcaataccttctacaccttcgatgaaaagtacgcgaaaaacagtaaggcccgaaccgatgtcgtcgcgcaaaatgtaccgactgaaatcagcgatcagatccgagcctatgcgattaaagcctttaaaggcatgaagttacgtcacctgtcccgtatcgactttttcttaaccgcggacaatgaaatcctgctgaacgaaatcaataccttcccaggttcgacgcccatttctatgttccctaagatgctgcaaaatcatgggcatgatttcacccaatacttaagtttagtgattaacagccagttagcggcaaagtaa

SEQ ID NO: 312351 - DNA, 976 bp, Unknown
  Bacterial polypeptide expressing nucleotide sequence isolated from the Sargasso Sea
tatgaagaagaatattggtatagtatatggaggatattcatcagaatataaaatttctataaaaagtggtgaatttattttcaagattttaaacaataatcctgattggaatgtatataaagtcttattatccaaaaatagcacatctgttatcttattggatgataaaattgaagaaattaatcatgatgactttagttttaagcatggtggtaatagagtaaaatttgatgctatatacaatataattcatggttctcctggggaaactggagaattttcatctttattagaaaaaattggtattccgcaaacttcttgtagttcagatatatgtaaacttacttttgacaaacatgaatatgttaaatttattaattcacttaatttaaaaacagcaaaacaattctttataaaaaagggacaagaatataacgttagtgacatagctgaaaagttaggtattccatgttttgttaagccaaataagtctggtagtagttttggtgtatcaaaggttaaaaataaagatttactaaatgataaaataaattatgcttttcaagagggagatgaagttctggtggaatcatttcttgatggaaaagaagtatctgttggtgtaataaatatagatggacaaagaactattttgcctattactgaaataaggagtaaaaatgaattctttgattttgatgctaaatataatggtgaatcagatgaaataactcctggagaactaaaagctagtgagttagatgatattcataaaatgataaatactatttatgataatatcaatcttagtggaattactcggtctgagataattctagttgatggaatccctcaccttgttgaaactaatacgattccagggtttacagaacaaagtatagttcctcaacaaattaaagctgctgggctatcaattcataaagtcattgaaagtcaaattaaatctttactttaa

SEQ ID NO: 312352 - DNA, 919 bp, Unknown
  Bacterial polypeptide expressing nucleotide sequence isolated from the Sargasso Sea
aaaaaaaaaatattaattttaggaggaggaatatcaaaggaacgtgaaataagtttagaaacagccaaacaagtaaacaatgttttaaaaaaaaaatattggactttattaagtgagccaaacgataatttaattaagaatattaaaaaatttaagcccaatataatttttaatgctttacatggtagatttggagaagatggctatatccagtccgtgttagaaagtttaaaaattaaatatactcattcaggagttttatcttcatcaattgcaatggataaaataatatctaaagaaatatttataaaaaaaaaaattttaacccccaagtacctcaagtttatttttgatagtagtgttttaaaaaaaaacaaaataataaataaaataaaattaaagttaaaatttcccgtaataattaagcctataaatgaaggatcaagcgtagatgtatttatttgttcaaaaaaaaacttaattaagaatttaaaaaaattaaaaaaatacaaagaaatattaattgaagaatatataggaggcagagaaattcaagttgcaatattaggtaaaaaaaaactgggagcaatagaattaaaaccgaaacgaaaattttatgattataaagcaaaatatagtttaagcgcaaagacagcacatttaattccagtaagtttaagtccaaagaatatgaataaagttttgaatatttcactgaaagctcataactgtcttggatgtagaggagttacaagatctgattttaaattttataataataaattttatttactagaggtaaatacgcaaccagggatgacaaagttgtcattagttccagaaattgcagcttacatgggaatggattttttaaatttattagagtggattttgaatgatgcttcaacaaataagtaaa

SEQ ID NO: 312353 - DNA, 955 bp, Unknown
  Bacterial polypeptide expressing nucleotide sequence isolated from the Sargasso Sea
aatggatcctattgcaattcttcaacaacaaaaaatattattattgtacggaggatggtcggctgaaagaaacatatcaattaattctggaactgcagtagcaggagctttaaaaagaaatggtataagtttttcagagtatgatttaacctctgaagaagacgctaaacttttatctactgattacgaccttgcttttatagccttacacgggagagggggagaagatggctttattcaagagattcttgaatcaaagaatattagatacacaggtagcgatacaatttcatgtaaaacttctttaaacaagattgaatcaaagaaaatttggagagacttgttattacctaccccagattttgttgaaattttaaatgttggcagacctgagatgaaattgaccccgcatctttcgggagaaaatgatataactgcattagataagacctatgtagttaaacctgcgaatgaaggctccagctttggtataactatcgttagaccggataatggcactcttgaaaaagcaatgcttgatgcctctaagtttgattcctcaatcctggtagaggcatttgttgatggcagagaacttactgtttcgatacttggagacgatgtatttcatccaattcatataaagccgtcaggagatttttatgacttcgattctaaatataataataaaggtacggaatatataaaagctgacctttcagtcgagaaactgaatgaaattaaagactatgcgtggcatgcgttttcctcgcttggttgcagtaaatggggtagggttgattttattgaagacaaggaaggtaattttcagataatagaagttaatactgttcccggactaaccgaaacaagtctttttcccaaggctgcatcttacgaaggtatagacttcgatgaattaattatcaaagtccttcatttgtcttgcaaataa

SEQ ID NO: 312354 - DNA, 646 bp, Unknown
  Bacterial polypeptide expressing nucleotide sequence isolated from the Sargasso Sea
gatgaaaacaattttctcaaatcttaaacttcctcaagttaattatctagtttttcaaaatgaagatctcaacgataagcaagtaaaaaataaaataattaatgaaattttaaaaaaattaaaatttcctgtttttgttaaaccatcgaactctggatcatctcttggcatctccaaagtcaaaaatgaatcggaaatattactagcattagaaaaggctcgggaaatagatccaagaatcttaatagaggaaggtttagaggtaagggagattgaatgcggaataattgggaattcaaaactctcaacctctgagataggcgaggtaaattacgaaagtgattggtatgattacaattcaaaatatcactcaaataataaaataattatcccagccgaaatagattctaaaatcacaaaagaaataaaagaaattgctattaaaagttgtagagcactaaatattttcggttttgcaagagtagatttctttttagaaaaatcttcaaataaaattttactgaatgaaattaatacaattcctggttttacaaaaaacagtatgtttccaatgctttgggaagcttcaggtttaaaaattgaacaacttgtggctaaactagtagatatatctctagatttgtaa

SEQ ID NO: 312355 - DNA, 862 bp, Unknown
  Bacterial polypeptide expressing nucleotide sequence isolated from the Sargasso Sea
caaacgcatcgctgtacttctgggtgggacatccgcagagcgtgaggtatctctggaatccggtcggcaatgtaccgaagcgctgcacgaagccggatacgacgcctacgaggtcgacgtaacggcgaatattgacgcgcttctcgacgccctcgagccgcgcccgcacgccgtgttcaacgcattgcacggtcgtttcggcgaggacggcaacattcagggcctcctgaatcttctggaactgccctatacccattccggcgtcctcgcctctgcgctggccatggacaaggcagccgcccgcaccatcttcgagacccagggtatggggatcgcccggggcatgcgcgcaacccgcgaagagctgctggccggcgatgtgatgccgcgtccctatgtggtgaagccgaacagtgagggctcctcggtaggagtccagatcattgaggacgggccgaacggtccggacccatatgcgctcgagaccgacaccctgctggtcgaggagttcatcccgggccgcgagctcaccgtggcggtcatgggtgcgccgggcgaagatccgcgcgccctcgctgtcaccgagctacggccgaccaagggcttttacgattacgaagcaaagtataccgacggcgtaaccgagcatctggtgccggcacccgtcagcgaaggtatctacgacaaggcaatggcctgggctgcccgagcgcacaaggcgctttattgccgcggcgtgacccgcgccgatttcagatacgacgacgaccgcgatgcgctggtgattctcgaggtcaacacccagcccggcatgacgcgcctgtcgctagtgccggagcaggcgacccattgcggcatcgct

SEQ ID NO: 312356 - DNA, 289 bp, Unknown
  Bacterial polypeptide expressing nucleotide sequence isolated from the Sargasso Sea
ttcaaaatattactcaaataataaaataattatcccagccgaaatagattctaaaatcaaaaaagaaattgaagaaattgctattaaaagttgtagagcactaaatattttcggttttgcaagagtagatttctttttagaaaaatcttcaaataaaattttgataaatgaaataaatacaattcctggctttacaaaaaacagtatgtttccaatgctttgggaagcttcaggtttaaaaattgaacaacttgtggctaaactggtagatatatctttagatttgtaa

SEQ ID NO: 312357 - DNA, 193 bp, Unknown
  Bacterial polypeptide expressing nucleotide sequence isolated from the Sargasso Sea
gcactaaatatttttggttttgcaagagtagatttctttttagaaaaaacttcaaataaaattctactaaatgaaataaatacaattcctggttttacaaaaaacagtatgtttccaatgctttgggaagcttcaggtttaaaaatcgaacaacttgtggctaaactggtagatatatctttagatttgtaat

SEQ ID NO: 312358 - DNA, 580 bp, Unknown
  Bacterial polypeptide expressing nucleotide sequence isolated from the Sargasso Sea
gatgttgcgtgtgccagaagaattcagttttgaggatgcagttcaggatctgggggacactttgtttgtcaagccctgcagagaaggttcttctctgggtgtatccaaagttagaacagcagatgaatatagtgatgcattgcggtatgcatttgatgtagacagtaaggttcttgtagaagaagcagtttctgggcgagaaattgaatgttctgttcttggtaatgattttcctgaggcagcttctgtacttggagaaattgcacctgcgcatgagttttattcttatgaagcaaagtacgtggacgaagatggagcagacttgattgttcctgcagagattgacttagatgtttcacttaatatccggcagactgcggttgaggcgtttcagataactgaatgccgtggaatggctagaattgatttttttctaaacagagataactctttcatcctcaacgaaataaatacacttcctggatttaccaatatcagcatgtatcctaaactttgggaagcttcaggtttgttatatccggaactgctagagcgtctgattgaattagctttggagtga

SEQ ID NO: 312359 - DNA, 574 bp, Unknown
  Bacterial polypeptide expressing nucleotide sequence isolated from the Sargasso Sea
gctgaagaaaattacttcgacgcttggcaataatatttgcattaaacctccaaaccaaggtagcgctcttggagtaaccctgatcagcaaagctgaggatattgaggccgccttgaacgatgcttttaagttcggttctaaggttcttgttgaagagagggtattcggtagagaaatcaccgttggattgcttgatacagaggaaggagtcaaagcatttccactaatcgaagtaaccacaccgaaagatacgtggtatgactacaagcataggtataccgtaggcttatcgaatcacgtaatcccagccaggattccttcagaactttccctaagcatacaagcttgcgcgattgaggcacacagagccctgggctgcagagatctatctcgtgcagatttcctcgttcgtggggacgaatattttttacttgaaatcaacacccttccaggcatgactggcacgagtctttatcctgagggggctgagggtttcggcatgaatttccctcaactccttgaccaccttatcgacagagcattccgtcggggccttacgacaaatttaaaataa

SEQ ID NO: 312360 - DNA, 677 bp, Unknown
  Bacterial polypeptide expressing nucleotide sequence isolated from the Sargasso Sea
ttgttcagcggtgagcatggacaaacaggccatgaaagctgccctggcaggtgcgggtctcgctcaggtgccctacgtctgcgcacaggcagacgagctcagcgatgcggcccgcttggaagcacttctgaaaagaatcgagtccggcctgggctatccctgcttcatcaagccagccaatctgggctcgtcggtgggcatcagcaaagcccggaaccgtgaggagctcatccaggggttgagattggccgcagcttttgatccacgcctcgtggtggaacagggggtgcaagcccgagaactggaatgcgctgtcctgggcgggacaaccctgcgagcctccgtcgtcggggaagttcgtttcgatgcggattggtacgactacgagagcaaatacaccgctggccgcagcaccacgctgattccagctcctttgcccaacgacatcatcgacacgatccagagccagtccatccaggcctgtgctgccgtgggcgtcaccggaatggccagggtggatttcttctacgacgacagcagcggcagggtttggctgaatgagatcaactccctgcccggtttcacctcccagagcatgtaccccatgctttgggaggcctctggcgtaacactcgaacagctcgtgcacgaactgctcgaaagcgcaggacaatgaa

SEQ ID NO: 312361 - DNA, 883 bp, Unknown
  Bacterial polypeptide expressing nucleotide sequence isolated from the Sargasso Sea
gatgaaaaaaaaaccaaatcgaattgcggtgttagagggcggaagttcagccgaagccgacgtatctcgctccagtgcagctcagattaccaaggctcttgagacacaaggttaccaaaccacgctgatagacattggcaacacccggctaaccgatcaaattctgacattcaagcccgacgtaatatttcctgctctgcatggccccataggggaagatggcaccatccaagggtttttagaaattctcgccatcccctatgtgggaagcaacgtcagaggcagtgcgctggcaatggacaagagcgtctctaaaaaaatattcgactccctagcaataccaaccgcggctggaattatggtcgacgaacttccggtttcaatgaattctcttcagcaaaatattgaagaaaacctgggtgagaaaattgtaattaaaccagttaatcaaggctcagcattgggcgtcgagatagtctctgatttaagcgatttacagaccagactgaccagatcattagattatggcccctgtttaatcgaaagttttattgaaggcagagaaattacagtgggcgttcttgatatcggaggccaaacaaagccgttccccgttatcgaggtagttacaccagagaacgagtggtataacttcactaaccgctacggtaaaaatctgagcgagcatattattcccgcgtcactgccggactcagtatctaaacgtttgcaaaatttcgctgtttctgcccacaaaggtctgggactcagggacctgtctcgtgcagactttatagtctctggagaaggtgaactagtaatacttgaggtaaatactttacccggcatgacggaaaccagcctttatcccgatgcgctaaac

SEQ ID NO: 312362 - DNA, 820 bp, Unknown
  Bacterial polypeptide expressing nucleotide sequence isolated from the Sargasso Sea
tttgggctatgaggctgaattagttgattatccaagtgacttttcacctgaaaaatttttgcaaggcgattttgtttttattgctcttcacgggcaagatggagagtcaggagagcttcaaagcttcttgcaacaaaataatattccatataccggaagtggttatgaagcttgtaaaaatacttggaataaagatacctttaaaaaaatcttaagagaaaatggaattccgaccccaaattggatttctgttccctctttggataaatttaagggcaatctagatgattcaatttttgatcaattcagaccattcaatgaaatttttttaaagccaacagaggatggatcaagtatagatgtttttaaattatcaactaataatgaattaaaaaaggccattagcgatagcttagattccaaaagacaatttatctttgaagaaagtatagattttaaagaactcaccgtccccattcttaacggaaaatgtttacctccagtagagataataactaaagaatctttctataatttcaatgcaaagtatgtaagtgaggatactgagcttattgaatttataatttctgataaaaagaaaattgagcttgagcagatttgtttaaaaacacttaatatagtcaaagcttgtggctggttaagagttgaccttatgcaagacagcaatcaaaacttttatgttcttgaggtcaatacagttccagggatgacatctcacagtttatttcctaaatcagcagaatcaattgggttatcatatgacgaccttgttaatgaaattattaatgctgaaatttag

SEQ ID NO: 312363 - DNA, 583 bp, Unknown
  Bacterial polypeptide expressing nucleotide sequence isolated from the Sargasso Sea
gatgttgcgtgtacctgaagaattgagttttgaggatgcagttaaggatcttggagacactttgtttgtcaagccctgcagagaaggttcttccctgggtgtatccaaagtcagaacagccgatgaatatagtaatgcattgcgggaagcatttgctgcagatagtaaggttctagttgaagaagcagtttccgggcgtgaaattgaatgttcagttcttgggaatgattttccccaagcagcttctgtacttggagaaattgcccctgcgcatgagttttattcttatgaagcaaagtatgtggacgaagatggagcagacttgattgtgcctgcagagatagacttggacgtttcacttaatatccggcagactgcggttgaggcttttcagataactgagtgccgtggaatggctagaattgatttttttctaaacagagacaattctttcatactcaacgaaataaatactcttcctggatttactaatatcagtatgtatcctaaactttgggaagcatccggcttgtcatatccggaattgctagaacgtctgattgaattagctttagagctttaa

SEQ ID NO: 312364 - DNA, 340 bp, Unknown
  Bacterial polypeptide expressing nucleotide sequence isolated from the Sargasso Sea
acctctgagataggagaagtaaaatatgaaagtgattggtatgattacaattcaaaatataacttaaacaataagataattatcccagccgaattagattttaaaattacaaaagaaattaaagaaattgcgattcaaagttgtagagcactaaatatttttggttttgcaagagtagatttctttttggaaaaatcttcaaataaaattttattaaacgaaataaatacaattcctggtttcacaaaaaacagcatgtttccaatgctttggaaagcttcaggttttaatattgaacaacttgtggctaaactggtagatatatctctagaatcataat

SEQ ID NO: 312365 - DNA, 760 bp, Unknown
  Bacterial polypeptide expressing nucleotide sequence isolated from the Sargasso Sea
ttacagtcaccttgataaaggggtagatagagcattcattgctttgcacggaaagggaggggaagacggactaattcagggattattggagtcataccaaatcccgtatactgggagcggagtcattccttctgccattgcgatgaataagattgcaagtaagagagtctttttatcaaaaaacctacctgttccgaattataaattattgagaaacaagaaagatctcaaggatgcacaaactgacctaggatttccaatgatattaaaaccagcttcagaaggatcaagtcttggaatgtttaaagtatgtcaatcgaacgagctgcttgacgcttttgaaactgttcttaaatttgatggaatcgtgcttgcagaagaatatattcatggaaatgaaataacagtgtctattcttaaggaaaaaacgcttcctagtatcaaaattagaacaaaaagagatttttatgatttcacagcaaaatatgaatctgatgatacagaatacaaatgcccaggatttgatgataacaaaaatgaaaaattatattcagagcttgcaaaaaaggcctttaattcattgaaatgcaaaggatggggaagagttgatttcatctgtgatcacaatgattatccaaagatacttgagataaacacaattcctggtatgacaaaaaagagtttagttccaaaggcagctgcaaaagaaggaatagatttcaatactctttgtttaaatatccttgaaacaagtatttaa

SEQ ID NO: 312366 - DNA, 421 bp, Unknown
  Bacterial polypeptide expressing nucleotide sequence isolated from the Sargasso Sea
aaatacgattcccaggtactggtggagcagtggatccacgcccgggagttcaccatcgcggtactgcgcggccaggtgctgccgccgatcgccttgggtacgccgcatgtgttctacgactacgacgccaagtacatcgccaacgacacccagtaccgcatcccctgcgggctggatagcgtcaaggaacaagagctgatcgacctgaccgcgcgcgcctgcaatgccattggcattgagggctgggggcggctggacgtgatgcaggacgagcagggccggttctggctgctcgaagtcaacactgcaccgggcatgacagatcatagcctggtgcccatggcggcccgcgcggctggcctggacttccagcaactggtgctggcaatcctggccgaaagcgtggcgacgcgaggctaat

SEQ ID NO: 312367 - DNA, 853 bp, Unknown
  Bacterial polypeptide expressing nucleotide sequence isolated from the Sargasso Sea
catgccgtccagtcccatcacggtcgggctcgtctttggaggccgctctggagagcacgacgtgtcgatccgatctgcggcgaccgtcgtccgaggcctgcgcagcgggcagaaccgagagcgatacacggtgcagccgatctacattgaccgtgagggtcgctggtggggaacggatctttccgaggcaacactggccttcgaaaccgcgccggagctcaacccacctctgcccccctcaggatttcaggggttcccggagggatgtgatgcggtcgacctctggtacccggtgctgcatggtcccaatggagaggacggcaccattcaggggttgttccagctgacgggcaaaccgttcgtgggagccggcgtgctcggctcagcggtcagcatggacaagcaggcgatgaaatctgccttctcaagcgccgggctgtcccaggtgccctatgtggcacttcacgcatccgaactagagaacgccatcagccgatcggccctcgtggatcggattgaacgcgaactgaactacccctgctttgtgaagccggccaatctcggctcttcggtgggcatcagcaaggtgcattctcgccaagaactggaagcaggcctcaaccaagctgcagcgctcgatccaaagctggtggtggagcaaggcgtcaacgcccgagaggtggaatgcgccgtcctggggggacgcatgctcgaagcgtctgtgatcggtgaagttcgttttgatgccgactggtacgactacgagacgaaatacaccgcagggcgcagcaccacgttgattccagctcccctgccggatgaagtggctgaccgcatccgcgcccaggccctg

SEQ ID NO: 312368 - DNA, 760 bp, Unknown
  Bacterial polypeptide expressing nucleotide sequence isolated from the Sargasso Sea
gaaaagctaaaagattttaatcttgtttttattgcattgcatggcgaagagggcgaaagtggtattcttcaatcaaaaatggataaagcaggaatagactataccggctctggttttgaagcttgcaagaatagttgggacaaagaaatttgcaaaaatatattaagagagaacaatcttcccactcccgatttttctgtgtataaaacatttcaagaaataattgagtctaaaaataaaatagaagagcagtttcaagaaggtgtatttataaagccctgcaaagaaggctctagtatagatattatcaaggtaacagatttctcaaaacctgatctagagaagataaaagtagatttagttgatagagaaagaaaatttttagtcgaaagatttattgagggtagggagtttaccgtcggttttttaaatgaccatattcttgaacccttagaaatcattactaaaagagaattctatgattatgaagctaaatatgatgatgatgaaactcagattattaaagctgatttggatgaaaatgacttggatacattaaaagaaatagctaaaagttgtttcaatgtatttgggctttcaagatggggcagagtggatattctgcaagatcaaaaaggaaatttttttgtattagaacttaatactgtcccaggtatgactgatcatagtctttttccttatgctgcaagcttaaagggatttagttttgatgaactagtaaatgaaattacaaagtaag

SEQ ID NO: 312369 - DNA, 985 bp, Unknown
  Bacterial polypeptide expressing nucleotide sequence isolated from the Sargasso Sea
catgagtaagacccgagtcctgttgctgttcggaggccagtccgccgagcatgaggtgtcggtggtctccgcgcgttcggtataccaggcaattgattccgatcgatatgaggtgatcctggccgggatctcccggacgggtcaatggtttctcgaggatggcaaagcctctctgctggagcacagtgaggtttccaatggcaacggctcgccggtacagctgggcgctggtcagcgagaccttgtggcgctggacggcaaccctgtcggcagtgctgctttcgacgtcgtgttccctctgttgcacggacctcgtggggaagacggctctgtccagggtctgctcgaactggccgatgtcgcgtacgtgggagcagggatagccgcatccgcggtggggatggataaagagttggcccgagcagtctttgctcaggctggactgcgtcagacagattacctggtgattcgtcgtagcgcgtggaacgtcgaccgtcagggtacgattgaagatatcgaagccaaactacgttacccgctgttcgtcaagccggtgaacctcggctccagtatcggcatttcaaaggtgcatgacacccagtcgcttgagagcgctatagaccttgctgcaggttacgacctaaagataatggtggaggcttcggtagaaaacgcacgggaactcgaatgcgctgtgttgggcaatgatgagcccaaagcctctgtcatcggtgagatcattcccggcgccgagttctatgactacaccaccaaatatattgatgaccgctcccagttgattgtgccggcagaactgccggagtcgatcagtggcgagattcagagaatgtcggtggatgcatttcgctcgatagactgtgccggtctcggacgcgttgatttccttatgacttcttctggcaacattttcttgaacgagatcaacaccatgcccggttttacgcccatcagtatgtatccccgg

SEQ ID NO: 312370 - DNA, 914 bp, Unknown
  Bacterial polypeptide expressing nucleotide sequence isolated from the Sargasso Sea
tctgatttctgcctatcatatccaaaaagcccttgaccgaaaccgctttgatgtgcggatgatcggcatcagccaggatggttcatggtttcttggagattcagaaaattttctggaaaatcatgaggatgtccgaaaagtggcttttacttcctctcttccagttacgattccggaacgacaatccttggtaattagaccagaaaataccggttcactggatgaaatcgatgttttcttcccaatcactcatggtcgcctgggagaagatggtgcgcttcagggacttttggaattggctggaaaaccctatgtcggatcagatgtgtatggttcggccatctgcatggacaaggatgtttgtaagagacttttgattcagaacgatctaccagtagtcagctaccgtgtgttttgttccggagattttatagattatgaagaattgatcctggagctgggtcccacacttttcgttaaaccctgtcgggaaggttcttcacttggagtgagcaaagtccataatgccagggaatttcaggtagcaatcaaagatgcattcgggatagaccgaaaaatcatgatcgaaaaagcagtccagggccgcgagatcgagtgctctgttttaggaaatgattcccctaaagcggcagaggtattgggtgaaattgtaccacgacatgatttttactcctatgaagcaaaatatgtggatgatgaaggtgctgatttgatcatccctgctcaaatcgaatccaagacatccctgaaaatacgtgaagctgctgtggaggcatttcgttgcacagaatgcagggggatggcgcgggttgatttttttctaaaccaagatgacgtttttttcatcaatgaaatcaatacgctacctggatttaccagcatcagcatgtacc

SEQ ID NO: 312371 - DNA, 922 bp, Unknown
  Bacterial polypeptide expressing nucleotide sequence isolated from the Sargasso Sea
atggatgatataaaaaaaattgctgttatatgtggcggttcatctccagaaagagagatttctttacaaagcgggagtggtgttggaaatgctttaattgaattgggatatcaaacatcaataatagattttcgagatcttaatgatttaaatatcttaaaaaattatgacttagtcttcattgcattacatggttttgaaggagagggaggagatcttcaagagagtttagatagtttaggaattaaatatactggttccaataacgttggatgtaaaaatacctggaataaggttaaatgtaaaaatattttatttcaaaatgatgtaagctcgccaaaagcaatcatatctagttctttggataatgaagactttaatcctttcattaaatttgagaaagaatttggttacaagaagaacttatttatgaaaccttctgaagatggttccagcattgatatatacaaaatttcaaatgatgatgattttattagcgcaaaaatgtcctgtattaacaaatcgagagagtttatatttgaagaagagatcaaaggcaaagaatacactttaacaattattaataatgaatgctttccaccaattgaaattcaaacaaagaatgatttttatgattatgatgcaaaatatatatctaacgaaactattcttgcagaggccaaactatcagataaagaactagatctaatgaataagatttcactaaaagcatacaaagcattaaattgcagtggatgggcaagggttgatattcttggagatgaagatggtaatttatatgtacttgaaataaatactgttccagggatgaccagtcatagttgtgttcctaagtctggtggctttgcagggctttcttattcggatgttgtcacaaaaattatttcttctaatgtttaga

SEQ ID NO: 312372 - DNA, 898 bp, Unknown
  Bacterial polypeptide expressing nucleotide sequence isolated from the Sargasso Sea
catgtcaggtaaaaaaataattgttttaagtggcggaacttcagctgaaagagaagtttccttaaaatcaggaagtcagattcactcagctctaattcagcttggtcatcaagttgagcttgaagatcttctaacaattaatcagataaatcatctgaaaaaaaatgttgaggtatttattgctcttcatggttttgagggagagtctggaattcttcaagataagttaactaatttgggaatagattactttggcacaaatgcacaaggttgtatcaatacatggaacaaagctaattgcaaaaagatacttattgaaaatggaataaatacacctaaatttttaactacaaaaaatattaaggctatggaatttccatcggatatttttttgaaaaatggtttttacataaaaccatctgaggagggctcatccattgatacatttgcagttaaatctaatgaggaatttaaatctcttaaacagaatcttgcaaatcctgaaagagaatttcttattgaagaaacaattaatggtagagaatttacggtatctgttcttaagggtcggtgtttggcaccgttagagataatccctgctagcggaatttatgattatcatgctaaatacattgctgaagatacaattattcaaaaagcgcaacttaaacctgatcagattaaattactttgtgatattgctctaaaagcttgcacagtctgtgaatgcaaggattgggctcgagtagatgttatgcaaaatgaagatggtgaattttatgtgctagagattaacactgtacccggaatgacagaccacagccttttcccagcggctgcaaaaatatctggcttgagctttaatgagcttattcatgaaatcataagtgatgattaa

SEQ ID NO: 312373 - DNA, 928 bp, Unknown
  Bacterial polypeptide expressing nucleotide sequence isolated from the Sargasso Sea
atgggaagcataaataaaattgcagttctatatggaggctcctcttctgaaagagaagtttccatacaaagtggtatgggtgtgcataatgcaatctgcgatttaggttatgaatcagatttaattgattttaaagatcttaacaatttgaatgaattaaagatttatgactttatatttattgctcttcatggttttgaaggcgagtcaggtaaacttcaaaaagatttaaatgatttaaatattttatattctggatcaggtccggaagcttgtagtaaaacatggaacaaaaaaattacaaaaaaaattttaaaagaaaataatataaatactcctatttcaataggcatctctgagtttagctatcaggtggcgaataacggtttaaagatatcgccttatgactgtttcagaccttttaattatttatttttaaaacctgatgaggatggatcaagtattgatatttttaaaattagcgatgatgaaagccttaaaaatgcatataaaaaatgtactaataataaaagaggttttttatttgaagaatatattgaaggaagggagctaactgtcactgtaattgataaagaatgttttccgcctattgagataattacaaaaaatgaattttatgattatgatgcaaagtatatttcagatgatactttgcatatcgaagcaaaattatctaaaagtgaattaattgatattaaatcaatatctctggaggcatttgaagcacttaattgcaaagcatgggcaagaattgatttgattcaagacaaaaaaggtaatttttatgtaatagaaattaatacagttcctggaatgacaagccacagcaatgttccaaagtcaggaagtctattaggcttaacttataatgaggttgtccaaaaaatcattgatgcatctttataaa

SEQ ID NO: 312374 - DNA, 934 bp, Unknown
  Bacterial polypeptide expressing nucleotide sequence isolated from the Sargasso Sea
atgcaattgcctaagtattcagcaaaagattttggaaaagtcgctgtattaatgggcggcgaatctgctgaaagagaaatctcactagaaagcggcaaagcagtgcatgcagcattgacgcaatctggtatcgatgctcatgttattgattataagccagggctatgcaatcaattggtcgataatgcttatgatcgtgtttttttggcattacatggaagaggaggtgaggatggaactgttcaaaaagaattggaattggttggtattccgtacacaggaagcagttcctcagcttcagcgctcgctatggataaagtaaaaagcaaatcaatttggcataaagcagggttgtctacacctgattcgattgaagttaacgaaaatagtaactggaaaagtgtagctaaaaaaattggtttaccagtgatgataaaaccagttagagaaggttcaagttttggcgcagcaaaaatagatagaattgaagacttatttcaagcgtggattaatgcaagtcaatttgatgatagagtcatggcggagtcttggattaccggacaggaatatactgttcctatacttgatgacaaggttttacccattatcaaattagaaaccaaaaataagttttatgattacgatgcaaaatataatgatagtgacacaaaatatatttgtccttgtggtttagatgaatcatttgaatcagatttaggagatgtttctaaggaggcatgtcgcctattaggagttagcggttgggcccgtgttgacttactagttgattcaaataatcaagagtggctaatcgaagttaatacaattcccggaatgacaagtcatagtcttgttccaatgtcagctaagaaggcgggaattacatttgaaaatctagtcaaagaaatcttgttaacaagttttaagcaataaa

SEQ ID NO: 312375 - DNA, 763 bp, Unknown
  Bacterial polypeptide expressing nucleotide sequence isolated from the Sargasso Sea
ttgtcttcatggaccaaatggagaggatggtgtaatccaaggactgtttaaatcaactggaaaaccatttgtaggctcgggtgttctcgggtccgcattaggtatggataaaatagcaatgaaatcagtatttaaatcatataatttacctcaagttccttatataagcttaaacaaagctgatatccaaaataatttatatatgaaatctatttatgaacaaataaataaaataattagttatccttgttttattaaacctgcaaatctgggttcttctgtcggcataacaaaagcatactcaaaagaagaatttattactggaataaaatttgctgcaaaatatgatgagagaattatagtagaaaaaggtatagaaggaagagaacttgaatgcggtgttttagggaaatcagtcatgaaatcatctgttgttggggaagttaaatttcaaactgattggtatacatatgagtctaaatataatgcgaatctaagcagtacaattatcccagctgatttgaatatagagatatccaataagatacaaaaactagctatcgaggcctgtaaagctattaatgcttatggtttagcaagagtcgattttttctatcaagagagcacgcaacagatttatataaatgaagttaacaccttgccaggattcactaaaacaagcatgtacccgacattgtgggaagcttcaggattaaaactagaaaaacttgttgctagtctcatagaaatagctaaagaatga

SEQ ID NO: 312376 - DNA, 229 bp, Unknown
  Bacterial polypeptide expressing nucleotide sequence isolated from the Sargasso Sea
tgaacaaattaaagatattgctattagaagttgtagagcattaaatatttacggtttcgcaagggttgatttctttttagaaaagatttcaaataaaatttttctgaatgaaataaatacaattcctggttttactagtaaaagtatgtttccgatgctttggaatgcttcaggtttaaatattgatcaacttgtagctaaactagtagatatatcatcagatttatag

SEQ ID NO: 312377 - DNA, 952 bp, Unknown
  Bacterial polypeptide expressing nucleotide sequence isolated from the Sargasso Sea
tatgagtgaaatgagcagcatcgaccctaaacaattcggcaaagtggcagtcctgcttggcggggattccgccgagcgcgaggtgtcgctcaattcgggccgcctcgtgctgcaaggtctgcgcgacgccggtatcgacgcgcatccgttcgacccggccgagcgtccgctcgccgccctgaaggacgaaggcttcgtgcgcgcgttcaacgcgctgcacggcggttatggcgagaacggacagattcagggtgcgctggatttttacggcattcgttacacgggcagcggcgtgctcggctcagcgctgggtctggacaagttccgcaccaagctcgtgtggcagcaactgggcattccgacgccgccgttcgaggctgtgctgcgcggcgacgactacgaagcacgcgcgaaagatatcgtcgctaagctcggcttgccgctgttcgtgaagccggctagcgaaggctcgagcgtcgcggtgatcaaggtgaaaagcgccgacgcattgccggcggcgctgctcgaagcggttaagtacgacaggatcgtcgtggtggaaaagagcatcgaaggcggcggcgaatacacggcgtgcatcgcgggcgatctggacctgccggtgatccgtatcgtgccggccggcgagttctacgactatcacgcgaagtacatcgccaacgacacgcagtatctgattccgtgcggtctgccggcggacgaagaagcgcgcctcaaagtgctggcgcgccgcgcgttcgacgtgcttggctgtaccgattgggggcgcgccgatttcatgctcgacgccgccggcaacccgtatttccttgaagtgaacacggcgcctggcatgaccgatcactcgttgccgccgaaagcggcgcgcgcggtgggcatcagctatcaggacctggtggtcggcgtgttggcgctgacgcttaaggactaa

SEQ ID NO: 312378 - DNA, 916 bp, Unknown
  Bacterial polypeptide expressing nucleotide sequence isolated from the Sargasso Sea
tatgagccgcaaatttggcaaagtagcagtgatgtttggtggaacctcggcagaacgtgaagtgtcgttacgttcaggggccgctgtgctggctgccttgcaaaaacaaggtgtcgacgcccatgcttttgatcccaaagatcagccgctaagtgctctcactgcagctggttttgatcgtgtatttatagtgctgcatggccgtggtggtgaagacggtactatgcaaggtgctttgcaattgatgggcttgccttacacaggtagccgcgtcttaggttctgccctggcgatggataaaatccgctgcaaatggctgtttcaggcacaagggttacctacggcaaaatttttagtggctgaagccggaaaacaactgaattatcaggatattttgcagcagttagctggtaaagtgatggtgaaaccagccaatgaagggtccagtatcggcatgagtgcagcaagcactgccgaagaactggaacaggcattggtggtagcaaccaaatacgattcggatgtactggttgaacagtggatccagggccgtgaatttaccgtgaccgtattaaacggtaaggctttgcctatcgttgaaatgcgtactccccgctctttttatgactatgaagccaagtatcagtccaatagcactgaatacctttgtcctgcgcctttaacagccgagcagactgcctttttgcaacaagttgcagctgctgcctttactgctgttggtgcgtcaggctggggccgtgttgatgcaatgctggacgagcagggtaatttttatctgctggaagtgaatactgtgcctggcatgacggaaaagtcattggtgcctatggcagctaaagcagcgggtttaagttttgagcagttagttctgcagattttagaacagactttatga

SEQ ID NO: 312379 - DNA, 925 bp, Unknown
  Bacterial polypeptide expressing nucleotide sequence isolated from the Sargasso Sea
aatggacaaaatcaaaaaaatagcagttctttatggagggttatcctcagaaagagaaatatcattgaaaagtggtatgggcgttcataaagcaatatgtgatcttggatatgaatcagacttaatagattttaagaatctaaacaatttgcatgaactaaaagcttatgattttatatttattgcacttcatggttttgagggcgaaggtggaaaacttcaagaagatttagataacttaaatatcctgtattctggatcaaactcaatggcatgtagaaatacttggaataaaagattagcaaaagaaatattaaaaaaaaataatattagaacgccagtttggcttgaagttaaactcaccaaaacaattgttaataatgggcttcgtgtgtcaccttatgacaggttcagaccttttgaatatttatttctcaaaccagaggaagatggctcaagcgtagatatttttaaaattagtgatgaagatagcttaagagctgcatataaaaaatgcacaaatcctaacagaggttttttgtttgaagaatatattcatggaagagagataacagtaactataattgacaaaaaatgttttccgcctatagaaataatcacaaaaaatgagttttatgactatgatgcaaaatatatctcagacgatactttgcatgttgaggcacaagtaactcaaaatgaattagatgagattaaatcaatagctatgaatgcgtttgaagcattagattgtaaagcatgggcaagagttgacatgattcaagataaaaaaggtaaattttatgtaatagaaattaatacagttcctggaatgacaagccacagtaatgttcccaagtcaggcagtttattgggcttaacttataatgaggttgtgcaaaaaatcatagatgcttctttataa

SEQ ID NO: 312380 - DNA, 781 bp, Unknown
  Bacterial polypeptide expressing nucleotide sequence isolated from the Sargasso Sea
tttgaatgaattaaaggtttatgactttatatttattgctcttcatggttttgaaggcgaagccggtaaacttcaaagagatttagatgatttaaatattttatattctggatcaggccctgaagcttgcatgaaaacatggaacaaaaaagtcacaaaagaaattttaatagaaaataatataaatactcctgtttccctgagtatttctgagttttctcttgaagatgcaaatcaaagtttaaatacatcatcatttgatcgatttagaccatttaattatttatttttaaaacctgaggaagatggctccagtattgatatttttaaaataagtgatgaagaaagccttaaaaatgcatataaaaaatgcactaatcgtaaaagaggttttttatttgaagaatatattgatggaagagagctaacagtgaccgtaattgataaagaatgttttccgcctattgaaataattacaaaaaatgaattttatgattatgatgcaaagtatatttcagatgataccttgcatattgaagcaaaattaacgcaaagtgaattagttgatattaaatcagtatctttagatgcatttgaagcacttaattgcaaagcatgggcaagagttgatttaattcaagataaaaaaggtaatttttatgtaatagagattaatacagtgcctggaatgacaagccatagcaatgttccaaagtctggaagtctattaggcttaacttataatgaggttgtccaaaaaatcataaatgcatctatataa

SEQ ID NO: 312381 - DNA, 952 bp, Unknown
  Bacterial polypeptide expressing nucleotide sequence isolated from the Sargasso Sea
atgaaaaaaaaaccaaatcgaattgcggtgttagagggcggaagttcagccgaagccgacgtatctcgctccagtgcagctcagattaccaaggctcttgagacacaaggttaccaaaccacgctgatagacattggcaacacccggctaaccgatcaaattctgacattcaagcccgacgtaatatttcctgctctgcatggccccataggggaagatggcaccatccaagggtttttagaaattctcgccatcccctatgtgggaagcaacgtcagaggcagtgcgctggcaatggacaagagcgtctctaaaaaaatattcgactccctagcaataccaaccgcggctggaattatggtcgacgaacttccggtttcaatgaattctcttcagcaaaatattgaagaaaacctgggtgagaaaattgtaattaaaccagttaatcaaggctcagcattgggcgtcgagatagtctctgatttaagcgatttacagaccagactgaccagatcattagattatggcccctgtttaatcgaaagttttattgaaggcagagaaattacagtgggcgttcttgatatcggaggccaaacaaagccgttccccgttatcgaggtagttacaccagagaacgagtggtataacttcactaaccgctacggtaaaaatctgagcgaacatattattcccgcgtcactgccggactcagtatctaaacgtttgcaaaatttcgctgtttctgcccacaaaggtctggggctcagagacctgtctcgtgcagactttatagtctctggagaaggggaactagtaatgcttgaggtaaatactttacccggcatgacgaaaaccagtctttatcccgatggcgctaaacaccttggatataaatttcctgtattaatccaactgctcatcgaagaggccttcagtagatcaaactgag

SEQ ID NO: 312382 - DNA, 901 bp, Unknown
  Bacterial polypeptide expressing nucleotide sequence isolated from the Sargasso Sea
atgaaagaagtctgtgtactctatggaggtaattcttccgaaagagaggtttcacttaaaagcggtaaatttatccataaatctctagtaaacaatgggtataaatctcacttaattgattatgcagatctgactgaattggaaaagctaaaagattttaatcttgtttttattgcattgcatggcgaagagggcgaaagcggtattcttcaatccaaaatggataaagtaggaatagactatactggctctggttatgaagcttgcaagagaagttgggataaagaaatttgcaaaaatgtattaagacagcacaatcttcctactcccgatttttttgtttataaaacatttcaagaaataattgaatctaaaaataaaatagaagagcattttcaagaaggtgtatttataaaaccctgtaaagaaggctctagtatagatattattaaggtaacagatttctcaaaatctgatctagagatgataaaagtagatttagttgatagagaaagaaaatttttagtagaaagatttattcagggtagggagtttaccgtcggttttttaaatgaccatattcttgaacccttagaaataattactaaaagagaattctatgattatgaagctaaatatgatgatgatgaaactcagattattaaagctgatttgaatgaaaatgacttggatacattaaaagaaatagctaaaagttgtttcaatgtatttgggctttcaagatggggcagagtggatattctgcaagatcaaaaaggaaatttttttgtattagaacttaatactgttccaggtatgactgatcatagtctttttccttatgctgcaagcttaaagggatttagttttgatgagctagtgaatgaaattacaaagtaag

SEQ ID NO: 312383 - DNA, 412 bp, Unknown
  Bacterial polypeptide expressing nucleotide sequence isolated from the Sargasso Sea
agaatcttaatagaggaagggttagaggtaagggagattgaatgtggaataattgggaattcaaaactcttaacctctgagataggcgaggtaaattacgaaagtgattggtatgattacgattcaaaatatcactcaaataatgaaattattatcccagccgaaatagattctaaaatcacaaaagaaattaaagaaattgctattaaaagttgtagggcactaaatattttcggttttgcaagagtagatttctttttagaaaaatcttcaaataaaattttcctaaatgaaataaatacaattcctggttttacaaaaaacagtatgtttccaatgctttgggaagcttcaggtttaaaaattgaacaacttgtggctaaactggtagaaatatctttagatttgtaat

SEQ ID NO: 312384 - DNA, 371 bp, Unknown
  Bacterial polypeptide expressing nucleotide sequence isolated from the Sargasso Sea
aatgcggaataattggaattcaaaactcataacctctgagataggcgaggtatattacgaaagtgattggtatgattacgattcaaaatataactcaaataataaaataattatcccagccgaaatagattctaaaatcacaaaagaaattaaagagatttctattaaaagttgtagagcactaaatattttcggttttgcaagagtagatttctttttagaaaagtcttcaaataaaattttgttaaatgaaataaatacaattccgggttttacaaaaaacagtatgtttccaatgctttgggaagcttcaggtttaaaaattgaacaacttgtggctaaactggtacaaataactctagatttgtaat

SEQ ID NO: 312385 - DNA, 820 bp, Unknown
  Bacterial polypeptide expressing nucleotide sequence isolated from the Sargasso Sea
agaaaaaattaacttcctagatggaattaactttcaaaatgttgatatatggtttcctattctacatggatttaatggtgaagacggatcaattcatggcttactgaaatttactaagaaaccttcagtcggatgtggaattataggctctgctctaggtatggataaaataatgatgaaaacaattttctcaaatcttaaacttccacaagttaattatctagtttttcagaataaagatctcaatgataaggaagaaaaaaataaattaattaatgagatttcaaaaaaattaaattttcctgtttttgttaaaccatctaattcaggatcatctcttggcatctctaaagtcacaaatgaaaaagaaatattgcaagcattagaaaaggcttgggaaatagatccaagaattttagtagaggaaggtttagaggttagagagatcgaatgtggaataattgggaattcaaaattattagcttctgagttaggggaagtaaagtacgaaagtgattggtatgattacgattcaaaatataacttaaataataaaataactatcccagccgaaatagattctaaaataattaaagaaattaaagaaattgcaattcaaagttgtagagcactaaatatttttggttttgcaagagtagatttctttttagaaaaatcttcaaataaaatttttttaaacgaaataaatacaattcctggtttcacaaaaaaaagtatgtttccaatgctttggaaatcttcaggtttaaatattgaacaacttgtggctaaactggtagatatatctctagatttataa

SEQ ID NO: 312386 - DNA, 307 bp, Unknown
  Bacterial polypeptide expressing nucleotide sequence isolated from the Sargasso Sea
cgattggtatgattacgattcaaaatatcactcaaataataaaataatcatcccagccgagatagattctaaaatcacaaaagaaattaaagaaattgctattaaaagttgtagagcactaaatatttttggttttgcaagagtagatttctttttagaaaaatcttcaaataaaattttactaaatgaaataaatacaattcctggctttacaaaaaacagcatgtttccaatgctttgggaagcttcaggtttaaaaattgaacaacttgtggctaaactggtagatataactttagatttgtaa

SEQ ID NO: 312387 - DNA, 313 bp, Unknown
  Bacterial polypeptide expressing nucleotide sequence isolated from the Sargasso Sea
cttacacgagttttattcctatgaagcaaagtacgtagatgaaagaggagcggatttaattgttcctgcagatatagacttggaagtctcacgaaatattcgtaaaactgcggtagaagcttttcagattacggaatgccgtggaatggctagagttgatttttttcttaataatgacaacacttttgtcctaaacgaaataaacactctacctgggttcacaaatatcagtatgtatccaaaactctgggaagcatccggcttgtcatatcctaaactacttgaaagcttgattgatttagctatggaatga

SEQ ID NO: 312388 - DNA, 906 bp, Unknown
  Bacterial polypeptide expressing nucleotide sequence isolated from the Sargasso Sea
agtattgataaacaagggcaatggcacgtcagcgatgccagtaattatctgctcaattcagacgacccggcgcatattgcattgcgaccttctgagaccagcctggcgcaggtaccgggtaaacaagcgcaccagttgatcgatgcacaaaacggtcaaccgctgccgacggtcgatgttattttcccgatcgtacatggcactctgggtgaagatggctctctgcagggcatgctgcgcgtggcaaacctaccgttcgtaggttctgatgtgctgggttctgcggcctgtatggataaagacgtgaccaaacgtctgctgcgtgatgccggattaaacatcgcgccatttattacgctcactcgcgccaatcgcaacagcatcagctttagcgaagtggaatcccgcctgggtctgccgttgtttgtaaaaccggccaaccagggatcgtccgttggcgtcagcaaagtaaccagcgaagcccaatacgatcaggccgttgcgctggcatttgaattcgatcataaagtcgtggtggagcaagggatcaaaggccgcgagatcgaatgtgcggtactgggcaacgatcatccgcaggccagtacctgtggagaaattgtgctgaacagcgatttttacgcttacgacactaaatacattgacgataacggtgccacagttgtcgttccggcagcaattgcaccagagattaacgacaagatccgcgaaatcgccattcaggcctaccagacactgggctgtgccggcatggcgcgcgtggacgttttcttaactgctgaaaacgacgttgtgatcaatgagatcaacacgctgccaggctttaccaacatcagtatgtatccgaagctgtggcaggcgagcggtttaggctataccgatttgatc

SEQ ID NO: 312389 - DNA, 388 bp, Unknown
  Bacterial polypeptide expressing nucleotide sequence isolated from the Sargasso Sea
gaggtaagggagattgaatgcggaataattgggaattcaaagctcttaacctctgagataggcgaggtaaattaccaaagtgattggtatgattacgattcgaaatatcactcaaataataaaataattatcccagccgaaatagattctaaaatctcagaagaaattaaagacattgctattaaaagttgtcgagcgctaaatattttcggtttcgcaagagtagatttctttttagaaaaatcttcaaataagattttgctcaatgaaataaatacaattcctggttttacaaaaaacagtatgtttccaatgctttgggaagcttcaggtttaaatattgaacaacttgtggctaaactggtagaaatatctttagatttgtaat

SEQ ID NO: 312390 - DNA, 461 bp, Unknown
  Bacterial polypeptide expressing nucleotide sequence isolated from the Sargasso Sea
aatgaccagcgcctacgacaagctgcactcgaccctggacgtcaaggcgttcggacgcgtcgccgtgctgtacggtggcaagagcgccgagcgtgaagtgtcgctgaaatccggcgccgcagtgatcgatgcgctgagcactgccggcgtcgacgtggtcgccatcgacgtcggtgatgacctgctcgcacgcctgcaaagcgagaagatcgaccgcgccttcatcatccttcacggccgtggcggtgaagacggaagcatgcaaggcttgctggagtgcctgggcatcccttacaccggcagcggcatcctggcttcggcgctggcgatggacaagctgcgcaccaagcaggtgtggcagagcctgggcattcccacaccacgccacgcggtgctggcgagcgaaagcgattgtttgcaggccagtacggaactgggcttcccgcttatcgtcaaacccg

SEQ ID NO: 312391 - DNA, 579 bp, Unknown
  Bacterial polypeptide expressing nucleotide sequence isolated from the Sargasso Sea
ttcgttccggagattttatagattatgaagaattgatcagggaactgggtcccacacttttcgtcaaaccctgtcgggaaggttcttcactgggagtgagcaaagtccataattccagggaatttcaggcagcaatcaaagatgcattcggaatagaccgaaaaatcatgatcgaaaaagcagtccaggggcgcgagatcgagtgctctgttttaggaaatgattcccctaaagcggctgaggtattgggtgaaattgtaccacgtcatgatttttactcctttgaagccaaatacgtggatgatgaaggagctgatttagtcatccctgctcaaatcgaatccaagacgtccctgaaaatacgtgaagcagctgtggaggcatttcgttgcacagaatgcagggggatggcgcgggttgatttttttctaaaccaagatgaagattttttcatcaatgaaatcaatacgctacctggatttaccaacatcagcatgtaccccaagttatgggaagcatccggtatgtcttattcaaaactactggaacatttgattgaacttgctttagaaaactgag

SEQ ID NO: 312392 - DNA, 341 bp, Unknown
  Bacterial polypeptide expressing nucleotide sequence isolated from the Sargasso Sea
tgaggtattgggtgaaaatgtaccacgtcatgatttttactcctatgaagccaaatacgtggatgatgaaggagctgatttaatcatccctgcgcaaatcgaatccgagacgtccctgaaaatacgtgaagccgctgtggaggcatttcgttgcacagaatgcagggggatggcgcgggttgatttttttctaaaccaagatgatgattttttcatcaatgaaatcaatacgctacctggatttaccagcatcagcatgtaccccaagttatgggaagcatccggtatgtcttattcaaaactactggaacatctgattgaacttgccctcgaaaactgag

SEQ ID NO: 312393 - DNA, 208 bp, Unknown
  Bacterial polypeptide expressing nucleotide sequence isolated from the Sargasso Sea
gctgtggaggcatttcgttgcacagaatgtaggggtatggcgcgggttgatttttttctaaaccaagatgacgattttttcatcaatgaaatcaatacgctacctggatttaccagcatcagcatgtaccccaagttatgggaagcatccggtatgtcttactcaaaactactggaacatttgattgaacttgctctcgaaaactgag

SEQ ID NO: 312394 - DNA, 415 bp, Unknown
  Bacterial polypeptide expressing nucleotide sequence isolated from the Sargasso Sea
ccaagaatcttagtagaggaaggtttagaggtaagggaaattgaatgcggaatagttggaaattcaaaactcttaacctctgagataggcgaagtaacgtataaaagtgattggtatgattacgattcaaaatataactctaacaataagattactatcccagccgaaatagattctaaaataaaaaaagaaattaaagaaatagctattcaaagttgtaaagcattaaatatttttggttttgctagggttgatttttttatagagaaatcttcaaataaaattttgttaaatgaaataaatactattcctggttttacaaaaaacagcatgtttcctatgctttggaaagcttcaggtttaaatattgagcaacttgtggctaaactggtagatatatctctagatttataat

SEQ ID NO: 312395 - DNA, 1063 bp, Unknown
  Bacterial polypeptide expressing nucleotide sequence isolated from the Sargasso Sea
atgtcatccagcccaaccacggtcggggttgtcttcggcggctgctccggtgaacacgatatctccatccgctccgcacaaacggttgttcatggcctgaacctgggcacgaaccgccagcgctaccagctggtgctcatctacatcgatcgcgacggccgttggtggggacccgacatcgccgccaaggttctggacagcggcagccctccctccagcgcggacctgccgcaaccactgccagggccaggattccgcggtctgcccgctggcgccgacgccgtgaccatctggtatccggtgctgcatggaccgaatggggaggacggcacgattcaggggctgttcgaaatgatgcagcagccctacgtcggagccggcgttctcggttccgccgtcagcatggacaaacaggccatgaaagcggccctggccggagcagggctggcccaggtgccctatgtctgcgcgcaggccgaagacctcagcgtggcgggccgccgggacgagctcctgcagaggatcgaagccgacctgggctacccctgcttcgtcaaaccggccaatctcggttcgtcggttggcatcagcaaagctcggaaccgtgaggagctgctgcagggcctgagcctggctgcaagcctcgatgcgcgcctcttggtggaacagggggtgcaggcccgcgaactggaatgtgccgttctcggaggaccaaccctgcgggcttccgtcgtcggggaagtccgtttcgatgcggactggtacgactacgacaccaaatacaccgaaggacgcagcaccacgctgattccagcccccttgcccgacgacatcgtgaaaacgatccggcgccagtccatccaggcctgcgctgccgtgggcgtcacggggatggccagggtggactttttttacgaggaaagcagcggcagggtctggcttaacgagatcaacactcttcccggtttcaccagtcagagcatgtaccccatgctctgggaagcctctggcgtaacactcgagcagctcgtgcacgaactgctcgaaagcgcaggacaatgag

SEQ ID NO: 312396 - DNA, 1069 bp, Unknown
  Bacterial polypeptide expressing nucleotide sequence isolated from the Sargasso Sea
atgatcggggttaagaaaaaatgtattggcttaatatttggcggtaattccaatgaacatgaagtatccatatcatctgcgaaaacagtttatgaagcatttaattcagaaataaacaaagaacgctttacagttaaagccttttacataaacaaatatggagattggcttgatagtgatagttcagaaaaaatcctaattagtaaaatccaaaacaataaaacaataaaacaagaaatttttaatcaagaaaaaattaatttccttgaaggaattgaatttcaaaatgttgatgtttggtttccccttttacatggatttaatggtgaagacggatcaattcatggcttacttagatttacaaagaaacctttagtcggttgtggaattattggctctgcacttggaatggataaaatattgatgaaaacaattttctcaaatcttaaacttccacaagttaattatctagtttttcaaaacgaagatctcaacgataaggaagtaaaaaataaaataattaataaaattttaaaaaaattaaattttcctgtttttgttaaaccttcgaactctggttcatctcttggcatctctaaagtcacaaatgaatcagaaatatcacaagcattagaaaaggcttatggaatagatccaagatttttaatagaagagggtttagaggtcagggagattgaatgcggaataattgggcgttcagaactattaatctctgagataggcgaggtaaattacgaaagtgattggtatgattacgattcaaaatataattcaaataataaaataattatcccagccgaaatagattctaaaatcactagagaaattaaagacattgctaataaaagctgtagagcactaaatattttcggttttgcaagagtagatttctttttagaaaaatcttcaaataaaattttgctaaatgaaataaatacaattccaggttttacaaaaaacagtatgtttccaatgctttgggaagcttcaggtttaaaaattgaacaacttgtggctaaactggtagatatatctttagatttgtaat

SEQ ID NO: 312397 - DNA, 871 bp, Unknown
  Bacterial polypeptide expressing nucleotide sequence isolated from the Sargasso Sea
gagcgcgaggtgtcgctgaaatccggcaacgcggtgctcagtgccctgcaagcaggcggtgttgacgccttcggcatcgacgtgggcgatgatttcctgcaacgccttgccagcgagaagatcgaccgcgcctttatcgtgctgcacggccgcggtggcgaagatggctccatgcagggcctgctcgagtgcgccggcattccctacaccggcagcggcatcctggcctctgcgctggcgatggacaagctgcgcaccaaacaggtctggcacagcctcggcctgccgacgccgcgccacgccgtgctgacctcgcgggctgactgcgaggctgctgccactgagctgggcttcccgctgatcgtcaaaccggcgcatgaaggttccagcatcggcatggccaaggtcgagagcgtcgaggcgctgatcgctgcctggcaggacgccgcgcgctacgacagccaggtgctggtcgagcagtggatcgccggccccgaatacaccatcgccgtgctgcgtggcgaagtgctgccgcccattggcctgggtacgccgcacaccttctacgactacgacgccaagtacctggccgatgacacccagtaccgcattccctgcggcctctcggccgagaaagaggcggaactgaaagaactgactgcgcgtgcctgcgaggcagtgggtactcagggctgggcgcgtgccgacgtgatgcaggatgccagcggccagttctggctgttggaagtgaacaccgtgccgggtatgaccgatcacagcctggtgccgatggccgcgcgtgctgccggtctggatttccagcaactggtgctggcgatcctggctgacagcgtcgaggcgaggggttaag

SEQ ID NO: 312398 - DNA, 1069 bp, Unknown
  Bacterial polypeptide expressing nucleotide sequence isolated from the Sargasso Sea
atgataagggggcaaaaaaaatgtattgggttaatattcggtgggaattccaatgagcatgaagtatcgatatcctctgcaaaaactgtttttcaagcatttaattcagaaataaacaaagaacgctatacagttaaaaccttttacataaacaaatatggagattggcttgatagtcatctctcagaaaagatactaattggtggaattgaaaacaataaaacaaataaaaaagaaatttttaatcaaaaaaaaattaacttccttgacggaattgaatttcaaaatattgatgtctggtttcctcttttgcatggatttaatggtgaagacggatcaattcatggcttacttagatttacaaagaaacctttagtcggatgtggaattataggctctgcacttggaatggataaaatattgatgaaaacaattttctcaaaccttaaacttccacaagttaattatctagtttttcaaaatgaaaatctcaacgataaggaagtaaaaaataaaataattaatgaaattttaaaaaaattaaaatttcctgtttttgttaaaccttcgaactccggatcatctcttggcatctccaaagtcaaaaatgaatcagaaatactagaagcattagaaaaggctcgggaaatcgattcaagaatcttaatagaagaaggtttagaggtaagggagattgaatgcggaataattggggattcaaaactcttaacctctgagataggcgaggtaaattacgaaagtgattggtatgattatgattcaaaatatcactcaaataataaaataattatcccagccgaaatagattctcaaatcacaaaagaaattaaagaaattgctattaaaagttgtagagcactaaatattttcggttttgcaagagtagatttctttttagaaaaatcttcaaataaaatttttctaaatgaaataaatacaattcctggatttacaaaaaacagtatgtttccaatgctttgggaagcttcaggtttaaaaattgaacaacttgtggctaaactggtagatatatctctaggtttgtaat

SEQ ID NO: 312399 - DNA, 895 bp, Unknown
  Bacterial polypeptide expressing nucleotide sequence isolated from the Sargasso Sea
ggacccgggatcgctgccgcggtgctggagaggggcgaagccgccaccgacgagcagctcccccccacccccctgccgcccgcaggattccggggactgccgcagggctgtgagcccatcgacgtctggtaccccgtgctgcacggccccaacggcgaggacggaaccgtgcaggggctgttccgcctgatgcgccaaccctttgtgggagccggtgtgctcggatccgccgtgagcatggacaagcaggcgatgaaggccgccttcgcggccgccggactctcccaggtgccctacgtctgcgttcaggccagcgaactgaaggacgacaccacgttcaacccgcttctgaagcgcatcgaacagctcggttatccctgctttgtcaagccagccaacctcggttcatcggtcgggatcagcaaggtgcgcaaccgggcggaactggttgagggcctccacaaggcttccctcctggatccgcgcctagtggtggagcagggggtcacggcacgggaactggagtgcgccgtgctggggcggaacgacctgagggcatccgtcgtcggggaggttcgtttcgaagccgactggtacgactacgagaccaagtacaccgctggacttagctccacactgattccggcgccgcttccagacggcgtcgctgattggatccgacagcaggctcttcaggcctgcgaagcggtcggggtcctgggcatggcccgtgtggatttcttctacgacgaagcagccggaacgatctggatcaatgagatcaacacccttcctggattcaccagccagagcatgtacccgatgctttgggcagcaagcggcttaacactcgatcaactggtgcacgaactggtggaaacagctggagaatgaa

SEQ ID NO: 312400 - DNA, 322 bp, Unknown
  Bacterial polypeptide expressing nucleotide sequence isolated from the Sargasso Sea
gatgaaagatttcgttgacgcaacggcttttaattcagagcaaggcaatcgcgccagaaagctttttgccgctgtagtacttgcagctttagatgatgccatcgctgatgaccgaaaatatggtaacgggcccgagcagatagctcgttgggcacgatcgagagatggcagagaggttttatcgtgcgccggtattgatcccaatgagcgagtagttgaaggtttaatggagttcgttgaaaagggtattagaacgtctgtggcgctatcccgtgaagaaagcgagcgtagaaatgctgccatggaagcagaagctgcttaa

SEQ ID NO: 312401 - DNA, 427 bp, Unknown
  Bacterial polypeptide expressing nucleotide sequence isolated from the Sargasso Sea
atgaataaaaaatatgagttaatttatgaaggcaaggcaaaaaaagtatttactcatgatgatgcaaataaagtcaaaattgaatttaaagatgaagctacagcgtttaatgcgttgaaaaaagaaaaatttgaaggtaaaggcaaacttaattgcttaataagtgcgagaatttttgagatcctgattaagaaaaatattccaactcattttattgaacttgaaaatgaaaatacaatgattgcaaaaaaaataaaagtaattccattagaaattgttctaagaaatactgcttatggttctttgtgcaaacaaactactattaaacctggaactttgttatctaaaccattaattgatatctatcttaaaaatgatgaacttaaagatccccttattacaaaagataggattgaattaatgaaaa

SEQ ID NO: 312402 - DNA, 718 bp, Unknown
  Bacterial polypeptide expressing nucleotide sequence isolated from the Sargasso Sea
atgaaaaaattaaacgaaataactaaaggtaaagcaaaatcaatgttcaccactgacaatgaagatcatttaattatgcacttcagtgatgacacctctgcattcgatggtaaaaagagagaggcattgctaggaaaaggggcagtaaataatcaatttaatgcttttataatggagcatttaaaaaataatgatatagaaactcatttaattgaagtaattgatagcacagattcattagtttataaactagatatgtttcctattgaatgtgttatcagaaatagagcctcaggatcaatttgtaaaagacttggcaccgaagatggcttaatattggaaaatcctttgtttgagttttttttaaaagatgatgatctaggagatcctttgataaatgatgaacatattatttcttttggttgggctaatcccgagcaaattcaagaaatgaaaaaacagacctacaaggtcaatcaagtcctttctaagctttttttagattctggtctaattcttgttgattttaaggttgagtatggtgttcataaagacaaaatacttttagcagatgaattcacacccgatggatgtagattatgggattcaaaaaccttaaagaaaatggacaaggataggtttagacaaggcctaggtgatgtcgttgagtcctatcatcaagttgcagatagattaggtatgaatatagaaacttgac

SEQ ID NO: 312403 - DNA, 684 bp, Unknown
  Bacterial polypeptide expressing nucleotide sequence isolated from the Sargasso Sea
tatggaaaatatagaaaaaggtgaattaataacaactggtaaagctaagtctttatattcaactaatcaagatgactatttggttatgcattatagagatgacacctctgctttcgatggaaaaaaaatagaaagtttagaaggtaaggggactattaataataaatttaacgcatttattatggaatatcttgaaaaagagggcataccaactcactttgaaaaacttctttctgagactgatagtttagttaagaaacttgaaatggcaccagttgaatgtgtggtaagaaatgttgccgctggaagtatatgcaaaagattgggtcttgaagaagggatagacttaaatccaccaacttttgaatttttctataaagatgatgatttaggtgacccaatgataaatgaatatcatataaagtcttttggctgggcaacttcggaacaagttgaacagatgcaagaaaaaacctttcaagttaatgatgctttaaagaagcttttttctgatgcgggaatgttgcttgttgattacaagctagaatttggttcatttaaaggtgagttacttcttggtgatgaattcacacctgatggttgtagggtttgggatgttgagactagagaaaaattagataaagatagattccgcccaagacctcggagacgttgtggagtcta

SEQ ID NO: 312404 - DNA, 640 bp, Unknown
  Bacterial polypeptide expressing nucleotide sequence isolated from the Sargasso Sea
gcattttagtgatgatacctcggcatttgatggtaaaaaaagagaagctttattaggtaagggagctgttaataatcaattcaatgcattcattatgaatcatctaaaagataatggagttgaatctcatcttatagaagtaattgatagcacagattcacttgtttataaattggatatgtttccaatagagtgtgtaattcgaaatagagcttcaggctcaatatgtaagagactaggaacagaagatggattagtgctagaaaatccattatttgaatttttccttaaagatgatgatcttggagatcctttaattaatgacgaacatattatttcatttggatgggccagtaatgagcatatacaagaaatgaaaaaacagacatatttagttaatgaaatattgtcaaaattatttcttaattctggtcttatattggttgattttaaagttgagtatggtctttacaaagataaaatactccttgctgatgaattcactcctgatggatgtagattatgggattcagaaactttgaaaaaaatggataaggatagatttaggcaaggtttaggtgacgtcgtagaatcatatcaccaagtcgcagatagattaggtatgaatatagaaacttga

SEQ ID NO: 312405 - DNA, 442 bp, Unknown
  Bacterial polypeptide expressing nucleotide sequence isolated from the Sargasso Sea
atgactgttaataaaggaaaaaaattatacgaaggtaaagcaaaaataatatacgaagggcctgaaaaaggaacagccatacagcattttaaagacgatgcttcagctttcaataatcaaaaaaaatccactgttgaaggcaaaggtgttttaaacaatagaatttctgagcacatttttaaaaatttaaatcaaataggaattaagactcatttaattaaaagattaaatatgagagaacaattaattaagctctgtgaaatatttcccgttaagtttattgttagaaatatagcaactggctcattaacaaaaagattgggcattccagatgggacggtgttatcaaaaccactaatcgaattttcttataaaaataatgatttggatcatcctataatttcaaaagaacatatactagaatttaaatgggtaaatgatt

SEQ ID NO: 312406 - DNA, 289 bp, Unknown
  Bacterial polypeptide expressing nucleotide sequence isolated from the Sargasso Sea
catgagtcttgctgattccgtattagccgtaaacaacgatttacccatccgcaccgacagcccagtccatagcggcaaggtacgtagcgtttactggctaaccgacgccgacagccgccgcttaattcaaaccaagggctacaatgtgcccgaagatacgccgcttgccattatggtgattagcgaccgtatctcagccttcgactgcatcttccacggtgaaggcggattaaaaggcattccaagtaaaggcgcggcatttaatgccatttctaatcattgggtttaa

SEQ ID NO: 312407 - DNA, 271 bp, Unknown
  Bacterial polypeptide expressing nucleotide sequence isolated from the Sargasso Sea
atgagtcttgctgattccgtattagccgtaaacaacgatttacccatccgcaccgacagcccagtccatagcggcaaggtacgtagcgtttactggctaaccgacgccgacagccgccgcttaattcaaaccaagggctacaatgtgcccgaagatacgccgcttgccattatggtgattagcgaccgtatctcagccttcgactgcatcttccacggtgaaggcggattaaaaggcattccaggtaaaggcgcggcattaaatgccattt

SEQ ID NO: 312408 - DNA, 676 bp, Unknown
  Bacterial polypeptide expressing nucleotide sequence isolated from the Sargasso Sea
aatgttcactactgaaagtgatgaccatttagttatgcactttagcgatgacacctctgcctttgatggaaaaaagaaagaagcattacttggaaaaggtgcagtaaataatcaatttaatgcatttattatggatcatctgaaaactaatggtgttgaaacacaccttgttgaagtaatagatagcacagattctctagtatataaattggatatgtttccaatagaatgtgttataaggaatagagcctcaggatcaatttgcaaaagacttggaacagaagatggtttgattcttaaaagtccattatttgaattttttttaaaagatgacgaacttggcgatccgctaatcaatgatgagcacattatttcgtttggatgggctgatatcaagcaaataaatgaaatgaagatacaaacatacaaaataaatgaaatcttatcaaaattatttttagattcaggtctaatattggtagattttaaagttgagtttggagtttttaaagataaaattatactagcagatgaatttacacctgatggatgtaggctttgggacacaaaaacattaaaaaaaatggataaggatagatttagacagggcttaggagatgttgttgagtcatatcatcaagttgcagatagattaggaatgaatattgatacttga

SEQ ID NO: 312409 - DNA, 843 bp, Unknown
  Bacterial polypeptide expressing nucleotide sequence isolated from the Sargasso Sea
gattacacccgatcgacaaaagtgcatttgatcgagtattggcatctataccttttaaaggccaagtattaaatcttacaagtgcttggtggtttgaaaaaaccaaacatattattcctaatcaggtacttaagattccggaccccaacgttaccttagcaaaaaaatgcacagtattcccaattgaatttgttgttagaggatatataactggtagtacgagtacatcattatggacagtttataataaaggagatcgtgaatattgtggaaatattcttcctgaaggtcttaaaaaaaatcaaaaactaagttcaaacatgcttacacctactactaaagaagaacaccacgaccgccctattgcaccaccagaaattataagcgaaggatggatgacaaaggaagattgggattattgcagtcaaaaagctttagatctctttgcttttggtcaggaaaaagctgcagaaaatggtatgattttagttgatactaaatatgaaatgggtaaagaccacgatggtaatattgttttaattgatgaaattcatacccctgactctagccgttactggatttctaaaacatatgatgagaggtttggttctgggcaagagcctcaaaatattgataaggaatttttgcgcttatggtttgttgataattgcgatccatataatgatgaaactcttcccgatgcaccagaagatcttgttgtagaattatcaagcagatatatttttctgtatgaaaccattactggaaataagtttccctttccaggagctgaaaaaaaagtaaatgatagaattaatgaaaatttaaaggatgaattatgaa

SEQ ID NO: 312410 - DNA, 270 bp, Unknown
  Bacterial polypeptide expressing nucleotide sequence isolated from the Sargasso Sea
gatgactcttgcaactcaggtcctggcggtcaatgacgacttgcctattcgtacagatttacctgttcactcaggtaaagttcgcagtgtgtactggctgactgccgctgacagcgcgcggttgatccgggaaaaaaactaccctgtagcaccagacacgccgctggccattatggtcatcagtgaccgtatttctgcatttgactgcatctggcatggcgaaaatggcttagatggcgtaccgggcaaaggcgcggcgctcaatgcaat

SEQ ID NO: 312411 - DNA, 718 bp, Unknown
  Bacterial polypeptide expressing nucleotide sequence isolated from the Sargasso Sea
tatggaaaatattgaaaaaggagaactaataactacaggaaaggctaaatctttgtatgagtctaatgaatcagattacctgataatgcactatcgagatgatacttctgctttcgatggcaagaaaattgaaagtttagatgggaaaggaaccattaataataaatttaatgctttcataatggagtatcttgaaggggaaggaattcctactcactttgaaaaactaatcagtgaaacggatagtctagttaaaagacttgatatggcacctgtagagtgtgttgtaagaaatgttgctgctggaagtatttgtaaaagactaggtttggaggagggtatggacttaaatccacctacattcgaattcttttataaagatgatgatcttggagatccaatgatcaatgaatatcatattaaatcgttcggttgggctaccgaggatcaagtaactcaaatgcaaacaaaaacttttcaagttaatgatgctctaaagaaattattttctgaagccggaatgatcttagtagattacaagttagaatttggagatttcaaaggtgaacttttgttaggagatgaattcacgccagatggttgccgagtttgggatgtagaaactagagaaaagcttgataaagacagattcagacaaggtctaggagatgttgtggagtcgtatcagataatggcaaaaaaacttggagtcatttag

SEQ ID NO: 312412 - DNA, 478 bp, Unknown
  Bacterial polypeptide expressing nucleotide sequence isolated from the Sargasso Sea
agtatacaaattagaaatgtttcctattgagtgtgttattagaaatagagcatcaggatcaatttgcaaaagacttggtacagaagatggattaattttagaaaatccgttatttgagttctttcttaaagatgatgatcttggagatccgcttattaatgatgagcacataatttcatttgaatgggctgattcaaatcaaatccaagaaatgaagaagcaaacatatttagtgaatgaaatactgtcaaaattatttcttgattctgggctcatattggtcgactttaaagtcgaatttggagtctataaagataaaatcttacttgcagatgaatttactcctgatggttgtagattatgggatgtaaataccttgaagaagatggataaggatcgttttagacagggtttaggtgacgttgtcgagtcatatcatcaagttgccgaacgattaggtatgaatatcgaaacttga

SEQ ID NO: 312413 - DNA, 517 bp, Unknown
  Bacterial polypeptide expressing nucleotide sequence isolated from the Sargasso Sea
ttacccccatctacaaaagctgaatatggtttgcatgacgaaccaatttctagagagaaaattatttcatccctggttgatgaagaaatttataaaaaagctgaagaatacgctttgcaattatttaatgaaggtcaaaagtgggctaatgaacaaggattgattttagttgatactaaatatgaatttggtatctatgatggagagttgattgttattgatgagattcatactcctgattcaagtagatattggataaaggatgagtatcaacaaagatttgaaaaaaataaaaatcaaaaaatgttagataaagaaaatataagacaatggttaattgaaagaggttttaaaggtgaaggagttcctcctaaattatcagatgatattagaatatatctttcagaaaaatatatagaattatataaaagattaactggaaaggaatttgttccatcaacaggtgatgtgaaatctagaatttctcaaagtcttaaaagtgcatctattatatgat

SEQ ID NO: 312414 - DNA, 597 bp, Unknown
  Bacterial polypeptide expressing nucleotide sequence isolated from the Sargasso Sea
aaaaaagaagcttaaaaagtaagggagaaataaataataaatttaatgctttcattatggagcatctttctaataatggtgttgaaactcacttccttaaattagtagaaaaaaatgaaagtcttgtaaaacgacttgatatgcttccagttgaatgtgtggtaagaaacattgctacaggatcattatgcagaaggttaggagttgaggaaggtattaaattcgaagatcctctttttgaatttttcttaaaagatgatgatcttggagacccacttataaatgataaccatataacagcatttggatgggggactgaagaagaaatagccacaatgaaagaaataacttttagaattaaccatcttctttgtaaacttttcaaggaagtagggctaattttagttgattataaggttgaatatggaagatctaatggatctcttatattgggcgatgaatttactccagatgggtgcagaatatgggatgctgaaacaggagaaagtctagataaagatagatttagaaaagatcttggtgacgtagttgaatcttatcaaatagtagcccataaactaggtatttctctttagt

SEQ ID NO: 312415 - DNA, 644 bp, Unknown
  Bacterial polypeptide expressing nucleotide sequence isolated from the Sargasso Sea
tggatatctcacgggaagcacgtccacgtcgttgtggacgcactacaagaacggggggcgaaactactgcgggaacgaactgaacgacggcatggtgaagaatcaaaaattgccgacgaacatcgtcacgccgacgacgaaggagaaggaacacgatagaccgatttctctcgcagacatcgtcaaggaggggtggatgaagcaagatgatttggattattgcgttgccaagacgctggaggtctttgtgtacgcgcaagaagtcgctgcgacgcgcggtttaattttggtcgacacaaagtacgaattcggtcgcgacgcagacggcaccattcgactcatcgatgaaatcaataccccggacagctcgagatattggttgtcggagtcgtacgccgagcgtcaagcgaagggcatggagccggacatgatcgataaggagttccttcgattgtggttcgcagagcggtgcgatccgtacaaggacgaggtgcttccggaggcgccggcggacctcgtcgccgagctgagctctagatacgtcaaactgtacgagatgatcacgggtgaaatgttcgaggtcccggcgtcgagctcggacgtgaacgagcgcatgcgcaacgcgcttaagggtgtcctttaat

SEQ ID NO: 312416 - DNA, 139 bp, Unknown
  Bacterial polypeptide expressing nucleotide sequence isolated from the Sargasso Sea
gataattgtagattgtgggatctcaatcagaatagtgatacaatcgtaagtctagacaaagacagatttagaaatgatttaggtggtcttattgaagcttatagtgaaattaatcgaagaataaatgatttcatataac

SEQ ID NO: 312417 - DNA, 361 bp, Unknown
  Bacterial polypeptide expressing nucleotide sequence isolated from the Sargasso Sea
cttgtctttctcaattttattttcagttaatactgcaagtgcatttgattggaaagctcactcaggaaaaacaataacaatcttaatgaatgagcaccctgtacttgatggtattagatctttaataccagaattcgaggaagataccggcattaaagtcaaagttaatgctttagcagaagatttatactttgatagaatggaagttaatttgagagctccaaaaggagcagatgctcatttttgtccaatggacgcaactgcattcaatcaatttagtgatggcttacttcagcccttaaatggttttttagatgacgctaatgctactcatccaggttatgatgtaaatgacttccct

SEQ ID NO: 312418 - DNA, 484 bp, Unknown
  Bacterial polypeptide expressing nucleotide sequence isolated from the Sargasso Sea
tcacttgtttataaattggatatgtttccaatagagtgtgtgattcgaaatagagcttcaggctcaatatgtaagagactaggaacagaagatggcttagtgctagaaaatccattatttgaatttttcctaaaagatgatgatttaggcgatcctttaattaatgatgagcatattatttcatttggatgggccagttatgaacatatacaagaaatgaaaaaacagacatatttagttaatgaaatattatcaaaattatttcttgattctggtcttatattggttgattttaaagttgagtatggtctttacaaagataaaatattacttgcagatgaattcactcctgatggatgtagattatgggattcagaaactttgaaaaaaatggataaggatagatttagacaaggtttaggtgacgtcgtagaatcatatcaccaagtcgcagatagactaggtatgaatatagaaacttgac

SEQ ID NO: 312419 - DNA, 447 bp, Unknown
  Bacterial polypeptide expressing nucleotide sequence isolated from the Sargasso Sea
catgaaagaaattgataatttatctcaaacttataatctagaatttaaaggaaaagtaagagatatatataattttgaaaatgataaattattaatctttacaagtgatagaatatctgcgtttgactttacctttgatgatcaaatagatggcaaaggtaaagttttaaccaagatggctaaattctggtttaataaaactaagcatattattgaaaatcatttatgtgagaataagattaaactatcatcctacctaaatgataggtgtatgatagtaaaaagaactaaagtaatccctatagaagcaatagtgagaggacatattgccggatctgcttggcaaacatataaggataataatttagtaaataatgaaaagttaactaaagaatataataaatatgataaatttgatgagccaatatttaccccatcaacaaaagc

SEQ ID NO: 312420 - DNA, 718 bp, Unknown
  Bacterial polypeptide expressing nucleotide sequence isolated from the Sargasso Sea
atgaaaaaaattaatgaaataactaaaggtaaagccaaatcaatgttctcaactgagaatgaggatcatctaattatgcattttagtgatgatacttcggcatttgatggtaaaaaaagagaagctttattaggcaagggagctgttaataatcaatttaatgcattcattatgaatcatttaaaagataatggagttgaatctcatctaattgaagtaattgatagcacagactcacttgtttataaattggatatgtttccaatagagtgtgtaattcgaaatagagcttcaggctcaatatgtaagagactaggaacagaagatggattggtgctagaaaatccattatttgaatttttccttaaagatgatgatcttggcgatcctttaattaatgatgagcatatcatttcatttggatgggccagtcatgagcatatacaagaaatgaaaaaacagacatatttagttaatgaaatattatcaaaattatttcttgattctggtcttatattggttgattttaaagttgagtatggtcttcacaaagataaaatactccttgctgacgaattcactcctgatggatgtagattatgggattcagaaactttgaaaaaaatggataaggatagatttaggcaaggtttaggtgacgtcgtagaatcatatcaccaagtcgcagatagactaggtatgaatatagaaacttgac

SEQ ID NO: 312421 - DNA, 421 bp, Unknown
  Bacterial polypeptide expressing nucleotide sequence isolated from the Sargasso Sea
agcaaaaaagctttagaattatttgcatttgggcaaaaaaaagcgatggaaaatggaatggttttagtagacacaaaatatgaaatggggaaggacagcaatgggggaatagtattaattgatgaaatacacactcctgattccagccgatattggattgcggaaagctacaatgatcgaattgaaaacaataaagaacctcaaaacattgacaaggaattcttacgtctttggtttgttgacaactgtgacccttacaatgatgagactctccctgacgctcccttggatcttgtcgcagaattatctagtaggtacatatatctttacgaaaccattacaggcggcatattccctttcccagatgctggaaaaccgatacaaaaaagaattaacgaaaacctagaggatcaaatatgaa

SEQ ID NO: 312422 - DNA, 484 bp, Unknown
  Bacterial polypeptide expressing nucleotide sequence isolated from the Sargasso Sea
tgaaaccgatagtcttgttaagcgacttgatattgctcccgttgaatgtgttgtcagaaatgttgctgcgggtagcatatgtaaaagattaggattagaagagggcatggatctaaatcctcctacatttgaattcttctataaagacgatgatcttggagatcccatgataaatgaatatcacattaaatccttcggttgggctactgaagatcaggtagaacagatgcaggttaagacttttgaagttaataatgcactcaagaaattattctctgatgccggtatgatacttgttgattacaaactcgaatttggagattttaagggcgaattattacttggagatgaatttacaccagacggatgcagggtttgggatgctgaaactcgcgaaaaactcgacaaagataggttcagacaggatcttggagatgtcgttgagtcttatcagataatggccaaaagattaggcgtcatttaa

SEQ ID NO: 312423 - DNA, 777 bp, Unknown
  Bacterial polypeptide expressing nucleotide sequence isolated from the Sargasso Sea
aaaatggtaatattgaagattctgaacaactattatcaaaaattaatgaatctttagctaatgaaaaaaatatcagaaataccaagggaaaagctaaatcaatgtttactactgagaatgaggagcatctagttatgcactttagtgatgatacttctgcttttgatggtaaaaagaaagaagcacttcttggtaagggggctgtaaataatcaatttaatgcttttattatggatcatttaaaaagtaacggagtcgatactcatttagtagaagtaatagatagtactgattcattagtttataaattggatatgtttcctattgaatgcgttattagaaatagagcctctggatcaatatgtaaaaggcttggcacggaagatggtttaattcttgaaaatcctttatttgagttttttttaaaggatgatgacctcggagacccacttattaatgatgagcatatactttcatttggttgggctaatgatgagcaaataaaagaaatgaaaaaacaaacttataaggttaatgaaatattatctaaattattcttagactcaggtttgattttagtggacttcaaagttgaatatggggtttataaagacaaaattttacttgctgatgaatttacaccagatggctgtagattatgggattctaaaacaatgaaaaaaatggataaagatcgatttaggcaagggcttggagacgttgttgaatcctaccatcaagtagcagatagattaggcatgaatatagaaacttgac

SEQ ID NO: 312424 - DNA, 573 bp, Unknown
  Bacterial polypeptide expressing nucleotide sequence isolated from the Sargasso Sea
ggaacaaactcccagaaggattagagaaaaaccaaaggctaaaagaaaacatgctgacgccaacaacaaaagaagagcaccacgatagacctatttcaccaaatgaaatagttaacgaaggttggatgacggctgaagattgggaatactgcagcagaaaagctttagagttatttcaatttggtcaggagaaggctttagaaaatggaatgatcttagtagatacaaagtatgaaatgggaaaagatgaaaatggaaatattgtattaattgatgaaattcacacacctgactctagtcggtattggattgctgaaacatacgaccaaagaataaaggataataaagaaccacaaaatattgacaaagagtttttacgactatggtttgtagacaattgtgatccttatagtgacaaagaacttcctgaagcaccaagagaattagttgtggagctttctagtcgatacatttacttgtatgagacaattactggaggaatttttccttttcctgattcaaagaaaacaattcaaaatagaataaataataatttaaaggatcttatatgaa

SEQ ID NO: 312425 - DNA, 786 bp, Unknown
  Bacterial polypeptide expressing nucleotide sequence isolated from the Sargasso Sea
attgaataccgcaactgagccatatactttcacggacgcagatggtgcattttcgctttcctctaccaacggtacgcaaaaagttgttgtcactactaactctgcaactgctggaaacttagccatcaacgctattgatggttcttcgggtgctgccttgactggtgttactttgacaggtccatctgggtcgtccgttctttctccagcttcaactctcttggaaaaatctgacctcaccgaagcagaagtcgcggccgctttaggtctcgatggtatttcgcttacttcctttaacccatatgctgacggcgtcgatgcagacaacgcattggcatttgagaaagttgcaactcaagttattaccacagttaaagcgatatctgcggctgctcagggtagtggtgcagcggcagaggctgcatccaatgcagccttttcttctataatttctgttgttgccacgaaggcaactgctggagaaacgttagacttgagcgcggccgctgatctgacttcaatacagacacaggctgccactgatcttgtggctgttgcaggggtcgacgctacggcatttaatgctgttttagcaactgccatgacggcggttggaaacgtgaatacacaagtcgctgctataacggatacggaccttactgctagtgctacaaaaggcttgtttgctacggctgattttttgtctacacaagttttggacgctgctgctgctgagttggctttggcgggttcgggtgtcgctggaattacgctatctgacgcggc

SEQ ID NO: 312426 - DNA, 694 bp, Unknown
  Bacterial polypeptide expressing nucleotide sequence isolated from the Sargasso Sea
gcttacgaaattacgaagtttttggtttaacaagactcagcatattatcaaaaatcatctgttagatgacagtgagctgcaagacttaatccccaaatctcatgaatcttgcatgctcgtaaaaaaatgtcgccctattagaatagagtcaattgttcgtggttatttgtctggctctgcatatactgaatatcttaaaaatggagaagtatcagacataagcatgaagccaggtctcaagttaaatgatagatttgatgttccgatttttactccatcaaccaaagctgaagtgggtgataaagatgaaagtataacattcactcaaatgaaagaactaataggtaatgatgaagcaatctacataaacaaaaaaagtatagaactctataactttgcacatgaatatgcgctatcaaaaggtctttgtttgatagatacaaaatttgagtttggttatgacgatcaaaataatatcatacttattgatgaaatttttacacctgattgctcaagatattgtctagcacaggacatgaataaaaaagatgtagatttttttgataaacagttttttagagactatctaagagaaataggctggcaaggtacacaaattgatatcccagaaaaaataaaaaatattctcattactagatatcaacaagtctataatacgattattaatgactag

SEQ ID NO: 312427 - DNA, 718 bp, Unknown
  Bacterial polypeptide expressing nucleotide sequence isolated from the Sargasso Sea
aatgaaaaaaatatcagaaataaccaagggaaaagctaaatcaatgtttactactgagaatgaggaacatttagttatgcactttagtgatgatacttctgcttttgatggtaaaaagaaagaagcacttcttggtaagggggctgtaaataatcaatttaatgcttttatcatggatcatttaaaaagtaatggagtcgatactcatttagtagaagtaatagatagtactgattctttagtttataaattggatatgtttcctattgaatgcgttattagaaatagagcctctggatcaatatgtaaaaggcttggtactgaagatggcttaattcttgaaaatcctttatttgagttttttttgaaggatgatgaccttggagacccacttattaatgatgagcatataatttcatttggttgggctaatgatgagcaaataaaagaaatgaaaaaacaaacttataaggttaatgaaatattatctaaattattcttagactcagggttgattttagtggacttcaaagttgaatatggggtttataaagacaaaattttacttgctgatgaatttacaccagatggctgtagattatgggattctaaaacaatgaaaaaaatggataaagatcgatttaggcaagggcttggagacgttgttgaatcctaccatcaagtagcagataggttaggcatgaatatagaaacttga

SEQ ID NO: 312428 - DNA, 858 bp, Unknown
  Bacterial polypeptide expressing nucleotide sequence isolated from the Sargasso Sea
atgaatactatagaatcaactaataaatatactgagtcgatatctaaatcgattaataacaccttaactaatacgaaaattaatgctggagcaaaaaaaaccggcaaagttagagatcaatatgatttaggcgataagcttgccttaattacaaccgatcgccaaagcgcatttgatcgcgtgcttgcatctataccatttaaaggacaggtattgaacttaactagcgcatggtggtttgaaaaaacacgtgacattattcaaaatcaagtaattagcattccggacccaaatgtaactttagcaaaaaaatgtgaagtatttcccattgagtttgttgtaagaggatttatcactggtagcaccagcacttcactgtggacagtttacaataatggagacagagagtattgcggaaatctattgccagaagggcttaaaaaaaatcagaagcttgaaaaaaatatgattacacccacaactaaagaagaggaccacgacaggccaatagctccaaatgaaattgtgagcgagggatggatgacgcaaaaggattgggattattgtagcagcaaagcgatggagttgtttgaatttggacagacaacagcactcaaaaatggattaatcctggtggataccaaatatgaaatgggtaaggatattgacggtaacattgttttgattgatgagattcacactccagattctagcagatattggttagctgatacatatcaagaaagaattgaaagtggaaacgaaccacaaaatattgacaaagagtttttaagattatggtttgttgacaatagtgacccttataacgataaagagttgcccaatgcgcctgaagaa

SEQ ID NO: 312429 - DNA, 454 bp, Unknown
  Bacterial polypeptide expressing nucleotide sequence isolated from the Sargasso Sea
aaatctacaattgagggaaaaggagttttaaataatagaatttcagaacacattctctcaaatatgtcccaaatagggatcaaaaatcacctagtcaaaagattgaatatgcgtgaacaagtaataaagttggttaatattttaccaattgaatttgttgtcagaaatgttgctactggttcgttaaccaaaagacttggtatagaagacggaacagttattaaagaacctttaattgagtattgcttgaaagacgacaaacttggagatccattgatagctgaagagcatatttatgtttttgaatgggcaacaaaaaaagagatagataaaattaaaaagatgatactaagaattaacgatttcatgattggtatgtttagaggggttggtatcaaccttattgatttcaaattagaatttggaagaataaaaattaatgaaaaaaatgaaa

SEQ ID NO: 312430 - DNA, 718 bp, Unknown
  Bacterial polypeptide expressing nucleotide sequence isolated from the Sargasso Sea
tatggaaaatattaaaaaaggtgaattaatcacaactggaaaagctaaatcgctctatgaatctaatgaatcagattttttgatcatgcattatcgagatgatacttcggcgttcgatggtaaaaaaattgaaagtcttgaaggaaaagggactattaataataaatttaatgcctttatcatgaagtaccttgaagatgaaggaatctctacacactttgaagagctaattagtgaaaccgatagtcttgttaagcgacttgatatggctcccgttgagtgtgttgtcagaaatgttgctgccggtagcatatgtaaaagattaggattagaagagggcatggatctaaatcctcctacatttgaattcttctataaagacgatgatctcggagatcccatgataaatgaatatcacatcaaatcctttggttgggctactgaggatcaagtagaacagatgcaggttaagacttttgaagttaataatgcgctcaagaaattattctctgatgccggtatgatacttgttgattacaaactcgaatttggagattttaaaggccaattattactgggagatgaatttacaccagacggttgcagagtttgggatgctgaaactcgcgagaaactcgacaaagacaggttcagacaagatcttggagatgttgtagagtcttatcagataatggccaaaagattaggtgttatttaa

SEQ ID NO: 312431 - DNA, 322 bp, Unknown
  Bacterial polypeptide expressing nucleotide sequence isolated from the Sargasso Sea
atgaaagatttcgttgacgcaacagcttttaactcagagcaggggaaccgcgctaggaagctttttgctgcggtagtattagcggctttggatgatgccatcgcagatgaccgaaaatatggcaatggacctgagcaaatagcccgatgggcaaggtcgagagatggccgagaagttttatcttgcgctggtattgacccaaacgagcgagtggttgcaggtttgatggaatttgttgaaaaaggcattagaacatccgtagcgctgtcgcgtgaggaaagcgagcgtagaaacgctgctatggaagcagaagctgcttaaa

SEQ ID NO: 312432 - DNA, 199 bp, Unknown
  Bacterial polypeptide expressing nucleotide sequence isolated from the Sargasso Sea
agccctgatacttgtaggttatgggaccaggaaactgaaaaaaaattagataaagacagatttagaaaagatttaggtggtgtagttgaagcatatcaagaagtagcaagaagacttggaattcttcacgaacagtcaaatataagaccaataaaattcccaaaaccaactgctgttaaacttaaaaaaaataaatgaa

SEQ ID NO: 312433 - DNA, 673 bp, Unknown
  Bacterial polypeptide expressing nucleotide sequence isolated from the Sargasso Sea
tttacgactgataatgatgattatttagtaatgcattttagcgatgatacttctgcttttgatggcaaaaagaaagaagctcttcttggcaaaggagcagtaaataaccaattcaatgcttttataatggaacatttaaagaacaatggagtgaatactcatttaatagaagtaatagatagtactgattctttagtatataaattagacatgtttcctatcgagtgtgttattagaaatagagcctctggatcaatatgtaaaagactgggtaccgaagatggcttaatacttgaaaatccattatttgaattctttttaaaagacgatgatcttggtgacccacttattaatgacgagcatataatttcatttggttgggctaataatgagcaaatacaagaaatgaaagaacaaacttataaagttaatgaaatattatctaatttatttatagactcaggcttaatcttagtagactttaaagttgaatatggtatccataaagacaaaatcttacttgctgatgaatttacgccggatggatgtagattatgggattctaaaacaatgaaaaaaatggacaaggatcgatttaggcaagggcttggagatgttgttgaatcctaccaccaagtagcagatagattaggtatgaatatagaaacttgac

SEQ ID NO: 312434 - DNA, 843 bp, Unknown
  Bacterial polypeptide expressing nucleotide sequence isolated from the Sargasso Sea
taattttgagcagggcaaagttcgtgaatcatatgctttgcccgacggacgacgtgtgatgattgctacagataggcagtctgcctttgatcaggtgctagcgtcagtgccctataagggacaagtgctcaatcagactgcaaggttctggtttgataacacattagatatatgtcctaaccatgttatcgattatccggaccccaatgtcattattgccaagggattatcaatgttaccggttgaaatggtagttagggactatataacgggatccacggagactagtatttggcccatgtatgacaggggcgaacgctccatgtacggcataccgtttccagaaggccttaagaaaaatcaaaaacttcccgatacaattctaacacccacgactaaagcggcgcagggcgatcatgatgctccaattacgccagaggagattgtctcacagggattgttaagtcaaaaacattgggatgagttagcggaaataagcctagcaatttttgccagaggtcgtgaaatttctgctaagaatggtttaattctggtggatacaaaatacgaatttggtcttgataacgacggcaacataacactagctgatgaggtacatactccggactcaagtcgttattggctggcttccagttatgaagaccgccttgcaagtggcaaagaaccggaaagcttggataaggaattcttgagattatggattgctgggcaatgtgacccctacaaggatcccattccggaaatacccgaaaatacaatcttggagtttagtaaaaaatatattgcactatatgagcaggtaacggggctcgaatttgaaca

SEQ ID NO: 312435 - DNA, 163 bp, Unknown
  Bacterial polypeptide expressing nucleotide sequence isolated from the Sargasso Sea
actggagaaaaaattagataaagataggttcagaaaagatctgggtaatataattgagggttatcaagaagtagctcgaagacttggtattatgccagaaatagctaatgtgaaagaagtaaatttcaataaacaaagttcaattaaattcaaaaaaaaataa

SEQ ID NO: 312436 - DNA, 718 bp, Unknown
  Bacterial polypeptide expressing nucleotide sequence isolated from the Sargasso Sea
catggaagaaataaaaaaaggtaatttagttaattcaggtaaagccaagtctttatttgaaagttcaatagatgatcattatgttatgcattatagggatgatacttctgcatttgacggtgtcaaaacagaaagtctttctggtaagggtgagataaataataagttcaatgcctttataatggaagtattagaaaaaaatgggatagctactcattttgttaggcttctttcagatactgactctttagttaagaagttaaatatgcttccaatagagtgtgtaataaggaatatagctgcggggagtatatgcaaaaggctaggaatagaggaagggttagatcttgatcccccaacctttgaattcttctataaagatgatgatctccatgatcctatgataaatgaatttcatatagattcttttggttgggcttccgaagatgaagttggccagatgaaagagttaacctttaaagttaataaggttttaaagaaacttttcttagatgcaggaatgattttagtcgattataaactggaattcggttcctttgataataaattattacttggagatgagtttactccagatggatgtagagtttgggacattgatacaagagagaaattagataaagatagatttcgtcaagatttaggcgatgtagtagagtcatatcacataatcgctaacaagctaggaatagattag

SEQ ID NO: 312437 - DNA, 677 bp, Unknown
  Bacterial polypeptide expressing nucleotide sequence isolated from the Sargasso Sea
aatgaatgaaaatggtgtatataatgggaaagtgcggtgtgttgaagatattggctacaattgtcttattttatcggctagtgatcgccttagtgcgtttgacaaatatatttgtgatgttcctaataaaggccttattttaaataatattagtgtatggtggtttaataagacaaaacacattattgacaatcattatttgtatcatgaaaataatcatatggtagttaagaaagctaaaccaattaaattagaaataattgttagagcttatatgactggttcaacaaatacaagtatatggccgatgtataataggggtgaacgtgaaatttatggaataaattttagagataactataagaagaatgaaaagttagataatattattattacacctaccacaaaaggaagcacagatagacctattacacctaaagaaattattgatttaaaatatttatcgcatgaagaatgggattttatttctaaaaaggcattagaattatttaaatatggacaaaaagaagcgagtaaaaagggcttattattagttgatacaaaatatgaatttggatggttaaatgatactataattttaattgatgaattacacacgtgtgatagcagtagatactggttaaaagattcttatgatgataggtttaaactcggtt

SEQ ID NO: 312438 - DNA, 655 bp, Unknown
  Bacterial polypeptide expressing nucleotide sequence isolated from the Sargasso Sea
taatcaacaggattatttagtgatgcattacagggatgatacgtccgctttcgatggaaaaaagatagaaagtcttgaaggaaaaggaactatcaataacaaatttaatgcattcataatgaattatttagaaaaagaaggaattcaaactcacttcgttgatctcctgaatgacactgatagcctggttaagaaacttgatatggcccctgtagagtgtgtggttaggaatgtcgctgcaggaagcatatgtaaaagactagggctagaggaggggattgatttgaaccctccaacttttgagtttttttataaagatgatgagctaggagatccaatgattaatgaatatcacataagatcatttggttgggctagtgaagagcaggttaagcagatgcaaattaaaacttttgaagtaaatgaagctctaaagaagcttttttcagatgcaggtatgattcttgttgattataagctagagtttggagattttcaaggcacgttgttattgggtgatgaatttactcctgatggatgtagagtatgggacgaagaaacaagagaaaagttagacaaagatagattcagacaagggttaggagacgtggttgaatcttatcaaattatggccaaaagacttggagttatttaa

SEQ ID NO: 312439 - DNA, 238 bp, Unknown
  Bacterial polypeptide expressing nucleotide sequence isolated from the Sargasso Sea
agtgatggtgagctttatctcattgatgaggttctcactccagactcctcaaggttctgggccattgagaattatgagcttggatcaagtccgccaagctttgacaaacaatatcttagggattatctagagacactggattgggataaaacggcaccaggacccgaattgcctcaagaagttattgataatacagcgtcaaaatataagaatgcattcaaacaaatcgctgagtaaa

SEQ ID NO: 312440 - DNA, 706 bp, Unknown
  Bacterial polypeptide expressing nucleotide sequence isolated from the Sargasso Sea
tttaaataaaataagtgaatggtggtttaaaaagactgaaaaattggttcctaatcattttatatctagtgaggatagatgtatgattgtaaagaaagcagatgtatttccaatagagtttgtaatgagaaattatttgacaggaagtacaagtacctctatatggaaaaattatgaagcaggtatgaggtattattgtggtcataaactaaaagacggaatgattaaagatcaaaagttagaaagagcaattttgactccaacaactaaaggtaaaaaagatgaattgattagtaaaaaaataattattgagagaggaattatgaccaaagaagactatgaggtatgtgagagatatgcgcataagttatttgaaataggtgttcatgaggcaggaaaaaggggattaattcttgtagatactaaatatgaatttggtaaaactaaagatggtaatattgtattgatagatgaggtacatactccagatagtagtagatattggttagaacatagttataagagcagatttaaagaaggaaaaagtccagaaatgatagataaagagattataaggaaatggattcggaaaaattatgaggacccttatactgctaataagataatgatttcagatgatattaggatgttaacatatgtaagatatattcagttatatgagataataactggggaaagtttttaa

SEQ ID NO: 312441 - DNA, 641 bp, Unknown
  Bacterial polypeptide expressing nucleotide sequence isolated from the Sargasso Sea
cgtcaccggaagctccagtacttccctctggaccatatacaaccggggcgaccgcgaatattgcggcattaccttccccgacgggctgaccaagaaccaagccctggaggaagccgtcctcacccctacgaccaaggaggaggatcacgacaggcctatctcgcccgcggacatcgtttccgagggatggatgacccaggaacactgggattttgccgcccagaaggctctggacctattcaaccggggacagaagatttcagctgatcacggcctaatccttgtggacaccaaatacgagatgggaattgccgaagatggagaaattacccttatcgacgagatccacaccccggattccagccgctactggattgccgagagctatgagagaaggatgggggaggggctcgaacccgagaatatcgacaaggaatttctccgcctgtggttcaaggaccattgcgacccctacgaggacgaaaccttgcccgcggctcccgacgacttggtcgttgaattgtccgcgcgttacattcacctttttgaaatcatcacgggtgagaatttcaccttccccgaggcggatttgcccatttcggatagaatcgcccacaaccttgcaaaatacctagcttaaa

SEQ ID NO: 312442 - DNA, 289 bp, Unknown
  Bacterial polypeptide expressing nucleotide sequence isolated from the Sargasso Sea
catgagtcttgctgattccgtattagccgtaaacaacgatttacccatccgcaccgacagcccagtccatagcggcaaggtacgtagcgtttactggctaaccgacgccgacagccgccgtttaattcaaaccaagggctacaatgtgcccgaagatacgccgcttgccatcatggtgattagcgaccgtatctccgccttcgactgcatcttccacggcgaaggcggattaaaaggcattcctggtaaaggcgcggcattaaatgccatttctaatcattgggtttaa

SEQ ID NO: 312443 - DNA, 457 bp, Unknown
  Bacterial polypeptide expressing nucleotide sequence isolated from the Sargasso Sea
caatgggatgagctcgcaagaattagcctcgcgatatttgcgcgcgggagagaaatcgcagcagataacggcttgattttggttgatacaaaatatgagtttggccttgatgaaactggtaccattacgcttgccgatgaagttcatacgccagattcaagccggtactggctgaaatctagctatgaaaagcgtcttgcggaagcgaaagaaccagaaagcttagacaaggagtttttacgtctttggatttctgggaagtgtgatccctacacggaccctatcccggatattcctgaggataccattattgagtttagcggtaagtatatagcgctttatgaacaggtcactggcttgaagtttgtataccctgacaatagccaacccgttggcgaaagggttcgtgccaatttagcagctgctcttccagagtttttctctaaagacggctagt

SEQ ID NO: 312444 - DNA, 583 bp, Unknown
  Bacterial polypeptide expressing nucleotide sequence isolated from the Sargasso Sea
ctgcccgccgacgccaccgccttcaacgtgtccaacctcaccgccgccacgcagttcgccgtgagcgtcgtcgcgcacaacgcgctcggcgcgtcgctgccgagcccctcgagctggctcaccacgctgccgacggtgccgcagacgccgggcgcgcccgagtgcgacgccaagcgcaccacgcacgactcgctctcgatcgtgctcgacccgcccgcgcgcgacaacggccagcccatcgagcagtacgagtaccgcctcgtcgcgggccagccgtcgcccgggacgcccgcggtgcgcgaggcggccgcgcagccggccgacgtgctcctcgtgagcacgctcccgccgagccagacgaccgtcgacgtgtccaaccgcaccgtcgacgtgtccaaccggtaccccatcgagccgggcgccacgtacctcgtgacggcgcgcgcgcgcaacgccctcggctggagcgcgtggtcggcggcgagcggcagctgcatcgcgcgcgacgtgcccgtgccgcccttcaactggatcccgctcatcgcggcgctcggcggcttcatgctcctcgccatcctctgcg

SEQ ID NO: 312445 - DNA, 187 bp, Unknown
  Bacterial polypeptide expressing nucleotide sequence isolated from the Sargasso Sea
gagtttggaaaatttcaggataagatgcttcttgcagacgagtttactccagatggatgtcgtttgtgggacaaagacacattaacaaaaatggataaagatcgatttcgtcaagacttgggaaatgttatagaaacatatggagaagtaggcaaaagattaggtatgcaaataaaacttgactaat

SEQ ID NO: 312446 - DNA, 625 bp, Unknown
  Bacterial polypeptide expressing nucleotide sequence isolated from the Sargasso Sea
tcatctgcttttgatggtaagaaaaaggaagcgcttttaggcaaaggctcagtaaataatcaatttaatgcatttattatgaaacacctcaaagaaaatggtgttgaaacgcatcttatagatgtaattgatagtacagattctcttgtatttaaattagacatgtttccaatcgaatgcgttattagaaatagggcatcaggttcaatatgtcaaagactgggaactcaagacggactagttcttgaaaatccattatttgagttttttttaaaagatgatgatttaggtgacccgttaattaatgatgaacatataatttcttttggttgggcaaacaatgaacaaattgaagaaatgaaaaaacaaacctatcgagtaaatgaaatattgtcaaaattgtttctagactcaggtcttatattagttgattttaaagtcgaatatggtgtttacaaagataaaattttattagcagacgagttcacaccagatggatgtagattgtgggattcaaaaacaatgaaaaaaatggataaggatcgcttcaggcaaggattaggagatgttgtcgaatcctatcatcaagttgcagaaaggcttggcatgaatattgaaacttgac

SEQ ID NO: 312447 - DNA, 302 bp, Unknown
  Bacterial polypeptide expressing nucleotide sequence isolated from the Sargasso Sea
gatgaaagatttcgttgacgcaacagcttttaactcagagcagggaaaccgcgctagaaagctttttgctgcagtagtattagcggctttggatgatgccatcgcggatgatagaaaatatggtaatggacctgagcaaatagctcgatgggcaaggtcaagagatggtcgagaagttttatcttgtgccggtatagatccaaatgagcgagtggttgaaggattgatggagtttgttgaaaaaggcatcagaacatccgtagcgctatcgcgtgaggaaagtgagcgtagaaatgctgcta

SEQ ID NO: 312448 - DNA, 844 bp, Unknown
  Bacterial polypeptide expressing nucleotide sequence isolated from the Sargasso Sea
attgataaccactgatcggcaaagcgcatttgatagggttctagcatcaatcccgtttaagggccaggttctcaacttgactagtgcctggtggtttgatcaaacaaaggatattattaaaaaccatgttttaagtgttccagatccaaatgttaccattgctaaaaagtgctatgttttccctattgaatttgtagttcgcggatacataaccggtagcaccagtacttctttgtggacagtatataataatggtgatagagaatattgtggaaacgttctgccggaagggcttaagaaaaatcaaaaacttgaagaaaacatgattacaccaacaacaaaagacgaaaatcatgacatgccaatttctccagatgcaattgtgagtgacggctggatgaccagcgaagactggaaattttgtagtcaaaaggcaatgcaactatttgagtttggtcaaaaaacagcgctagaaaatggtatgattttagtggatactaaatatgaaatgggaaaggacagagatggtaatattgtattgattgacgagatacacacaccagactccagcaggtattggattgctaatacctaccatgagagaattaaaaatgggaaagagccacaaaacattgataaggaattcttaaggctttggtttgtagataattgcgatccatacaatgacgaaacgctccctaacgctcctgaggatcttgttgtagagctatccaagcgatatatttatctttatgagaccatcacaggaaaatcatttccatttcctgatgagaatattccagttaacgaaagaattaaaaacaacttgaaggatcaattatga

SEQ ID NO: 312449 - DNA, 449 bp, Unknown
  Bacterial polypeptide expressing nucleotide sequence isolated from the Sargasso Sea
tatgaaaatattaaaattatttttaatttttacttctgtattattttcatttaatgcagctaatgcatttgattggaaagcacattctggaaaaactattacaatcttgatgaatgagcatccagtccttgatggtattagatctttaataccacaatttgaggctgatacaggaattaaagttaaagttaatgctttagctgaagatttatattttgatagaatggaagtaaacttaagagcaccaaaaggtgctgatgcccatttctgtccaatggatgcaacagcatttaatcaatttagtgatggattacttcagccattgaatggatttttagatgattcaaatgctacacatccagattacgatgtaaatgattttcctgcaggtttcttaaatgcaaccaattttccaagaggacccggctctaactattattgtataccaa

SEQ ID NO: 312450 - DNA, 310 bp, Unknown
  Bacterial polypeptide expressing nucleotide sequence isolated from the Sargasso Sea
tattatttcatttggatgggctagtcatgagcatatacaagaaatgaaaaaacagacatatttagttaatgaaatattatcaaaattatttcttgattctggtcttatattggttgattttaaagttgagtatggtctttacaaagataaaatattacttgcagacgaattcactcctgatggatgtagattatgggattcagaaactttgaaaaaaatggataaggatagatttagacaaggtttaggtgacgtcgtagaatcatatcaccaagtcgcagatagactaggtatgaatatagaaacttga

SEQ ID NO: 312451 - DNA, 718 bp, Unknown
  Bacterial polypeptide expressing nucleotide sequence isolated from the Sargasso Sea
ttgaaaaaaacaggtaaagtccgagaccaatatgaacttgataatcaaatcgctttaattacaacagaccggcaaagtgcatttgatcgagttttagcctcaattccattcaaaggtcaagttttaaacctaactagtgcttggtggtttgaacagactaaacacattatacctaatcaggttatttcaattccggaccctaatgtaacccttgcaaaaaagtgcaaagtgtttccaattgaatttgttgttcggggttatatcacaggaagtaccagtacctccctttggacagtatataaaagcggagaccgtgaatattgtggaaatataattcctgacgggcttctaaaaaatcaaaaactagaaagcaacatgttaacaccaacaactaaagaaaaacaccatgacaggccaatcgctccagatcaaataataagcgaaggctggatgtccttagaagattggaattattgcagtaaaaaagcattagaactatttgaatttggtcagaaaaaagctgcagaaaatggtatgattcttgtagacactaaatatgaaatgggtaaggatgaagatgaaaacattctactaattgatgaaattcatacaccagattctagtcgatattggattgctgatagctatgaagagagaatggaaaaacaactagagcctcaaaatattgacaaggaattcttaaggctttggttgtaga

SEQ ID NO: 312452 - DNA, 378 bp, Unknown
  Bacterial polypeptide expressing nucleotide sequence isolated from the Sargasso Sea
aaaatccattgtttgaattctttctaaaagatgatgagcttggcgatcctttaattaatgatgagcatataatttcttttggatgggcaaattcagatcaaatacaagaaatgaagaagcaaacttatctagtaaacaaaattctatcaaaattattttttgattctggactcatactagtcgactttaaagtcgagtacggcatctataaagacaaaattctacttgctgatgagttcacgcctgatggttgtaggctatgggattcaaagacattgaagaaaatggataaggatcgtttcaggcaaggcttgggtgatgttgttgagtcttatcatcaagtggctgatagattgggtatgaatattgaaacttgac

SEQ ID NO: 312453 - DNA, 718 bp, Unknown
  Bacterial polypeptide expressing nucleotide sequence isolated from the Sargasso Sea
aatgaaaaaaattaatgaaataactaaagggaaagccaaatccatgttctctactgagaatgaggatcatttaattatgcattttagtgacgatacttctgcatttgatggtaaaaaaagagaagctttattaggtaagggagctgttaataaccaattcaatgcattcatcatgaatcatcttaaagataatggagttgaatcccatctaattgaagttattgatagtacagactcacttgtatataaattggatatgtttccaatagagtgcgttattcgaaatagagcttcaggatcaatatgtaagagactaggaacagaagatggattagtgctagaaaatccattatttgaatttttccttaaagatgatgatttaggcgatcctttaattaatgatgagcatattatttcatttggatgggcctctcacgagcatatacaagaaatgaagaaacagacatatttagttaatgaaatattgtcaaaattatttcttgattctggtcttatattggttgattttaaagttgagtatggtctttataaagataaaattctccttgctgatgaattcactcctgatggatgtagattatgggattcagaaactttgaaaaaaatggataaggatagatttaggcaaggtttaggtgacgtcgtagaatcatatcaccaagtcgcagacagattaggtatgaatatagaaacttga

SEQ ID NO: 312454 - DNA, 541 bp, Unknown
  Bacterial polypeptide expressing nucleotide sequence isolated from the Sargasso Sea
aaacttgaagagaatatgctcactccaactacgaaggaagaagatcatgaccgcccaatttctccttcagatatagtaagtgaaaattggatgacccaagaagattgggattattgcagcaaaaaagctttggaactatttgaatttggtcaggaaaaagcagccgaacatggtatgattttagttgacacaaaatatgaaatggggaaagatgaggatggaaatatcctactgattgatgaaatccataccccagatagtagccgatattggatagccggtagttatgaagattgcattgctcaaggcaaagaacctcagaacattgataaagaatttctaaggttatggtttgttgataactgtgatccttataatgataaagaattaccagcagcacctgatgaattagttattgaattatctagcagatatatatatctatatgaaacgataacaggaagtgtcttccccttccccgataaaggaaaagaggtaacagaaagaattaaagaaaacttgaaagattacataaaatgaa

SEQ ID NO: 312455 - DNA, 952 bp, Unknown
  Bacterial polypeptide expressing nucleotide sequence isolated from the Sargasso Sea
cctgataaaacagcaattaaaatatcctttagaagagactaatttcgatgatcaaggtgaactttatcgaggaaaagtcagagacaattacattaatgaagataccataactatggtgacaacggatagaatttcagcctttgataaagtactaggaacagtcccattcaaaggccaatcattagtggaattagctgactggtggttcggagaaactgcagatattgtggccaatcatgtaattagacgacctcatcctaatgtttggaccgtaagaagatgcgacccaattcaagttgaaatggttgttagaggttacattaccggagtaacatcaacttcagcatggactgcatacgataaaggagagagaaatttttgcggaaatgagttgcctgacggaatgcgaaaaaatgaaaaacttcctgaaccgattattacaccctcaactaaggcagctcaaggcgaacacgatgaatcagtagcaccttcagaactttacaaaagaggcgttgtagatccagcactttacagtgaattagcccgtatatcgatgagattgtatgaaagaggagtttctcgggcagctgatcacggtttaatttttgtagatactaagtatgaattcggtatatctaatggcaaaatcatgcttatggatgaagtgaatacccctgactcaagccgatattggatttctgaagactatgaaaaacgttttgaaaataatgaagaaccaaggaaattagataaagaatatgttagaacttggcttgcagatcaaggatttactggaaaaggcaaaccacctaaattaacggatgaaatccgtgttgaagccgcatccagatacatggaagttgtagaaacttttacaggagaacctatgcaacttgaagtagggcctgttgatgagtcaatatattctattctaaacccatttgcgtattga

SEQ ID NO: 312456 - DNA, 676 bp, Unknown
  Bacterial polypeptide expressing nucleotide sequence isolated from the Sargasso Sea
ctggtagtggaaagtgcaataaaaaatactgactttaattttgagaacttaaaaaagaaatacacaggtaaagttcgagatgtttatcattttgaagataagttagtaatggttgtttcggatagaataagtgcatttgatgttgtattacctaaaccaattccctttaaaggacaaattttaaatcaaatagcagaaaagtttttaaaaatgactgaagatatagttccaaactggataatttcagtacctgaccctaatgtaactataggaaaaaattgtgatacatttccagtcgaaatggttattaggggatacttgactgggcatgcatggagagagtataatagtggtaaaagaattatctgcggtgtatcaatgcctgaaggaatgagggaacatgataaatttccaaaaccgattattacacccactacaaaagccaaaataggtcatgatattgatacctctaaagatgagatcatttcaaaaaatttaatatcaaaagttgagtatgaggagttagaaaaaattacaagaaaactttttgaaagaggaactgactttgcaaaatcaaaaaatttgctacttgtagatacaaagtatgaatttggtaaatttggaaatgaaattactctgattgatgaaattcatactcctgactcatcaaggtact

SEQ ID NO: 312457 - DNA, 988 bp, Unknown
  Bacterial polypeptide expressing nucleotide sequence isolated from the Sargasso Sea
catgaatgttttagaatcagttagccagtacaaagaccgtatttctgttgagctaaataacactctaacggagacagaacttggctctgcaaaaaagaaaactggtaaggtaagagaccagtatgatctcggagacgctctggcgcttatcacaacagataggcaaagcgcatttgaccgcgttttagcatccatcccatttaaggggcaggtgttaaacctcgccagtgcttggtggtttgaggaaacaaaacacattatagataaccacattatcaacgtagcagacccgaatgttattgttgcaaaaaaatgtaaggtgttccccatcgagtttgttgtgcgcggtttcataaccggtagcaccagtacctcactttggacagtttataataatggtgaccgtgaatattgtggaaatagccttcctgaggggttgaagaaaaatcagaaacttgtaaaaaatatgttgaccccaacgaccaaagaagaacaccacgacagacctatctctcctgctgagatcgtaagtgaaaactggatgactcaagaagactgggactattgcagtgaaaaagccatggagctttttgagtttggacaaaagaaagccaaggaaaatggtatgatactggtcgatacaaaatatgaaatgggaaaagatgaagatggaaatattttactgatagatgaaatacatacccctgacagcagcagatattggattgcagagacctacgaagagagaatgtcaagtggccaagaaccacaaaatatagataaagaatttcttagactgtggtttgttgacaattgcgatccttataatgataaagaattaccaccagctccggatgagctgataattgagctctcaagtagatatatttatctatatgaaacaattaccggcagtgtatttccattccctgataaggggaaagctgtccaagaaagaataaacgaaaacctgaaagaatatttataa

SEQ ID NO: 312458 - DNA, 979 bp, Unknown
  Bacterial polypeptide expressing nucleotide sequence isolated from the Sargasso Sea
tatgaaatcaaaaaataaatatacagactccatctcaaaatcaattaacaatacattaaccaatacttctcttggttctggtcaaaagaaaaccggcaaggttagagaccaatatgacctgggagacaaaattgccctgataactacggatagacaaagcgcatttgatcgggttttagcatctataccttttaaaggtcaagttctaaatctaactagcgcttggtggtttgataaaacaaaagatataatcccaaatcatgtgattgatattccagaccctaatgtaactcttgcaaaaaagtgtgatgtgtttccaatagaatttgtaataagaggttttataacgggcagtacaagcacatctctttggacagtatataataatggtgatagagaatactgcgggaatgccctacctgatggtcttaaaaaaaaccagaggcttgataaaaatatgattactccaaccacaaaagaagaacaccacgataggcccatatcgcctgatgaaattgtcagtgaaaaatggatgactgaagaagattggaattattgtagtcaaaaggcaatggagttatttgaatttggtcaaaaaacagcattaagccatggaatgatccttgtggacaccaaatacgaaatgggtaaagatgccgatggaaatattgtccttattgatgaaattcatacacctgattcaagtaggtattggatagcggaaagctatcaagaaagaatagatagcggacaagaacctcaaaacattgataaagagtttttacgactttggtttgtggataattgcgatccatataatgatgaaactttaccagacgcgccggatgagctggttgttgagctctccagccgatatatttatctatatgaaactataactagtaatgattttccatttccaaataatgatttgccgatcaatgaaaggattaatcacaatttaaaggatcttttatga

SEQ ID NO: 312459 - DNA, 601 bp, Unknown
  Bacterial polypeptide expressing nucleotide sequence isolated from the Sargasso Sea
gaggctcttgataataaaggaaaagtcaacaatcaatttaatgcctttgtaatggaatttttagcatctaaagggatagaaacgcattttataaaactactttcaaaccacgaatctctagttcataaactagaaatgtttccaattgagtgtgttgttagaaatagggccacaggatcgctttgtaaaagattaggtattgaagatggtttgatactcgaccctcctttatttgagttctttctaaaagatgatgatttaggagatccattgattaatgaccatcatatagagtcgtttggttgggcaacccaagaagacgctgatgccatgagagatttaacccttaaaattaacgatattttggttgaattttttatggaagccaatctaattttagtggattacaaattagagtttggaaaattgcaggataagatgcttctcgcagatgaatttactccagatggatgtcgtttatgggacaaagatacattaactaaaatggataaagatagatttcgtcaagacttaggagatgttatagaaacctacggagaagtgggagagcgcctaggaatgaagataaaacttgactaaa

SEQ ID NO: 312460 - DNA, 721 bp, Unknown
  Bacterial polypeptide expressing nucleotide sequence isolated from the Sargasso Sea
atggaaaaaatatctcaaataactactggaaaagctaaatctttattcaccactaatgaacccgatcaattgattatggagtttagagatgacacatctgcttttgatggcaaaaaaatagaggctttagataataaaggtaaggttaacaaccaatttaatgcatttgtcatggagtttcttgcttcaaaaggcatcgaaactcattttataaaattattatctaatcatgagtcccttgtttataaattagagatgtttccaattgaatgtgtggttagaaatagggctacaggttcactttgtaagagattgggcatcgaagatggtttaattctagatccgcccttatttgagttctttttaaaagatgatgatcttggagatcccttaatcaatgatcatcacattaattcatttggttgggctacacaagaagatgcagatgcaatgagagatttaactctaaaaataaatgatattttagtagattttttcatggaagctaatttgattttggtcgactataaattagagtttggaaaatttaatggaaagatgttgcttgctgatgagtttactcctgatgggtgtcgactttgggataaagatactcttacaaaaatggacaaagatagatttcgtcaagatcttggaaatgttattgaaacatacggcgaagttggagagcgcctaggaatgcaaattaaacttgactaat

SEQ ID NO: 312461 - DNA, 718 bp, Unknown
  Bacterial polypeptide expressing nucleotide sequence isolated from the Sargasso Sea
atgaataaaataaaagagataactaaaggaaaagcaaaatcaatgtttacaactgaaaatgaagagcatttaataatgcacttcagtgatgatacttcagcttttgatggaaaaaagaaagaagctcttttaggcaaaggggttgttaataatcaatttaatgcttttataatggatcatcttaaacaaaatggaattgaaacccatctcattgaagttatagataatagtgactcattagtctacaagctagaaatgtttccaattgagtgtgttattaggaacagggcatctggatcaatatgtaaaagattgggaactgaagatgggttgattctagagaatcccctatttgaattcttcctgaaggacgatgatttaggagatcctctaataaatgatgagcatattatttcgtttggatgggctactcaagaacagatattggagatgaaaaaacttacatataaggtaaatgagatactttctagtttatttctagattcaggcttaattttggttgattttaaagttgaatacggtgtttataatgacaaaattcttttagctgatgaatttactcctgacggttgcaggctttgggattctgaaacaatgaaaaagatggataaggatagatttcggcaggggctgggtgatgttgtggaatcttatcatcaggttgcagatagattaggaatgaatatcaaaacttgac

SEQ ID NO: 312462 - DNA, 381 bp, Unknown
  Bacterial polypeptide expressing nucleotide sequence isolated from the Sargasso Sea
aaacagcaaagaaaaatgacctaattctggtagacacaaaatacgaaattggtactgactcttcaggaaaaattaagtttgtcgatgaaatacacactcctgatagtagtagattttggataagtggttcatataaagaaagaattaatgcgggtcaagaacctgaaaacatcgataaagaatttttaaggctttggtttgcaaaaaactgtgatccctataatgatgaggctttaccagacgcccctgacgatcttgttgcagaactttctgctagatatattttattatatgaactaatcactggagaaaaatttgtttttccaaaccttgatgatataaacaaacgaattactgaaaacataaaggagctattatgaa

SEQ ID NO: 312463 - DNA, 694 bp, Unknown
  Bacterial polypeptide expressing nucleotide sequence isolated from the Sargasso Sea
ttgccatctggaataaaaagatctggcaaagtgcgagaccaatatgacttgggtgactcaattgctttgattacaaccgatagacaaagtgctttcgacagagtactggcatcagtccctttcaaagggcaagtgctaaatcttacaagtgcatggtggtttgaggcgacaaaagatataattgcaaatcatgtaattgatatcccagatccgaacgttacactagctaaaaagtgtgatgtttttcccatagaatttgtagttcgtggttttattaccggtagcactagcacatctctttggacagtatacaacaatggagatagagaatattgtggtaatgatttgccagaaggattaaagaaaaatcaaagattagaacaaaatatgctcacccctacaaccaaggaagaggatcatgatcgccctatttctccaacagatattgttaaagaaaaatggatgactcaagaggattgggactattgtagtaaaaaggcacttgaactatttgcctttggtcaagagaaagccaaggaaaatggtctaatattggtggacacaaaatatgaaatgggtaaagataaagatggcaacattgtattaatcgatgagattcatacccctgattctagcagatattggatatctgaatcaaatgaagaaagatttaatagcggtaaagagccacaaa

SEQ ID NO: 312464 - DNA, 988 bp, Unknown
  Bacterial polypeptide expressing nucleotide sequence isolated from the Sargasso Sea
atgaatgttttagaatcagttagccagtataaagaccgtatatctgttgagctaaataacacgcttacagagacagagctcggctctgcgaaaaagaaaaccggcaaagtcagagatcagtatgacctaggtaatgctctggcacttatcacaacagacaggcaaagtgcatttgaccgtgtcttggcatctatcccatttaaaggacaagtattaaacctcgctagtgcttggtggtttgatgaaacaaaacatatcatagataatcatattatcagcgtagcagacccgaatgttattatcgcaaaaaaatgcaaggtgttccccatcgagtttgttgttcgtggtttcataaccggtagtaccagtacctcactatggacagtttataataatggtgaccgtgaatattgtgggaatagtctccctgagggtttgaagaaaaatcagaaacttgtcagtaatatgctcaccccaacgactaaagaagaacaccacgacagacctatctcccctgatgaaatcgtaagtgaaaattggatgactcaagaagattgggactattgcagtaaaaaagccctggagctttttgaatttgggcaaaagaaagccaaagaaaatgggatgatactggtggatactaaatatgaaatgggaagagatgaagatggaaatattttattgatagatgaaatacatacccctgacagtagcagatattggattgcagagacctacgaagagagaatgtcaaatggccaagaaccacaaaatatagataaagaatttcttagactgtggtttgttgataattgtgacccttataatgacaaagaattaccaccggctccagatgagctgataattgagctttctagcaggtatatctatctgtatgaaacaattactggcagtgtattcccgtttcctgataagggaaaagctgtccaagaaagaataaacgaaaacctgaaagaatatttataat

SEQ ID NO: 312465 - DNA, 934 bp, Unknown
  Bacterial polypeptide expressing nucleotide sequence isolated from the Sargasso Sea
ctgactaataccattcaggacaccaatattgacgccccaaataaaaaagtcggaaaagtaagggacgcctattttttaaacgagaaggttgttatgatttctaccgacagacaaagcgcttttgatcgtgttttagctgcaattccatacaagggggcagtcttaaactctgttagcgcttggtggttcaaacaaacagaacacctttttccaaaccatctaatatcaacacctgacccaaacgtttcaattgtagaaaagtgtgatgtgtttcctgttgagtttgtggttaggggatatattaccgggacaactgacacctctctttggacagtatataataagggtgatcgcgaatattgcggaaacattcttcctgagggtttaacaaaaaacgataagcttgatgtaccaatgctgaccccaaccaccaaagacaaggtgcatgatcgtccggtgtctagagaagagattatcgagcttggccttatgacggctgaagattatgattttgctgcaaaaatgagcctagacctcttttcttttggtcaaaaaactgcagagaaaaatggattaattcttgtagacactaaatatgaaattggtaaagactcttctggtaaaattaagtttgttgacgaaatacacacccctgactcaagcagattttggattagcggctcttataaggacagaattaagaatggacaagagcctgaaaatattgataaagaattcttaaggctttggttcgcaaaaaactgtgatccttacaatgacgaggttttacctgacgctccggacgagcttgttgctgaactttcagcaagatatattttattatatgagctaattacgggagaaaagtttgtctttcccaacctcgacaacattaataaacgcattactgaaaacataaaggaattattatgaa

SEQ ID NO: 312466 - DNA, 715 bp, Unknown
  Bacterial polypeptide expressing nucleotide sequence isolated from the Sargasso Sea
atgatagaaaaacttaatcttatctctgaaggcaaagctaagtcgctttatgaaacttcagaagcatctgagttattaatggtgtatagagacgatacatcagcttttgatggtaagaaaaaagaagctttaaaaggtaagggagaaataaataataaatttaatgctttcattatggaacatctttctaataatggtgttgaaactcactttcttaaattagtggagaaaaatgaaagtcttgtaaaacgacttgatatgcttccagttgaatgtgtggtaagaaacattgctacaggatcactatgcagaaggttaggagttgaggaaggtattaaattcgaagatcctctttttgaatttttcttaaaagatgatgatcttggagacccacttataaatgataatcatataacagcatttggatggggtactgaagaggaaatagccacaatgaaagaaataacttttagaatcaaccatcttctttgtgaacttttcaaggaagtagggctaattttagttgattataaggttgaatatggaagatctaacggatctcttatattgggtgatgaatttactcctgatgggtgcagaatatgggatgctgaaacaggagaaagtttagataaagatagattcaggaaagatcttggtgatgtagttgaatcttatcaaatagtagcccataaattaggcatttctctttagt

SEQ ID NO: 312467 - DNA, 349 bp, Unknown
  Bacterial polypeptide expressing nucleotide sequence isolated from the Sargasso Sea
atgaataaaggaaaaaaactttacgaaggtaaagctaaaattctctatgaaggcccagaaaaaggtactgctatacaacattttaaagacgcagctacagcatttaataatcaaaaaaaatctgttgttgagggtaaaggagttctaaataacagaatctctgaacatatacttcttaacctaagtcaaattggaattaaaactcatcttataaaaagattaaatatgcgtgaacagttggtgcgacttgttgaaataattccaattaaatttattgttagaaatgttgctactggatctctaacaaaaagattgggtatagctgatggaactgttatgtcaaaacctt

SEQ ID NO: 312468 - DNA, 718 bp, Unknown
  Bacterial polypeptide expressing nucleotide sequence isolated from the Sargasso Sea
aatgaataaaattcaagaaataacaaaaggcaaagctaagtcaatgtttactactgaaaatgatgatcatttaataatgcatttcagtgatgatacctctgcttttgatgggaaaaagaaagaggcacttctcggtaaaggcgctgttaacaatcaatttaatgctttcattatggatcatcttaaagaaaatggtgtagatacacaccttattgagatgatagataatactgattcacttgtatataaattagaaatgttcccaattgaatgtgttataagaaatagagcatctggatcaatttgtaagcgcttaggcacagaggacggcttagtttttgagagtccattatttgagttttttctcaaagatgatgatcttggtgacccgctcattaatgatgaacacatcatttcttttggatgggcaaatttaagtcaaatagaagaaatgaaaaaacaaacatacagggtcaatgaaattttatctaagttatttcttgattcaggattaatcttagttgattttaaagttgaatttggagtgtacaaagataaaattttgttagccgacgaatttacacccgatggttgtaggttgtgggactcaaaaacaatgaaaaagatggacaaagatcgttttaggcaaggccttggcgatgttgttgaatcatatcatcaagtagctgatagattgggcatgaatatagaaacttga

SEQ ID NO: 312469 - DNA, 322 bp, Unknown
  Bacterial polypeptide expressing nucleotide sequence isolated from the Sargasso Sea
atgaaagatttcgttgacgcaacagcttttaatacagagcagggaaaccgcgctagaaagctttttgctgcagtagtattggcggctttggatgatgcgattgcagatgatcggaaatatggtaatgggcctgaacaaatagctagatgggcaaggtcaagagatggtcgagaagttttatcttgtgctggtattgatccaaatgagcgtgtggttgaaggtttgatggagttcgttgaaaaaggcatcagaacatccgtagcgctatcgcgtgaggaaagcgaacgtagaaacgccgctatggaggcagaagctgcttaag

SEQ ID NO: 312470 - DNA, 715 bp, Unknown
  Bacterial polypeptide expressing nucleotide sequence isolated from the Sargasso Sea
atgatagaaaaactcagtctaatttctgaaggaaaggctaaatcattgtatgaaacatctgagacatctgagctgttgatggtttatagagatgacacttcagcatttgatggtaagaaaaaggaagctcttaaaggaaagggagaaataaataataaattcaatgcttttattatgcagtatctagcaaacaatggtgttgaaactcactttattaaactcgtgcaagataatgaaagccttgttaaaagactcgatatgttgccagttgaatgtgttgtaagaaatattgctacaggctcattatgtagaaggttgggagttgaagaaggcattaaatttgaagatccacttttcgaattctttttgaaagatgatgatcttggggatcctttgataaatgataaccatataacggcttttggctggggaactgaacaagaaatatctgaaatgaaggaaataactttcaaaattaaccaacttctatgcgatttatttaaggatgtgggcctaatcttagtcgattataaggttgaatatggtagatctaatgcatcgctaatactaggcgatgaatttactccagatggttgcagaatatgggatgctgaaacaggagagagtctcgataaagatagatttcgaaaagatctaggagatgtagttgagtcttatcaaatagtagctcacaaattaggcatttcactttagt

SEQ ID NO: 312471 - DNA, 934 bp, Unknown
  Bacterial polypeptide expressing nucleotide sequence isolated from the Sargasso Sea
ctgactaatactattcaggacaccaatattagcgcccccaataaaaaagttggcaaagttagggatgcttattttctaaatgacaaagtggtaatgatttctaccgacagacaaagcgcctttgaccgcgttttagctgcaattccatataagggtgctgttttaaattccgttagtgcatggtggtttaaaaaaactgagcatttgttcccaaaccatcttatttctacccctgatccaaatgtatcaattgtagaaaagtgcactgtctttccggttgagttcgttgtgagaggttacattacaggaactactgacacctctttatggacagtttataataatggagatcgagaatattgtggtaactcccttcctgaagggttaaagaaaaatgataagcttgacaaacctatgttgacaccaacaactaaggataaagttcatgacagacctgtttctagggaagaaattattgatcttgggttaatgtctgcggaagattatgacttagctgctaaaatgagtcttgacctttttgcctttgggcaagaaactgcaaagaaaaacggtttaattctagttgatacgaaatacgaaataggtacggattcaaaaggaaagattaaatttgttgacgaaatacatacacctgatagcagtagattttggattagcagctcatacaaggatagaattaattcaggtcaagaaccagaaaatatagataaagagtttttaagattatggtttgcaaaaaactgcgatccctataatgacgaagttttacctgatgccccagacgatcttgttgctgaactttccgctagatacatcttattatacgaattaattactggtgaaaaatttatttttccaaatcttaacgatataaacaaacgcattactgaaaatatagaggaactattatgaa

SEQ ID NO: 312472 - DNA, 985 bp, Unknown
  Bacterial polypeptide expressing nucleotide sequence isolated from the Sargasso Sea
atgaatgctataaaatcaactgaacactacaaagctcgaatcaaagctgaaattgataacacactaactgaaacaaacttacaatctggaactaaaaagacaggaaaagtaagagaccagtatgaccttggtgataaaattgcattgatcacaacagaccgccaaagtgcttttgaccgagtactggcgtctatcccattcaaagggcaggttctgaatcttactagcgcatggtggtttgaacaaaccaaacacattattgataaccaggtcattgatataccggatccaaatgttacactggcaaaaaaatgcaaggtcttccccattgagtttgtggtcagaggctacattactggaagtactagtacctctttatggaccgtgtataataatggcgatcgtgagtattgtggtaacatacttgaagaggggcttgtaaaaaatcagaagctggatgagaatatgcttaccccaacaacaaaagaagaacaccatgatcgaccaatatcaccagaagatatcgttaaagaaggctggatgagtcaggaggattgggactactgtagcaacaaggctcttgagttattttcatttggtcaggaaaaggcagccgatcatggaatgatacttgtagatacaaaatatgaaatgggaaaagatagtgatggcaatatagttttaattgatgagatacatacacctgactctagccgatattggatcgctgatacttacgatgagagaatgaaagatggaaaagaacctcaaaacatagataaggagttccttcgtttgtggtttgtggacaattgcgacccgtataatgatgatgaattacctgatgcgcctgaagatcttgtaacggaactatccagcaggtatatctacttgtacgagaccattacaggtggcctcttccccttccctgattcaggaaaaaccattggcgataggatcgctgaaaacttaaaggatgtataat

SEQ ID NO: 312473 - DNA, 148 bp, Unknown
  Bacterial polypeptide expressing nucleotide sequence isolated from the Sargasso Sea
aatgaaaaaaggaaaaaaattgtatgagggaaaagccaaaattatttttgcttctcctgaaaaaaatttagtaattcaacattttaaagatgaagcaacagcttttaataatcaaaaaaaagcaaacttagatggaaagggaatttga

SEQ ID NO: 312474 - DNA, 694 bp, Unknown
  Bacterial polypeptide expressing nucleotide sequence isolated from the Sargasso Sea
catattattggtaatcatttcttgtatatggctaacgatcccaaaattaatgaagtttttgcatcagaagcactgattcgtgaattacctgcggacattgcaagacaatcaatgatagttagagaagctaagagaatagacgttgaatgtgttgtgaggggatatataactggttctgcatggactgagtataagagagaaggaacggtgtctggtcgaattatgcctaaaggattggttgaagggcaaaagttttctgaaccgctgtttactccaactacaaaggcggaacaaggtcatgatgaaaacatgagcatggatgaggtacggaaattggtaggtaatgaggttgcatttgccttggaaaccaagagtaaagaggtgtacaattttgctcatgattatgctgtacagaaagatataattttggcagacacaaaaatggaatttggtttcatcggagacaacttgattttaatagatgaattattgactccggactctagtagattctgggaggccgataagtatgtcccaggcaattcattgcctaattatgataaacagctagttagaaattggctggagtcttcaggctgggataaagaatctacaccgcctaatttaccttcatatgtgatagaaaacactataaaccgctatacagaagtgtaccaactgctttcgcagtaac

SEQ ID NO: 312475 - DNA, 94 bp, Unknown
  Bacterial polypeptide expressing nucleotide sequence isolated from the Sargasso Sea
tgttcttgctgatgaaataagtcctgacacatgtaggcttgggattcaaaaacagaaaaaaagttggataaggacagatttagaaaagatttag

SEQ ID NO: 312476 - DNA, 988 bp, Unknown
  Bacterial polypeptide expressing nucleotide sequence isolated from the Sargasso Sea
tatgaatgctatagaatcaaataaacattacaaaaagcggattaattccgaattacaaaacacattaacagagaccaatctttctcaaggcaataaaaggacaggaaaagttagggaccaatatgaacttgaagacaaaattgtcttaatcacaacggataggcaaagtgcttttgatagagtattagcatcaattccttttaaagggcaggtcctaaatcttactagtgcctggtggtttgaacaaacaaaagagattattcccaatcaggtaataaatattccagatccaaatgttactcttgctaaaaagtgtaacgttatacctatagaatttgttgtccgaggttttattacaggaagcacaagcacttcactttggactgtatataataatggtgacagagagtattgtggtaatattattccagatggattagtaaaaaatcaaaagctagaagaaaacatgcttacaccaaccacaaaggaagaagaccacgatcgccccattgctccaagtgaaattgtttccgaagggtggatgactcaaaatgattgggattattgcagtgcaaaggcccttgaattattttcttttggacaaaaaaaagcagctgagaatggtatgattcttgttgatacaaaatatgaaatgggacatgatgatgatggaaatattttattaattgatgaaattcatacacccgactcaagtcgctattggatagccgatacatatgaggaaagaatggctaacggatttgagccacaaaatattgataaggaatttttgcggctttggtttgttgataactgtgatccatataatgatgaacaactaccagaagctccaaatgatttggtatctgagctttcaagtcgatatatatatttatatgaaacaattaccggtcaatcattcccctttcctgaagccgatctctcaattcatgaaagaattaatagtaatttaaaggatctaatatga

SEQ ID NO: 312477 - DNA, 248 bp, Unknown
  Bacterial polypeptide expressing nucleotide sequence isolated from the Sargasso Sea
gatgtctaccctttacgaatccacgctccactcgctgccgctgctcggccgcggaaaagtccgcgacaactatgcggtgggcaacgaccagttgctgatcgtcacgaccgaccgtctgtcggcgttcgacgtcatcatgggcgagccgattccgaacaagggccgcgtgctcaacgaaatggcgaacttctggttcgagaagctcaagcacgtggtgccgaatcacctcacgggcgtggcgcccgaat

SEQ ID NO: 312478 - DNA, 718 bp, Unknown
  Bacterial polypeptide expressing nucleotide sequence isolated from the Sargasso Sea
aatgaaaaaaataaacgaaataactaaaggcaaagcaaaatcaatgtttactactgatgtcgaagatcatttaattatgcacttcagtgatgacacgtctgcattcgatggtaaaaagagggaggcattgctaggaaaaggagcagtaaataatcaatttaatgcttttataatggagcatttaaaaaagaatggtatagaaactcatttaatagaagtaattgatagcacggattcattagtttataaactagatatgtttcctattgaatgtgttatcagaaatagagcctcaggatcaatttgtaaaagacttggcaccgaagatggcttaatattggaaaatcctttatttgagttttttttaaaagatgatgatttgggagaccctttgattaatgatgaacatattatttcttttggctgggctaatgccgagcaaattcaagaaatgaaaaaacagacctacaaggtcaatcaggtcctatctaagctttttttagattctggtctaattcttgttgattttaaggttgagtatggtgtttataaagacaaaatacttttagcagacgaattcacacccgatggatgtagattatgggattcaaaaaccttaaagaaaatggacaaggatagatttagacaaggacttggtgatgtcgttgagtcctatcatcaagttgcagatagattaggcatgaatatagaaacttga

SEQ ID NO: 312479 - DNA, 771 bp, Unknown
  Bacterial polypeptide expressing nucleotide sequence isolated from the Sargasso Sea
taaaccttactagtgcctggtggttggaacaaaccaagcatattattgataatcaagttattgacataccagacccaaatgttactttggcaaaaaaatgcaaagttttccctattgagtttgtagtaagaggctacattaccggaagtacgagtacttctctttggaccgtctataataatgggagccgtgattactgtggcaatgcgcttgaagaggggttggtaaaaaatcaaaaactagatgcaaacatgttgacccccacaacaaaagaagtagaccatgatcgtcctatctctccagaagatatcgttaaagaaggctggatgaatcaagaagattgggactactgtagcagcaaagctcttgaactattttcttttggtcaagaaaaggcagctgctaacgggatgatccttgttgatacaaagtatgaaatgggtagggatagtgatggcaatatcgttcttatcgatgagatacacactccagattcgagtaggtattggatcgctgagacttacgatgagagaatgaatgcaggagaagaacctcaaaatattgacaaagaatttctgcgtttatggtttatggataactgtgacccttataatgatgaggtgttgcctgaagcaccaaatgaacttgtaacagaattatccagcaggtatatatacctatacgagacaatcacaggcggtcttttcccgtttcccgactcaggtaaaactattggagatagaatcgctgaaaacttaaaggacaaataat

SEQ ID NO: 312480 - DNA, 184 bp, Unknown
  Bacterial polypeptide expressing nucleotide sequence isolated from the Sargasso Sea
ttgtcgtttatgggactctaaaacagaaaaaaaattagacaaagatagatttagaaaagatttaggtaatatcattcaaggttaccaagaagttgcgagaagacttggaatcatgcctgaagaaacaaatataagtgaagtcaacttcggtaaaacaattccaattaaatttaaaaaaaaataa

SEQ ID NO: 312481 - DNA, 376 bp, Unknown
  Bacterial polypeptide expressing nucleotide sequence isolated from the Sargasso Sea
ttaacatttaattggcttaatgtaatgcagcttgatttgatagatgaaaatctatctagattaaatgattttctactaggaatgtttagaggtgtcggaataaaattaatagattttaaagttgaatttggcttcactcatgaaagtgaaaaaactcagattatattagctgatgaaataagccctgatacatgtagattatgggatactttaacagataaaaaacttgataaagatagatttagaaaagatttaggagatattattcccgcgtatacagaagttgcaaaaagacttggcatacttcatgagcaatcaaatgtttccgctgttaatgttacccaactttcatcagtaaaaagaaagaaaaaatgaa

SEQ ID NO: 312482 - DNA, 337 bp, Unknown
  Bacterial polypeptide expressing nucleotide sequence isolated from the Sargasso Sea
aatgaaaaaaggaaaaaaattatacgaaggcaaagctaaaattatttatgcaacaaatgataaaaacttagttatccaatattttaaagatgacgcaacagcattcaataatcaaaaaaaaactaccattgaaggtaaaggcgttttaaataatagaatatctgagcatatactttcaaatttgtcagaggttggaattaaaaatcatttagtaaaaagaattaatatgagagaacagctagttaagcttgttgatataataccaatagaatttatagtaagaaatattgcaactggatcattaaccaaaagattgggtattgaggaaggaaccgta

SEQ ID NO: 312483 - DNA, 245 bp, Unknown
  Bacterial polypeptide expressing nucleotide sequence isolated from the Sargasso Sea
cggaaaaactaagtcaaacgatacaataatgctggctgatgaaattagtcctgacacatgtagattatgggatcaaaaaactgataaaaagttagataaagacagatttagaaaagatttaggtaatgtagttgaagcctaccaagaagtagctagaagacttggaattcttcatgagcaacctaatataagaccaataaaattctccaaaccaactgcagtaaaaataaaaaaaagtaaatgaa

SEQ ID NO: 312484 - DNA, 490 bp, Unknown
  Bacterial polypeptide expressing nucleotide sequence isolated from the Sargasso Sea
atgaaaaaagggaaaaaattatacgaaggaaaagccaaaattgtttatgctacaaatgataaaagtttaggtatccagcactttaaagatagtgcaactgcatttaataataaaaaaagagcaactattgatggtaagggtattttaaataacagaatttcagagcatatattgagtaatttgagtcagattggaattaaaaatcatctagtaaaaagattaaatatgcgagaacaattaattaagcttgtggaaattattcctattgaatttattgttaggaatgttgcaaccggatctcttacaaaaagattaggtattgaagatggcacagaactaagaaagcccttaattgaattttgtttaaagaatgatgaattgggagatcccttaatttcaaaagaacatatatttgcttttgaatgggctagtaaaaaggaaattgataaaattgagggaaatttacatagaatgaatgattttatgattg

SEQ ID NO: 312485 - DNA, 306 bp, Unknown
  Bacterial polypeptide expressing nucleotide sequence isolated from the Sargasso Sea
ttggagtgaatcacgctaaagaaaaggggattatcattgcagataccaagtttgaatttggattagacggtgatggtgagctttatctcattgatgaggttctcactccagactcctcaaggttttgggccattgagaattatgagctgggatcaagtccgccaagctttgacaaacaatatcttagagattatctagagacactggattgggataaaacggcaccagggcccgaattgcctcaagaagtgattgataatacagcgtcaaaatataaaaatgcgttcaaacaaatcgctaagtaaa

SEQ ID NO: 312486 - DNA, 841 bp, Unknown
  Bacterial polypeptide expressing nucleotide sequence isolated from the Sargasso Sea
atgagccaaaaaagcatatataattcaaatttacctaatataactcatgcgggtaaggtaagagatacctacgagctaaacgatgaactccttttaatggttgttacggatagaatttctgcatttgatgttgttatggatacagctattcctagaaaaggagaggttttggcaaagatgtcagagttttggtttaaaaaaacaaatcatattataccaaatcatttcattggcctggcatctgatagtaaaacttttgaactgatatctgactttccaatcgctaagcatttggatgaggggttgagaaaaagatctatggttgtaaaaaaagctaaaagaatagatatagaatgtatagtaaggggatatataactggctcagcatggtcggaatataaaaaaacaaaaacagttaacaagatgcctattcctcaggatttagttgaagcggcagaatttcctgaatttatttttactccaagcacgaaagctgaggtggggcatgatgaacctctatcgccaaatgaaactaaagaattgataggcgaggacttatatgatcaagttaaatctaaaagcattgagatttatacctacgctaatgaatactctaggtctaaaggaatgattcttgccgacactaaatttgaatttggatttattgataataaattatcccttattgacgaagctcttacgcctgattcaagtagattttggagcataaatgactacaagcctggaaaatcccctctcccctacgataaacaatatttaaggaattggcttttaactcagaattggaataaaaagccgcctccccctcaaatgccaaaag

SEQ ID NO: 312487 - DNA, 454 bp, Unknown
  Bacterial polypeptide expressing nucleotide sequence isolated from the Sargasso Sea
aatgaaaaaaggaaaaaaactttacgaaggtaaagcaaaaataatttacgcaacatcagataaaaatttagttattcaatattttaaggatgatgcaacagcatttaataatcaaaaaaagagcaatatagaaggtaaaggtgttttaaataatagaatttccgaacatattctttctaatttatctcaagtaggaattaaaaatcatttagttaaaagactaaatatgagagaacaactagtgaaacttgtagatattatcccaatagaatttattgtaagaaacattgcaacaggctcattgacaaaaagattgggtatcgaagatggaactatactagaacgtccactgatcgagtactgccttaaagatgataaacttggtgatccactaataagtaaagaacatatactaacttttaattggttgagtaaaacccagttagattttgtt

SEQ ID NO: 312488 - DNA, 136 bp, Unknown
  Bacterial polypeptide expressing nucleotide sequence isolated from the Sargasso Sea
aatgaataaaggtaaaaaactatacgaaggtaaagccaaaattctttatgaaactaaagataaagaactaattattcaacattttaaagatgatgccactgcattcaataatcttaaaaaagcgagtgttgagggt

SEQ ID NO: 312489 - DNA, 325 bp, Unknown
  Bacterial polypeptide expressing nucleotide sequence isolated from the Sargasso Sea
atgaatagtaaatttggattaatttatgaagggaaagcaaaaaaaatattttcccatcaagattctgagaaagtaattattgaatttaaggatgatgcgacagcttttaatgcattaaagaaagctaagtttgaaggcaaaggcgaattaaattgtcttataagttcaaaaatatttgaatttcttatcaaaaataatataccaacgcattatcttgaggtcatcaataaaaattcaatgattgcccaaaaaataaaaattattccgcttgaaatcgttctaagaaatattgcatatggttcgcttgtaaacagactacaataaa

SEQ ID NO: 312490 - DNA, 793 bp, Unknown
  Bacterial polypeptide expressing nucleotide sequence isolated from the Sargasso Sea
tatgaacacgccactcagatcaatttaccaggaaatcaaatcaagctcatctaagagcgttttagacgaacactgttttaacggaatcactgaaaaccaaattgaacaactaaatggtgatggctatggttactacgagggtaaagtaagacaatgcttttcaaaagaagacaagctttttgtcgtacacacagatagattatctgcctttgatagacttattggcctcgtaccatataaaggtgctgttctaaatgctattagtgacttttggctagacaaagccaaagaagtactcccaacacacttaatatctaaaagcgatgataggaccttagaaactcttaaagctgaacctgtaaaagcagaggttattgtaagaagctatttagctggcagcatgatgcgcgcctataatgatggtgaacgtgagttttgcggcaacagcctaccagatggtcttgaagactatggcgtattgccaaaaagaattataactcctactacaaaagcagctgcttttgaacatgatgaaaatacgactgcttctgagctaatagaacgcaatatcgtaacagaggacgagtggaaacaaatagaaaagatgtcactggatctatttgaactcggaagcaaaatctacgcagaaaaaggctggattcttgttgatacaaaatacgagtttggaagacttccaaacggagagatcatcgtcatagatgagatccacacacctgattcttctcgtttctgggtaaaagaaagctatgaaaaaaatgtaaaagagggctta

SEQ ID NO: 312491 - DNA, 559 bp, Unknown
  Bacterial polypeptide expressing nucleotide sequence isolated from the Sargasso Sea
tatgagagaacagcttgttgaattggtaaatattataccaattgaatttgtaataagaaacatcgcaactggttctctaacaaaaagattgggaattgaagaaggtacaatccttgattatcctttaatagagtactgtttaaaaaatgataaacttggcgatccaataatttcacgtgaacatattctaaattttaaatggctagatacaatagaattagatttaattaatgaacaatgtttaagaattaacgatttccttcaagggatttttagaggtgtaggaattaaattagttgattttaaagtagaatttggaaaaactaaatcaaatgacaaaataattttagcggatgaaataagtcctgatacatgtagattatgggatcatcaaacagataaaaaattagataaagatagatttagaaaaaatttaggaaatgtggttgagtcttaccaagaaatagctagaagacttggaattcttcatgaacaatcaaatataagaccaataaaattccctaaaccaatagctgttaaaataaaaaaaaataaatga

SEQ ID NO: 312492 - DNA, 467 bp, Unknown
  Bacterial polypeptide expressing nucleotide sequence isolated from the Sargasso Sea
aatgaataagggaaaaaaactttacgaaggaaaagccaaaatcttatacgaaacaaaggaaaaaggtttggctatccaacattttaaagacgacgcaaccgcctttaataatcagaaaaaagctaatgttgaaggaaagggtgtgctaaataatcgtatttcggaacatattttacaaaatttaaatcaagcaggtattaaaactcatttggtaaaaagattaaatatgcgcgaacaactagtaaggctagtggaaattattccaatcgaagttataataagaaatattgcaactggttctttaacaaaaagattgggaatacctgatgggactgttttagaaaaaccattgatagaattttcttataaaaatgatgaactaggagatcctcttgttgcaaaagaacatattctcgcattcaattgggcaacagaagatgagcttaaaataattgaagaacaaactt

SEQ ID NO: 312493 - DNA, 474 bp, Unknown
  Bacterial polypeptide expressing nucleotide sequence isolated from the Sargasso Sea
aattagaagaaggtcttactaatagttccaaacttaccgaaccaatattcacaccgtctacaaaagaagacgaaggtcacgatgaaaatatatcttttgaagttatgagtgatatgattggaaaagatttatcagaacaattaaaagatatatcacttaatttatataaaacagcatcagaatacgctcttacaaaaaatataattattgcagacacaaaatttgagtttggaataattaatgaaaaaatcacattgattgatgaagtgcttacacctgattcaagtagattttgggatatagatgattatcaacctggaaaatctcaagatagttatgataaacaaatagtaagagattggctagaaacaactgattgggacaaagaacctccctcaccagatctacctgaagaaataatgaacaaaacatacgaaagatacaaatctgctctggaaaaattaacaagttaat

SEQ ID NO: 312494 - DNA, 586 bp, Unknown
  Bacterial polypeptide expressing nucleotide sequence isolated from the Sargasso Sea
aatgaaaaaaggtaaaaaattatacgagggtaaagctaaaatcatttatgccacaaatgataagaatttagtcattcagcattttaaagatgatgcaactgcttttaacaatcaaaaaaaagatgtaattgaaggaaaaggaattttaaataatagaatttcagaacatatccttacacaattaagtaatgttggaataaaaaatcatttagtgaaaagacttaatatgagagagcaacttgttaagcttgtagaaataatcccaatagaatttatcgtgagaaatatagcaacaggatccttaacaaaaagacttggtatagaagacggtacagttttagattatccattagttgaatattgtttgaagaaagatgaattaggcgatcctttagttagcagagaacatattttagcttttaagtggatggatgtatttgaattagactttatttatgaagaagtaagaagaataaatgacttcttgcaaggcatgtttagaggtgtaggcattaaattagttgactttaaagttgaatttggaagatctgaaattgatggcaaaagagaaagtatgttagctgat

SEQ ID NO: 312495 - DNA, 618 bp, Unknown
  Bacterial polypeptide expressing nucleotide sequence isolated from the Sargasso Sea
tctgctaaactctgcgcgccttttaccagcctcagaagaagtgaagatgactcttgcaactcaggttctggcggtcaatgacgatctgccaattcgtacagatttaccggtgcactccggcaaagtgcgcagtgtttactggctgacagccgaagacagtgctcggcttatccgtgagaaaaattatcctgtagcgttagatacgccgcttgcaattatggtaatcagcgaccgtatatcggcttttgactgcatatggcatggtgaaaatggcctgaacggggtgccgggtaaaggcgcggcattaaatgcgatatccaatcactggttttcgctgtttaaacagcatggcctggccgacagccatattctggatattccgcacccgctggtgtggatagtacaaaaagcccgcccggttaaaatcgaggccatagcccgccagtacatcaccggctctatgtggcgcgcttacagtaaaggtgaacgcgaattctgcggcataacgctgccggaagggctgcaaaaggatcagaaattgcctgacattctgatcacgccttctaccaaagggatattgaccggactggacggtgtgccagaggcagatgacgtcaa

SEQ ID NO: 312496 - DNA, 328 bp, Unknown
  Bacterial polypeptide expressing nucleotide sequence isolated from the Sargasso Sea
atgaaaaaagggaaaaaactatacgagggaaaagctaaaattatttatgcgacttctgacaaaaatcttgttattcaatattttaaagatgatgcaacggcattcaataatcaaaaaaaaagtactattgagggcaaaggtgttcttaataatagaatttcagaacatatactctcaaaccttaatcaaattgggattaaaaatcatttagtaaaaagactaaatatgagagaacaacttgtgaaacttgtggatattattcctattgagttcattgtaagaaatattgcaactggatctttaacaaaaagattaggtatcgaggagg

SEQ ID NO: 312497 - DNA, 153 bp, Unknown
  Bacterial polypeptide expressing nucleotide sequence isolated from the Sargasso Sea
aatgaaaaaaggtaagaaactttacgaaggtaaagcaaaaatagttttcgctacaagtgataaaaatgttgtcattcaacattttaaagatgatgcgactgcatttaataaccagaaaaaatcaattatagaaggaaaaggaattttaaataa

SEQ ID NO: 312498 - DNA, 542 bp, Unknown
  Bacterial polypeptide expressing nucleotide sequence isolated from the Sargasso Sea
taagaagaatattccaacacattttattgaactcgaaaatgaaaatacaatgattgcaaaaaaaataaaagtaattccattagaaattgttctaagaaatattgcttatggttctttatgtaaacaaacgactataaaacctggaactttcctatcaaaaccattaattgatatctacctgaaaaatgatgaacttaatgatcctcttattacaaaagatagaattgaattaataaacatattaagctctgatgatttacagttaataatcaatttaacgttaaaagttaatgaaattctgaaaagtttctttaaaaatattcaacttcagcttgtggatttcaagttggaatatggttacgatcttaaaaataacattcttctcggagatgaaataagtcctgataattgtagattgtgggatctaaaccaaaaaaatgatacaattgtaagtctagataaagatagatttaggaatgatttaggtggtttaattgaagcttatagtgaaattcaccgaagaattaacaattttctttagc

SEQ ID NO: 312499 - DNA, 577 bp, Unknown
  Bacterial polypeptide expressing nucleotide sequence isolated from the Sargasso Sea
gtaaaaagaattaatatgagagaacaattagttaagctagttgatataataccaatagaatttatagtaagaaatattgcaactggatcattaactaaaagattgggtatcgaggagggaactgtccttgaacgaccattaatagaatactgtctaaaagatgataagcttggagatccaataattagtcgtgagcatattttaacttttaattggcttaatttagcgcagcttgattggatagatgaaaatctatctagattaaatgattttttactaggaatgtttagaggtgtaggaataaaattagtagattttaaagttgaatttggcttcactcatgaaagtgaaaaaaataagataatattagctgatgagataagccctgacacatgcagattatgggatactttaacagataaaaaacttgataaagacagatttagaaaagatttaggagatcttattcctgcgtatactgaagttgcaaaaagacttggaatacttcatgaacaatcaaatgtttctgctgttaatgtaacccaactgtcatcggtaaaaagaaagaaaaaatgaa

SEQ ID NO: 312500 - DNA, 491 bp, Unknown
  Bacterial polypeptide expressing nucleotide sequence isolated from the Sargasso Sea
aatgaataaaggtaataaactatacgaaggtaaagccaaaattatctacgaaactacaaataaaaatttggtaattcaacattttaaagacgacgcaacagcctttaataatttaaaaaaatcaaaagttgaaggtaaaggcgtgttaaacaatcgaatttcagaatacattttaacaaatttatcacagtgtggaattaaaactcatctggttaaacgactaaatatgagagaacaattagtaagaaaagctgaaatttttcctattgaatttattgttagaaatattgcaacaggatcacttacaaaaagactagatatttctgagggaacagttttagaaaaaccattattagaatattgttataaaaaagatgaactgcaagatcctcttgtatcaagagaccacatatactcatttggttgggcaagtgaaaaagaattaaaagaaattgataaaacttcattaagaataaacgatctattgcttg

SEQ ID NO: 312501 - DNA, 307 bp, Unknown
  Bacterial polypeptide expressing nucleotide sequence isolated from the Sargasso Sea
tttctggtaggaatgtttagaggaataggaataaaactagttgattttaaagttgaatttggaagattaaaaaatagcaacaaaaatgaaattatcttagcagatgaaattagtccagatacttgtcgcctttgggatactaatacagaaaagaaacttgacaaagatcgctttagaaaaaatcttggaaatctaattgaagcttatcaagatgtggcaagaaggctcggtattcttcatgagcattcaaatataaggccattgaagttcccaaaaccaaaagaagtaaaaataaaaaaaaagtaaa

SEQ ID NO: 312502 - DNA, 604 bp, Unknown
  Bacterial polypeptide expressing nucleotide sequence isolated from the Sargasso Sea
atgaaaaaaggtaaaaaactttacgaaggtaaagcaaagattatttttgctacgagtgataaaaatactgttattcagcactttaaggatgatgcaaccgcatttaataatcaaaaaaaagcaaatatagatggaaaaggaattctaaataatagaatttcagaacacttgttaaaatctctttcagacattggaattaaaaatcatcttattaaaagattaaatatgagagaacaacttgttgaattggtaaatataattccaattgaatttgtaattagaaatattgcaaccggatctttgacaaaaagactgggaattgaagaaggaacagttttagattatccgttaatcgaatactgtttaaaggatgataaacttggggatccaataatttctcgtgaacatattttaaattttaaatggcttaatttaattgagttagacttaattaatgaacagtgtttaagaataaatgattatctccaaggtttatttagaggtattggaattaaattagttgattttaaagtagagttcggaaaaacaaaatcagatgaaacaataatattagctgatgaaataagccacagatacatgtaga

SEQ ID NO: 312503 - DNA, 589 bp, Unknown
  Bacterial polypeptide expressing nucleotide sequence isolated from the Sargasso Sea
gaaagatcattcaaaaggtaagggtgaaatcaatgcaaagatatcatcacttatctttcaacaattagaacgtgccacaattaaaactcatttcatacagtctgccggtcctggtattatgagatgtaagaaggtggatattattccgattgaagttgttgttcgtaatgtagctgatggttcgattgtaagagagacgactattcctaaggataccgtattcaatccaccactggttgagttctatcttaaggatgatgataagaatgatcctttacttacggaggatagattaacactcatggggtatactaatctaagaagaatcaaacagtatgcaaaggaaactaatgctgtggtatctgatttgtttaaaagaattggtattgtactgattgattttaaacttgagtttggtactactgtcaatggagacattgttgttgctgatgagattagtcctgatggatgtaggttgagaaataaggagacaaatcagagtatggacaaagatttattccgtaagggtacaggtgatattattggtgcctacactgaaattatggacaaattgattgaaatatgctaa

SEQ ID NO: 312504 - DNA, 562 bp, Unknown
  Bacterial polypeptide expressing nucleotide sequence isolated from the Sargasso Sea
attgagagagcaactagttcagcatattgaaattatacctattgaatttattgtaagaaacatagcaactggatcattaaccaaaagattgggtattgaagatgggacagtcttagataatccattaatagaatattgcttaaaagatgatgaattaggtgatcctttagtaagtactgaacacatcttagcttttaaatggatggagaaggatgaactaaaattaattaataaagaattaaatagaattaacgattttcttcaaggtatgtttaggggtgttggaattaaacttgtagattttaaggtagaatttggaagatatgaaaaaaatggaaaaaaagagatcatgcttgcagatgaaataagtccagacacatgcagactatgggacgtaaatagtgataaaaaattagataaagataggtttagaaaaggtcttggtaatctaattgaggcttatcaagaagttgctagaagattagatatacttcatgaacaatcaaatataagaccattaaaatacaccaagccacaagcagtaaagattaaaaagaagtaa

SEQ ID NO: 312505 - DNA, 235 bp, Unknown
  Bacterial polypeptide expressing nucleotide sequence isolated from the Sargasso Sea
atgaatgataaatatgaattgctttatgaaggcaaagctaaaaaagtattttctcatgatgataaagataaagttatcattgaatttaaagatgatgctactgcttttaatgctttgaaaaaagctaaattcgaaggaaagggcaaacttaattgcctaataagtgcaagaatttttgaacttcttataaagaataatattccaactcattttcttgaacttaaaaatgaaaata

SEQ ID NO: 312506 - DNA, 234 bp, Unknown
  Bacterial polypeptide expressing nucleotide sequence isolated from the Sargasso Sea
catgcctgaggaactactatacgagggaaaagccaaaaagcttttcatcacagaggatccgcaaattttgcgggtagagtacaaagacgatgcgacggccttcaacgggaaaaaatttgaccgtttgagagataaaggacgtctaaataatgcgatcacggtttttttcttcgaacacctcgatacaaaagacattccgagtcattttgttcgcaagatttccgaaaccgagca

SEQ ID NO: 312507 - DNA, 468 bp, Unknown
  Bacterial polypeptide expressing nucleotide sequence isolated from the Sargasso Sea
aatgaaaaaagggaaaaaattatatgagggaaaagctaaaattatttatgctactacaactaaagatttagtaattcaatattttaaagatgatgctacagcttttaataatcaaaaaaaatctaccattgaaggaaaaggggttttaaataacagaatttctgaacatatactttcaagcctttcacaaataggtattaaaaatcatttagttaaaagattaaatatgcgcgagcaagttgttaaacttgttgagataattcctattgaatttattgttagaaatattgcaacaggctccttaacaaaacgtctaggaattgaagatggaactgttttgaaggagccattaattgaatattgcttaaaagatgacaaacttggtgatccattaattgctgaggaacatatactagcttttgattgggcatctaaaaaagaaatagaaaaggtaaaaaaaatgatttt

SEQ ID NO: 312508 - DNA, 137 bp, Unknown
  Bacterial polypeptide expressing nucleotide sequence isolated from the Sargasso Sea
aatgaaaaaaggtaagaagttatatgagggtaaagctaaaattatttatgcatgtgctgaaaaaaatttagtgatacaacattttaaagatgacgctactgcttttaataatcaaaagaaatctgttattgaaggca

SEQ ID NO: 312509 - DNA, 285 bp, Unknown
  Bacterial polypeptide expressing nucleotide sequence isolated from the Sargasso Sea
ttcttgctgatacaaaatttgagtgggggcatgatactgaagggcaattgatgttagtcgacgaagtgctcacgccagacagttctaggttttggccagctgagctcgcgtgtaaaggcgaagttcctgaatctttcgataagcaattcgtgcgcgattggctggcttcctccggctgggaccgaatgagtaccccccctcctctgccgccggaaatagttgatggtacgaggcaaaaatatctcgatgtatgccaaagactaacaggaagcctgccttgttaga

SEQ ID NO: 312510 - DNA, 405 bp, Unknown
  Bacterial polypeptide expressing nucleotide sequence isolated from the Sargasso Sea
aatgaaaaaaggaaaaaaactatatgaaggaaaagctaaaataatttattcaacctcggataaagatttagctattcaatactttaaagatgatgcaacagcctttaataatgtaaaaaggactactattgagggaaaaggtgttttaaataaccgaatttcagaacatatactttcaaatttatctcagataggtattaaaaatcatttagttaaacgtcttaatatgagagaacaaataattaaatttgtagagataataccgatagaatttattattcgtaatgtagcaactggttccctgacaaagagacttgggatagaagatggaactgttcttaaagaacctttaatagaatattgtttgaaagatgacaaactaggtgaccctttaatatctgaaga

SEQ ID NO: 312511 - DNA, 280 bp, Unknown
  Bacterial polypeptide expressing nucleotide sequence isolated from the Sargasso Sea
atgaaaaaaaataaaatttatgaaggaaaggctaagataatgtacaaaggtcccgagcccggtactttgattcagcattttaaagatgacgccacagcaaataacaacgaaaagatggaaatcttcgaaggaaaaggggttataaacaatcgtatatctgaacatttattcaaattgttatcttctctagatattccaaatcattttattcgtaggcttaatatgagagaacagctcattcatgaggtggaaatatttccattagaagtagttgtaagaa

SEQ ID NO: 312512 - DNA, 193 bp, Unknown
  Bacterial polypeptide expressing nucleotide sequence isolated from the Sargasso Sea
cgagttcggccgtctccccgacggcacggtgattctcgccgacgagatcagccccgacaattgccgtctctggcaggtcggcactgacgagaggatggacaaggacaggtttcgccgtgatctaggcggcctgattgaagcctatcaggaaattgcccaccggctcggtctcaacgtgccgcagcagggctag

SEQ ID NO: 312513 - DNA, 157 bp, Unknown
  Bacterial polypeptide expressing nucleotide sequence isolated from the Sargasso Sea
aatgaaaaaaggtaaaaaattatacgaaggcaaagctaaaatcatttatgcaacaaatgataaaaacttagttattcaatattttaaagatgatgctactgcattcaataatcaaaaaaaaactactattgaaggtaaaggagttctaaacaataga

SEQ ID NO: 312514 - DNA, 683 bp, Unknown
  Bacterial polypeptide expressing nucleotide sequence isolated from the Sargasso Sea
tgcttttaataatcaaaaaaaagctactatcgatggtaagggaatcttaaataatagaatttctgaatacattctttctaatttaagtcaaataggaataaaaaatcacctagttaaaagaattaatatgagggagcaacttgtgaaatttgtagaaataataccaatagaatttattgtaagaaacattgccacaggttcattaactaaaagacttggtatagaagatggtacaatgttgaatcgaccattaattgaatattgtcttaaaaaagatgaactaggagatccattaataagtagagaacatattttaacctttgattggctaaatataattgatttagattggataaccgaagaatgcaaaagaataaatgattttctacaaggaatgtttagaggagttaatattaagttagttgattttaaagttgaatttggaagatcatcaatagacaataatataattctagctgatgaaataagtcctgacacatgtaggttgtgggacacaaagacagaaagaaaactagataaagacatttttagaaaaaacttaggaaatctaattgatggatatcaagaggtagcaagaagattggacatcctgcatgagcaaacaaatattagaccactaaaatttaccaaaccaaaagcagttaaaattaaaaaaaaataat

SEQ ID NO: 312515 - DNA, 480 bp, Unknown
  Bacterial polypeptide expressing nucleotide sequence isolated from the Sargasso Sea
aaagattgggtatcgaggaaggaactgtccttgaacgaccattaatagaatactgtctaaaagatgataagcttggagatccaataattagtcgtgagcatattttaacttttaattggcttaatgtaatgcagcttgattggatagatgaaaatctatcaagattaaatgactttttactaggaatgtttagaggtgttggaataaaattagtagattttaaagttgaatttggcttcactcatgaaagtgaaaaaactaagataatattagctgatgagataagccctgacacatgcagattgtgggatactttaacagataaaaaacttgataaagatagatttagaaaagatttaggagatcttattcctgcgtatactgaagttgcaaaaagacttgggatacttcatgaacaatcaaatgtttctgctgttaatgtcacccaactttcatcagtaaaaagaaagaaaaaatgaa

SEQ ID NO: 312516 - DNA, 406 bp, Unknown
  Bacterial polypeptide expressing nucleotide sequence isolated from the Sargasso Sea
acttggcgatccaataatttctcgtgaacatattttaaattttaaatggcttaaattaattgagctagacctaattaatgaacagtgtttaagaataaatgattatctccaaggtttgtttagaggtgttggaattaaattagttgattttaaagtagaatttggaaaagcaaaatcagatgaagcaataatattagctgatgaaataagtcctgacacttgcagactatgggatcaagaaactgataaaaaattagacaaagatagatttaggaaagatttaggtaacattgtagaagcctatcaagaggtagctagaagacttggaattcttcatgaacaatcaaatataagaccaataaaattctctaaaccaaccgcagtaaaaattaaaaaaaataaatga

SEQ ID NO: 312517 - DNA, 214 bp, Unknown
  Bacterial polypeptide expressing nucleotide sequence isolated from the Sargasso Sea
atgaaaaaagggaaaaaattatacgagggtaaagcaaaaataatttatgcctgtgctgaaaaaaatttagtaattcaacatttcaaagatgatgcaacagcttttaataatcaaaaaaaatctgtaattgagggtaagggaattttgaataatagaatttcggaacatatacttacttgcctaagtcaagcaggtattaaaaatcatttagtta

SEQ ID NO: 312518 - DNA, 370 bp, Unknown
  Bacterial polypeptide expressing nucleotide sequence isolated from the Sargasso Sea
atgaaaaaaggtaaaaaattatacgaaggtaaggcaaaaataatttatgcaactagtgataaaaatttagttatccaacactttaaagacgatgccacagcttttaataatcaaaaaaaagatgttattgaaggaaaaggaattttaaataatagaatttcagaacatattcttactcagttaagcaatgttggtattaaaaatcatttagtaaaaagacttaacatgagagaacaacttgtgaagttagttgaaattattccaattgaatttattgtcagaaatattgctacaggatctttaacaaaaagattaggaatagaagatggaactatattggattatccattagttgagtattgcttaaaaa

SEQ ID NO: 312519 - DNA, 502 bp, Unknown
  Bacterial polypeptide expressing nucleotide sequence isolated from the Sargasso Sea
aatgaaaaaaggaaaaaaattatacgaaggtaaagcaaaaataatttttgcaagtaatgataaaaaatatgttatccaacattttaaggatgatgcaaccgcatttaataatcaaaaaaaagcagtgatggatggtaaaggaattttaaataataggatttctgaacatatattaactcagttgaataatgttggtatcaaaaatcatttagtaaaacgtttaaatatgagagaacaactcgttcagcatgttgaaattatacctattgaatttattgtaagaaatattgcaactggatcattaactaaaagattaggcattgaagatgggacagtcttagataatccattaatagagtattgcttaaaagatgatgatttaggagatcccttagtaagcactgaacacatcttagcttttaaatggatggaaaaagatgaattaaacttaattaataaagaattaaatagaattaatgactttctacaaggcatggtttag

SEQ ID NO: 312520 - DNA, 204 bp, Unknown
  Bacterial polypeptide expressing nucleotide sequence isolated from the Sargasso Sea
attttaaattagaatttggctacaattctaacgggcagattgttttaggtgatgagatcagtcctgataattgcagattatgggaccttaatcaaaaaaatggtaaaatagttagccttgataaagatagatttagaaatgatttaggtggctttattgaagcctatagtgaaattaataaaagaataaacaactttatttaat

SEQ ID NO: 312521 - DNA, 225 bp, Unknown
  Bacterial polypeptide expressing nucleotide sequence isolated from the Sargasso Sea
aaaaagagatcatgctcgcagatgaaataagtccggatacttgcagactatgggatgtaaatagtgataaaaaattagataaagatagattagaaaaaggtcttggtaatctaatggaggcttatcaagaagttgcaagaagattagatatacttcatgaacaatcaaatattagaccattaaaatacaccaaaccacaagcagtaaagattaaaaagaagtaat

SEQ ID NO: 312522 - DNA, 292 bp, Unknown
  Bacterial polypeptide expressing nucleotide sequence isolated from the Sargasso Sea
catgaaaaataatcctaaaataatttatcactctaatataaaaagtctcaaacttataaatagtggtaaagttagagatatctatgaagtagatgatgagcatttattaattgttactagtgatagactctcagcatttgatgttattttaccagatccaattcctggtaagggttacgtgttaacggaggtctcaaacttttggtttgaacgttttaaaaatattattccaaaccatattacagaaactaaaataagtgatgtaattaatagcgaagaggagcttaaaatt

SEQ ID NO: 312523 - DNA, 331 bp, Unknown
  Bacterial polypeptide expressing nucleotide sequence isolated from the Sargasso Sea
cgaagaagtaagaagaataaatgattttcttcaaggcatgtttagaggtgtcggtattaaattagttgactttaaagttgagtttggaagatctgaagttgatggaaaaagagaagtaatgttggctgatgaaattagtcctgacacatgcagactttgggatatgagaactgataaaaaactagacaaagatagatttagaaatgatttaggcaacttagttgaagcatatcaggaggttgcaataagattaaatttgttacacgaacaatcaaatattagacctttaaattaccctaaaccaaaagctgtaaaaattaagaaaaaatga

SEQ ID NO: 312524 - DNA, 400 bp, Unknown
  Bacterial polypeptide expressing nucleotide sequence isolated from the Sargasso Sea
ataatttcaaaagaacatattataacatttagttgggcaacaaaaaaagaattagaaaaaattgataatatgcttttaaggattaatgattttatggttggtatgtttagagggataggtattaaattggttgattttaaagttgaatttggaagattaaagacaggtcaaaaaactgaaattattttagcagatgagattagccctgatacatgtagattgtgggacagcaatactgataaaaagttagataaagatagatttagaaaaaacttaggaaacttaatacctgcttatcaagaagtagctaaaagactaggtatacttcacgaagaagcaaatgtgcgccatgtaaatttttcaaaaccaaaatccgttaagttgaaaaaaaataaatgaa

SEQ ID NO: 312525 - DNA, 241 bp, Unknown
  Bacterial polypeptide expressing nucleotide sequence isolated from the Sargasso Sea
atgaaaaaaggtaaaaaattatacgaaggtaaagctaaaattatttatgctactcaagataaaggtttagttattcaatattttaaagatgatgcaacagcatttaataatcaaaagaaaagcactattgaaggaaaaggtgttttaaataatagaatttcagagcatatactttcaaatttgtcacaaataggaattaaaaatcatttagttaaaagacttaatatgagggaacaagtaa

SEQ ID NO: 312526 - DNA, 265 bp, Unknown
  Bacterial polypeptide expressing nucleotide sequence isolated from the Sargasso Sea
aatgaaaaaagggaaaaaattatacgaaggaaaagctaaaattatttatgcaacttctgacaaaaatcttgttattcaatattttaaagatgatgcaacagcatttaataatcaaaaaaaaagtactattgagggcaaaggtgttcttaataatagaatttcagaacatatactctcaaacctaaatcaaattggaattaaaaatcatttagtaaaaagactaaatatgagagaacaacttgtgaaacttgtggatattattcct

SEQ ID NO: 312527 - DNA, 543 bp, Unknown
  Bacterial polypeptide expressing nucleotide sequence isolated from the Sargasso Sea
aacttgtagatataattcctattgagtttattgtaagaaacattgcaactggatctttaacaaaaagattaggtatcgaagatggaactgtacttgactatccattaatagagtattgtcttaaagatgataaattgggtgatccaaacataagtagagaacatattctggcatttaattggcttaacgctattcagcttgatttaattgatgaaaatttaaaacgtctgaatgactttttattgggcttatttcgaggcgttggaattaaactagtcgattttaaagtagaatttggcttcacacatgatagtggaaaaaatgaaattattttagcggatgaaatcagccctgatacttgtagattgtgggattcaattactgacaaaaaacttgataaggacagatttagaaaggatttgggagatttgataccagcttatactgaggttgcaaaacgacttggtattcttcatgaacaatcaaatgtatccgctgttaacgtaacaaaactttcctcaataaaaaaaaagagtaaatgaa

SEQ ID NO: 312528 - DNA, 150 bp, Unknown
  Bacterial polypeptide expressing nucleotide sequence isolated from the Sargasso Sea
catgagtcccgaccacggcgagctgctgtacgaaggcaaggcgaagcgcatctacgccaccgaccacctggatcaggtgcttgtggagtacaaaaacgacgcgacggcgttcaatgcccagaagaaggcccagctgggcgataaaggacg

SEQ ID NO: 312529 - DNA, 202 bp, Unknown
  Bacterial polypeptide expressing nucleotide sequence isolated from the Sargasso Sea
aagcttcagatcagagggcgaaaaacttattattgctgatgaaataagtcctgatacctgtcgtctatgggactcaaaaacaaaaaaacgcctcgataaagatgtttttagattgaatgaaggtagtatttcaattgcatacactgaagtagcggatagatttgatttattaccgaaaaatgtgagaagtgccgtacgatga

SEQ ID NO: 312530 - DNA, 364 bp, Unknown
  Bacterial polypeptide expressing nucleotide sequence isolated from the Sargasso Sea
gatggagatcgatgaattaaatttaattaataaagaattaaatagaattaatgattttcttcaaggtatgtttaggggtgttggaattaaacttgtagattttaaagtagaatttggaagatatgaaaaaaatggaaaaaaagagatcatgcttgcagacgaaataagtcctgatacctgcagactatgggatgtaaatagtgataaaaaattagataaagataggtttagaaaaggccttggtaatctaattgaggcttatcaagaagttgctagaagattagatatacttcatgaacaatcaaatataagaccattaaaatacaccaagccacaagcagtaaagataaaaaagaagcaatga

SEQ ID NO: 312531 - DNA, 518 bp, Unknown
  Bacterial polypeptide expressing nucleotide sequence isolated from the Sargasso Sea
tgaatttgtaattagaaatattgcaaccggatctttaacaaaaagactgggaattgaagaaggaacagttttagattatccattaatcgagtattgtttaaaagatgataaacttggggatccaataatttctcgtgaacatattttaaatttcaaatggcttagtttaattgaattagacttaattaatgaacagtgtttaagaataaatgattatctccaaggtttgtttagaggtattggaattaaattagttgattttaaagtagaatttggaaaaacaaaatcagatgaaacaataatattagctgatgaaataagtcctgacacttgtagactatgggatcaagaaactgataagaaattagataaagatagatttagaaaagatttaggtaatattttagaagcctaccaagaggtagctagaagacttggaattcttcatgaacaatcaaacattagaccaataaaattctctaaaccaactgcagtaaaaattaaaaaaagtaaatgaa

SEQ ID NO: 312532 - DNA, 340 bp, Unknown
  Bacterial polypeptide expressing nucleotide sequence isolated from the Sargasso Sea
gacttaatagatgaaaacctttctagactaaacgattttcttttaggaatgtttagagctgttggaataaaattagtagactttaaagttgaatttggtttaacacatgagagtggcaaaacccaaattattcttgctgacgaaataagtccagatacatgtagattgtgggactcaattactgataagaaactagataaagatagatttagaaaagatttaggagatttaatccctgcgtatactgaggtggcaaaaagattgggtattcttcatgaacaatccaatgtgtctgctgtaaatgtaacaaaattgtcttctattaaaaaaaaaaagtaaa

SEQ ID NO: 312533 - DNA, 460 bp, Unknown
  Bacterial polypeptide expressing nucleotide sequence isolated from the Sargasso Sea
aggaactgttcttgaacgaccattaatagaatactgtctaaaagatgataagcttggagatccaataattagtcgtgaacatattttaacttttaactggttaaagggaacgcaacttgattggatagatgaaaatttgtctagattaaatgattttttactgggaatgtttagaggtgttggaattaaattagtagattttaaagttgaatttggcttaacccatgagagtgaaaaaaatcaaattatattagcagacgaaattagccctgacacatgtagattatgggatactgtaacagacaaaaaacttgataaagacagatttagaaaagacttaggagatcttattcccgcatatacagaggttgcaaaaagacttggaatacttcatgagcaatcaaatgttgctgcagttaatgttactcaactttcttctgttaaaagaaagaaaaaatga

SEQ ID NO: 312534 - DNA, 703 bp, Unknown
  Bacterial polypeptide expressing nucleotide sequence isolated from the Sargasso Sea
atggtgaaacgcagaaggatctacgaaggcagagaaaaggtcctttataatgggcccgagcccggtagcctcgtgctatcctttaaagatgacgttacctcggaatgtggtaagcgcgagggcacgatcacaggcaaaggcgtcttaaacaatcgtatatccgaattcattatgatgcgtttgcacgaaattggaattcctactcattttattcgtcgactaaatatgcgcgagcagttgatccgcgaagtggaaatcatcccacttgaagttatggtacggaatgctgcggcgggacagttcgctgaacgctttggcataaaatccggaacccagatgccacgttcgatcgttgagtactactacaaatcgaccgaattggagcagccgatggtgtctgaagaacatattacggcgtttggttgggctgcgccacaagacatcgacgatatgctcgctttggcgctacgcgtgaacgattttctctcgggcttgttcctcggtgctgggctgcgtttgatcgattttcggtccgaattcggacgactttatgaggaaactggcgaaatgcgagtggtactggcagacgaagttagccccgattcgtgccgaatttgggatatcgaatcgaacgaaccgctcgactcagaccgattcgaactggaccttggccgcgaatcggaggcctatcaagaaatgcccg

SEQ ID NO: 312535 - DNA, 358 bp, Unknown
  Bacterial polypeptide expressing nucleotide sequence isolated from the Sargasso Sea
atgaataaaggaaaaaagctttatgagggaaaagcaaaaattctttatgaaggacccgaaaaaggtacagctatacaacactttaaagacgatgccactgcatttaataatctaaaaaaagctactgttgaaggaaaaggagttttaaataacagaatttcagaacacatatttaataatttaaatcaaataggaataaaaacacatttgattaaaagactaaatatgcgtgaacagttagtgagattagttgatgtgatgcctgtagagtttatagttagaaatattgctacgggctccttaactaaaaaactaggcataccagatggtactgttctttcaaaaccactaatcgaat

SEQ ID NO: 312536 - DNA, 451 bp, Unknown
  Bacterial polypeptide expressing nucleotide sequence isolated from the Sargasso Sea
gatgaataaaggaaaaaaactttacgagggaaaagctaaaatcttatacgaaacaaaagaaaaaggtttggcaatccaacactttaaggacgatgcgactgcatttaataaccaaaaaaaagcaaacgttgagggcaaaggtgtattgaacaatcgtatctctgaacacattttgcagaatttaaatcaagcaggtatcaaaactcatttggtaaaaagattaaacatgagggagcagctagtaaaattagtggaaattattccaattgaggtaataataagaaacattgcaactggttccttaacaaaaagacttggtatagctgacggaactattttagataaacctttgttagaattttcttataaaaatgatgagttgggagacccacttgtggctaaagaacatattttggcattcaattgggctacaaatgatgagcttcaataa

SEQ ID NO: 312537 - DNA, 211 bp, Unknown
  Bacterial polypeptide expressing nucleotide sequence isolated from the Sargasso Sea
agcagatgaaataagtcctgatacttgtagattgtgggatcagaaaactgacaaaaaacttgataaagaccgatttagaaaagatttaggaaatgttgtagaagcatatcaagaagttgctagaagattaggaattctgcatgaacattcaaatataagacctatcaaattttcaaaaccaacggcagtaaaaatcaaaaaaaataaatga

SEQ ID NO: 312538 - DNA, 195 bp, Unknown
  Bacterial polypeptide expressing nucleotide sequence isolated from the Sargasso Sea
aatgaataataaatatgagttgatttatgaaggcaaagcaaaaaaagtatttactcatgatgatgcagataaagtaaaaattgaatttaaagatgatgctactgcttttaatgcgttgaaaaaagaaaaatttgaaggtaaaggtaaacttaattgcctaataagtgcaagaatttttgagattcttattaagaa

SEQ ID NO: 312539 - DNA, 310 bp, Unknown
  Bacterial polypeptide expressing nucleotide sequence isolated from the Sargasso Sea
atgaaaaagggaaaaaaactatacgaaggtaaagcaaaaatagtttttgcaacaagtgataaaaatttagtcatacaacattttaaagatgacgctacagcctttaacaatcagaaaaaagatgtcattgatggtaaaggaattttaaataatagaatttctgaacatattttaacgaatttaaatcaagttggtattaaaaatcatttaataaaacgtcttaatatgagagaacaactcgttcaacatgttgagattatacccgtcgaatttataataagaaatattgcaacaggatcattaacaaaaa

SEQ ID NO: 312540 - DNA, 119 bp, Unknown
  Bacterial polypeptide expressing nucleotide sequence isolated from the Sargasso Sea
aatgaatagtaaattaaaatttatttatgaaggtaaagcaaaaaaaatatttgcttatgaggattcagataaagtaataattgaattcaaagatgatgccacagcttttaatgcattga

SEQ ID NO: 312541 - DNA, 484 bp, Unknown
  Bacterial polypeptide expressing nucleotide sequence isolated from the Sargasso Sea
aatgaaaaaaggaaaaaaattatacgaaggtaaagcaaaaataatttttgcaagtaatgataaaaaatatgttatccaacattttaaagatgacgcaactgcatttaataatcaaaaaaaagcagttatggatggaaaaggaattttaaataataggatttctgaacatatattaactcagttgaacaacgttggtataaaaaatcatttagtaaaacgtttaaatatgagagaacaactcgttcagcatgttgaaataatacctattgaatttattgtaagaaatattgcaaccgggtcattaaccaaaagattgggaattgaagatggtacagtcttagatagtccattaatagaatattgcttaaaagatgatgatttaggagatcccttagtaagtactgaacacatcttggcttttaagtggatggagatcgatgaattaaatttaattaataaagaattaaatagaattaacgacttt

SEQ ID NO: 312542 - DNA, 528 bp, Unknown
  Bacterial polypeptide expressing nucleotide sequence isolated from the Sargasso Sea
aatgaaaaagggaaaaaaattatacgaaggcaaagcaaaaatcatttatgcaacaaatgataaaaacttagttatccaatattttaaagatgatgcaactgcatttaataatcaaaaaaaaacaaccatagaaggtaaaggtgttttaaataatagaatatctgagcacatactctcaaatttatcagaagtcggaattaaaaatcatttagtaaaaagaattaatatgagagaacaattagttaagctagttgatataatacctatagaatttatagtaagaaatattgcaaccggatcattaactaaaagattgggtatcgaagaaggaactatccttgaacgaccattaatagaatactgtcttaaagatgataagcttggagatccaataattagtcgtgagcatattttaacttttaattggcttaatgtaatgcagcttgattggatagatgaaaatctatctagattaaatgattttttgctaggaatgtttagaggtgtcggaataaaattagtggattt

SEQ ID NO: 312543 - DNA, 658 bp, Unknown
  Bacterial polypeptide expressing nucleotide sequence isolated from the Sargasso Sea
atagatggaaaaggaattctaaataatagaatttcagagcacttgttaaaatctctttcagaagttggaattaaaaatcatcttattaaaagattaaatatgagagaacaacttgttgaattggtaaatatcattccaattgaatttgtaattagaaatattgcaaccggatctttaacaaaaagactgggaattgaagaaggaacagttttagattatccattaatcgagtattgtttaaaagatgataaacttggggacccaataatttctcgtgaacatattttaaattttaaatggcttaatttgctcgaactggacttaattaataaactgtgtttaagaataaatgactatctccaaggtttgtttagaggcattggaattaaattagttgattttaaagtagaattcggaaaaacaaaatcagacgaaacaataatattagctgacgaaataagtcctgatacttgcagattatgggaccaagaaactgaaaaaaaattagataaagacagatttaggaaagatttaggtaatgtggtcgaagcctatcaagaagtagccaggagacttggaattcttcatgaacaatcaaatataagaccgataaaattcacaaaaccaactgcagttaaaattaaaaaaaataaatgaa

SEQ ID NO: 312544 - DNA, 203 bp, Unknown
  Bacterial polypeptide expressing nucleotide sequence isolated from the Sargasso Sea
catgaataaaggcaataaactttacgaaggcaaagctaaaataatatacgaaactaaagataaaaatttggtaattcaacattttaaagatgatgcaaccgcattcaataatttaaaaaaagctaaagtcgaaggtaaaggggtgctcaataatagaatttctgaatatatacttaataatttatctcaatgtgggattaaaa

SEQ ID NO: 312545 - DNA, 191 bp, Unknown
  Bacterial polypeptide expressing nucleotide sequence isolated from the Sargasso Sea
tatgaataaaggtaaaaaattgtatgaagggaaagctaagatcgtctacgaaacttcagataagaacttagtaattcaacattttaaagacgacgccactgcatttaacaacctaaaaaaagctaaggttgaaggaaaaggtgtgatcaataatagaatttccgagtacatatttactaacttgggtcagt

SEQ ID NO: 312546 - DNA, 433 bp, Unknown
  Bacterial polypeptide expressing nucleotide sequence isolated from the Sargasso Sea
aatgaaaaaaggtaaaaaattatacgaagggaaagctaaaataatttatgcaacaaatgataaaaatttagttattcaatactttaaagatgatgcaactgcatttaataatcaaaaaaaaacaaccatagaaggtaaaggcgttttaaataatagaatatctgagcacatactctcaaatttatctgaagttggaattaaaaatcatttagtaaaaagaattaatatgagagaacaattagttaagcttgttgaaataataccaatagaatttatagtaagaaatattgcaactggatcattaactaaaagattaggaatcgaagaaggaactgttcttgagcgaccattaatagaatactgtcttaaagatgacaagcttggagatccaataattaatcgtgagcatattttaacttttaattggcttaat

SEQ ID NO: 312547 - DNA, 265 bp, Unknown
  Bacterial polypeptide expressing nucleotide sequence isolated from the Sargasso Sea
aatgaataaaggaaaaaaactttacgagggtaaagctaagattatttacgaaaccaaagaaaaaggtttagtaattcagcattttaaagatgatgctaccgccttcaataatcaaaaaaaagcaacagttgaaggaaaaggtgtcttaaacaacagaatttcagaacatattttgcaaaacttaaatcaagttggcattaaaacacattttatcaaaagacttaatatgagagaacaattagttaagttagtagagattataccg

SEQ ID NO: 312548 - DNA, 195 bp, Unknown
  Bacterial polypeptide expressing nucleotide sequence isolated from the Sargasso Sea
atgggagcttgctgctggctgatgaaattagccctgacacctgccgcctttgggatgtgggggtggctgatcgccagggccggatcttggataaggaccgtttccgtaaggatctaggtggtgttgtcgaggcctatggggaggtcctcaaacgggtccaaggcctggggccagcaccacgccaataccggtaag

SEQ ID NO: 312549 - DNA, 646 bp, Unknown
  Bacterial polypeptide expressing nucleotide sequence isolated from the Sargasso Sea
tatggagtttagggacgatacatctgcatttgatggaaagaaaacggctgctcttgaaaacaaaggtaaagttaacaatcagtttaatgcttttattatggaatttctctccacaaaagaaataaatactcacttcatcaagcttttatcaaataatgaatcacttgttcgtaatcttgatatgtttccaatagagtgtgttgttagaaatcgagctaccggctcattatgtaaaagactaggtatagaagatggctacatacttcaaactccactttttgagttttttttaaaagatgatgatctaggagatcctcttattaatgataatcacattatttcttttggatgggcaaccaaagaagaacttggtgtaatgcagtcaattactcttaaagtaaatgaaattcttgtggatttcttttccgaggctaatcttttgctaatagactttaagctcgaatttggtaaattcaaagatcaaattatgctcggagatgaattcactcctgatggttgcaggctttgggataaagatacacttaacaaaatggataaggatcgattcagacaagatcttggtaatgtcatagagacctacggtgaagttgcagataggttaggcatgcagatcaaacttgactaa

SEQ ID NO: 312550 - DNA, 361 bp, Unknown
  Bacterial polypeptide expressing nucleotide sequence isolated from the Sargasso Sea
atgaataataaatatgtgttgatatacgaaggcaaagcaaaaaaagtatttactcatgatgatgaagaaaaagtaagaattgaattcaaggatgatgctacagcttttaatgcgctgaaaaaagaaaaatttgaaggtaaaggcaaacttaattgcttaataagtgcaagaatttttgagattctcattaggaataatatcccaactcattttattgaacttgaaaatgaaaatacaatgattgcaaaaaaaataaaagtaattccattagaaattgttcttagaaatactgcttatggttctttgtgtaaacaaacgactatcaaacctggaactttcctatcaaaaccactaattgata

SEQ ID NO: 312551 - DNA, 394 bp, Unknown
  Bacterial polypeptide expressing nucleotide sequence isolated from the Sargasso Sea
aatgaaaaaaggtaaaaaaatatacgagggtaaagctaaaataatttatgctagtaacgataagaatttagtaattcaacatttcaaagatgatgcaacagcttttaataatcaaaagaaagatattattgagggtaaaggaattttaaacaacagaatttcagagcacattcttacacaattaagcaatgttgggattaaaaatcacttagtaaaaagactcaacatgagagaacagcttgtaaaattggtcgaaataattccaattgaatttattgtaagaaatattgctactggatctttaacgaaaagattaggaatagaagatggaacgatattggattatccattagttgaattttgcttaaagatgacgaattgggtgatccattag

SEQ ID NO: 312552 - DNA, 434 bp, Unknown
  Bacterial polypeptide expressing nucleotide sequence isolated from the Sargasso Sea
aatgaaaaaaggtaaaaaattatacgaaggcaaagcaaaaatcatttatgcgacaaatgacaaaagcttagttattcaatattttaaagatgaagcaactgcatttaataatcaaaaaaaaactactattgaaggtaaaggtgttctaaataatagaatatcagaacatatactctctaacctatctcaaataggtattgaaaatcatttagttaaaagattaaatatgcgtgagcaaattataaagctcgtagaaataattcctattgaattcatagttagaaatgttgcaacaggttcaattaccaaaagattaggtattgaggacggcagtgttttaaaagaacctctaattgaatactgcttaaaagatgacaaacttggagatccattaatatctgaggagcatattttagtatttgattgggcaacaa

SEQ ID NO: 312553 - DNA, 135 bp, Unknown
  Bacterial polypeptide expressing nucleotide sequence isolated from the Sargasso Sea
tatggcccgccgtgcaaaaatttatgaaggtaaagcaaaaattttatatgaggggcctgaacctggaacaattgttcagtattttaaagatgatgccacagcatttaatgccgaaaaaaaagaggtgattgaaag

SEQ ID NO: 312554 - DNA, 166 bp, Unknown
  Bacterial polypeptide expressing nucleotide sequence isolated from the Sargasso Sea
aatgaaaaaaggtaaaaaaatatacgagggtaaggccaaaataatatttgcaactaacgaaaaaaatacagtaattcaacatttcaaagatgatgcaactgcttttaacaatcaaaagaaagctagaatagaaggaaaaggaattttaaacaacagaatttcggag

SEQ ID NO: 312555 - DNA, 703 bp, Unknown
  Bacterial polypeptide expressing nucleotide sequence isolated from the Sargasso Sea
tttgtggtttaataaaacaaaacatattattgataaccatatggttgcactatcagaagatcttgctcccacatcttcccaattccaaaatataccagaagaagtatctaagagaggaatggttgtaaaccgagcaaatagactagacgtagaatgtattgtgagaggttatcttgcaggttctgcctggggagaatataaatctaaaggaacaatatttgggtccaaagctccagagggaatgaaagaaggtcaaaagctagagacacctatatttactcctacaacaaaagctgaaataggtcatgacgaaaacattactatagaagaaatgaaaggaatatttggagaagatctaacaaatcaattggaaaaaatcagtattgaattatacaattatgctaatgattattcagtttcaaaaggaataatacttgcagatacgaaatttgaatttggtatgattaacgataaattaactatcattgatgaggttctaactccagactctagtagattttgggatttaagcacctttgaagaaggtagccaaccaccaaattttgacaaacaatttgtcagagactggctcgatactagcggatggaatcacgaaccccctgctccagaattgccagaagaaatagtgaataaaactattgaaagatataaactagcatttgaaatgttaacaaaggcgtag

SEQ ID NO: 312556 - DNA, 487 bp, Unknown
  Bacterial polypeptide expressing nucleotide sequence isolated from the Sargasso Sea
attaactaaaagattgggtattgaagatgggacagtcttagataatccattaatagagtattgcttaaaagatgatgctttaggagatcctttaataagtactgaacatatcttagcttttaaatggatggaaacagatgaattaaaaataattaataaagaattaaatagaattaacgattttcttcaaggcatgtttagaggtgtcggaattaaacttgtagattttaaagtagaatttggaagatatgaaaaaaatggaaaaaaagagatcatacttgccgatgaaataagcccagatacctgcagattatgggatgtaaacagtgacaaaaaattagataaagataggtttagaaaaggtcttggtaatctaattgaggcttatcaagaagttgcaagaagattagatatacttcatgaacagtcaaatattagaccattaaaatacaccaaaccacaagcagtaaagattaaaaaaaaataa

SEQ ID NO: 312557 - DNA, 283 bp, Unknown
  Bacterial polypeptide expressing nucleotide sequence isolated from the Sargasso Sea
atgaaaaaaggtaaaaaattatatgaaggcaaagctaaaatcatttatgcaacaaatgataaaaacttagttatacaatattttaaagatgatgcgactgcattcaataatcaaaaaaaaactacaattgaaggtaaaggtgttttaaataatagaatatctgagcatatactctcaaatttatctgaagttggaattaaaaatcatttagtaaaaagaattaatatgagagaacaattagttaagctagttgatataatacccaatagaatttatagtaaga

SEQ ID NO: 312558 - DNA, 526 bp, Unknown
  Bacterial polypeptide expressing nucleotide sequence isolated from the Sargasso Sea
tccgattgagtttatcgttagaaatattgccacaggatctttgacaaaaagattgggcatagaagatggaacagtattagattatccattagtcgaatattgtttaaagaacgatgatttaggtgatcctctagtaagtagagagcacattctagcatttaagtggatggatgttttcgaattagattttatttatgaagaagttagaaggataaatgattttctacaaggtatgtttagaggtgttggaattaaattagttgattttaaagtagagtttggaagatttgagagtgacaacaaacgagagataatgctagctgatgaaattagtcctgatacatgcaggctttgggacatgagaacagataaaaaactagataaagatagatttagaaataatcttggaaacttagtagaagcctatcaagaagttgcaataaggctaaacctattacatgaacaatcaaatataagaccactaacatatccaaaacctaaagaagtaaaaattagaaaaaaatga

SEQ ID NO: 312559 - DNA, 362 bp, Unknown
  Bacterial polypeptide expressing nucleotide sequence isolated from the Sargasso Sea
ggcatcaaaaaaagagatagaaaaaattgataaatatcttttaagaatgaatgattttatgattggtatgttcagaggtataggaattaaattggttgattttaaagttgagtttggaagatacaaaaataacggaaaaactgaaattatattggcggatgagattagtcctgatacttgtagattgtgggatttatcctcagataaaaaacttgataaagatagatttagaaagaatttaggcaatgtgatgcaaggataccaagatgtggctagaagacttggtattttgcatgaagaatcgaatataagaacagtgaaatttcctaaaccaaaagcagtaaaaataaaaagaaaataaa

SEQ ID NO: 312560 - DNA, 229 bp, Unknown
  Bacterial polypeptide expressing nucleotide sequence isolated from the Sargasso Sea
gtagacttcaagattgaaatcggcagaagcttcagatcagaatacgaaaaacttattattgctgatgagataagtcccgatacctgtcgcctgtgggactcaaaaacaaaaaaacgcctcgataaggatgtttttagaatgaatgaaggaagcatttcaattgcatacactgaagtagcggatagatttgatttattgccaaaaaatgtgaaaagagccgtacaatgat

SEQ ID NO: 312561 - DNA, 301 bp, Unknown
  Bacterial polypeptide expressing nucleotide sequence isolated from the Sargasso Sea
cttgcggatacaaagtttgaatttgggcagttagcgggcgtcgaaaaacccttattgattgacgagatttttactccggacagttctcgtttttggccggctgccgattgggagcctggtagggagcaagcaagctttgataagcagattgtacgaaactatttagaaaccgttgtttcctctggagattgggataaaactcctccagggccagagttgccagatgatgtggtggaaaaggggatcgcgagatatttggaagcttatgaattgctgacaggtagttcactatcgatttgat

SEQ ID NO: 312562 - DNA, 562 bp, Unknown
  Bacterial polypeptide expressing nucleotide sequence isolated from the Sargasso Sea
catgagagaacagcttgtaaagttagtagaaattattccagttgagtttatcgttagaaatattgcaacaggatctttaaccaaaagactggggatagaagacggaacggtcctagattatccattagtcgaatattgcttaaagaatgatgaattaggggatccattagtaagcagagaacatattttagcatttaaatggatggatgttttcgaattagattttatttatgaagaggtaagaagaataaatgattttcttcaaggcatgttcaggggcgttggaattaaattagtagattttaaagttgaatttggaagatttgaagctgatggcaaaagagaagttatgttagctgatgaaattagtcctgatacgtgcagactttgggacatgagaacggataaaaaattagataaagacagatttagaaataatcttggaaacttagttgaagcataccaagaagtggcaattaggcttaatatattacacgaacaatcaaatataagaccattaacttatcctaaacctaaagcagttaaaattaagaaaaaatga

SEQ ID NO: 312563 - DNA, 301 bp, Unknown
  Bacterial polypeptide expressing nucleotide sequence isolated from the Sargasso Sea
atgaaaaaaggtaaaaaattatacgaagggaaagctaaaatcatatatgcaacaaatgataaaaacttagttatccaatattttaaagatgatgctactgcatttaataatcaaaaaaaaactaccattgaaggcaaaggtgttctaaataatagaatatcagaacatatactctctaacctctctcaaataggaattaaaaatcatttagtaaaaagattaaatatgcgtgagcaaattatcaagcttgtagaaataattccgatcgaattcattgtgagaaatgttgcaacaggttcaa

SEQ ID NO: 312564 - DNA, 125 bp, Unknown
  Bacterial polypeptide expressing nucleotide sequence isolated from the Sargasso Sea
aatgaaaaaaggaaaaaaaatttatgaaggaaaggcaaaaatagtttttgcaacagaaaataaaaatttagtaattcaacattttaaagatgacgctactgcatttaataatcaaaaaaaaacta

SEQ ID NO: 312565 - DNA, 412 bp, Unknown
  Bacterial polypeptide expressing nucleotide sequence isolated from the Sargasso Sea
tgatctaggagatcctcttataagtagagaacatattttagcatttaaatgtatggatgttttcgaattagattttatttatgaagaagttcgaaggataaatgattttcttcaaggcatgtttagaggtgttggaattaaattagtagattttaaagttgaatttggaagatttgaagccgatggtaaaagagaaattatgttagctgatgaaattagtcctgatacatgcagactttgggacatgagaacagataaaaaattagacaaagatagatttagaaacaaccttggaaacttagttgaagcataccaagaggtggcaataaggcttaatatattgcacgaacaatcaaatataagaccattaacttatcccaaacctaaagcagtaaaaattaagaaaaaatga

SEQ ID NO: 312566 - DNA, 304 bp, Unknown
  Bacterial polypeptide expressing nucleotide sequence isolated from the Sargasso Sea
atgaaaaaaggcaaaaaactttacgaaggtaaagcaaaaataatatttgctaccagcgataagaatattgtaattcaacattttaaagatgatgcaactgcattcaataatcaaaaaaaagctagcatagaaggaaaaggaattttaaataatagaatttcagagcacatactctcatctctttcagaagtaggtattaaaaatcaccttatcaaaagattaaatatgagagaacagcttgttgagatggtaaatattataccaattgaatttgtaattagaaatattgcaacgggatcttgac

SEQ ID NO: 312567 - DNA, 304 bp, Unknown
  Bacterial polypeptide expressing nucleotide sequence isolated from the Sargasso Sea
attggtatgtttaggggggattaatattaagttagttgattttaaagtagaatttggaagatacaaaaacaacggaaaaaatgaaattattctagctgacgaaattagccctgacacttgtagattgtgggatgctaaaagtgaaaaaaagttagataaagatcgatttagaaataatttaggtaatttaattgaggcttatcaagatgtggcaagaagattagggattctttacgaacaagcaaatataacaccaatcaaatacatgaaacctcattcactaaagtttaagaaaactaaatga

SEQ ID NO: 312568 - DNA, 355 bp, Unknown
  Bacterial polypeptide expressing nucleotide sequence isolated from the Sargasso Sea
atggataaaggaaaaaaattatatgaaggaaaggctaaaattatttatgccacaaaagataaaaatcacgttattcaacattttaaagacgatgcgaccgcatttaataatctaaaaaaaacgactattgaaggtaagggtattttaaataatagaatttcggaacatatactttcgaatttgtctcaaattggaattaaaaaccattttgtaaaaagattaaatatgagagaacaattagtaaatcacgttgaaatcattcctatagaatttgttgtaagaaatattgcaacaggttcgctgacaaaaagacttggcattgaagatggcacagttttagaaaaacctttgctag

SEQ ID NO: 312569 - DNA, 387 bp, Unknown
  Bacterial polypeptide expressing nucleotide sequence isolated from the Sargasso Sea
gcctcgatttaatggagtggctgaaggaatctacgctctcgctttacaaggaagcaagagactacgctctggacagaggaattatacttgcggatacaaagtttgaatttgggcagttagcgggtgccgagaagcctttattgattgacgagatttttactccggacagctctcgtttttggccggctgccgattgggagcctggtagggagcaagcaagctttgataagcagattgtacgaaactatttagaaaccgttgttgcctctggagattgggataaaactcctccagggccagagttgccagatgatgttgtggaaaaggggatcgcgagatatttggaagcttatgaattgctgacaggtagttcactatcgatttgat

SEQ ID NO: 312570 - DNA, 439 bp, Unknown
  Bacterial polypeptide expressing nucleotide sequence isolated from the Sargasso Sea
aatgaaaaaaggtaaaaagttatacgaaggtaaagctaaaataatctatgctagcaatgataaaaatttagtaattcaacatttcaaagatgatgcaactgcttttaataatcaaaaaaaagatgtcattgaaggtaaaggaatcttaaataatagaatttcagaacatattcttactcaattaagcaatgttggaataaaaaaccatttagtaaaaagacttaatatgagagaacaacttgttaagttagtggaaattattccaattgaatttgttgttagaaatattgcaacaggttctttaacgaaaagattgggaatagaggatggaacagtgcttgattatccactagttgaatattgcctaaaaaatgatgatctaggagatccccttgtaagcagagaacatattttagcatttaaatggatggatgttttc

SEQ ID NO: 312571 - DNA, 241 bp, Unknown
  Bacterial polypeptide expressing nucleotide sequence isolated from the Sargasso Sea
aatgaaaaaagggaaaaaattatacgaaggaaaagctaaaattatttatgctacaacagataaagatttagtaattcaatattttaaagatgatgcaacagcttttaataatcaaaaaaaatctaccattgaaggaaaaggtgttttaaacaatagaatttctgaacatatacttacaagcctttcacaaataggcatcaaaaatcacttagttaaaagattaaacatgcgtgagcaagtt

SEQ ID NO: 312572 - DNA, 558 bp, Unknown
  Bacterial polypeptide expressing nucleotide sequence isolated from the Sargasso Sea
aatggaaaaacgcgacgagctttaccgtggtaaagcaaaaacggtttattacaccgatgacagcgaaaagctgatattgcactttcgaaacgatacatcagcgtttgatggtgaaaaaattgagcagcttgaccgcaaaggcgaagtgaacaacaagtttaatcattttattatgaataagcttgaggatgctggcattgctacgcaagtagaagcccttgtatctgatactgaatcgctggtgaaaaaactcgatatgattccggttgaatgcgtcgtgagaaacctctcagcaggctctcttgtgcgccgacttggcgttgaagaaggccaaacgcttaacccacccatttttgagtttttcctaaaagatgatgcgctccacgacccaatggtaaatgactttcatatcatttcttttggttgggctacgcagtcgcagattagcgaaatgaaagctctcacattcaaagttaacaacgtgcttaaggcattgtttgataacgccggcatgctgttagtagactacaaactcgagtttggtgtggacagcgacgg

SEQ ID NO: 312573 - DNA, 490 bp, Unknown
  Bacterial polypeptide expressing nucleotide sequence isolated from the Sargasso Sea
atctttaacaaaaagacttggtatagaagacggtacagtattagattatccgctagttgaatattgtctaaaaaatgatgaattaggtgatcctttaattagtagagaacatattttagcttttaaatggatggatgtatttgaattagactttatttatgaagaagtaagaagaataaatgattttcttcaaggtatgtttagaggtgtaggaataaaattagtagattttaaagttgaatttggaagatctgaaattgatgggaagagatcaattatgttagcagatgagataagtccggatacatgcagactttgggacatgcgaacagataaaaaattagataaagatagatttagaaataacttaggaaacttagttgaagcttaccaagaagttgctattagacttgatttacttcacgaacaatcaaatgtaagaccattaagttatcctaaacccaaggctgttaaaattaagaaaaaatga

SEQ ID NO: 312574 - DNA, 163 bp, Unknown
  Bacterial polypeptide expressing nucleotide sequence isolated from the Sargasso Sea
aatgaaaaaaggtaaaaagatttacgaaggaaaagctaagattatttatgctactcaagaaaaaaatttagttattcaatactttaaagatgatgcaactgcatttaataatcaaaagaaaagtaccatagaaggaaaaggggtattaaataatagaatttca

SEQ ID NO: 312575 - DNA, 214 bp, Unknown
  Bacterial polypeptide expressing nucleotide sequence isolated from the Sargasso Sea
tgttttggcagatgagattagtccagatacttgcagactatgggatgttaaaactgaaaaaaaacttgataaagatagattcagaaaagacttaggcaatatcatccaagcgtatcaagaggttgctaggagatttggaataatgcctgaggaaacaaacataagcgaagtaaactttggtaaaacaataccaataaaattcaaaaaaaaataa

SEQ ID NO: 312576 - DNA, 262 bp, Unknown
  Bacterial polypeptide expressing nucleotide sequence isolated from the Sargasso Sea
tttaagttgaatttggctttacccatggagagtgaaaaaactcaaattatattagctgacgagataagccctgatacatgtagattatgggatactttaacagataaaaaacttgataaagatagatttagaaaagatttaggtgatttaataccagcttacacagaagttgctaaaagattaggtattttgcacgaacaatcaaatgtaagtgctgtaaatgtcacaaaattatcatctattaaaagaaagaaaaaatgaa

SEQ ID NO: 312577 - DNA, 533 bp, Unknown
  Bacterial polypeptide expressing nucleotide sequence isolated from the Sargasso Sea
aatgaaaaaagggaaaaaattatatgaaggaaaagctaagatcatttatgaaacaagtgataaagatttagtaattcaatattttaaagatgatgcaacagcttttaataatcaaaaaaaatctatcattgaaggaaaaggagttttaaataatagaatttctgaacatatactgtcaagcctatcacaaataggtatcaaaaatcatttagttaaaagattaaatatgcgtgagcaagttgttaaacttgttgagataattcctattgaatttattgttagaaatgttgcatcaggatctttaacaaaacgtcttggaattgaagatggaactattttaaaagaaccattgattgaatattgcttgaaagatgacaaacttggcgatcctttaattgctgaagaacatattattgcgtttgaatgggcatctaaaaaagaaatagaaaaagtaaaaaaaatgattttaagaattaatgattttatgattggtatgtttagaggggtgggtattaaattaatcgatttcaaat

SEQ ID NO: 312578 - DNA, 361 bp, Unknown
  Bacterial polypeptide expressing nucleotide sequence isolated from the Sargasso Sea
ttttttaaaagatgatgatcttggcgatcctcttatcaacgataatcatattatttctttcggctgggcaaatagagaagatttaagtgttatgcaatcaatgaccttaaaagtgaatgagttattagttgatttttttgctaaagctaacctattactgattgatttcaaattagaatttggaaaacatgatggaaaaattatcctcggggatgagtttactcctgatgggtgtcgcctttgggataaagatactcttacaaaaatggataaagataggttcagacaagatttaggagatgttattgaaacttatggtgaagtagcagatcgtctgggcatgcaaattaaacttgactaa

SEQ ID NO: 312579 - DNA, 244 bp, Unknown
  Bacterial polypeptide expressing nucleotide sequence isolated from the Sargasso Sea
atgaaaaaaggtaaaaaactttacgaaggtaaagcaaagataatattcgctacaaatgataagaatgttgtaattcaacattttaaagatgatgcaactgcattcaataatcaaaaaaaagctagcatagaaggaaaaggaattttaaataatagaatttcagagcatatactttcattgctttcagaaataggtattaaaaatcatttaatcaaaagattaaatatgagagaacaacttgtag

SEQ ID NO: 312580 - DNA, 457 bp, Unknown
  Bacterial polypeptide expressing nucleotide sequence isolated from the Sargasso Sea
atgaaaaaaggaaaaaaattatacgaaggtaaagcaaaaataatttttgcaagtaacgataagaaatatgttatccaacatttcaaagatgatgcaaccgcatttaataatcaaaaaaaagcagtgatggatggtaaaggaattttaaacaatagaatttctgaacatatattaactcaattaaacaatgttggtatcaaaaatcatttagtaaaacgtttaaatatgagagaacaactcgttcagcatgttgaaattatacctattgaatttattgtaagaaatattgcaactggttcattaactaaaagattgggtattgaagatggtacagtcttagatagtccattaatagaatattgcttaaaagatgatgatttaggagatccattagtaagcaccgaacacatattagcttttaaaaggatggaaaaagatgaattaaacttaattaata

SEQ ID NO: 312581 - DNA, 856 bp, Unknown
  Bacterial polypeptide expressing nucleotide sequence isolated from the Sargasso Sea
aatgacaactggtcaagagaaccagttaaaaggatttgatttaatacacaaaggaaaagtcagagacatttatagatacaaaagcaatgaaattctcataattacaagtgatagaatttcagcctttgactttatttttaatgatgaaattgatgggaagggaaaaatcctaacgtcattgacgaaatattggttcagacaaacaaaagatataataaaaaatcatttaattgatgaaataccaaaattagaaagtcaattattagacagagctatgcttgcgcgtgaggctagagtaataccctatgaagcagttgttagagggtatcttactggttcggcatggaatgaatataaaagcaatcaaactattggcggagttaatgtaaagagtggatataaagaatttgatgctcttgtaaacccagcatttactccaactacaaaagcaaaggtcggtgataaggataaaccagttacatttaaacagatggagaataatctggggaaggatttagcagggcaaattagagaatatagtataaaactttttgaatttgcacgaaattcatatgaaaagaaaggagtaattcttgttgatacgaaatttgaatttggattagatgctgataacaaattaatgctagtcgatgaaattttcactccagattgctcacgattctggatgaaggatgatgtagataacaaagtgtacaatccatatgacaaacagatttttcgaaactatctattagagataaattgggataatgaacaaatgaatctatctgaagatatcaagaataaattgattgacagctatgagaagatatataacaaaatagcaaatgtctaa

SEQ ID NO: 312582 - DNA, 460 bp, Unknown
  Bacterial polypeptide expressing nucleotide sequence isolated from the Sargasso Sea
gctgcctgagccgattttcacgccggcagccaaggccgaaatgggccatcacgacgaaaacatcacgtacaacgagatggagcgccgcatcggcaccgaactgtcggccacgatccgcgacatctcgatcaagctgtacaaggaagctgcggattatgccgccacgcgcggcatcatcatcgcggatacgaagttcgaattcggtctggacaaccacggccagctgtatctgatggatgaagcgctgaccgccgattcgtcgcgtttctggccggctgaccagtatcaggtcggcaccaacccgccgtcgttcgacaagcagttcgtgcgcgactggctcgaaacccaaccgtggaagaaagagccgcccgcgccgaagctgccggacgacgtggtcacgaagacaggcgagaaatatcaggaagcgctcgaacgcctgaccggacacaagctcgcttga

SEQ ID NO: 312583 - DNA, 214 bp, Unknown
  Bacterial polypeptide expressing nucleotide sequence isolated from the Sargasso Sea
atgaaaacaaatggaaaacaagagatcatacttgcggacgaaataagcccagacacctgtagactatgggatgtaaatagtgataaaaaattagataaagatagatttagaaaaggtcttggtaatcttattgaggcttatcaagaagttgcaagaagattaaatatacttcatgaacaatcaaatataagaccattaaaatataccaagccac

SEQ ID NO: 312584 - DNA, 130 bp, Unknown
  Bacterial polypeptide expressing nucleotide sequence isolated from the Sargasso Sea
atgaaaaaaggtaaaaaattatatgaaggtaaagctaaaataatttatgcctgtgctgaaaaaaatttagtcattcaacattttaaagatgatgcaacagcatttaacaatcagaaaaaatctgtcattg

SEQ ID NO: 312585 - DNA, 226 bp, Unknown
  Bacterial polypeptide expressing nucleotide sequence isolated from the Sargasso Sea
aatgtttgcagctgggggcttattacttgttgattttaaactcgagtttggcagacaagatggaaaaatgtacttaggcgatgagatgactcccgatggttgcagggtgtgggatgctgagacaagaaagaaactcgataaagatagatttcgacaaggcttaggtgatgtaattgaatcctatcaagaaattgcctcaagaataggagttagtttagaaaactaa

SEQ ID NO: 312586 - DNA, 217 bp, Unknown
  Bacterial polypeptide expressing nucleotide sequence isolated from the Sargasso Sea
aattgttctggcagatgaaattagccctgatacttgtaggctttgggatattaaaagtgagcgtaagttagacaaagatagatttagaaaagatttaggcaatatcattcaagcatatcaagaggtagcaagaagattgggtataatgccagaagaaactaacattagtgaagtcaaattcgggaaacctaaatcagtagatatcaagaaaaagtaa

SEQ ID NO: 312587 - DNA, 490 bp, Unknown
  Bacterial polypeptide expressing nucleotide sequence isolated from the Sargasso Sea
aatgaaaaaaggtaagaagttatatgaaggaaaggctaaaatcatatatgcaggccccgaggaaggcacggcaatacagcattttaaagatgaggcaacggcatttaataatttaaaaaagtctacaattgaaggtaagggtattttgaataatagaatatctgagcacattctttccaatttaaatcaagtaggtatagaaacacatttgatcaaaagaattaatatgagagaacaactaattaagttagttgaaatcattccaattgaatttgttgtcagaaatatagctgcaggatctttatcaaaaagacttggtattgaagaaggtactgttttaaaagaccctttattagaattttattataaaaaagatgaattaggagacccattaatttcaagagagcatatatttgcttttgaatattgtaacgttatgtctttagactttattagtagtcaatgtttaagaattaatatttttacaggg

SEQ ID NO: 312588 - DNA, 721 bp, Unknown
  Bacterial polypeptide expressing nucleotide sequence isolated from the Sargasso Sea
tatggaaaaaattaaacagattacatcaggtaaagcaaagtcactctacacaaccaatgatggtaattttttggtaatggaatttagggatgatacctcagcttttgatggcaagaaaacagctgcattagagaataaaggtaaagttaataaccaatttaacgcattcataatggagtatcttgcaacccaaaacattgatacgcattttgtaaaacttcttagcaatactgagtcgcttgttaaaaatcttgaaatgtttccaatcgaatgtgtagtaagaaatagagcaaccggttccttgtgcaaaagacttggaatagaggatggcttaattctggaaactcccttattcgaattttttttaaaagatgatgatcttggtgatcctcttatcaacgacaatcatattatttcatttggctgggcaaatagagaagatttaagtgtcatgcaatcaatgaccctaaaagtgaatgagttattggttgatttttttgctaaagctaacctattactgattgattttaaattagaatttggaaaacatgatggaaaaattgtccttggggatgagtttacccctgatgggtgtcgcctatgggataaagatacactcacaaaaatggataaagataggttcaggcaagatttaggggacgttattgaaacttatggagaagtagcagatcgtctaggcatgcaaattaaacttgactaa

SEQ ID NO: 312589 - DNA, 313 bp, Unknown
  Bacterial polypeptide expressing nucleotide sequence isolated from the Sargasso Sea
aaaagaataaatgattttttacaaggattgtttagaggtgttggaataagattagttgattttaaagttgaatttggaaaaacatcgaatgatgaaattattttagcagatgaaataagtccggatacttgtagattgtgggatgaaaaaacagaaagaaaattagataaagatatttttagaaaagatttgggaagcttagttgaaggatatcaagaagttgctagaagattaaatattcttcatgagcaatctaatattaaaccaatatcatttccaaaaccaaaagaagttaaaattaaaaagaaataat

SEQ ID NO: 312590 - DNA, 495 bp, Unknown
  Bacterial polypeptide expressing nucleotide sequence isolated from the Sargasso Sea
aatgaaaaaaggtaaaaagttatacgaaggtaaagctaaaataatctatgctagcaatgataaaaatttagtaattcaacatttcaaagatgatgcaactgcttttaataatcaaaaaaaagatgtcattgaaggaaaaggaattttaaacaacaggatttcagaacatattcttactcaattaagcaatgttggtatcaaaaatcatttagtaaaaagacttaatatgcgagaacaacttgttaagttagtggaaattattccaattgaatttgttgttagaaatattgcaacaggttctttgacaaaaagattgggaatagaggatgggacagtgcttgattatccactagttgaatattgtttaaaaaatgatgatcttggagatcctcttgtaagcagagaacatattttagcatttaaatggatggatgttttcgaattagattttatttatgaagaggtaagaagaataaatgactttctgcaaggcat

SEQ ID NO: 312591 - DNA, 589 bp, Unknown
  Bacterial polypeptide expressing nucleotide sequence isolated from the Sargasso Sea
atgaaaaaaggaaaaaaaatatacgaaggtaaagcaaaaatagtctttgctacaagtgataaaaatttagtcatacaacattttaaagatgatgctacagcttttaacaaccagaaaaaagatgtcattgatggcaaaggaattttaaataatagaatttctgaacatattttaacaaacttaaatcaagttggtattaaaaatcatttaataaaacgtctaaatatgagagaacaacttgttcaacatgttgagattataccaatcgaatttatagtaagaaatattgcaacaggatcattaacaaaaagactaggtatagaagatggtacagttcttgaatatccactagtagaatattgtttaaaaaatgatgaactcggtgatccacttataagcaaagaacatattttagcatttaagtggatggatgactttgaaattgattttgtgaacaacgaattagcaagaataaatgattttcttcaagggatgttcagaggtgttggaataaagttagttgattttaaagttgaatttggaagattagaaaagaatggaaaaaaagatattattttagcagatgaaa

SEQ ID NO: 312592 - DNA, 502 bp, Unknown
  Bacterial polypeptide expressing nucleotide sequence isolated from the Sargasso Sea
aatgaataataaatatgagttaatatacgaaggaaaagcaaaaaaaatattttcgcatgatgatgcagataaagtaagaattgaatttaaagatgatgctactgcatttaatgctttgaaaaaagaaaaatttgaaggtaaaggcaaacttaattgcttaattagtgcaagaatatttgagattctcataaaggagaatattccaacacattttattcaactcgaaaatgaaaatacaatgattgcaaaaaaaataaaagtaattccactagaaattgttctaagaaatactgcttatggttctttatgtaaacaaacgactataaaacctggaactttcctatcaaaaccattaattgatatctaccttaaaaatgatgaacttaatgatccccttatcacaaaagatagaataaaattaatgaacataataaactctgatgatttagagttagtaattaatttaactttaaaagttaatgaaattctgaaaagttcttaa

SEQ ID NO: 312593 - DNA, 260 bp, Unknown
  Bacterial polypeptide expressing nucleotide sequence isolated from the Sargasso Sea
aatgacaagacgtagacaattatacgagggcaaggcaaaggtgatttttgaagggcctgagccagagacggttgtggcttattttaaggatgatgcgactgcctttaacaatcagaagaaaggtatgatcactggcaaaggagtaattaacaatagtatttctgagtttatgatgtccaaactttctgaaattggcatctccacacatttcataaagcggctaaatatgcgagagcaactattgcataaagtagaaatta

SEQ ID NO: 312594 - DNA, 457 bp, Unknown
  Bacterial polypeptide expressing nucleotide sequence isolated from the Sargasso Sea
atgcaatctacggaattaaaaaacctcgaactcgtcgccaaaggcaaggttagggacatttacgcggtggattctgatcacttgctgattgtcaccacagacagaatgtctgcatttgatgttgttcttccaaatccaattccaggcaaaggtgaagtgctgactcagctttcagaattttggtttgaaaaaacacaatcgattgtaagcaatcacatgacagatgatctcgagctcgttgaccttctcgatagtcctgatcaattggactatttctctaagcgcagcatgattgtaaagcgtttgaatcctcttccaatcgaagcagtggttcgaggatatctcatcggatccggatggaaggattatcaagccactggatctgtgtgtggaattcaattggagaaagggctccaaatggcgcaaaaattgcctgtaacccttcccgatcgatgac

SEQ ID NO: 312595 - DNA, 238 bp, Unknown
  Bacterial polypeptide expressing nucleotide sequence isolated from the Sargasso Sea
aatgaaaaaaggaaaaaaattatacgaaggtaaggctaaaattatttatgcttccactgaaaaaaatttagtgattcaacattttaaagatgatgcaactgctttcaataatcaaaaaaaagcagtaattgatggaaaaggaattttaaacaatagaatatctgaatatattctatcaagcttaaatgaaataggaataaaaaatcaccttgtaaaaagaattaatatgagagaacag

SEQ ID NO: 312596 - DNA, 421 bp, Unknown
  Bacterial polypeptide expressing nucleotide sequence isolated from the Sargasso Sea
aaaaatgatgatcttggagatcctcttgtaagcagagaacatattttagcatttaaatggatggatgttttcgaattagattttatttatgaagaagtaagaagaataaatgactttctgcaaggcatgtttagaggtgttggaattaaattagtagattttaaagttgaatttggaagatttgaagccaatggcaaaagagaaattatgttagctgatgaaattagtcctgatacttgcagactttgggacatgagaacagataaaaaactagataaagatagatttagaaataaccttggaaacttagttgaagcataccaagaagtggcgattaggcttaacatattacatgaacgatcaaatataagaccattaacttatcctaaacctaaagcagtaaaaattaagaaaaaatgaa

SEQ ID NO: 312597 - DNA, 610 bp, Unknown
  Bacterial polypeptide expressing nucleotide sequence isolated from the Sargasso Sea
atgaaaaaaggaaaaaaattatacgaaggtaaggcaaaaataatctttgcaagcaacgataaaaaatatgttatccaacattttaaagatgatgcaactgcatttaataatcaaaaaaaagcagtgatggatggtaaaggaattttaaacaatagaatatctgaacatatattaactcaattaaacaacgttggtataaaaaatcatttagtaaaacgtttaaatatgagagaacaactcgttcagcatgttgaaattatacctattgaatttattgtaagaaacattgcaactggatcattaactaaaagattgggtattgaagacggaacagttttagataatccattaatagagtattgcttaaaagatgatgatttaggagatcccttagtaagtactgaacatatcttaaattttaagtggatggaaaaagatgaattaaacttaataaataaagaattaaatagaattaacgattttcttcaaggcatgtttagaggtgttggaattaaacttgttgattttaaagtagaatttggaagatatgaaaacaaatggaaaacaagagatcatacttgcggacgaaataagcccagacacctgtaga

SEQ ID NO: 312598 - DNA, 478 bp, Unknown
  Bacterial polypeptide expressing nucleotide sequence isolated from the Sargasso Sea
caaaaagagtgggtatagaagagggtacagttttggactatcctttgatggaatatgtcttaaaaacgatgagttaggcgatccaatagtttctagggaacatatcttaaattttaattggttatcgaatattgagctagatttaattaatgaacagtgttttagaataaatgattttttgcaaggaatgtttaggggcgttggaattaaactagtcgattttaaagttgaatttggaaaagcaaaatctgatggaaaaataattctggcagatgaaataagcccggactcctgcagattatgggatcaagaaacagacaaaaaattagataaagatagatttagaaaagacttaggagatttggttgaagcttaccaagaagtagcaaaaagacttggtatactccacgaacaaacaaatataagaccaataaaatttcccaaacctaccgcagtaaaaataaagaaaaataaatga

SEQ ID NO: 312599 - DNA, 220 bp, Unknown
  Bacterial polypeptide expressing nucleotide sequence isolated from the Sargasso Sea
atggctaatagaaaaaaattatacgagggaaaagctaaaattctttacaaaggcccaaggccaggaacactcgttcagtattttaaagacgatgcaacagctttcaacaacgaaaaacgtggcgttataacaggtaaaggggttttaaataacactattagtgaatacatgatgactcgtctgacagaaattggtatcacaactcactttatcgagcgat

SEQ ID NO: 312600 - DNA, 268 bp, Unknown
  Bacterial polypeptide expressing nucleotide sequence isolated from the Sargasso Sea
atgaaaaaaggcaaaaagttatatgaagggaaagcaaagataatttacgcttcacctcaaaaaaatttacttatccaacattttaaagatgacgctacagcttttaataatcaaaaaaaagcttcaattgaaggaaaaggaatcttaaataatagaatttcagaatatatactttcgaacttgaaccaagtaggaataaaaaatcatcttgttaaaagaattaacatgagagagcaattagttaaatctgttgagatattcctataga

SEQ ID NO: 312601 - DNA, 159 bp, Unknown
  Bacterial polypeptide expressing nucleotide sequence isolated from the Sargasso Sea
catgcctgaggaactactttacgagggaaaagccaaaaagcttttcatcacagaggatccgcaaattttgcgggttgagtacaaagacgatgcgaccgctttcaacgggaaaaaattcgaccgtttgagagataaaggacgtctgaacaacgcgatcac

SEQ ID NO: 312602 - DNA, 439 bp, Unknown
  Bacterial polypeptide expressing nucleotide sequence isolated from the Sargasso Sea
aatgaaaaaaggtaaaaagttatacgaaggtaaagcaaaaataatctatgctagcaatgataaaaatttagtaattcaacatttcaaagatgatgcaaccgcttttaataatcaaaaaaaagatgtcattgaaggtaaaggtatcttaaataatagaatttcagaacatattcttactcaattaagcaatgttggtatcaaaaatcatttagtaaaaagacttaatatgagggaacaacttgttaagttagtggaaattattccaattgaatttgttgttagaaatattgcaacaggttctttgacaaaaagattgggaatagaagatgggacagtacttgattatccactaattgaatattgcttaaaaaatgatgatcttggagatcctcttgtaagcagagaacatattttagcatttaaatggatggatgttttc

SEQ ID NO: 312603 - DNA, 324 bp, Unknown
  Bacterial polypeptide expressing nucleotide sequence isolated from the Sargasso Sea
aatgaataaaggaaagaaactttacgaaggaaaagctaaaatcttatacgaaactaaagaaaaaggtttagcaattcaacattttaaagatgatgcaacagcatttaacaatcaaaaaaaagcaaatgttgaaggaaaaggcgttctcaacaatcgaatatcagaacatattttacaaaatttaaatcaatctggtatcaaaactcatttaataaaaagattgaacatgcgtgaacaactagtaaaactagtagaaataattccaattgaagtaataataagaaatattgcaacaggttcgctaacaagaagactgggaatagc

SEQ ID NO: 312604 - DNA, 670 bp, Unknown
  Bacterial polypeptide expressing nucleotide sequence isolated from the Sargasso Sea
aaaaaaagcaaatatagatggaaagggaatcctaaataataggatttcagaacatttgttaaaatctctttcagaaattggaattaaaaatcatcttattaaaagattaaatatgagagaacaacttgttgaattggtaaatataattccaattgagtttgtaattagaaatattgcaaccggatctttaacaaagagattgggaattgaagaagggacagttttagattatccgttaatcgagtattgtttaaaagatgataaacttggagatccaataatttcacgtgaacatattttaaattttaaatggttaaatgtaattgaattagacttgatcaatgatcaatgtttaagaataaatgattatcttcaaggcttgtttagaggtataggaattaaattagttgattttaaagtagagtttggaaaaacaaagtcagacgaaataataattcttgcagacgaaattagtccagatacttgtagattatgggatcaagaaactgataaaaagttggataaagatagatttaggaaagatttgggtaacgttgtagaggcctaccaagaagtagctagaagacttggaattcttcatgagcaatcgaatataagaccaataaaattctcaaaaccaactgcagtaaaaattaaaaaaagtaaatga

SEQ ID NO: 312605 - DNA, 874 bp, Unknown
  Bacterial polypeptide expressing nucleotide sequence isolated from the Sargasso Sea
atgtttcaatcatacatacctcatctcaaactattgggtcgaggtaaagtcagggacatatacgaagctgatgaccaacatttgttgatcgtcgctactgacagactctctgcttacgatgttataatgccaaatcccatccctgggaaaggtgaaattctaacttcactctcaaatttttggtttgatatgatgtcagatctagttccaaatcatttgacgaaattaaatatcaattcatacatcagtgataagagagaaattaaaatactagaaaagcgatctatcattgtaaaaaaacttaaaccactcccaatagaatctgtagttaggggttatctgataggttccggctggagagactatgaaaaaaatagtgcgatctgcggtataaaacttcctaaaaatttaaatcaagcccaaaaactaccagaaataatatatacccctgcaactaaagctgcagctggggatcatgatataaacatagactacgaaatgacagaatcattgattggtaaagagctggcaaaaagagttaaagaaatatcaatagatatctataaacgagcttttgactatgccatttcacgagggataataattgcagatacaaaatttgagtttggcttggatgatgaagaaaatctctatctgattgatgaaattctaactcctgattcttcaagattttggccgaaagattcatataaagttggtgttagcccaccaagttatgataagcagtatctaagagattacttagataccctttcatgggaaaaagttgctcctgggccagatttacctgatgaaattatccaaaatacttaccaaaaatatcttgaaagcaaacagatacttgctcattaac

SEQ ID NO: 312606 - DNA, 541 bp, Unknown
  Bacterial polypeptide expressing nucleotide sequence isolated from the Sargasso Sea
ttagtagaaattattccaattgaatttgttgtaagaaatatagcaacaggatttttaacaaaaagattgggtatcgaagacggtacagttttagattatccactagttgaatattgtttaaagaatgatgaattaggtgatcctttagtcagtagagaacatattttagcttttaaatggatggatgtatttgaattggattttatttacgaggaagtaaggagaataaatgacttcttacaaggcatgtttagaggtgtaggcattaaattagtagattttaaagttgagtttggaagatctgaagttgatggaaagagagaagttatgttagctgatgaaataagtcctgacacatgcaggctttgggatatgagaactgataaaaaactagataaagatagatttagaaatgacctaggaaatctagttgaagcttatcaagaagttgcaattagactaaatctactacatgaacaatcaaatattaggcctttaaattatcctaaaccaaaagctgtaaaaattaagaaaaaatgaa

SEQ ID NO: 312607 - DNA, 291 bp, Unknown
  Bacterial polypeptide expressing nucleotide sequence isolated from the Sargasso Sea
aatgaaaaaaggaaaaaaattatacgaaggaaaagctaaaattatttatgcaactaatgataagaatttagtaattcaatattttaaagatgatgcaaccgcattcaataatcaaaaaaaatctatcattgaaggtaaaggtgttttaaacaacagaatatctgaacatgtactctctaacctgtctcaaataggaattaaaaatcatttagtaaaaagattaaatatgcgtgagcaaattataaagcttgtggaaataattccaatcgagttcattataagaaatgttgc

SEQ ID NO: 312608 - DNA, 191 bp, Unknown
  Bacterial polypeptide expressing nucleotide sequence isolated from the Sargasso Sea
aatgaaaaaaggtaaaaaattatacgaaggaaaagcaaaaatcatttatgcaacaagtgataaaaatttagttatccaatattttaaagatgatgcaactgcattcaataatcaaaaaaaaactacaattgaaggtaaaggtgtttttaataatagaatatcagaccatatactctcaaacctctctcaaa

SEQ ID NO: 312609 - DNA, 484 bp, Unknown
  Bacterial polypeptide expressing nucleotide sequence isolated from the Sargasso Sea
ccacaaggaatattagaagcacaaagatttgaaaaacctatttttactccttcaactaaggcttcagaaggacatgatgagcctctatcatctaatgcaggtaaaaaattaattggagataaactctatgaacagttagaagaaatatctatagatttatacatcaaagctcatgatttctgtgaaaataaaggaataattctagcagatacaaaatttgaatttggaataattgataatgaaattattttgatagatgaagttctaactcctgattcaagcagattttggaaaaaagatgattattcagagggaaattctccaaatccatatgacaaacaatttcttcgtgactggctaaatcaacaagattggaataaaactccaccccctccttctataccaaatgaagtaataaataatactttaggtaggtatttagagatttatgaattactaacaaatgataaattaaatatatagt

SEQ ID NO: 312610 - DNA, 519 bp, Unknown
  Bacterial polypeptide expressing nucleotide sequence isolated from the Sargasso Sea
ttgagtttgttataagaaatattgcaaccggttctttaacaaaaagaataggaatagaagaaggcactgttttggactatcctttgattgaatattgtcttaaaaacgatgagttaggtgatccaatagtttctagagaacatatcttaaattttaattggttaaaaagtattgaattagactttattaatgagcaatgtttgagaataaatgattttttacaaggaatgttcaaaggtgttggaattaaactggttgattttaaggttgaatttggaataacaaaatctgatggtaaaataattttggcagatgaaataagtccagactcatgcagattgtgggatcaagagacagataaaaaattagataaagatagatttagaaaagatttaggggatttagttgaagcttatcaagaggtagcaaaaagacttggtattctgcacgaacaaacaaatataaggccaataaaatttcctaaacctactgcggtgaaaataaagaaaaataaatgaa

SEQ ID NO: 312611 - DNA, 715 bp, Unknown
  Bacterial polypeptide expressing nucleotide sequence isolated from the Sargasso Sea
atacaacattttaaagatgatgctacagcttttaataatcaaaaaaaatctactgttgaaggaaaaggagttctaaataatagaatatctgagcatatattaaataacttgaatcaaataggaattaaaaatcacttgattaaaaggttaaatatgcgagagcagttaataaaactctgcgaaattttcccagttgaatttattgtaagaaatatagcaacaggctctcttacaaaaagattgggtatagcagatggcactatactatcaaaacctttaattgaattttcttataagaacgatgatttaggtgaccctgttgtttctagagaacatatacttgaattcggatgggtaaaagattctgatacattagattttattattgctaaatgtttaagaattaatgactttatgcaagggatgtttagaggtgtaggaattaaacttgtagattttaaattagaatttggacagtcaaaaacagataatgaaattatattagctgacgaaataagtcccgacacttgtagattgtgggatgtttcaagtgaaaaaaaattagataaagacagatttagaaaagatttaggtaatataatccaagcgtatcaagaagtcgctagaagattaggtattattcatgaagaagctaatatcagcgaagtcaaatttggtaagcccacagctgtaaatattacaaagaaaaaataaa

SEQ ID NO: 312612 - DNA, 557 bp, Unknown
  Bacterial polypeptide expressing nucleotide sequence isolated from the Sargasso Sea
aatgaaaaagggaaaaaaattatatgaaggtaaagcaaaaattatttatgcctcttcagaaaaaaatttagtaatacagcattttaaggacgatgccacagcttttaataatcaaaaaaaatcagtgattgaaggtaaaggaattttaaataatagaatttcagaacatatacttacttacttgggacaagtgggaatcaaaaatcatttaattaaacgtattaatatgagagaacaattaattaaatatgtaaatataattcccattgaatttattgttagaaatattgcaactggttcattaacaaaaaggttgggtattgaagaaggtacgactttagaaaaaccattattagaatattgttttaaaaatgacaaattgggtgatccattaataagtagagaacatataataacttttaactggttaaatttaatggaattagaatggataaatgaacaatgtagaaggataaatgatcttttacaaggtatgtttagaagtgttggaattaaattagttgattttaaaatcgagttggaaaaacaaaagagaa

SEQ ID NO: 312613 - DNA, 733 bp, Unknown
  Bacterial polypeptide expressing nucleotide sequence isolated from the Sargasso Sea
aaagaaaaaggtttggcaattcaacactttaaggacgacgccactgcatttaataatcaaaagaaagcgaatgtcgaaggtaagggtgtgcttaataatagaatatctgaacatattttacagaatctaaaccaagctggtattaaaaatcatttggtaaaaagattaaatatgcgtgaacaacttataaaacttgtagagataattccgatcgaagtcataataagaaatattgctacaggctctttaacaaaaagattgggaatacctgatggtactgttttagaaaaaccattactagaattttcttataagaatgatgaactaggagatcctcttgttgctaaagaacatattcttgccttcaattgggcaacaaaagatgaacttgatataattcaagatacgacttttagaattaacgacttcatgacgggtatgttcaggggtgtaggtattaaacttgttgattttaaattagaattcggaagattgtgggaaaaagataaaaaggaagttattcttgcagatgagataagtcccgatacatgtagactttgggatataaaaagtgaaagaaaattagataaagacagattcagaaaagatcttggtaacattatacaagcatatcaagaagtggctcgaagattaaatattctaccagagacaacgaatataagtgaagtaaattttaaaaaacctacatcaataaatattaaaaaaaaataaa

SEQ ID NO: 312614 - DNA, 790 bp, Unknown
  Bacterial polypeptide expressing nucleotide sequence isolated from the Sargasso Sea
aatgaaaaaaggcaaaaaactttacgagggaaaggcaaaagttatttttgcaactgatgaaaagaacttagtcattcaacattttaaagacgatgcaactgcttttaataataaaaaaaaagacactattgaaggaaaaggtgttttaaacaatagaatatcggaacatattctaacaaatctaagtcaagtaggaattaaaaatcatttagttaaaagaattaatatgagagaacaattaattaagtttgttgaaatcataccattagaatttattgtaagaaatatagcgactggctcattaacaaagagattaggaataggagacggaacggttttagatgatccattaatagaatattgtctcaaagatgataagttgggtgacccattagtatctaaagaacatattcttgcttttaaatgggctagtaaaaaagaattagaaaaaattgataagcaacttcaaagaataaatgattttatggttgggatgtttagaggtgtcggtattaaacttgttgattttaaagttgaatttggcagatacaaaagtaacggaaaaactgaagttattttagcagacgaaattagtccagatacctgcagactttgggataataaaactgataaaaaattagataaggatagatttagaaataatcttggaaacttaattgatgcttatcaagatgtggcaagaaggctgggtattctacatgagcaatcaaatataaccgctgttaacttttcaaaattaaaaactataaaaaataaaaaaaataaatga

SEQ ID NO: 312615 - DNA, 742 bp, Unknown
  Bacterial polypeptide expressing nucleotide sequence isolated from the Sargasso Sea
tatgcaacaagtgataaaagtttagttatccaatattttaaagatgatgcaactgcgttcaataatcaaaaaaaaactacgattgaaggtaaaggtgttttaaataatagaatatctgagcatatactctcaaatttatctgaagttggaattaaaaatcatttagtaaaaagaattaatatgagagaacaactagttaagctagttgacataataccaatagaatttgtagtaagaaatattgcaactggatcattaactaaaagattaggtatcgaggaaggaactgtccttgaacggccattaatagaatactgtctaaaagatgataagcttggagatccaataattagtcgtgaacatattttaacttttaattggcttaatgtaatgcagcttgattggatagatgaaaatctatctagattaaatgattttttacaaggtatgtttagaggtgttggaataaaattagtagattttaaagttgaatttggcttcactcatgaaagtgaaaaaactaagattatattagctgatgagataagccctgacacatgcagattatgggatgctttaacagataaaaaacttgataaagacagatttagaaaagatttaggagatcttattcctgcgtatacagaagttgcaaaaagacttggtatacttcatgagcaatcaaatgtttctgctgttaatgttacccaactttcatcagtaaaaagaaagaaaaaatgaa

SEQ ID NO: 312616 - DNA, 562 bp, Unknown
  Bacterial polypeptide expressing nucleotide sequence isolated from the Sargasso Sea
tccaattgaggctgttgtgagaggatatctcataggctctggatggaaggactatcaagcaactggctctgtgtgcgggattgaattagaagaagggctccaaatggcgcaaaaattaccagaaccgatttacacacctgcaacaaaagctgaggtaggtgaacacgatgaaaacatttcttatgaaaaaacggtcgacttaatcggcgaagagctcgcaagcagagtgaagcaaattgcaattgatatatataactttggagtgaatcacgctaaagaaaaggggattatcattgcagataccaagtttgaatttggattagacagtgatggtgagctttatctcattgatgaggttctcactccagactcctcaaggttctgggccattgagaattatgagcttggatcaagtccgccaagctttgacaaacaatatcttagggattatctagagacactggattgggataaaacggcaccaggacccgaattgcctcaagaagttattgataatacagcgtcaaaatataagaatgcattcaaacaaatcgctgagtaa

SEQ ID NO: 312617 - DNA, 745 bp, Unknown
  Bacterial polypeptide expressing nucleotide sequence isolated from the Sargasso Sea
aatgaataaaggaaaaaaactttacgaaggaaaagccaaaataatatacgaaactaaagaaaaaggtttggctattcagcactttaaggacgacgccacagcttttaacaataaaaaaaaagctactgtagaaggtaaaggtgtactaaacaatcgaatttcagaacatatattaaataacttaaaccaagttggtattaaaacgcacctggtaaaaaggttaaatatgcgtgagcaattaattaaacttgttgaaattattccaatagaagtaattgtgagaaacattgcaactggatctttaacaaaaagactcggtataacagacggaacagtcttagataagcctttgttagaattttgttataaaaaagatgaactagatgaccctttaattgcaaaggaacatatatttgcttttaattgggcaacaaaagaagagatagaagctattgaggaaatgacttttagaataaacgactttatgtccggtatgttcagaggaataggaattaaattagtagattttaaattagagtttggtcgaatatggattgataacaataaggaagtcatccttgctgatgagatcagtccggatacgtgtagactatgggatataaaaagtgaaaaaaaattagacaaggatagatttagaaaagatttaggaaatataatccaagcatatcaagaggttgctaggagattaggtatagttcctgaaacaacaaacgtcagtaaagtt

SEQ ID NO: 312618 - DNA, 784 bp, Unknown
  Bacterial polypeptide expressing nucleotide sequence isolated from the Sargasso Sea
tgaaaaaaggaaaaaactttacgagggaaaagcgaaaataatatacgctacatcggataaaaatttagtaattcaatattttaaagacgatgcaactgcatttaataatcaaaaaaagagtacgattgagggcaagggtgtactaaataacagaatttcagaacatatacttttaaatttaactcaaataggaatcaaaaatcatttggtgaaaagacttaatatgagagaacaacttgtaaaacttgttgatattatacctatagaatttattgttagaaacatagctactggatcattgacaaaaagattaggaattgaagatggcactatattagagagacctctaatagaatattgtcttaaggatgacaaacttggagatccaaacataagtagagaacatattctcacttttaattggctaaatgaaaaacaattaagattaattgatgaaagtttaaaacgtttaaatgatttccttctaggtttatttagaggagttggaattaaattggtagattttaaagttgagtttggtttaactcatgaaagtaataaaaatgaaataattttagcagatgaaattagccctgatacatgcagattatgggactcaataactgaaaaaaaacttgataaagatagatttagaaaagatttaggtgatttaattccagcttatactgaagttgcaaaaagattaggcattcttcatgaacaaacgaatgtaactgcagttaatgtaactaaattatcatcagttaaaaaaaaaaataaatga

SEQ ID NO: 312619 - DNA, 349 bp, Unknown
  Bacterial polypeptide expressing nucleotide sequence isolated from the Sargasso Sea
catgcctgaggaactactttacgagggaaaagccaaaaagcttttcatcacagaggatccgcaaattttgcgggttgagtataaagacgatgcgacggccttcaacgggaaaaaattcgaccgtttgagagataaaggacgcctgaacaacgcgatcacggtttttttcttcgaacacctcgatacaaaagacattccgagtcattttgtttgcaagatttccgaaaccgagcagttggtccgaagggtgaaaatcatccccctggaagtggtggtccgcaatgtggcggcaggatctcttagtaaacgcatcggttgggaggaaggaaaggaacttcctcatccgatt

SEQ ID NO: 312620 - DNA, 425 bp, Unknown
  Bacterial polypeptide expressing nucleotide sequence isolated from the Sargasso Sea
ttacaaaaaagatgaacttgatgatcctttaattgcaaaagaacatatctttgcttttaattgggcaacaaaagacgagataaaatctattgaagatatgacttttagaataaatgactttatgtccggtatgtttagaggggttggtataaaacttgtcgattttaaattagagtttggaagaatatggcatggagacaaaaaggaagttattcttgcagacgaaataagtcccgatacttgtagactttgggatgttaaaagtgaaaaaaaattagataaagatagatttagaaaagatcttggaaatattattcaagcatatcaagaagtagccagaaggttgggcatagtgcccgaaacaaccaacgtaagcgaagtaaactttaataaacctacatcaataagcattaagaaaaaataaa

SEQ ID NO: 312621 - DNA, 730 bp, Unknown
  Bacterial polypeptide expressing nucleotide sequence isolated from the Sargasso Sea
atgaataaaaaatatgatttgatttatgaaggcaaagcaaaaaaagtatttactcataatgatgtagaaaaagtaagaattgaattcaaggatgatgctacagcttttaatgccttgaaaaaagaaaaatttgaaggtaaaggcaaacttaattgtttaataagtgcaagaatttttgagattcttattaagaagaatattcccactcattttattgaacttgaaaatgaaaatacaatgattgcaaaaaaaataaaagtaattccattagaaatcgttctaagaaatactgcttttggttctttgtgcaaacaaacaactattaaacctggaactttgttatcaaaaccattaattgatatctatcttaaaaatgatgaacttaatgatccccttctcacaaaagatagaattgaattaatgaatatattaagctctcatgatttagagttaataataaatttaaccttaaaaattaatgtaatcttgaaaagtttttttaaaaatattcaacttcaacttgtggatttcaaattggaatttggttatgattttaaaaataatattcttctaggagatgaaataagtcctgacaattgtagattgtgggatctagaccaaaaaaatgatacaattgtaagtcttgataaagatagatttaggaatgatttaggtggtttaattgaagcttatagtgaaattaaccgaaggattaacgattatctttaac

SEQ ID NO: 312622 - DNA, 733 bp, Unknown
  Bacterial polypeptide expressing nucleotide sequence isolated from the Sargasso Sea
aaagaaaaaggattggctattcaacactttaaagatgatgccaccgcttttaataaccaaaaaaaagcaaacgtagaaggaaaaggtgttctaaacaatagaatatcagaacatattctgcaaaatttaaaccaagccggtataaaaacccatttagttaaaaggttaaacatgagagaacagctcgtaaagcttgtagaaattattcctattgaagttataataagaaatatagcaacaggctctctaactaagaggcttggaatagctgatggaactgttttagaaaaacctttacttgaattttcttacaaaaatgatgaattaggtgatccacttgttgctaaggaacatatacttgcgtttaattgggctacaaatgatgagcttgatattattgaagagatgacttttaggattaatgattttatgtcgggaatgtttagaggggttggtattaaacttgttgatttcaaattagaatttgggagaatttgggtaaatgataaaaaagaagtaattcttgctgatgaaattagtccagatacttgtaggctttgggatgttaaaagtgaaagaaaattagacaaagatagatttagaaaagatcttggaaatattattcaagcttatcaggaagtagctagaagattaggaataatgccggaaaccacaaatataagcgaagtaaactttaaaaaacctacatcaataaatattaaaaaaaaataaa

SEQ ID NO: 312623 - DNA, 448 bp, Unknown
  Bacterial polypeptide expressing nucleotide sequence isolated from the Sargasso Sea
tgttataaggaatagggctactggatcaatatgtagaagactgggaacagaagatggtttaatccttgacaagcctctatttgaattcttcttaaaagatgatgatttaggtgatccattaattaatagaaaccatatagtttcatttggatgggcaaaagatgatgagctagatgaaatgatcagtacttctcataaggttaatgaacttttaacaaaactttttgctgattcaggaatgatattggttgattttaagcttgaatttggtgtctctaatggaaaaatcttgctaggcgatgaatttactcctgatggttgcagattgtgggatgatgaaactcttgaaaagcttgataaagatagatttagacaagatttaggagatgttatcgaatcctaccatatggttgcacatagattaggaatgcaaataaaagttgactaa

SEQ ID NO: 312624 - DNA, 268 bp, Unknown
  Bacterial polypeptide expressing nucleotide sequence isolated from the Sargasso Sea
tgtagactttaaattagagtttggaagactgtggcaaggagacaaaaaggaagttattcttgcagatgaaataagtcctgacacttgcaggctttgggatgttaagagtgaaaaaaaattagataaagatagattcagaaaagatcttggtaatattattcaagcatatcaagaagttgccagaagattaggtatagtacctgaaacagctaatattagtgaagtaaacttcaagaaacctacatcaataaaattcaaaaaaaaataa

SEQ ID NO: 312625 - DNA, 793 bp, Unknown
  Bacterial polypeptide expressing nucleotide sequence isolated from the Sargasso Sea
atgaataaaggcaataaattatacgaaggtaaagcaaaaataatttatgaaactaaagataaacatttggttattcagcattttaaagacgacgcaactgcatttaataatttaaaaaaagctaaagttgagggcaaaggagtcttaaataatagaatttcagaatatattctttcaaacttatctcagtgtggaattaagactcatttaataaaaagattgaatatgagagaacaattaatcaaaaaagctgaaatttttcctatagagtttattgtaaggaacatagccacagggtcattaacaaaaagattaggaatatctgaaggtacaatattagaaaaaccgctattggaatactgttttaaaaaagatgaattaaatgatccacttgtttcgaaagaacatattttttcatttggctgggcgactgaagaagaaattaaaacaattgataaaatgacactcagaattaacgatattttgactggtatgtttagagctataggaataaaacttgtagatttcaaaattgagtttggaaaagcttggaacaaagatacagataagaaagaaattgttttagctgatgaaatcagcccagatacgtgtagactgtgggatgcaaaaactgaaaaaaaattagataaagatagattcagaaaagacctaggaaatatcattcaagcttatcaagaagttgcaagaagacttggtattatgccagaagaaactaacataagtgaagttaatttcggaaaaacaattccaattaaatttaaaaaaaaataat

SEQ ID NO: 312626 - DNA, 637 bp, Unknown
  Bacterial polypeptide expressing nucleotide sequence isolated from the Sargasso Sea
catgacgcccgatcacggagagctgctttacgaaggcaaggccaagcgggtgttcgccagcatggatcccgaccaggtgctggtggagttcaagaacgacgccaccgccttcaatgccaagaagaaagcccagctggacgacaaaggtcggctgaactgccagatctcagcaaggttgttcgagctgctcgagcgtgagggggtaccgacccattactgcggtctggccggggagacctggatgctggttcgtcgggtggagatcattcctctggaggtggttttgcggaacatcgccacaggatcgctgtgtcgtcagacgccgatcacggagggcacagctatcgaacccgcccttctggatctttattacaaggatgattccctgggcgatccgctgatcacagaggcgcgcgtgcagctgttgggggtagccgattcggcgcggctgtcagcgattgaacaattggcccgccgggtgaatgccacgctcctgcggttttttgaagagcttgatctgccactggtggatttcaagctggagttggggctggcatcggatggaacactcctgctcgccgacgagatcagtcctgacacctgcagggctctgggatcgccgcaacagcaatgccga

SEQ ID NO: 312627 - DNA, 787 bp, Unknown
  Bacterial polypeptide expressing nucleotide sequence isolated from the Sargasso Sea
atgaaaaaaggtaaaaaattatacgagggtaaagcaaaaatcatttatgcctcttctgataaaaatttagttatccaatattttaaagatgacgctactgcttttaataatcagaaaaaaagtaccatagagggaaaaggtgtattgaataatcgtatttcagaatacatactttctaatctgtctcaaataggaattaaaaatcatttagtaaaaagattaaatatgagagaacaattaatcaaattggtagaaattattccaattgagtttgttgtgagaaatgttgctaccggttctttaacgaaaaggcttggaattgaagatggaacggttcttaaagaacccctaattgaatactgtttaaaggatgacgaacttggagatcccttaatagcagaagatcatatctatgcttttgagtgggcctcaaaaaaagaaattgaaaaagtaaaaaaaatgatcttaagaattaacgatttcatgattggtatgtttagaggcgttggtatcaagttgatagactttaaacttgagtttggaagaataaaaataaacggtaaaaatgaggttattttagctgatgaaattagtccagatacttgtcgattatgggactctgttacagaaaaaaaattagataaagatagattcagaaaagatttaggagatttaataccagcatacactgaagtcgcaaaaagactgggaattttacatgaactatccaatgttactgcggtcaatgttacaaaattatcttcagtaaaaaaaaagagtaaatgaa

SEQ ID NO: 312628 - DNA, 520 bp, Unknown
  Bacterial polypeptide expressing nucleotide sequence isolated from the Sargasso Sea
tatgtcgcggcgaagacaaatatacgagggcaaagccaaagtgctgtttgaaggcccagagcccggcactctggtgcagtacttcaaggatgatgcaaccgccttcaataataaaaagaaggggactattaccggcaagggggtcttaaacaaccgaatctctgaacacttaatgacaaaattagccgcaattgggatacctactcattttgttcgccgccttaatatgcgggaacaacttgtaaaagaagttgagatcatacccatagaagttgtcgtgagaaatgtagccgcgggatccttagctaaaagatttggtcttgaagaagggacacctctaccaagatctatcgttgaatactactacaaatctgatgaactagatgacccaatgataatggaagagcatatcacagccttcggctgggcatcaccaacagaacttgatgaaatattagccatgacacttcggataaatgattttctctctggattattcctggggctagaaatcaagctc

SEQ ID NO: 312629 - DNA, 703 bp, Unknown
  Bacterial polypeptide expressing nucleotide sequence isolated from the Sargasso Sea
atgaagagtgcgttattagaaacaaaactttctcttccaaataggagatctgggaaagtaagagatttatatgatgtggatttggggtcagaaaaggctctgttgattgttgctactgatcggattagtgcttttgatgtggtgatgcagaatggctttcctgggaaaggtatcgttctcactcagatttcaaaattttggtttgattactttggagatcgcttttcgcaccatttgattagtacaaatgttgatgatgtacctggattgaatgctgaggaaaaagacgctttggatggtcgaatcatgctttgtcgtaagactgaagtggtgccgatcgaatgtattgctaggggctacataacaggaagtggttggaaagattatcaaacttctggcgaggtttgcggtatcaagttgccgacgggcttgagaaatagcgataagttagacgagcctttgtttacaccttcgactaaggcggatactggccacgatgaaaacatcagttttgaggaaggaaccaatttagtgggcctcgatctaatggagtggcttaagaaatctacgctctcgctttataaggaggctagagactacgccttggacagaggaatcatactggcagatacgaagtttgaatttggacaattagcagatagcgacgagcctttattgattgacgagatttttactccggaca

SEQ ID NO: 312630 - DNA, 247 bp, Unknown
  Bacterial polypeptide expressing nucleotide sequence isolated from the Sargasso Sea
aatgaaaaaaggtaaaaaattatacgagggtaaagcaaaaatcatttatgcttcttctgataaaaatttagttatccaatattttaaagacgacgctactgcttttaataatcagaaaaaaagcaccatagagggaaaaggtgtattgaataatcgtatttcagaacacatactttctaatctgtctcaaataggaattaaaaatcatttagtaaaaagattaaatatgagagaacaattaatcaaa

SEQ ID NO: 312631 - DNA, 491 bp, Unknown
  Bacterial polypeptide expressing nucleotide sequence isolated from the Sargasso Sea
aatgaataagggtagcaagttatacgaaggtaaagccaaaattatctatgaaacaaaagataaagatttggtaattcaacattttaaggatgatgcaaccgcttttaataacttaaaaaaagcaaaagttgaaggcaagggtgttttaaataatagaatttctgaatatatacttactaatttagctcaatgcggaattaaaaatcattttatcaaaagactaaatatgcgtgaacaattaataagaaaagctgaaatttttccaatagaatttattgtaagaaatattgctactggctcattaaccaaaagattagggatacctgagggaacagttctagaaaaaccattattagaatactgttacaaaaatgatgaattgcaagatcctcttatatcaaaggatcatattttttcttttggttgggcatcaaaaaaagaaatagaagaaattgatataactacgcttaggataaatgaccttttatcag

SEQ ID NO: 312632 - DNA, 322 bp, Unknown
  Bacterial polypeptide expressing nucleotide sequence isolated from the Sargasso Sea
ttaagaattaacgatttcatgattggtatgtttagaggcgttggtatcaagttgatagactttaaacttgagtttggaagaataaaaataaacggtaaaaatgaggttattttagctgatgaaattagtccagatacttgtcgattatgggactctgttacagaaaaaaaattagataaagatagattcagaaaagatttaggagatttaataccagcatacactgaagtcgcaaaaagactgggaattttacatgaactatccaatgttactgcggtcaatgttacaaaattatcttcagtaaaaaaaaagagtaaatgaa

SEQ ID NO: 312633 - DNA, 389 bp, Unknown
  Bacterial polypeptide expressing nucleotide sequence isolated from the Sargasso Sea
cgtcaaacgacgatcgcggagggcacccgcatcgatccagcgttgcttgacctctattacaaagatgatgatctgggggatccgctgttgacggacgctcgggtgcggttgatggggctggtggatgacgcccgtctgtcagcgattgaacaactggcgcggcggatcaatggggtgctgcagccgtttttcaacgatcttgagctgcagttggtggatttcaagcttgaacttggcctcaacagggcgggtgaattgctgctggccgatgagatcagcccagacacctgccgcttctgggaccagcgcagccgcgatgccaacgatcggatcctggataaggaccgcttccgaaaggatctcggtggcgtgatggaggcctacgggga

SEQ ID NO: 312634 - DNA, 337 bp, Unknown
  Bacterial polypeptide expressing nucleotide sequence isolated from the Sargasso Sea
tttattaaagaacagtgtttacgtataaatgattttttacaaggaatgtttataggtattaatattaaacttgttgatttcaaattagaatttggaaaaagaaagtcagatggtaaaataatacttgcagatgagattagtccagacacctgtagactgtgggatgcggatacagagaaaaaattagataaagatagatttagaaaaaatttaggtaatatagtagaagcatatcaagaagtagctagaagattaggaatattgcatgaacaaacaagcaatgttagaccaattaaatttcctaaacccactgcggttaaaattaaaaaaaaataat

SEQ ID NO: 312635 - DNA, 660 bp, Unknown
  Bacterial polypeptide expressing nucleotide sequence isolated from the Sargasso Sea
aatgaaaaaaggtaaaaaactttatgagggaaaagcaaaaataatttatgctacgtcagataaaaaatatgtaattcaatattttaaggacgatgctacagcttttaataatcaaaaaaaatctaaaataaatggtaagggtgttttaaataatagaatatcagagcacattttagaaaatttaaatcaaataggtattaaaactcattttgttaaaagactaaacatgagagaacaagtcatcaaactcgtagaaattatccctattgaatttattgtaagaaatattgcctcaggttctattactaaaagacttggaattgaagatggtaccgtattaaaaagtcctctagttgaatattgtcttaagaatgataacttaggagatccattaattgcagaagaacatatctacgctttcgattgggcaacaaaaaaagaaattgaaaaagtaaaaaaaatgattttaagaattaatgattttatgatcggaatgtttagaggtgttgggattaaactggtagattttaaacttgaatttggaagagcaaaagtaaatggtaaaaatgaggtaatccttgctgacgaaattagcccagatacttgcagactatgggatgctttaactgaaaaaaaattagataaagatagatttagaaa

SEQ ID NO: 312636 - DNA, 536 bp, Unknown
  Bacterial polypeptide expressing nucleotide sequence isolated from the Sargasso Sea
aatgaacaagggaaaaaaactttacgagggaaaagctaaaattatctacgaaacaaaggagaaaggtttagctattcaacacttcaaagacgacgcgactgcttttaataataaaaagcaagcaactgttgagggcaaaggggttttgaataatagaatttcagaacatattttaaataatttaaatcaagttggtattaaaaatcatttaataaaaagattaaatatgagggaacagttaattaagcttgttgaaattatacctatagaggtaatagtgagaaatattgctacaggctccctgactaaaagacttggtataactgatggaactattttagaaaaaccgttacttgagttttgttataaaaaagacgaacttgatgatcctttaattgccaaagaacacatttttgcatttaattgggcaacaaaagatgaaatcaaaactattgaagaaatgactttcagaataaacgattttatgaccggaatgttcaggggcgttggaattaaacttgtagattttaaattag

SEQ ID NO: 312637 - DNA, 696 bp, Unknown
  Bacterial polypeptide expressing nucleotide sequence isolated from the Sargasso Sea
ccacagctttcaataaccaaaaaaaatctaaaattgatggcaagggtgttttaaataacagaatatcagagcatattttagaaaatttaaatcaaataggtattaaaactcacttggttaaaagattaaatatgagagaacaagttgttaaaattgttgaaataattccgatagaatttattgtaagaaacattgcctcgggttcaattacaaaaagacttggaattgaagatggtactgtattaaaaaatcctttgattgaatattgtctcaagaatgacaagctgggagatccattaattgctgaagaacatatatttacttttgattgggcaactaaaaaggaaattgaaaaaataaaaaaaatgattttaagaattaacgattttatgattggtatgtttagaggtgttggaataaaacttatagattttaaacttgaatttggaagattaaagatgaatggtaaaaaggatataatacttgcagatgaaataagcccagatacatgtaggctatgggatgctgtaacagaaaaaaaattagataaagatagatttagaaaaaaccttggaggtttaatacctgcttatacagaggttgcaaaaagacttggcattttacatgaacaatcaaatgtacagaactctaatgtcacaaatctaagtgcatttaaaaagaaattaaaaaaatgaa

SEQ ID NO: 312638 - DNA, 478 bp, Unknown
  Bacterial polypeptide expressing nucleotide sequence isolated from the Sargasso Sea
aatgaaaaaaggaaaaaagttatacgaaggcaaagcaaaaatcatttacgcaacaaatgataaaaatttagttatacaatattttaaagacgacgcgacagcattcaataatcaaaagaaaactacaattgaaggaaaaggtgttctaaacaatagaatatctgaacacattctctcaaatttatctcaaataggaattaaaaatcatttagttaaaagactaaatatgcgcgaacaaatcattaagttagttgagatcattccaatagaatttattgttagaaatgttgcaacaggatctattacaaaaagactaggtatagaagatggaactgttttaaaagaaccattaattgaatactgcttaaaagatgacaaattaggcgaccctctaattgcagaagagcatataatagcatttgaatgggctactaaaaatgaaatagatacagccaaaaaaatgattttaagaattaat

SEQ ID NO: 312639 - DNA, 578 bp, Unknown
  Bacterial polypeptide expressing nucleotide sequence isolated from the Sargasso Sea
agtaaaaagattaaatatgagggagcagcttattaagcgtgtagaaattatacctattgagtttgttgttcgtaacattgccactggatctcttacaaatagactcggtatcgaagaaggtactgttttagactctacattaattgagtattgcttaaaagatgacaagctaggcgatcctcttatttctaaggaacatatttatacttttaaatgggcaactagaagagaaatagagaagattgatagacaactattaaggattaatgacttcttagtaggtctgtttaggggaataggaattaaactggtggatttcaaagttgagtttggaagatacaaaaataatagtaaaaatgaaattctattagctgatgaaataagtcctgatacttgcaggttgtgggacatgaatactgaaaaaaaacttgataaggataggtttagaaaaaatttaggtaatctcatagaagcttatcaagaggtcgcaaaaagactaggaattttacatgaacaatctaatgttagaccactaagatttccaaaaccaaaagctgtaaaaataaaaaataaatgaa

SEQ ID NO: 312640 - DNA, 373 bp, Unknown
  Bacterial polypeptide expressing nucleotide sequence isolated from the Sargasso Sea
gcatattcttgaattcaattgggcatcgccatatgagcttgatgaaatatctggaatggcatttaaaattaatgattttttaactggactattttatggggtaggaataacactggttgattttaaattagaatttgggcgtcctctagacaaaggtgataataagatactcttagcagatgaaataagtcctgactcttgtaggctttgggatgatctagataatcgaaaactagacaaagatgtctttcggcttgatcttggcaatatttctgaaacatatttggaagtagcccaaaggtttaatctaaaccctaaaagaacttcttctaatgccaaggttttaaaagacaacgtcttcagtatggaataa

SEQ ID NO: 312641 - DNA, 328 bp, Unknown
  Bacterial polypeptide expressing nucleotide sequence isolated from the Sargasso Sea
aatgattcttagaattaatgacttcatgattggtatgtttagaggaattggtattaaattaattgattttaaattggaatttggaagaataaagatcaatggaaaaaatgaaataattcttgctgatgaaataagtcctgatacttgcaggttgtgggatgcggtaactgataaaaaactagataaagataggtttagaaaagatttaggtgatttaataccagcttatacggaagttgcaaagagattaggaattcttcatgaacaatcaaatgtgacagttgttaatgtaactaaattatcgtcaatcaaaaaaaaaagtaaatga

SEQ ID NO: 312642 - DNA, 521 bp, Unknown
  Bacterial polypeptide expressing nucleotide sequence isolated from the Sargasso Sea
aatgaataagggaaaaaaactctacgaaggaaaagcaaaaatcatctatgaaaccaaagaaaaaggtttagctattcagcactttaaagatgatgcgactgcttttaacaatcaaaaaaaagccaacattgaaggaaaaggggttttaaataatcgaatttctgaacacatattgcaaaatttaaatcaatctgggatcaaaacacacttggttaaaaggttaaacatgagagaacagttgattaagcttgttgagatcataccaatagaatttatagttaggaatgtagcaacaggttctttaacaaagagacttggaatccctgatggaaccatattggaaaaacctttgctagaatattgttacaaaaatgatgaattagaagatcctctaatagcggaagaacatattttagcattcaattgggcaaccaatatggaattaaaaatcataagaaacatgactctaaggattaacgattttatgacaggaatgtttagaggaattggtattaagcttg

SEQ ID NO: 312643 - DNA, 569 bp, Unknown
  Bacterial polypeptide expressing nucleotide sequence isolated from the Sargasso Sea
aatgaaaaaaggaaaaaaattatacgaaggtaaagcaaaaataatttttgcaacgagtgataaaaacctagtcatccagcacttcaaagatgatgctacggcttttaacaaccaaaaaaaagatgtaattgatggtaaaggaattttaaataatagaatttcagaacatattcttacaaatttaaatcaagtaggaattaaaaatcacttagtaaaacgtcttaatatgagagagcagctaattcaacatgttgagataataccaatagaatttattgtacgaaatatagcaacgggttcattaactaaaagactaggtattgaagacggaacagtccttgagtatccgctcgttgagtattgtttaaaaaatgatgaattgggtgacccacttatcagtaaagaacatatcatgacatttaaatggatggatgattttgaaattgattttgtgaataacgaattagcaaggataaatgattttcttcaaggcatgttcagaggtgtcggtattaaattggttgattttaaagttgaatttggaagattagaaaaaaatggaaaaaaag

SEQ ID NO: 312644 - DNA, 316 bp, Unknown
  Bacterial polypeptide expressing nucleotide sequence isolated from the Sargasso Sea
tatgtcgcggcgaagacaaatatacgagggaaaagccaaggtgctgtttgaagggccagagcccggcactcttgtgcagtatttcaaggatgacgccacagccttcaacaataaaaagaagggaactattaccggcaaaggtgtcctgaataatcgaatctccgaacacttgatgacaaaactaacggcaattgggatacccacccattttgttcgccgccttaatatgcgggaacaactcgtaaaagaggttgagatcattcccatagaagttgttgttaggaacgtagctgcaggatccatagccaaaagattt

SEQ ID NO: 312645 - DNA, 787 bp, Unknown
  Bacterial polypeptide expressing nucleotide sequence isolated from the Sargasso Sea
aatgaataaaggtaaaaaattatacgaaggtaaagctaaaattatctacgaaactaaagaaaaaggacttgccgttcagcattttaaggatgatgcgactgcttttaataacaaaaaaaaagctaccgttgaagggaaaggagtcctaaataacagaatatcagagcatattttaaataacttaaaccaagttggaataaaaactcacttaataaaaagactgaatatgagagaacaattaataaagttggttgagattatacctattgaggtaattgtaagaaatatagctacgggatcattaactaagagactgggtattactgacgggacgattttggaaaaacctcttttggaattttgttataagaaagacgaattagatgatcctttgatagctaaggaacatatatatgcttttaattgggcaacaaaagatgaaattaaaactatagaagaaatgactttcagaataaatgattttatgtcaggcatgttcagaggcattgggataaagcttgttgattttaaattagagtttggaagactttgggagggtgataaaaaagaagttattctcgcagacgaaataagcccagatacatgcagactctgggatattaaaagtgaaaaaaaattagataaagatagatttagaaaagatcttggaaatataattcaagcataccaggaagttgctagaagactgggcatagttcccgaaacatcaaatgtaagcgaagtaaactttaagaaacctacatcaataaatattaagaaaaaataa

SEQ ID NO: 312646 - DNA, 676 bp, Unknown
  Bacterial polypeptide expressing nucleotide sequence isolated from the Sargasso Sea
aatgtcgcaaagcaaaactctatatgaagggaaagcaaagaaaattttaaaaggaccttctaaaaatactcttattcaagtttttaaagatgacgctacggcttataacaaaaaaaaacataagatttttagcggtaaagggattctaaataatctaatctctgaacatataatggaacatttaatgactaagggtatagaaactcacttgaaaaaaagactaaataatcgtgaacagctaattaaaaaatgtgagattattccaatagagtttgttgttagaaatatagtcgctggatcaattgcaaaaaaacttggattaaaagaaggcactaaattgaaaaaacctcttcttgaatactattataaaaaagacagtttggatgatccgatgatttcaagagatcacgttgaagcatttggatgggcaacaaaaactgagcttaaaaaaattgataagatatcaaccaagataaataaaatattaagcagtctattcattaagaaaaagattgtactagtagatttcaaaattgaatttggaagattgacctcaaatcccaaaaagattgtactcgctgatgagattagtcctgactcatgtcgtctttgggataaaaaatctaaaaagaagttggataaagatgtgtttaggcgaaatcttggaagtctaatc

SEQ ID NO: 312647 - DNA, 262 bp, Unknown
  Bacterial polypeptide expressing nucleotide sequence isolated from the Sargasso Sea
acttctcataaggttaatgaacttttaacaaaactttttgctgattcaggaatgatattggttgattttaagcttgaatttggtgtctctaatggaaaaatcttgctaggcgatgaatttactcctgatggttgcagattgtgggatgatgaaactcttgaaaagcttgataaagatagatttagacaagatttaggagatgttatcgaatcctaccatatggttgcacatagattaggaatgcaaataaaagttgactaat

SEQ ID NO: 312648 - DNA, 583 bp, Unknown
  Bacterial polypeptide expressing nucleotide sequence isolated from the Sargasso Sea
atgaatgataatcttgacttgatttacgaagggaaagctaaaaaaatatttactcatgatgactcagataaagtaattattgaatttaaagatgatgcaacagcttttaatgcactaaaaaaagcaaaatttgaaggtaaaggtaaactaaattgccaaataagttcgaaaatttttgagctactaatcaaaaacaatattcctactcactatcttggacttagaaacgaaaattctatgtttgcacaaaaaattaaagttgtacctttggaaattgttttaagaaatattgcttatggttctctatgtaaacaaacaacaattaaacctggaacaattttagatagtccattaattgatatatatctcaaaaacgataatttaaatgatccattattaactcaagaaagaataaaattattaaatattattgataacaaagaattagatttaataattgatttaactttaaaaataaatagtgttttaaagagcttctttcaaaaaattcaacttaatctagttgattttaaattggagtttggacacaactcaaaaaatgagatcatacttggtgatgaaa

SEQ ID NO: 312649 - DNA, 361 bp, Unknown
  Bacterial polypeptide expressing nucleotide sequence isolated from the Sargasso Sea
ggcaaataaaaaagaaatagaaaaagttaaaaaaatgattttaagaataaatgattttatgattggtatgtttagaggaattggaattaagttaattgattttaaactagaatttgggagagttaaattaaatggaaaaaatgaggtaattcttgcagacgaaataagtccagatacttgtagattatgggactcaataaccgataagaaattagataaagacagatttagaaaagacttaggtgatttaatcccagcttatacagaagttgcaaaaaggctgggtatacttcatgaacaatcaaatgtttcagctgtcaacgtaactcaactatcttcggttaagaaaaaaaataaatga

SEQ ID NO: 312650 - DNA, 277 bp, Unknown
  Bacterial polypeptide expressing nucleotide sequence isolated from the Sargasso Sea
aatgaacaaaggcaaaaaactttacgaaggaaaagctaaaattatttacgaaacaaaagaaaaagggctagctattcaacattttaaagatgatgctactgcttttaataataaaaaaaaagccacagtcgaaggcaaaggtgtgctgaacaatcgaatatccgagcatattttaaataatttaaatcaagtaggtataaaaacccatttagtaaaaagattaaacatgcgagaacaacttattaagtgggtcgaaaatatacctattgaagtgata

SEQ ID NO: 312651 - DNA, 730 bp, Unknown
  Bacterial polypeptide expressing nucleotide sequence isolated from the Sargasso Sea
aatgaaaaaaggtaaaaaactttacgagggaaaagccaagataatttattcaaccccagataaaaatttggtaatccaatactttaaagatgatgctacagcattcaataatgagaaaagaactactattgagggtaaaggagttttaaataatagaatttctgaacatatactttcaaatttatctcaaattggtattgaaaatcatttagtcaaacgactaaacatgagagaacaattaattaaatttgtagagataattccaatcgaatttattattcgaaatatagcaacaggatctttaactaaaagacttggaatagaagatggaaccgtcctaaaagaacctttaattgaatactgtttaaaagacgacaagcttggcgatcctttaatttcagaggatcacatttacgcatttgattgggcaaataaaaaagaaattgaaaagataaaaaaaactatttttagaattaatgattttatgattggaatgtttagaggggtgggaataaaattaattgattttaaattagaatttgggcgaactaaaattgatggaaaaaaagaaataattttggctgatgaaataagcccagatacttgtagattgtgggatagtgcaactgacaaaaaacttgataaagatagatttagaaaagatttaggagatttattgcctgcgtatacagaagttgcaaaaagactggaattctacatgagcaatcaa

SEQ ID NO: 312652 - DNA, 698 bp, Unknown
  Bacterial polypeptide expressing nucleotide sequence isolated from the Sargasso Sea
gcctgaagctggcaccctcgtgcaatatttcaaagatgatgccacagcttttaacgcccagaaaaaagatgtgatcagcggcaaaggtgtgcttaataattacatcagcgaacatatcttgacagcggttggcgatataggcataccgcatcacttcatcacccgcctgaatgaccgcgaacagcttatccgcaaattagagattattccgattgaggttgttgtccgcaatgtcgccgccggctctatctgtccgcgccttggtctcgaggaaggggcgatgctgaacaacacgctggtcgaattctgcctaaaagatgacagcctcggtgacccgatcattgcgcctgaacatattttcacctttggctgggcatcgtcggacgagctggaaatcatggttgaggacactttgcgcatcaatgattttctcacgggcctgtttctggggatcggtgtcaggctgattgacttcaaacttgaatttggccggttttatcatgacccggatgacagcgacgataatgtgatcatgctggccgatgaaatcagcccggataactgccgtttatgggactcacaaaccaacgaaaaaatggataaagatcggtttcggcgtgatctcggtgggttgcgcgaagcctatcaggaaatcgccagccgccttggtgttgaaattccggatctggacaagtaac

SEQ ID NO: 312653 - DNA, 318 bp, Unknown
  Bacterial polypeptide expressing nucleotide sequence isolated from the Sargasso Sea
gtataaatgatattttatcaggtttgtttagagcggtaggaattaagctggtggattttaaattagagtttggtagatattggaataatgaagaaaaaaaaataattttagttgatgagattagtcctgatacctgtagattgtgggatactaaaaatgaaaaaaaactggataaagacagatttagaaaagatttgggtgggttaattgaggcttatcaagaagttgcaaagaggcttggaatcatgccagaaggtactaatatcaaggaaattaaaacaggtatttctaaaacaattaaattaaaaaaaagttaaa

SEQ ID NO: 312654 - DNA, 577 bp, Unknown
  Bacterial polypeptide expressing nucleotide sequence isolated from the Sargasso Sea
gatggtagcaaaattgaaaaaattatatgagggaaaggcaaaaattatttatgccaaaactagtaaggaagtcatagctacttataaaaatgatgctacagcttttaataatttaaaaaagggctcgataaagaataagggtgcaattaataatgctatatcgagttatttatttcaaatattgaatcattgtgatattccaacacactttataaagaaaattgataaaaaatctcagcttttaaaaaaagtagatattattccaattgaagttttggttagaaatttctttgctggctctttatctaaaaagtttggtgtaaaagaaggaacacaattatctgatacgctaattgagtattgtttaaaatctgatgaacttggcgatccccatataagttctgaacatattcttaatttaggtttatgtgattttgatgaattagagttaatagatgaatattctttgagaattaatgacatattaaggtctacgttctattctataggaataaatctagttgactttaaactagaatttggaatttgtaaaaaaactgatgacccttgttttagc

SEQ ID NO: 312655 - DNA, 421 bp, Unknown
  Bacterial polypeptide expressing nucleotide sequence isolated from the Sargasso Sea
atgaaaaaaggtaaaaaattatacgaaggaaaagctaaaatcatttatgcaacaaatgataaaaacttagttatccaatattttaaagatgatgcaactgcattcaacaatcaaaaaaaaactaccattgaaggtaaaggtgttctaaataatagaatatcagaacatatactctctaacctctctcaaataggaattaaaaatcatttagttagaagattaaatatgcgtgagcaaattataaagcttgtagaaataattccgatcgaattcattgtaagaaatgttgcaacaggttcaattactaaaagattgggcattgaggatggtactgttttaaaagaacctctaattgaatactgcttaaaagatgacaagcttggagatccattgatatctgaagagcatattttagcatttg

SEQ ID NO: 312656 - DNA, 621 bp, Unknown
  Bacterial polypeptide expressing nucleotide sequence isolated from the Sargasso Sea
aacatattttatctgcactaaaagatgcaagtattgaaaatcatcttataaaaagacttaatatgagagaacaattaattgatttggttgaaattatacctattgaatttattgtaagaaatattgttacaggctccttaactaaaagactagatatagaagacggtactaggctaaaacgaccattgatagaattttgctacaagagtgataaacttggcgacccattggttgctagagagcatatttatgtatttgaatgggcatctgaagtagaaattgattacataactgaacaatgtatgcgtattaatgattttttactaggcatgtttaaagggataggaattaaattagttgatttcaaacttgaatttggaaaaagaaaatctgatggtaaaattattttagctgatgaaattagtcctgatacatgtagattatgggatgctgacactgataaaaaattagataaagatagatttagaaaagatttaggtgaaattattgaaggatatcaagaagttgcaagaagactaggaatcttgcatgagcaaacaaataatatcaggccaatcaaattcccaaaacccatagcagtaaaaattaagaaaaaataat

SEQ ID NO: 312657 - DNA, 445 bp, Unknown
  Bacterial polypeptide expressing nucleotide sequence isolated from the Sargasso Sea
aaaccttcttttagaattttcatataaaaatgatgaacttggagatcctttagtagctaaagagcatattcttgcttttaattgggcaactgaggacgaacttgaaataattgaaagtatgacttttagaataaatgattttatgtctggaatgtttcgtggtgtgggaatcaaacttgttgattttaaactagaatttggaagactttgggaaaatgaaaaaaaacaagttatactcgcggatgaaataagtccagatacctgcagactttgggatgttaagagcgaaagaaaattggataaagatagatttagaaaagatcttggtaatattattcaagcttatcaggaagtagcaagaaggttgggtattatgcctgaaaccacaaatattagtgaagttaattttaagaagcccacttcaataagtattaaaaaaaaataa

SEQ ID NO: 312658 - DNA, 349 bp, Unknown
  Bacterial polypeptide expressing nucleotide sequence isolated from the Sargasso Sea
aatgaaaaaaggcaaaaaactatacgagggtaaagcaaaaatagtttatgcaagtagcgaaaaaaatttagttattcagcatttcaaagatgatgcgacagctttcaataataaaaagaaatcagtaatagatggtaaaggcattctaaacaatagaatatctgaacatattcttacatatttatctcaagtaggaattaaaaatcatttagtaaaaagattgaatatgagagagcaacttattaaacgtgtagaaattatacctattgagtttgttgttcgtaatattgctactggatctcttacaaatagactaggtatcgaggaaggtactgttttagattctaca

SEQ ID NO: 312659 - DNA, 544 bp, Unknown
  Bacterial polypeptide expressing nucleotide sequence isolated from the Sargasso Sea
aaatcatggcgaagtattaccaattgagtttgttgttagaaatattgctgctgggtcaatagttaatagattgggtttaaacgaagggtctattttaaaaaatccgatagttgagtattattacaaaaatgacgctctaggagatccaattgtaacaatagagcatattaaaattaatgattgggcaaatgaggaagaaattaaaaaggctactaatatttctttacgtataaatgatattttatcaggtttgtttagagcggtgggaattaagctggtggattttaaattagagtttggtagatattggaataatgaagaaaaaaaaataattttagttgatgagattagtcctgatacctgtagattgtgggatactaaaaatgaaaaaaaactcgataaagacagatttagaaaagatttaggtggattaattgaggcttatcaagaagttgcaaagaggcttggaatcatgccagaaggtactaatatcaaggaaattaaaacaggtatttctaaaactattaaattaaaaaaaagttaa

SEQ ID NO: 312660 - DNA, 493 bp, Unknown
  Bacterial polypeptide expressing nucleotide sequence isolated from the Sargasso Sea
ttaactaaaagattagatatttcggaaggaacagtattggaaaaaccattgttggaatattgctataaaaaagatgaacttcaagatcctcttatttcaaaggaacatatttattcttttggttgggcaactgaaaaagaaataaaagaaatagataaaattaccttgagaattaatgacttattacttggtatgtttagaggcataggaattaaattagtagattttaaaattgagtacggtaaagcgtggaataaagataaggaagcaaatgaaattgtacttgccgatgaaattagccctgatacttgtagactatgggatgctaaaacagaaaaaaaattagacaaagacagatttagaaaagatttaggtaatattattcaaggttatcaagaagtagcaagaagattaaatataatgccggaagaaactaatataagtgaggtaaattttggcaaaacaacttcgataaaatttaaaaaaaaataaa

SEQ ID NO: 312661 - DNA, 589 bp, Unknown
  Bacterial polypeptide expressing nucleotide sequence isolated from the Sargasso Sea
aatgaatagtaaattaaagtttatttatgaaggcaaagcaaaaaaaatatttgcttatgaagactcaaataaagtaattattgaatttaaagatgatgccacagcttttaatgcattgaagaaagctaagtttgagggcaaaggggaattgaattgtcttataagttcaaaaatatttgagtttcttatcaaaaacaacataccaacgcattaccttggcctcaaaaataataaatcaatgattgctcaaaaaataaaaatcataccccttgaagttgttttaagaaatactgcatatggttcgctttgtaaacagactactattaagccaggaactgttttggaaccccccttgattgatttttatcttaaaaatgatactcttaatgatccacttctaacaaaagacagaattaatttattgaagataattgataataaagaattagactttataactaatatgacattaaagattaataaacttctcaaaatgtttttctacaatattaaacttgatcttgtagattttaaattagaatttgggtataacacagatggccaaatcgttttaggtgatgagatcagc

SEQ ID NO: 312662 - DNA, 784 bp, Unknown
  Bacterial polypeptide expressing nucleotide sequence isolated from the Sargasso Sea
aatgaaaaaaggtaaaaaattatacgaaggaaaggcaaaagttatttttgctactgataataaagactttgttattcaacactttaaagacgacgcaactgctttcaataaccagaaaaaagcaaaaattgaaggtaaaggcgttttaaataatagaatctcagaacatattttaatgaatttagatcaagttggaataaaaaatcatttagtaaaaagactaaacatgagggagcagctaataaaacatgtcgagattattccaattgaatttattgtaagaaatattgctactggctctcttacaaaaagacttgggatagaagatggcactattttagaaaatccattaattgaatattgtttaaaaaatgatgaactaggagatcctctagtatctaaggaacatatctatacttttaaatggtcaactaaaaaagaaatagaaaaaatcgataaacaactattgagaataaatgactttatggttggaatgtttagaggtgttggtattaaacttgtagattttaaagttgagtttggaagaattaaaaataatggtaaaacagatgttttgctagctgatgagataagtccagacacatgcagattatgggacaataagactgataaaaaattagataaagataggtttagaaataatcttggaaatttaattaatgcatatcaagaagtagcaaaaagattaggtattctttacgagcaatctaacatacaagctgtcaattttgaaaaaccaaaagcggtaaaaaacaaaaaataa

SEQ ID NO: 312663 - DNA, 548 bp, Unknown
  Bacterial polypeptide expressing nucleotide sequence isolated from the Sargasso Sea
tcttataaagaagaatattccaactcattttcttgaacttaaaaatgaaaatacaatgattgcacaaaaaataaaagtaatacctttagaaattgttctgagaaatactgcttatggttctttgtgtaaacaaactactattaaatctggcactgtcctagcaaaaccattaattgatatttatcttaaaaatgatgaactgaatgatcctctaattacaagagatagaattgaattaatgcatatactaagctctaatgacttagatttaataatagatttgactttaaaaattaatttaatcctgaaaagtttttttaaaaatattcagcttcaacttgtagatttcaagttagagtttgggtatgattttaaaaataatatacttcttgcggatgaaataagtcccgataattgtagattgtgggatcttaatcagaaaaatgatacaattgtaagcctagacaaagacagatttagaaatgatttaggtggtttaattgaagcttatagtgaaattaatcgaagaataaacgatttcatttaac

SEQ ID NO: 312664 - DNA, 329 bp, Unknown
  Bacterial polypeptide expressing nucleotide sequence isolated from the Sargasso Sea
attaagaataaatgatatcctattaggtatgtttagggctataggaataaaacttgttgattttaaaattgaatatggaaaaacatggaataaagatactgaaaaaaaagagatagttttagcagatgagataagtccagacacatgcagattatgggattcaaaaactgaaaaaaaattagataaagacagatttagaaaagacttgggaaatattattcaagcctaccaagacgttgcgagaagatttggaataatgcctgaagaaactaatataagtgaagtgaactttggaaaaactatcccattaaaattcaaaaacaaataaa

SEQ ID NO: 312665 - DNA, 388 bp, Unknown
  Bacterial polypeptide expressing nucleotide sequence isolated from the Sargasso Sea
gaacacattcttatatttggatgggcaacaaaaaaagaaattgagaagattaaaaaaattattttaagaattaatgattttatgattggaatgtttagaggtatcgggattaaacttgttgattttaaattagaatttggacgtattaaatcaagcaacaaaaaagacataatattagctgacgaaataagcccagatacttgtagattgtgggattctttaactgaaaaaaaactagataaagatagatttagaaaaaaccttggtggtttaatacctgcatatacggaagttgcaaagagattaggcatattacatgagcagtcgaatgtaaatacttctaatgttaccaacttaagttcatttaaaaaaaaaattagaaaatgaa

SEQ ID NO: 312666 - DNA, 652 bp, Unknown
  Bacterial polypeptide expressing nucleotide sequence isolated from the Sargasso Sea
taaaggagttttaaataatagaatttctgagcatatacttacaaatttatctcaaattggtattgaaaatcatttggtcaaacgactgaacatgagagaacaattaatcaaatttgtagagataattccaattgaatttattattcgaaatatagcaacaggatctttaactaaaagacttggaatagaggatggaactgtattgaaagagcctttaattgaatactgtttaaaagatgacaagcttggtgatcctttaatttcagaagatcatatttacgcatttgattgggctaataaaaaagaaattgaaaaggttaaaaaaactatttttagaattaatgattttatgatcggaatgtttagaggagtgggaataaaattaattgattttaaactagagtttggaagaactaaaattgatggaagaaaagatataattttggcagatgaaataagccctgatacttgtagattgtgggattctgcaactgataaaaaacttgataaagatagatttagaaaagatttgggagatttattgcctgcctataccgaagttgcaaaaagacttggaattcttcatgagcaatcaaatgtttctgcggtaaatgtaactaaactatcctcaattaaaaagaggagaaaatga

SEQ ID NO: 312667 - DNA, 574 bp, Unknown
  Bacterial polypeptide expressing nucleotide sequence isolated from the Sargasso Sea
aatgaaaaaaggaaaaaaactttacgaaggaaaggcaaaaattatatatgcaacttcagataaaaatttagtcattcagtattttaaagacgatgctacagcttttaataatcaaaaaaaatctactatagagggtaaaggggttttaaataatagaatttctgagcatattctttcaaatctttctcaaataggaattaaaaatcacttagttaaaagactaaatatgagagaacaagtcataaagttagtcgaaattattcctattgaatttgtaataagaaatattgcaactggatcgataactaagagactaggaatagaggatggtactgttttaaaagaacctttaattgaatactgtttaaaagatgatgcccttggtgatccattaatagctgaagatcatatttatgcttttgattgggcatcaaaaaaagagatagaaaaaataaaaaaaatgattttaagaattaatgattttatgattggtatgtttagaggtgttggaattaaactaatagatttcaaattagaatttggaagaattaaattgaatggaaaaaatgagata

SEQ ID NO: 312668 - DNA, 268 bp, Unknown
  Bacterial polypeptide expressing nucleotide sequence isolated from the Sargasso Sea
tttaaccttaaaagtaaatttaatcctgaaaagtttttttaaaaatattcaacttcaacttgtggatttcaaattggaatttggttatgattttaaaaataatattcttctcggagatgaaataagtcctgataactgtagattgtgggatctaaaccaaaaaaatgatacaattgtaagcctagataaagatagatttaggaatgatttaggaggtttaattgaagcttatagtgaaattaaccgaagaattaacgattatctttaa

SEQ ID NO: 312669 - DNA, 370 bp, Unknown
  Bacterial polypeptide expressing nucleotide sequence isolated from the Sargasso Sea
tatttatcttaaaaatgatgaacttaatgatcctataattacaaaagatagaattgaattaatgaatataataagctctaaagatttagatttaattatagatttgactttaaaaattaatttaatcctaaaaagtttttttaaaaacattcagcttcatcttgtagatttcaagttagagtttgggtataattttaacaataaaatacttcttgcagatgaaataagtcccgataattgtagattgtgggatcttaatcagaaaaatgatataattgtaagtctagataaagatagatttagaaatgatttaggtggtttaattgaagcttatagtgaaattaatcgaagaataaacgatttcaattaa

SEQ ID NO: 312670 - DNA, 319 bp, Unknown
  Bacterial polypeptide expressing nucleotide sequence isolated from the Sargasso Sea
tctaagaattaacgattttcttcagggaatgtttaaaggcatcggtattaaattggttgatttcaaagtagaatttggaaaaactaaatcagatgaaaaaataatattagcagatgaaataagtcctgatacctgtagattgtgggatagcaaaactgataaaaagttagataaagatagatttagaaatgacttgggagaaataattgaaggttatcaagaagtggctagaaggctaggaattcttcatgaacaatcgaatataagaccaattaaattttccaaaccaacggcagttaaaatcaaaaaaaataaatga

SEQ ID NO: 312671 - DNA, 412 bp, Unknown
  Bacterial polypeptide expressing nucleotide sequence isolated from the Sargasso Sea
aatgaaaaaaggaaaaaaattatacgaaggtaaagctaaaattatttattcttctccagaaaaaaatttagtaattcaacattttaaagatgatgcgacagcttttaataatcaaaaaaaagcgactattgatggtaaaggaattttaaataatagaatttctgaatatattcttcaaaacctaaaccaaatcggtatcaaaaatcaccttataaaaagaattaatatgagagagcagcttataaaattggtagaaataatacctatagaatttattgtaagaaatattgcttcaggctcattaacaaaaagacttggcatagaagacggcactgtattaaatcgtccattagttgaatattgccttaaaaatgatgaattgggtgatcctttaattagtagagagcatatt

SEQ ID NO: 312672 - DNA, 651 bp, Unknown
  Bacterial polypeptide expressing nucleotide sequence isolated from the Sargasso Sea
aaggtgttctaaataataggatttctgaacatattcttttaaatctatcacaaattggaattaaaaatcacctagttaaaagattaaacatgcgtgagcaggtcattaaattagtagaaataatacctgttgaattcatagttagaaatattgctacaggatcaataacaaaaagattaggtattgaagacggtacagttttaaaagaacctttaattgaatactgtttaaaggatgacaaattaggtgaccctataattgctgaagaacatattcttgtttttgattgggctacaaaaaaagagatggaaaaaataaaaaaaatgattttaagaattaatgattttatgattggtatgttcagaggcgtgggtataaaacttatcgattttaaattagagtttggaagacttaaatcgagcgaaaaaaaagaagttatattggcagatgaaattagtcctgacacatgtaggctttgggatggcataacagacaaaaaattagataaagatagatttagaaaagaccttggagatctaattccagcatatacagaagttgctaaaaaattgggtattcttcatgaacaatcaaatatttctgcagtaaatgttacaaaattatctactgttaaaagaaatcgtaaatgaa

SEQ ID NO: 312673 - DNA, 513 bp, Unknown
  Bacterial polypeptide expressing nucleotide sequence isolated from the Sargasso Sea
tagctagaaatattgctacaggatcaataacaaaaagattaggtattgaagacggtacagttttaaaagaacctttaattgaatattgtttaaaggatgacaaattaggcgatcctataattgccgaagaacatattcttgcttttgattgggctacaaaaaaagagatggaaaaaattaaaaaaatgattttaagaatcaatgattttatgattggaatgttcagaggtgtgggtataaaacttatcgattttaagttagaatttggaagacttaaatctagtgaaaaaaaagaagttatattagcagatgaaattagtcctgatacatgtaggctttgggacagcataacagacaaaaaattagataaagatagatttagaaaagatcttggagatctaattccagcatatacagaagttgctaaaagattgggtattcttcatgaacaatcaaatatttctgcagtaaatgttacaaaattatctactgttaaaagaaatcgtaaatgaa

SEQ ID NO: 312674 - DNA, 739 bp, Unknown
  Bacterial polypeptide expressing nucleotide sequence isolated from the Sargasso Sea
gctacaaatgataaagatctagtgattcaatactttaaggatgacgctaccgcattcaataaccaaaaaaaaagcacaattgaaggaaaaggagttttaaacaatcgtatctctgaacacattctctcaaatttatctcaaattggaattcaaaatcatttagtaaaaagacttaatatgagggaacaagttataaagttagtagaaataattccagttgaattcgttgtgagaaatgtagcgactggatcaatcacaaaaagacttggaatagaagatggtacaattttgaaagaaccattaatagaatattgcctaaaagatgatgctctcggtgacccattaattgctgaagaacatatatatgtatttgaatgggcaaaaaaagaagagatagaaaaagtaaaaaaaatgatcctaagaattaatgattttatgattggaatgtttagaggtataggtattaaattaattgatttcaaactagaatttggaagattaaaagttaatggcaaaaatgaaattattcttgctgatgagataagcccagatacttgcaggttatgggactcaataactgaaaaaaaacttgataaagatagattcagaaaagacctaggtgatttaattcctgcatatactgaagttgcaaaaagattgggcattcttcatgaacaatcgaatctctcagcagtaaacgtaacaaaattatcttcaattaaaaaaaaatctaaatgaa

SEQ ID NO: 312675 - DNA, 646 bp, Unknown
  Bacterial polypeptide expressing nucleotide sequence isolated from the Sargasso Sea
tgttctcaataacagaatttcagagcacatccttcagaacttgaatcaggtaggtataaagaatcatttaataaaaagattaaatatgagggaacaattaataaaattggttgagattatacctattgaagtcattgtaagaaatattgctacaggatcactgactaaaagattgggcgtaaccgatggcacaatcttagaaaagccattaatagagttttgttacaaaaaggatgaacttggtgatccactcatcgctaaagagcatatttttgcatttaattgggcaacagaaaacgaaatcaaaacaattgaaaaaatgacttttagagttaatgactttatgtcaggaatgtttaggggaattggaattaagctagtagatttcaaactcgaatttggaagaatatgggatggagatacaaaagaagttattctagcagatgaaataagtcctgatacctgtagactttgggatattaaaagtgagagaaaacttgataaagatagatttagaaaagatctgggaaatattattcaggcgtaccaagaagtggctcgaagattaggaatagttccagaaacaactaatgtaagtgaagtaaactttaaaaaacctacatcaataagtattaagaaaaaataa

SEQ ID NO: 312676 - DNA, 528 bp, Unknown
  Bacterial polypeptide expressing nucleotide sequence isolated from the Sargasso Sea
gatgcaaaagcaagctgagttgtatcgtggtaaagcgaaaaccgtttacagcacggagaatccggatctgctggtactcgaattccgtaacgatacttcagcaggggatggcgcgcgcattgagcagttcgatcgtaaaggcatggtgaacaacaaatttaaccatttcattatgagcaaactggaagaagccggtatcccgactcagatggaagcgctgctctccgataccgaatgtctggtgaaaaaactggagatggttccggtggagtgcgtagtccgtaaccgcgccgctggttctctggttaagcgtctgggtattgaagaagggattgaactcaatccgccgctgtttgatctgttcctgaaaaatgatgcgatgcacgatccgatggtcaacgagtcttactgcgagacttttggctgggtaagcaaaaagaacctcgcgcgcatgcaggaactgacttttaaagccaacgacgtattgaaaaagctgtttgatgatgccggcctgatcctggtcgattt

SEQ ID NO: 312677 - DNA, 739 bp, Unknown
  Bacterial polypeptide expressing nucleotide sequence isolated from the Sargasso Sea
caaactaacgataaaaaatatgttatccaacattttaaagatgatgcaactgcatttaataatcaaaaaaaagcagtgatggatggcaaaggaattttaaataatagaatttctgaacatatattaactcaattgaacaatgttggtatcaaaaatcatttagtcaaacgtttaaatatgagggagcaattagtccaatatgttgaaattatacctatcgaatttattgtaagaaatacggcaactgggtcattaactaaaagattaggtattgaagatggaacagtcttagataatccattaatagagtattgcttgaaagatgatgacctaggtgatcctctagtaagcactgaacatatcttagcttttaaatggatggagaaagatgaattaaaattaattaataaagagttaaatagaattaacgattttcttcaaggcatgtttagaggtgttggaattaaacttgtagattttaaggtggaatttggaagatatgaaaaaaatggaaaaaaagagatcatgctcgcggatgaaataagcccagatacctgtaggctatgggacgtaaatagtgataaaaaattagataaagatagatttagaaaaggtcttggtaatctaattgaggcttatcaagaagttgcaagaagattagatatacttcatgaacaatcaaatataagaccattaaaatacaccaaaccacaagcagtaaagattaaaaaaaaataat

SEQ ID NO: 312678 - DNA, 620 bp, Unknown
  Bacterial polypeptide expressing nucleotide sequence isolated from the Sargasso Sea
aatgaataaaggcaataaactatacgaaggtaaggctaaaattatctatgaaacaaaagataagaatttagttatacagcattttaaagatgatgcgactgcttttaataatttaaaaaaatccaaagttgaaggcaaaggtgtcttaaacaaccgaatttcagagtatattttaactaatttatctcaatgtggaataaaaactcatttggtcaaacgactaaacatgagagaacaattaattagaaaagctgaaatatttcctattgaatttatagtaagaaatattgcaactggatcgttaacaaaaagattagatatttcggaaggaactatcttagaaaaaccattattagaatattgttataaaaaagatgaacttgaagatcctcttatctcaaaagaacatatttattcatttggatgggcaactgaaaaagaaataaatgaaatagataaaattacattaagaattaacgacttgttgatgggattatttaggggtattggaataaaactagtagattttaaaattgagtacggtaaggcgtggaataaagatacagaagaaaaagagattgtacttgctgatgaaatcagtccagatacttgtagacttt

SEQ ID NO: 312679 - DNA, 706 bp, Unknown
  Bacterial polypeptide expressing nucleotide sequence isolated from the Sargasso Sea
agaaattgcagctggtaaagctaaatcaatgtttaccaccaacaatgcaaatgaattaataatggagttcagagatgatgcttctgcatttgatggaaagaaaagagcttctttagctggaaaaggagcagtgaacaatcaatttaatgcatttattatggattaccttggtgctaacggtgtagaacaccatttaattaatctgatggataatactcattctctagtgcacagcttggatatgtttcctatcgagtgcgtaattaggaatagggctactggatcaatatgcagaagactaggaacagaagacggtttaatccttgagaagcctctctttgaattcttcttaaaagatgatgatttaggcgatccattaattaatagaaaccatatagtttcatttggatgggcaaaagatgatgaactcgatgaaatgatcagtacttcgcataaggttaatggacttttaacaaaactttttgctgattcaggaatgatattggttgattttaagcttgaatttggtgtatcaaatggaaagattctgcttggcgatgaatttactccagatggctgtagattatgggatgatcaaactttagaaaaactcgataaagacagatttagacaagatttaggagatgtgatcgaatcatatcatatggttgcacatagattaggaatgcaaataaaagttgactaa

SEQ ID NO: 312680 - DNA, 676 bp, Unknown
  Bacterial polypeptide expressing nucleotide sequence isolated from the Sargasso Sea
atgaaaaaaggaaaaaaattatacgaaggaaaagcaaaaatcatttatgctacaagtgacaaaaatttagttatccaatattttaaagatgatgcaactgcattcaacaatcaaaagaaaactactattgaaggtaaaggtgttttaaataatagaatatctgagcacatcctttctaatctttctgaagttggaattaaaaaccacttagtcaaaagaataaatatgagagaacaactcgttaaacttgttgatataatacccatagaatttattgtaagaaatattgcaactggatcattaactcagagattgggtattgaagatggaactgttctggaacatccgttgatcgaatattgtttgaaggatgataaactaggtgacccattaattagtcgtgatcacatacttacttttaactggcttaatgtaatacaactagatttgataaatgaaaatttaactagacttaatgattttttattaggaatgtttagggctgttggaattaaattagttgattttaaagttgagtttggtttcacacatgaaagtggaaaaaatcaaattgttttagcagatgaaattagtccggatacttgcaggttatgggatactataaccgatagaaagctagataaagataggtttagaaaagatcttggagatttaa

SEQ ID NO: 312681 - DNA, 484 bp, Unknown
  Bacterial polypeptide expressing nucleotide sequence isolated from the Sargasso Sea
catgcctgaggaactactttacgagggaaaagctaaaaagctttttgtcacagaggatcctcaaattttgcgggttgagtacaaagacgatgcgaccgccttcaacgggaaaaaattcgaccgtttgagagataaaggacgtctgaacaacgcgatcacggtttttttcttcaaacacctcgaaacaaaaaacattccgagtcattttgttcgcatgatttcagaaaccgaacagttggtccgaagggtaaaaatcatccccctggaagtggtggtccgcaatgtggtggcaggatctcttagtaaacgcatcggttggaaggaaggaaaggaacttcctcatccgattgtggagttttactacaaggacgatgacctaggtgacccgctccttgcagaagaacacatccgattacttgaattggcttcagaagcgcaaatcaaagagcataagaaaagagggttagcggtcaatgaagcttta

SEQ ID NO: 312682 - DNA, 723 bp, Unknown
  Bacterial polypeptide expressing nucleotide sequence isolated from the Sargasso Sea
aatgaaaaaaggtaaaaagttatacgaaggtaaagctaaaattatttatgctagtaatgataaaaatctagtaattcaacatttcaaagatgatgcaacagctttcaataatcaaaaaaaagatgtcatagaaggtaaaggaattttaaataatagaatttcagaacatattcttacgcaattaagtaatgttggtataaaaaatcatttcgtaaaaagacttaatatgagggaacagcttgttaagttagtggaaattattccaattgaatttgttgttagaaatattgctacaggttctttgacgaaaagattaggaatagaagatggaactgttcttgattatccactggttgaatattgcttaaaaaatgatgacctaggtgatcctcttgtaagtagagaacatatccttgctttcaaatggatggatgtttttgagttagattttatctacgaggaagttagaagaataaatgactttctccaaggaatgtttagaggtgttggaattaaattagtagattttaaagttgaatttggaagatttgaagctgatggtaaaagagaaattatgttagccgatgaaattagtcccgatacctgcagactttgggacatgagaacagataaaaaactagacaaagacagatttagaaataaccttggaaacctagttgaggcttaccaagaggtggcaattaggcttaatatattgcacga

SEQ ID NO: 312683 - DNA, 247 bp, Unknown
  Bacterial polypeptide expressing nucleotide sequence isolated from the Sargasso Sea
ggctgggcgaccctggagcaactggccgaaatgaaggcctactccttcaaggtcaacgaagtactgagcaagctgttcgacgacgccggcctgctgctggtggacttcaagctcgagttcggcctgttccacggcaagatcgtcctgggcgacgaattcagcccggatggctgccgcctgtgggacaaggaaacccgcaagaagaggacaaggaccgcttccgcccaggggctgggcgacgtcatcg

SEQ ID NO: 312684 - DNA, 268 bp, Unknown
  Bacterial polypeptide expressing nucleotide sequence isolated from the Sargasso Sea
tgtggattttaaattggaatttggaagaatatggcaaggagacaaaaaagaagtcattcttgcagacgaaataagtcctgatacttgtagactttgggatgttaagagtgaaaaaaaattagataaggatagatttagaaaagatcttggaaatattattcaagcatatcaagaagtcgctcgaagattgggtatagttcctgagacaactaatattagtgaagtaaactttaagaaacccacatcaataagtattaaaaaaaaataa

SEQ ID NO: 312685 - DNA, 757 bp, Unknown
  Bacterial polypeptide expressing nucleotide sequence isolated from the Sargasso Sea
aaagcaaaaataatatatgctactagtgacaagaatttagtaattcagcacttcaaagatgatgcaacggcctttaataatcaaaagaaagatatcattgaaggtaaaggaattttaaacaatagaatttcagaacatattcttactcagttaagcaatgtaggaataaaaaatcatttagtaaaaagacttaacatgagagaacaactggtaaagttggttgaaattattccaattgaatttattgtaagaaatattgctacaggatctttaacaaaaagattgggaatagaagatggcacggtattggattatccattagttgaatattgcttaaaaaatgatgatttaggagatccattggttagtagagaacatattttagcttttaaatggatggatgtatttgagttagattttatttatgaagaagtaagaagaataaatgattttcttcaaggcatgtttagaggtgttggaattaaattggtagattttaaagtcgaatttggaagaaatgtaagtgatagcaaaagagaaatcatgcttgcggacgaaattagccctgatacttgcagactttgggacatgcgaacagataaaaaactagataaagatagatttagaaataacttgggtaacttagttgaagcttatcaagaagtagcagttagattaaatatattacacgaacaatcaaacataaggccattaacctatcctaaaccaaaagctgtaaaaattaagaaaaaatgaa

SEQ ID NO: 312686 - DNA, 724 bp, Unknown
  Bacterial polypeptide expressing nucleotide sequence isolated from the Sargasso Sea
aaatttagttatccaatattttaaagatgatgcaacagcattcaataatcaaaaaagaactaccattgaaggcaaaggtgttctaaataatagaatatcagaacatatactctctaacctctctcaaataggaattaaaaatcatttgattaaaagattaaatatgcgtgagcaaattataaagcttgtagaaataattccgatagaatttattgtgagaaatgttgcaacaggttcaattacaaatagattgggtatcgaggatggtacggttttaaaagagcctctaatcgaatactgcttaaaaaatgacaaacttggagatccattaatatctgaagagcatattttgacatttgattgggcgtcaaaaactgaaatagataaaattaaaaaaatgattttaagaattaatgattttatggttgggatgtttaggggtgtaggaattaaacttatagattttaaattagaatttgggagaattaaaattgatggaaaaaatgaagttattttagcagatgaaattagtcctgatacgtgcagattatgggacagtattacagaaaaaaagttagataaagatcgatttagaaaagatctgggtgatttaattccagcctataccgaagttgctaaaagattaggtatactacatgaacaatctaatgtttcagcggtaaatgtaactaaattatcttcagttaaaagaaagaaaaaatga

SEQ ID NO: 312687 - DNA, 736 bp, Unknown
  Bacterial polypeptide expressing nucleotide sequence isolated from the Sargasso Sea
agaaaaactttatgaaggcaaggcaaagattttgtactctaccgatgattcctatagcttaatccagcattttaaggatgaagcaaccgcttttaatgcaaaaaaaaaggaggttatagaaggtaagggagttttaaacaattttttgtcagaattttttatgcaaaaacttaattctgttaatgttccaacccactttattagtagattaaatatgcgcgagcaattggtagaaaagtgtgacatcatacctttagaagtagttgtgcgaaatatcgcagcaggctccttatcaaaaagattgggcatagaggaaggtaaacgcttacctagaccattggtggagttttactacaaggatgacagtctaaatgatccactggttactgaaagtcaaataagtacttttgagtgggctacagaaacagaattaggagagatatttgagatagccttaagaacaaatgattttctatgtggccttctttctgcagttaatctgacacttgtagacttcaagattgaaatcggcagaagcttcagatcagaaggcgaaaaacttattatcgctgatgagataagtcctgatacctgtcgtctgtgggactcaaaaacaaaaaaacgtctcgataaagatgtttttagattgaatgaaggtagtatttcaattgcatacactgaagtagcggatagatttgatttattaccaaaaaatgtgagaagagccgtacaatga

SEQ ID NO: 312688 - DNA, 790 bp, Unknown
  Bacterial polypeptide expressing nucleotide sequence isolated from the Sargasso Sea
atgaataaaggaaaaaaactttacgaaggaaaagctaaaattatttacgaaggacccgaaaaaggtactgctatacaacactttaaagatgatgccactgcttttaataatcaaaaaaaatctaccgttgaaggaaaaggtgttcttaataatagaatttctgaacatattttaaataatcttaatcaaattggtgtgaaaactcacttaattaaaagattaaatatgcgcgaacagctagtccgtttggttgatatattgccagtagaattcattgtcagaaatattgctactggatctttgacaaaaaaacttggaattgcagatggtactgttttaaccaagcccttgattgaatatagttataagaatgatgaactaggcgatcctcttattgctagagagcatatattagaatttaagtgggtaaaggatgccaattctttagattttatcaacgctacatgcttaagaataaatgattttatgcaaggaatgtttagaggagtgggaattaaacttgtcgacttcaaacttgaatttggagtagcaaatatcgacggaaaagaaaatattattttagcagatgagataagtccagatacatgcagattgtgggatgtggcaagtgaaaaaaaattagataaagataggttcagaaaagatttaggaaatattattcaagcttatcaagaggtagctagaagacttggaataattcacgaagaagcaaacattagtgaagtcaaatttggtaaacctaaggctgtaaccataaagaacaaataaa

SEQ ID NO: 312689 - DNA, 708 bp, Unknown
  Bacterial polypeptide expressing nucleotide sequence isolated from the Sargasso Sea
gacagaatttctgtctttgataaggttcttccaaatattattcctgaaaaaggtattattcttaatgaaatttcaaatttttggtttaaaagatataataatttaataccaaatcatatcattgattacgatataaacagtcttgaaattagtaaagacgaaattaaagaaattgcacaaagatcaatcacagtaaaaaagcttaagacctttcctatagaagctatagtaagactttatctttcaggaagtgcttacaacgaatatttaaaggatggatgtgtatgcggtattaaattaccaaaaggtcttcgtcaatctgaaaaacttccagagccaatatttacaccatccactaaagctaacgtgggcgatcacgacctaaatattactcatgactcatgcattaatataattggaaaaaataattttgagtttataaaaaaaattagtattaaaatttttaatgatgcttttttatatcttaaagaaagaggtattatattatcggatactaagtttgaatttggttttgactcacaagataatatttttttgattgatgaagttttaacaccagattcatcaagattttggcttgagaaagattataaaatagattgttctccacaaagtttagataaacaatacattagagattatgtaaaattttctggttggacagatgaccaaaatcttcctagtttg

SEQ ID NO: 312690 - DNA, 530 bp, Unknown
  Bacterial polypeptide expressing nucleotide sequence isolated from the Sargasso Sea
agaagcaggcattgcaacgcaagttgaggcgctggtttctgacactgagtctttggttaagaagctcgacatgatccctgttgagtgtgtggtgagaaacttgtctgctggctctttagttcgcagactgggtgtggaagagggcaaagagcttaacccacctattttcgagtttttcttaaagaatgatgcacttcacgatccaatggtaaatgactaccatattttatcatttggttgggcaaccgaagcgcaaattgctgaaatgaaagcattgaccttcaaggttaacagtgttttgaaagcactctttgatgacgcgggtatgttgcttgtagactataaactagagtttggtgtcgacaaagatggcaatatcgtactaggtgatgagttcacaccagatggctgtcgcttgtgggataaagaaacccgtaaaaagatggacaaagaccgctttagacaaggtttgggctctgtagtcgagacctatattgaagtggctgagcgcttaggcttatcgctttaaa

SEQ ID NO: 312691 - DNA, 769 bp, Unknown
  Bacterial polypeptide expressing nucleotide sequence isolated from the Sargasso Sea
atgaaaaaaggtaaaaaactctacgaaggtaaagcaaagattatttttgctacaagtgataaaaataccgttattcagcattttaaggatgatgcaaccgcatttaataatcagaagaaagcaaatatagatggaaaaggaattctaaataatagaatttcagagcacttgctaaaatctctttcagaagttggaattaaaaatcatcttattaagagattaaatatgagagagcaacttgttgaattggtaaatattattccaattgaatttgtaattagaaatattgcaaccggatctttaacaaaaagactgggaattgaagaaggaacagttttagattatccattgatcgagtattgtttaaaagatgataaacttggggacccaataatttctcgtgaacatattttaaattttaaatggcttaatttgctcgaattggacttaattaataaacagtgtttaagaataaatgactatctccaaggtttgtttagaggcattggaattaaattagttgattttaaagtagaatttggaaaaacaaaatcagacgaaacaataatattagctgacgaaataagtcctgatacttgcagactatgggatcaagaaactgataaaaaattagataaagatagatttaggaaagatttaggtaatattgtagacgcctaccaagaggtagctagaaggcttggaattcttcatgaacagtcaaacataagaccaataaaattctctaaaccaacggcagtaaaaataa

SEQ ID NO: 312692 - DNA, 376 bp, Unknown
  Bacterial polypeptide expressing nucleotide sequence isolated from the Sargasso Sea
tttgactggggcttcaaaagatgaaattaaacaaattgataaaatgacattgagaattaacgatattttatcaggtttatttagagggataggtattaaattaatagattttaaaattgaatatggaaaagtttggaataaagataaaagtgaaaacgaaatcgttttggcagatgaaattagtccagatacatgtagactgtgggacacaaaaactgaaaaaaaacttgataaagatagatttagaaaagatttaggcaatataatagagggatatcaagaggtagcacgcagattgggtattatgcctgaaatagcaaatgttaaagaagtgagtttcaataaaccaagttcaataaaatttaaaaaaaaataa

SEQ ID NO: 312693 - DNA, 787 bp, Unknown
  Bacterial polypeptide expressing nucleotide sequence isolated from the Sargasso Sea
aatgaaaaaaggtaaaaaattatatgaaggtaaagctaaaattatttatgcaaccaatgataaaaatttagtaattcagcattttaaagatgatgctaccgcatttaataatcagaaaaaagatgtaattgaaggtaaaggaattttaaataatagaatttcggaacatatccttacccaattaagcaatgtaggaattaaaaatcatttagtcaaaagacttaacatgagagaacaacttgttaagctggtagagattattccaattgaatttgttgtaagaaatatagcaacaggatctttaacaaaaagattgggaattgaagatggaacagtattagattatccactagttgaatattgtttaaagaatgatgaattaggtgatcctttagtaagtagagaacatattttagcttttaaatggatggacgtatttgaattagattttatttacgaagaagtaagaagaataaatgacttcttacaaggcatgttcagaggagttggtattaaattagttgattttaaagttgaatttgggagatctgaagttgatggaaaaagagaggttttattagctgatgaaattagtccagacacatgcaggctttgggacatgagaactgataaaaaactagataaagatagatttagaaacaatttaggaaatctggtagaagcttatcaagaagttgcaataagactaaacctgctacacgaacaatcaaatattagacctttaaattatcctaaaccaaaagctgtaaaaattaagaaaaaatga

SEQ ID NO: 312694 - DNA, 615 bp, Unknown
  Bacterial polypeptide expressing nucleotide sequence isolated from the Sargasso Sea
atctggcacagtgtggtatcagaacacattttgtaaaacgtttaaatatgagagaacaattaataaataaagctgaaatttttccaattgaatttattgtaagaaatattgcaacaggctctttaactaaaaggctgggtatatctgagggaactgttttagaaaagccattattagaatattgttataaaaaagatgaactaaatgatccattaatatcaaaagagcacatttacttatttgattgggcaactgaaaaagaaattcaaataattgataaaatgacattacgtattaatgatttattggtaggaatgtttagagggataggtattaagcttgtagattttaaaattgaatatgggaaaatttggaatgaagaaactgaagaaaaagaaattcttttagctgatgaaataagtcctgatacttgtcggttgtgggactcaaaaacagaaaaaaaattagataaagatagatttagaaaaggtttaggaaatattattcaaggttatcaagaggtagcaagaagattgggcatcatgcctgaagaaactaatattagtgaagtaaattttggtaaaacaatcccaataaaatttaaaaaaaaataaa

SEQ ID NO: 312695 - DNA, 706 bp, Unknown
  Bacterial polypeptide expressing nucleotide sequence isolated from the Sargasso Sea
tatgaaggtaaagcaaaaaaagtattttcccatgatgaagtagataaagtattaattgaattcaaagatgatgctacagcctttaatgctttgaaaaaagctaaatatgaagggaagggaagacttaattgcttaataagtgcaaggatttttgaaattcttataaagaataagatcccaactcattttattgagcttaaaaatgaaaatacaatgattgcaaaaaaaatagttgtaatccccttagaaattgttctcagaaatactgcttacggttctttatgtaaacaaacgactattaaatctggtactgtcctagcaaaaccattaattgatatttattttaaaaatgatgaactcaatgatccgttaattacaaaagataggattgaattaatgaatattcttagctctaaagatttagatttaataataaatttaactttaaaaattaatggaatcttgataagtttttttaagaatattcagcttcaacttgtagatttcaagttggaatttggttatgacgttaataataatataattcttggtgatgaaataagcccggacaattgtagattgtgggatctcaatcagaaaaatgatacaattgtaagcctagacaaagacaggtttagaaatgatttaggaggtcttattgaagcttatagtgaaattaaccgaagaattaataatttcatttaac

SEQ ID NO: 312696 - DNA, 787 bp, Unknown
  Bacterial polypeptide expressing nucleotide sequence isolated from the Sargasso Sea
atgaaaaaaggtaaaaaattatacgaaggaaaagctaaaatcatttattcaacaaatgataaaaacttggttattcaatattttaaagatgatgcaacagcattcaataatcaaaaaaaaactacaattgaaggtaaaggtgttctaaacaatagaatatcagaacatatactctctaacctctctcaaataggaatcgaaaaccatttggttaaaagattaaatatgcgtgagcaaattataaagcttgtagaaataattccgattgaattcattgtaagaaatgttgcaacaggttcaattactaaaagattaggcattgaagacggtacagttttaaaagaacctcttattgaatactgcttaaaggatgacaaacttggagatccattgatatctgaagagcatattttagcatttgattgggcatcaaaaatagaaatagataaagttaaaaaaatgattttaagaattaatgatttcatgattgggatgtttagaggtgttgggattaaacttatcgattttaaattagaatttggaagaataaaaattaatggaaaaaatgatgttattttagcagatgaaattagtcctgatacatgcagattgtgggacagtattacggaaaaaaaattagataaagatcgatttagaaaagatctaggtgatttaattccagcctatactgaagttgctaaaagattaggtatactccatgaacaatctaatgtttcagcagtaaatgtaactaaattatcttcagttaaaagaaagaaaaaatgaa

SEQ ID NO: 312697 - DNA, 787 bp, Unknown
  Bacterial polypeptide expressing nucleotide sequence isolated from the Sargasso Sea
aatgaaaaaagggaaaaaactttatgagggaaaagcaaaaattatttatgctacccaagataaagatctagttattcaatacttcaaggatgatgcaacagcatttaataatcaaaaaaagacaactatagaaggcaaaggagttttgaataatagaatttcagaacatattctttcgaacttgtctcaaattggaattaaaaatcatttagtcaaaagactcaatatgagagaacaggttattagattggtagaaattattcctattgaatttatagttcgaaatgtagcaacaggatctcttactaagaggctaggaattgaagatggtactgttcttaaagaaccattaattgaatattgtttaaaggacgactctctcggtgatccattaattgctgaagatcatatctatgcttttgaatgggcaaacaaaaaagaaattgaaaaagttaaaaaaatgattttaagagtaaatgatttcatgattggtatgtttagaggaataggaattaaactaattgattttaaattagaatttggaagattaaaggttaatgggagaaatgaagtaattcttgctgatgaaataagtccagatacatgtagattatgggattctgttactgataaaaaactagataaggacagatttagaaaagaccttggagatttaatacctgcttacactgaagtagcaaaaagattaggaattcttcatgagcaatcaaatgtatctgctgtgaatgtaactaaattatcttcagtaaagaaaaaaaataaatga

SEQ ID NO: 312698 - DNA, 702 bp, Unknown
  Bacterial polypeptide expressing nucleotide sequence isolated from the Sargasso Sea
gatgggcgagccgattccgaacaagggccgcgtgctgaaccagatggcgaacttctggttcgacaagcttgcgcacatcgtgccgaaccacctgacgggcgacgcgccggaagcggttgtcgccgccgacgaggtcgagcaggtgaagggccgcggcgtggtcgtcaagcgcctcgagccgatcatgatcgaagcagtcgtgcgcggctacctggccggcagcggctggaaggaataccaggcgtcgggcgccgtgtgcggcgtgcagctgccggaaggcctgcagaacgcgcagaagctacccgagccgatcttcacgccggccgcgaaggccgagatgggcgagcacgacgagaacatcacgttcgaggaaaccgagcgccgcatcggcaccgagctggccgcgacgatccgcgacatctcgatcaagctgtacaaggaagcggccgactacgcggccacgcgcggcatcatcatcgccgacacgaagttcgaattcggcctcgacaaccacggcaagctgtacctgatggacgaagtgctgaccgccgattcgtcgcgcttctggccggccgaccagtacgaagtcggcacgaacccgccgtcgttcgacaagcagttcgtgcgcgactggctcgaggcgcagccgtggggcaagaccgcgccggcgcctgcgctgccggccgacgtcgtcgagaagac

SEQ ID NO: 312699 - DNA, 712 bp, Unknown
  Bacterial polypeptide expressing nucleotide sequence isolated from the Sargasso Sea
aatgaaaaaaggaaaaaaactttatgaaggtaaagcaaaaataatttatgctacctcagataaaaatttagtaattcaatatttcaaagatgatgcgacagcttttaataatcagaaaaaaagtaacatagaaggcaaaggtgttattaataatagaatttctgaacatatcctcaccaatttatcccaagtaggaataaaaaatcatttagttaaaagacttaatatgagagaacaattagtaaaacttgtagaaattatcccaatagaatttattgtgagaaacattgcaacaggctcattgacaaaaaggttaggtattgaagatggaactgtattagcacgtcctttgatcgagtattgtcttaaggatgataaacttggtgatccaataattagtaaagagcacatactaacttttaattggttgagtaaaactcaattagattttgttgatgataatttaaaacgtttaaacgattttcttttaggaatgttcagaggtgtaggtatcaaacttgtcgattttaaagttgaatttggctttatgaatgaaagtaacaaaaatgaaatcattttagctgatgaaataagtcctgacacttgcaggttatgggattctattacagaaaaaaaattagataaagatagatttagaaaagatttaggagatttaatcccagcatataccgaggtagcaaaaagattggga

SEQ ID NO: 312700 - DNA, 336 bp, Unknown
  Bacterial polypeptide expressing nucleotide sequence isolated from the Sargasso Sea
tatgaataaaggaaataagttatacgaaggtaaagctaaaattatctatgaaacaaaagataaaaatttagtcatacaacactttaaagatgatgccacggcctttaataatttgaagaaatcaaaagtagaaggtaaaggtgttttaaataatcgaatatcagaatatatcttaactaacttaatgcaatgtggaataaaaacacatttaattaaacgattaaacatgagggaacagctcattaaaaaagcagatatttttcctattgaatttatagtaagaaatattgcaactggatctttgtctaagcgattgaatatacctgaaggaacaat

SEQ ID NO: 312701 - DNA, 302 bp, Unknown
  Bacterial polypeptide expressing nucleotide sequence isolated from the Sargasso Sea
tatgaacaaaggaaataaactatacgagggtaaagccaaaattatctacgaaacaagagataaaaatttacttattcaacattttaaagatgatgcaactgcttttaataatttaaaaaaatcaaaagttgaaggcaaaggtgttttaaataacagaatttcagaatatattttaacaaatttatctcaatgtggaataaaaacccacctggtcaaacgattaaatatgagagaacagttaataagaaaagccgaaatatttcccattgagtttatagtaagaaatattgcaacaggatcat

SEQ ID NO: 312702 - DNA, 286 bp, Unknown
  Bacterial polypeptide expressing nucleotide sequence isolated from the Sargasso Sea
tggtgatctcgatgaaatgatcagcacttctcataaggttaatgaacttttaacaaaactttttgctgactcaggaatgatattggttgattttaagcttgaatttggtatctctaatgggaaaattctgcttggcgatgaatttactccagatggctgcagattgtgggatgatgaaactcttgaaaagcttgataaagatagatttaggcaagatttaggagatgttatcgaatcctatcatatggttgcacatagattaggaatgcaaataaaagttgactaa

SEQ ID NO: 312703 - DNA, 640 bp, Unknown
  Bacterial polypeptide expressing nucleotide sequence isolated from the Sargasso Sea
aaataatagaatctcagaacatatacttaataatttaggtcaagtaggaataaaaaatcatttagtaaaaagactaaatatgagggagcaattgataaaatttgttgaaatttttccaattgaattcatcgtaagaaatatagcaactggctcattaacaaaaagattgggtattgaagaaggaacagttttagaaagcccattaatcgaatattgctttaagaatgatgatctcggcgatccactagtctcaaaggaacatatttttgcttttaattgggctacaaaaaaagaaatcgaaaaagttaatagatatttatttagaataaatgatttcttgattggaatgtttaggggtgtaggaataaaactagttgactttaaagtagagtttggaagatataattacaataacaaatcagaaattatacttgcagacgagataagcccagatacctgtagattatgggatatcaactccgaaaaaaaaatggataaagacagatttcgtaaaaatttgggaaatgttctacaagcttatcaagatgtggctagaagactaggtattcttcacgaagaatcgaatataagaacagttaaatttcctaaaccaaaagcagtaaaaattaaaaaaaaatag

SEQ ID NO: 312704 - DNA, 478 bp, Unknown
  Bacterial polypeptide expressing nucleotide sequence isolated from the Sargasso Sea
agacttggtgttaccgatggcacaattttagaaaaacctttaatagaattttgttataaaaaagatgagttagatgaccctttgattgcaaaagaacatatatttgcttttaactgggcaactaaagatgaaataaagtctatagaagatatgactttcagaattaatgattttatgtctggaatgtttagaggaattggaattaagcttgtagacttcaaattagaatttggaaggatctgggaaggagataaaaaagaaattatccttgcagatgaaataagtccagatacttgtagactttgggacattaaaagcgagagaaagttagataaagatagatttagaaaagatcttggtaacatcatacaagcataccaggaagttgcgagaagattaggaatagttcctgaaacaactaatataagtgaagtaaactttaaaaaacctacatcaataagcattaagaaaaaataac

SEQ ID NO: 312705 - DNA, 745 bp, Unknown
  Bacterial polypeptide expressing nucleotide sequence isolated from the Sargasso Sea
aggcaaagctaaaatcatttatgcaacaaatgataaaaatttagttatccaatattttaaagatgatgcaactgcatttaataatcaaaaaaaaactacgattgaaggtaaaggtgttctaaataatagaatatctgagcatatactctcaaatttatctgaagttggaattaaaactcatttagtgaaaagaattaatatgagagaacaactagttaagctagttgatataataccaatagaatttatagtaagaaatattgcaactggatcattaactaaaagattgggtatcgaggaaggaactgtcattgaacgaccattaatagaatactgtctaaaagatgatgagcttggagatccaataattagtcgtgagcatattttaacttttaattggcttaatgtaatgcaacttgattggatagatgaaaatctatctagattaaatgattttttacaaggaatgtttagaggtgtcggaataaaattagtagattttaaagttgaatttggtttcactcatgaaagtgaaaaaactcagattatattagctgatgagataagccccgatacatgcaggttatgggatactttaacagataaaaaacttgataaagatagatttagaaaagatttaggagatcttattcctgcatatacagaagtggcaaaaagacttggaatacttcatgaacaatcaaatgtttctgctgttaatgttacccaactttcatcagtaaaa

SEQ ID NO: 312706 - DNA, 614 bp, Unknown
  Bacterial polypeptide expressing nucleotide sequence isolated from the Sargasso Sea
aatgtcacgtcgtaaacagatatatgaaggtaaagcaaaagttctctttgaaggaccagagcctggaaccatcgttcagtacttcaaagatgacgccactgctttcaataataagaaaaaaggtataattaccggtaaaggcgtcttaaataatagaatatccgaacatttaatgattaagttaaatgatatggggataccaacccattttataaaaagattaaacatgagagaacagttagtcaggaaagtagagataattcctcttgagattgtagtaagaaatgtagtggcaggttctctagctaaaagactaggactagaagagggggacgagttatctagatcaattattgagttcttttataaatcagatcagcttaatgacccattagtaactgaagagcatatcacagcatttgactgggcatctacccacgaaatggatgaaatagttacaatgacattacgtataaatgattttttatcagggttattctttgggacaggtataaaattaattgactttaaattggagtacggaaggatctatattaatgaccagattaaaattgtattagctgacgaaattagtcctgactcctgtaggcttt

SEQ ID NO: 312707 - DNA, 762 bp, Unknown
  Bacterial polypeptide expressing nucleotide sequence isolated from the Sargasso Sea
aatgaaaaaaggaaaaaaattatacgagggtaaagcgaaagttatttttgcaactgataataaagactttgtaattcagcattttaaagatgatgcaactgcttttaataaccaaaaaaaagcaaaaattgaaggcaaaggtgttcttaataacaggatttctgaacatattttaatgaacttagatcaggttggaataaaaaaccatttagtaaaaagattaaatatgagggaacagctaataaaacatgtcgaaattattccaattgaatttattgtaagaaatattgctactggctctcttacaaaaagacttgggatagaagatggtactattttagaaaatccattaattgaatattgtttaaaaaatgatgaactaggagatcctctaatatctaaagagcatatccacacttttaaatgggcaacaaaaaaagagatagaaaaaatcgataaacaactattaagaataaatgacttcatggttggaatgtttaggggtgttggtattaaacttgtagattttaaagttgagtttggaagaattaaaaacaatggtaaaacagatgttttgctggctgatgagataagtccagacacatgcagattatgggacaataagactgataaaaaattagataaagataggtttagaaataatcttggaaatttaattaatgcataccaagaagtagcaaaaagattaggtattcttcacgaacaatccaacatacaagctgtcaattttgaaaaacaaaa

SEQ ID NO: 312708 - DNA, 634 bp, Unknown
  Bacterial polypeptide expressing nucleotide sequence isolated from the Sargasso Sea
atctgaatatattttaagtaatttaggagaatgtggaattaaaactcacttaataaaaagacttaatatgagagaacagttaataaaaaaagctgaaatttttccaattgaatttatcgtaagaaatgtagctactggctctttaactaaaaggttgggtatttcagaaggtacggtcttgaacaagccattgcttgaatattgttacaaaaaagatgaattagaagaccctataatttctagagaacatattttttcttttggttgggcaactgaaaaacaaattgaaataattgataagattacattaagaataaatgatattttacaaggaatttttagaggtataggaattaaattaatagattttaaaattgaatatgggatagcaataaacaaagatactaatgaaaaagaaattgttttagctgatgaaataagtcctgacacatgcagactttgggatgttaaaactgaaaaaaaactagataaagacagatttagaaaagatttaggaaacgtgatccagggctatcaggaggtagctaggcgtctcggtataatgcctgaagaaacaaatataagtgaagtcaatttcggtaaagccacttcattaaaatttaaaaaaaaataa

SEQ ID NO: 312709 - DNA, 591 bp, Unknown
  Bacterial polypeptide expressing nucleotide sequence isolated from the Sargasso Sea
aaaatcatttagtcaaacgaataaatatgagagaacaactcattaaatttgtagagattattccagtagaatttattgtaagaaatattgctacaggatctttaacaaaaagacttggtatagaagatggtactgttttggatgaacccttaatcgagtattgtttaaaagatgacaagttaggcgacccgttaatatctaaagaacatatacttacttttaaatggtcaaataaaaaagaattagaaaaaattgataaatatctgcatagaataaatgattttatggtcgggatgtttagaggtgttggaattaaattggtagattttaaagttgaatttggaagatacaaaaataatggaaaaacagaagttatattagctgatgaaattagtccagatacatgtagactttgggatgtaaatactgaaaaaaaactagataaagatagatttagaaataatttaggtcatttaatagaagcttaccaagatgtggcaagaagactaggtatacttcatgagcaatcaaatataagacctattaagttcacaaaaccaaaagcagtaaaatttaaaaaaaataaatgaa

SEQ ID NO: 312710 - DNA, 448 bp, Unknown
  Bacterial polypeptide expressing nucleotide sequence isolated from the Sargasso Sea
gtaatccgtaacagagcaactggatctatttgcaaaaggcttggaacacatgatggcttgatacttgacaaacctttatttgaattcttcctcaaggacgatgatttgggcgatccactaattaataggaatcacatagtttcatttggatgggcaaaagataatgagcttgatgaaatgatcagaacttcccacaaggttaataaacttttaacaaagctatttgctgattcaggaatgatattggttgattttaagcttgaattcgggatctccaatggaaagatttttcttggtgatgaatttactccagatggatgtagattatgggatgatcaaactttagaaaagcttgataaggacagatttagacaagatttaggagatgttatcgaatcctatcatatggttgcacatagattaggaatggaaataaaagttgactaaa

SEQ ID NO: 312711 - DNA, 502 bp, Unknown
  Bacterial polypeptide expressing nucleotide sequence isolated from the Sargasso Sea
aatgtcacggcgaaaacaaatatacgaaggcaaagctaaggtgctatttgaaggctcagagccaggaaccattgttcaatacttcaaagatgatgcgacagcatttaataaccaaaaaaaaggggtaatcactggtaaaggagtattaaataatagaatatcagaatatttgatgaccaaattaaacgatatgggcattccaacacattttattaaaagacttaatatgagggagcagcttgtaagaaaagtagaaataattcccttagaagttgttgtaagaaatactgttgccggctctcttgctgaacgacttggtttaaaagaaggggataatttaccaaggtctataattgagttcttttataaagcagatgaactaaatgaccctttagtaacagaagagcatattactgcttttgactgggcatccgctcaagaaatggatgagttaatttcaatgactttacgaatcaatgattttttgtctggtttatttttt

SEQ ID NO: 312712 - DNA, 730 bp, Unknown
  Bacterial polypeptide expressing nucleotide sequence isolated from the Sargasso Sea
atgaataataaatatgatctgatttatgaaggcaaagcaaaaaaagtatttaattatgatgatgtagatagagtaagaattgaatttaaagatgatgctacagcttttaatgctttgaaaaaagaaaaatttgaaggcaaagggaaactaaattgcttaataagtgcaagaatttttgagattcttactaagaataaaattccaactcactttattgaacttgagaatgaaaatacaatgattgcaaaaaaaataagaataattccattagaaattgttctaagaaacactgcctatggttctttgtgtaaacaaacgaatattaaacctggaacttccctatcaaaaccattaattgatatctatcttaaaaatgatgaactgaacgacccacttattacaaaagatagaatagaattaatgaacatattaagttctgatgatttggagttaatagtaaaattaactttaaaaattaatttaatactgaaaagtttttttaacaatattcaacttcaacttgtggatttcaagttggaatttggttatgattctaaaaataacattattcttggggatgaaataagtcccgataattgtagattgtgggatctaaatcaaaaaaatgatacaattaaaagcctagataaagatagatttaggtacgatttaggtggtctaattgaagcttacagtgaaattcaccgaagaataaacgattttctttaac

SEQ ID NO: 312713 - DNA, 423 bp, Unknown
  Bacterial polypeptide expressing nucleotide sequence isolated from the Sargasso Sea
ataaaaaagatgaactcggagacccacttattgctaaagaacatatttttgcttttaattgggcaagcgaggctgaaataaaatctattgaagaaatgacttttagagtaaacgattttatgtcgggaatgtttaggggaatcggaattaaacttgtagattttaaacttgaatttggaagaatttgggatggagataaaaaagaggttattcttgcagatgaaataagtccggacacgtgtaggctttgggatatcaaaagcgagagaaaattagataaagatagatttagaaaagatctaggaaatataattcaagcttatcaagaagtagccagaagattggggatagttcctgagacgactaacgtaagtgaagtaaactttaagaaacctacatcaataagtattaagaaaaaataaa

SEQ ID NO: 312714 - DNA, 787 bp, Unknown
  Bacterial polypeptide expressing nucleotide sequence isolated from the Sargasso Sea
aatgaaaaaaggaaaaaaactttatgagggaaaagcaaaaattatttatgctactaacgataagaatttagttattcaatattttaaagacgacgcaacagcttttaataatcaaaagaagacaacaattgaaggtaaaggtgtattaaataaccgtatctcagaacatattctctcaaatctttctcaaatagggattaaaaatcatttagttaaaaggttaaatatgagggaacaaattatcaaatttgtagaaattattccaattgagtttattgtcagaaatgtagcaactggctctctaactaaaagacttggaattgaggatggaactgtacttaaagaacctttgttagaatattgcttaaaagatgacaagctaggtgacccattggtagccgaagagcatatctatgcatttgaatgggcaacgaaaaaagaaatagacaaagtaaaaaagatgatcctaagaattaatgactttatgataggcatgtttagagggattggaattaaattaatagattttaaattagagtttggaagacttaagttaaacgggaaaaatgaaatcatacttgcagatgagataagtcctgatacctgtagattatgggattctatcactgacaaaaaacttgataaagataggtttagaaaagatctgggaggtttaattccagcttatactgaagtggctaaaagattaggtattctacatgagcaatcaaatatatctgcagtgaacgtaacaaaattatcttcagttaaaaaaaagagaaaatga

SEQ ID NO: 312715 - DNA, 667 bp, Unknown
  Bacterial polypeptide expressing nucleotide sequence isolated from the Sargasso Sea
gttcaagaacgacgccaccgccttcaatgcccagaaaaaagcccagcttgacgacaaaggtcggctgaactgccagatctcaacacggttgttcgagctgctggagcgtgagggggtgccgacccattactgcggtctggccggggagacctggatgctggtgcgtcgggtggagatcattccccttgaggtggtgctgcgcaacaccgccaccggatcgttgtgccgtcaaacgccgatcgcggagggcacagccatcgaacccgccctgctggatctctattacaaggatgattccctgggcgatccgctgctcactgaggcgcgcgtgcagctgcttggtgtggcagacccagcgcgactgtcagcgattgaacaactggcccgccgggtgaatgccgtgctcctgccgttctttgaggggcttgatctgcaactggtggatttcaagctggagttggggctggctgcggatggaacactcctgcttgccgatgagatcagccctgacacctgcaggctctgggatcgccgcaacagcaatgccgaggaccggattttggacaaggaccgcttccgcaaggatctcggtggggtgatggaggcctacggggaggtccttaaacgggtccaaggcagctgccccaacccccgcaactgcctgtaa

SEQ ID NO: 312716 - DNA, 490 bp, Unknown
  Bacterial polypeptide expressing nucleotide sequence isolated from the Sargasso Sea
atgaaaaaaggcaaaaaattatacgaaggtaaagcaaaaattatttatgcttcacctgaaaaaaatttagtcattcagcattttaaagatgatgcaacagcttttaataatcaaaaaaaagcaactattgatggaaaaggaattttaaataacagaatttctgaatacattcttcaaaacttaaaccaagtaggtattaaaaatcatttagttaaaagaattaatatgagagagcaacttataaagtttgtagaaataatacctatagaatttattgtaagaaatatagcaactggctcattaacaaaaagacttggcatagaagatggaaccttattaaatcgtccattaattgaatattgtcttaaaaatgatgaattaggagatcccttaattagtagagaacatattttaacttttgattggttaaacataatagagctagactggattacagaagaatgtcgtagaataaatgattttctaccaa

SEQ ID NO: 312717 - DNA, 766 bp, Unknown
  Bacterial polypeptide expressing nucleotide sequence isolated from the Sargasso Sea
atggccagacgtaggcaagtgtatgaaggtcggggcaaggtgcttttcgagggacccgaacctggaacactggttcagtatttcaaggatgacgcctacgtgcagcagacgcggaaggcaggaacaatcaccggtaagggcgtacttaataatcgcatttctgaataccttatgcagcgcctgggtgaaataggcgttccgacccattttgtccgccgcctcaacatgcgcgaacaactggtccgcgaggtggagatcattccgatcactatcgtcgttaggaatattgttgctggcgggctggcggaacgcttcgccatgccagaaggcacggccctgccaagatctatcgtcgaattctattacaaatccgacgagctgggtagccccatggtcactgaagagcatatcacagccttcggctgggcccacccacaggacattgacgagatccttgcgctgtcgcttcgggtcaacgacttcctagccggcctgttcctcggcatcggcttacgacttgtcgacgtgcgactggagttcggccgcctttgggagaatgaccatatgcgaatcatgctcgcagatgagatcagcccagataattgccgtctttgggatctacaaaccaatgagcccatggacaaagaccggttctctaaggacctaggccgggttgaggaggcctatcaagaggtggcccaccgcctcggaattcttccccaatcagaaccctcagatttcagaggtacgaacaccatccaataag

SEQ ID NO: 312718 - DNA, 498 bp, Unknown
  Bacterial polypeptide expressing nucleotide sequence isolated from the Sargasso Sea
aatgaaaaaaggtaaaaaaatatacgaagggaaagctaagatcatttatgcaacaaatgataaaagtttagttatccaatattttaaagatgatgcaactgcattcaacaatcaaaaaaaaactaccattgagggtaaaggtgttctaaacaacagaatatcagaacacatactctctaacctttctcaaataggaattaaaaatcatttagtaaaaagattgaatatgcgtgagcaaattataaatcttgtagaaataattccgatagaattcattgtgagaaatgttgcaacaggttcaataactaaaagattgggtattgaggatggtacagttttaaaagaacctttaatcgaatactgcttgaaaaatgacaaacttggagatccattagtatctgaagagcatattttagcatttgattgggcatcaaaaacagaaatagataaaattaaaaaaatgatttttagaattaatgattttatgattgggatgtt

SEQ ID NO: 312719 - DNA, 737 bp, Unknown
  Bacterial polypeptide expressing nucleotide sequence isolated from the Sargasso Sea
aatgaataaagggaaaaaattatacgaaggtaaagctaaaatactttacgaaacaaaagataaaaatacattaattcaacattttaaagatgatgcaactgccttcaataatcttaaaaaaacgagtgttgagggaaaaggagttcttaataatagaatatcagaatatatattaattaatctctcgcaatgtggaatcaaaacccattttttaaagcgcttaaatatgagagaacagttaataaaaaaagctgagatttttccaatagaatttattgtaagaaatatttcaacgggttcattgacaacaagattgggtatttcagaaggaacagtattggaaagaccattgttagaatactgttacaaaaaagatgaattaaatgatccaataatttctaaggaacatattttttcatttggttgggcaactgaaaaagaaatagaaataattgataaaatgactttaagaattaatgatttgttgattggtttatttagagggataggaattaagctcgtagattttaaaattgaatatggcaaagcatggaataaagatacagaaaaaaaagaaatagtcctggctgatgaaataagtcctgacacttgtcgattgtgggattccaagacagaaaagaaattagacaaagatagatttcgaaaagacttaggaaatattattcaaggctaccaagaagtagctagacgattgggtataatgcctgaagaaacaa

SEQ ID NO: 312720 - DNA, 277 bp, Unknown
  Bacterial polypeptide expressing nucleotide sequence isolated from the Sargasso Sea
aatgaaaaaaggaaaaaaaatttatgaggggaaagcaaaaatagtttttgcaacagaaaataaaaatttagtaattcaacattttaaagatgatgctaccgcatttaataatcaaaaaagagctaagattgaaggaaaaggtgttttaaataacagaatttctgaacatattctaactaacttaagtcaaattggtattaaaaatcatttagtaaaacgaataaatatgagagaacaattaattaaatttgtggaaattattccaattgaatttgtt

SEQ ID NO: 312721 - DNA, 841 bp, Unknown
  Bacterial polypeptide expressing nucleotide sequence isolated from the Sargasso Sea
caatttctaaccattgggtttagtttatttgctcaaaatggcttagcagacagccacattttagatattccacacccttttgtatggatagtacaaaaagcccgcccaattaaagtagaagcgatttgtcgccaatacattaccggttcaatgtggcgcgcttattcaaaaggcgaacgtgttttttgtggcatcaccttgccagaaggcttaagcaaagaccaaaaattaccagaattacttattaccccatcaaccaaaggcattttaaccggtattccaggcgtgccagcacaagatgacgtcaatattagccgcagcgacattgaagccaactaccaggcattcggctttgaaaagccacaagatatcgacttatatgaaactttgctcaaacaaggctttaaagtaatctctgacgcattggctaaacttgaccaggtatttgtcgacaccaaatttgaatttggctatgtaaacgacaaaaacggccaatcaaaactgatttacatggacgaagtcggcacgccagattcatcacgtatttgggatggcccagcttaccgcgagggtaagattgttgaaaactcaaaagaaggcttccgccagtttttattaaaccattttgacgatgccgacatcttattaaataaagacagaatgcctgagcgtgaagccctagcacgtgataatgacctaccactagaagccatgatgaacgtatcacgcacttataccggtgttgctgaaaaggtaacaggtcgcagcattgcactgccaactaaccctaaagcagacattatcaaggtgctgcgcgagcaatatgatttaatcgtgtaag

SEQ ID NO: 312722 - DNA, 462 bp, Unknown
  Bacterial polypeptide expressing nucleotide sequence isolated from the Sargasso Sea
tatgaataaaggaaacaaactttacgaaggaaaagcaaaaattatctaccaaacgaaagacaagaatttagtaatacaacattttaaagatgatgcgactgcttttaataatttaaaaaaagcaaaagttgagggaaagggcgttttaaataataggatctcagaatttatattaacaaatttaatgcaaagcggaattcaaactcatttggtgagaagattaaatatgagagaacaacttattaaaaaagctgaaatctttcctatagaatttattgtaagaaatattgcaactggatctttaacaaaacgtcttggtatagctgagggaacaattttagagaaacctcttttagaatattgcttaaaaaaagatgaacttaacgatcctttaatttcaagggagcacatttttgcctttggttgggctaatgaaaatgagattaaatttatagataaaat

SEQ ID NO: 312723 - DNA, 709 bp, Unknown
  Bacterial polypeptide expressing nucleotide sequence isolated from the Sargasso Sea
aatgaaaaaaggtaaaaaaatttatgagggtaaagctaaaattatttatgctactggggataagaatttagttattcaatattttaaagatgatgctactgcatttaataatcagaaaagaactacgatcgaaggtaagggagttttaaataatcgaatttcagaacatattctcacaaatttatctcaaattggaattaaaaatcatttggttaaaagattaaatatgagagaacaaataattagatttgtagaaattattcctattgagtttatagtgagaaatgttgcaaccggctctcttacaaaaagacttggtatagaagatgggactgttcttgaagaacctctaattgaatactgtttaaaagatgacaaacttggagatcccttagtagcagtagaacatatttacgcttttgaatgggcttcaaaaaaagaaattgaaaaagtaaaaaaaatgattttacgaattaatgactttatgattggtatgtttagaggaattggaataaagctgatagattttaagttggaatttgggagaataaaagtaaatggtaaaaacgaaatcattctagctgatgaaattagccctgatacttgtagattatgggatacaattactgataaaaaattagataaagacagatttaggaaaaacttaggaggtttattcctgcttatacagaagttgcaaaaagattag

SEQ ID NO: 312724 - DNA, 423 bp, Unknown
  Bacterial polypeptide expressing nucleotide sequence isolated from the Sargasso Sea
aatgaaaaaaggtaaaaaattatacgaaggaaaagctaaaatcatttatgcaacaaatgataaaaatttagttatccaatattttaaagatgatgcaactgcattcaataatcaaaaaaaaactacgattgaaggtaaaggtgtactaaataacagaatttcagaacacatactctctaacctctcacaaataggaattaaaaatcatttgattaaaagattaaatatgcgtgaacaaattataaaacttgtagaaataattccaatcgaattcattgtaagaaatgttgcaacaggttcaattactaaaagattaggtattgaggatggcactattttaaaagaacctctaattgaatactgcttaaaagatgacaaacttggagatccattaatatctgaagagcatattttggcatttga

SEQ ID NO: 312725 - DNA, 631 bp, Unknown
  Bacterial polypeptide expressing nucleotide sequence isolated from the Sargasso Sea
aatggctccaagacaaaaactctatgaaggtaaagcaaaaattctttttaaaggaaccgactccaatactttaatccaatatttcaaggatgatgctactgcatttaatgctaaaaaaacttccgtttttgaaggtaaaggcattctaaataatatcttgtctgagcattttatgaagggactttcgtcaattggaatctctaaccatttcataaaacgattaaatatgcgcgaacagcttattaaatcttgcgatattattccacttgagatcgtagtaagaaatctagctgcaggatcgatttcaaaaaggttgggtttaactgagggtactgtgttcagaccaccattggtagaattttattttaaggaagatgaactcggtgaccctctagtcactgaagagcatatcgttggattgaattgggcaagtcaatctgaagttaaagagataaaagccactgctctaagggttaatgattttatgtcagggatgatgtctgcggttgacataacacttgtagattttaaaattgaaattggccgttattgtgaacagaatgagtggaaacttataatagcggatgaaataagtcctgatagctgtcggctgtgggataaaacttcgggt

SEQ ID NO: 312726 - DNA, 577 bp, Unknown
  Bacterial polypeptide expressing nucleotide sequence isolated from the Sargasso Sea
aaattaataatcttatatctgagtattaaatgcagatattatccaataatcagatcccaaatccattttataaaaaaaattaatattagagacaatttaatacatcaatgtaagattattcctttagaagttgtcatcaggaatatagctgcaggttcaatttgtaaaagattaggaataaaagaaggaaagatttttaaagaccctataattgagttttattataaaaatgacgaactaaatgatcctattgtaaataatagtcatataatatcttttggatggtctgataaagaagagttgttaaacatcaataaactatctcttaaagttaataaaatccttaaaaaaaaatttgaagaaatttctatttctctaattgattttaaattagaatttggaagaaaaacttctgatgattccttagtagttgcggatgaaataagtcctgattcttgccgcttatgtgatgtgaataataaagaaaaatttgataaggatatatttcgatatgataaaggtaacctcttggaggcttacaaaaaattatttattagactcggaataataaaataat

SEQ ID NO: 312727 - DNA, 640 bp, Unknown
  Bacterial polypeptide expressing nucleotide sequence isolated from the Sargasso Sea
aatagaatttcagaacatatattaacctatttgggtcaagttggtattaaaaatcatttagttaaacgaatcaatatgagagaacaattaatcaaacatgtaaccataatcccgattgaatttattgtaagaaatattgcaacaggatcactaactaaaagacttggaatagaagatggaactgttttagatgagcctttaatagaatattgccttaagaatgatggtcttggtgatcctttaatttctaaagaacatatatttgcttttaagtgggctacaaaaaaagaaatagaaaaagttgataaacaacttcacagaataaatgattttttagtgggtttatttagaggtgttggtattaaactagtagactttaaagtagagtttggaagatttaagaataataataagaatgaaattattttagccgatgagattagtcctgacacttgtagactttgggacatgaatacagaaaaaaaattagataaagatagatttagaaaagatctagggaatctaatcgaagcatatcaagatgtggcaagaagacttggtattcttcatgagcaatcaaatataagacctcttaggtttcctaagccaaaagctgtaagattgaaaaaaaacaaatgaa

SEQ ID NO: 312728 - DNA, 699 bp, Unknown
  Bacterial polypeptide expressing nucleotide sequence isolated from the Sargasso Sea
aggacgatgccactgcatttaacaatcagaaaaaatctagtatagaagaaaaaggaatcctaaataataggatttcagaacatttgttaaaatctctttcagaaattggaattaaaaatcatcttattaaaagattaaatatgagagaacagcttgttgaattggtaaacattataccaattgaatttgtaattagaaatattgcaactggatctctcacaaaaagattgggaattgaagaaggaacagttttagattatccattaattgaatattgtttaaaagacgataaactcggagatccaataatttctcgtgagcatattttaaattttaagtggctaaatataattgagctagacttaattaatcagcaatgcttgagaattaatgattacctacaaggtttgtttagagctgttggaataaaattagttgatttcaaagtagaatttggaaaaacaaaatcaaacgaaacaataatattagccgacgaaattagtcctgatacgtgtagattgtgggatcaagagactgaaaaaaaattagataaagacagatttaggaaggatttaggtaatgtgtccgaagcttaccaagaggtagctagaagacttggaattcttcatgaacaatcaaacataagaccaataaaattcacaaagccaactgcggtaaaaattaaaaaaagtaaatgaa

SEQ ID NO: 312729 - DNA, 577 bp, Unknown
  Bacterial polypeptide expressing nucleotide sequence isolated from the Sargasso Sea
agactcaatatgagggagcagttaataaaaaaagcagagataattcctgtagaaataattgtcaggaatcttgcaacaggctctctaacaaaaagattgggtattacagagggaactatattaagtaagcctcttatagagtattgttacaaaagtgatgacctcggagatccattggtttcaatagatcacatatttgaattcaattgggcagataaaaaggaaattgaaactattaatgagttgtctttaagaataaatgatattttaaccggtatgtttaaagctattaatatcaaattagttgattttaaacttgaattcggtagagcatggaacaaagataaagataaaaatgaaatcattttagctgatgaaattagtccagatacttgcagactttgggatgctaaaactgaaaaaaaacttgataaagacagatttagaaaagacttgggcaatataatacaaagttaccaggaggtagcgagaaggcttggaataatgccagaagaaactaatataaaggaagtcaatttcggaaaaccgacctctgtaaagtttaaaaagaagtaaa

SEQ ID NO: 312730 - DNA, 730 bp, Unknown
  Bacterial polypeptide expressing nucleotide sequence isolated from the Sargasso Sea
aatgaaaaaaggtaaaaaactctacgaaggcaaagcaaagattatttttgctacaagtgataaaaatactgttattcagcattttaaggatgatgccaccgcatttaataatcaaaaaaaagcaaatatagatggaaaaggaattctaaataatagaatttcagaacacttgttaaaatctctttcagaaattggaattaaaaatcatcttattaaaagattaaatatgagagaacaacttgttgaattggtaaatatcattccaattgaatttgtaattagaaatattgcaactggatctttaacaaaaagactaggaattgaagaaggaacaatccttgattatccattaattgagtattgtttaaaagatgataaacttggagatccaataatttctcgtgaacatattttaaattttagatggctcaatttaattgagttagacttaattaatgaacaatgcttaagaataaatgattatcttcagggtctgttcagaggtataggaattaaattagttgattttaaagtagaatttggaaaaacaaagtcaaacgagacaataatacttgccgacgaaattagtcctgacacgtgcagactatgggatcaagaaactgataaaaaactagataaagatagatttagaaaagatttaggtaatattgtagaggcctaccaagaagtagctagaaggcttggaattcttcatgaacaatcaaacata

SEQ ID NO: 312731 - DNA, 776 bp, Unknown
  Bacterial polypeptide expressing nucleotide sequence isolated from the Sargasso Sea
aatgaaaaaaggaaaaaaactatacgaaggaaaagcaaaaatcatatacgcttcccctgaaaaaaatttagttattcaacactttaaagatgatgcaactgcttttaataatcaaaaaaaagcaactatcgatggaaagggcattttaaataatagaatttcagaacacatcctctcaaacttaaatgaaataggaataaaaaatcatcttattaaaagaattaacatgagagaacaacttgtaaaaaatgttgaaattatacctattgaatttgtagtgagaaatattgcaactggatcattaactaaaagacttggaattgaagatggtacggttttaagtcgaccattaattgaatattgccttaaaaatgatgaattaggagacccattaataagccgagagcatatattaacttttgattggttaaatgtaatggaattagattggataaatgaagaatgtagaagaataaacgattttcttcaaggaatgttcaggggcgttggtataaaattggttgattttaaagttgaatttggaagatcagctcaagacaatattataattctcgcagatgaaataagtcctgacacatgtcgactctgggactcatcaactgaaaaaaaactagataaagatatatttagaaatgatcttggaaacttgattgaaggatatcaagaagtggcaaagagattaaatatacttcacgaacaatcaaatataagacctataaaatttccaaaacctaaagctgttaagaataaaaaga

SEQ ID NO: 312732 - DNA, 538 bp, Unknown
  Bacterial polypeptide expressing nucleotide sequence isolated from the Sargasso Sea
gaaataattccgatagaatttattgtaagaaacattgcctcgggttcaattacaaaaagactgggaattgaagatggtactgtattaaaaaaccctttgattgaatattgtctcaagaatgacaagctgggagatccattaattgctgaagaacatatatttacttttgattgggcaactaaaaaggaaattgaaaaaataaaaaaaatgattttaagaattaacgattttatgattggcatgtttagaggtgttggaataaaacttgtagattttaaacttgagtttggaagattaaaaatgaatggaaaaaaggatataattcttgctgatgaaataagcccagatacatgtaggctatgggatgctgtaacagaaaaaaaattagataaagacaggtttagaaaaaatcttggaggtttaatacctgcttatacagaggttgcaaaaagacttggcattttacatgaacaatcaaatgtagagaactctaatgttacaaatcttagtgcatttaaaaagaaattaaaaaaatgaa

SEQ ID NO: 312733 - DNA, 625 bp, Unknown
  Bacterial polypeptide expressing nucleotide sequence isolated from the Sargasso Sea
atgaataataaatatgagttgatttatgaaggtaaagcaaaaaaagttttttctcataatgattcagataaagtaataattgaatttaaagatgatgctacagcttttaatgccttaaaaaaagctagatttgaggggaagggaaaacttaattgcctaataagtgcaagaatttttgaactgcttataaagaataatattccaactcattttattgaattgaaaaatgaaaatacaatgattgcaaagaaaataaaagtaattcccttagaaattgttttaagaaatactgcttatggttctttgtgtaaacaaacgactattaaacccggcactgtcttggtaaaaccattaattgatatttatcttaaaaatgatgaacttaatgatccccttcttactaaagatagaatcgaactaatgaatatactaagctctaaggatttagatttaataataaatttaactataaaaattaatggaatcatgaaaagtttttttaaaaatattcagcttcaacttgtagattttaagttggagtttggctatgattttaaaaatgatatacttcttggggatgaaataagtcccgataattgtagaattatgggatctaaatcagaaa

SEQ ID NO: 312734 - DNA, 277 bp, Unknown
  Bacterial polypeptide expressing nucleotide sequence isolated from the Sargasso Sea
attaaacttattgatttcaaattagaatttggacgattaaaaaataatggaaaaaatgaaattattcttgcagacgaaattagcccagatacatgtagattgtgggactcaataactgataaaaaacttgataaagatagatttagaaaagatcttggagatttaattccagcttatacggaagttgcaaaaagattaggcatattgcatgaacaatctaatgttacagcagtcaatgtaacaaaattatcatctgtcaaaaaaaagagtaaatgaa

SEQ ID NO: 312735 - DNA, 760 bp, Unknown
  Bacterial polypeptide expressing nucleotide sequence isolated from the Sargasso Sea
tatggcccgccgtgcaaaaatttacgaaggtaaagcaaaaattttatatgaagggcctgaaccaggaacagttgttcagtattttaaagatgatgcaactgcatttaatgccgaaaaaaaagaggtgattgagggtaaaggcgtcttaaataaccgtctatctgaattttttatgtcaggcctaaataatataggagttccaacccactttattaaacgtttgaatatgcgagagcaactagttcgcaattgtgaaataattcctcttgaagttgttgtgcgaaactatgcagcgggttcgatgtcaaaacggttaggaatagaagaaggtacacagttatctcgtcccgtagtcgaatactattataaagatgatagtcttggggacccgatagtttccgaagaacatatagcagcttttaattgggcatcttcccaagatatggaagatattctaggtttatcgctaagagtaaatgattttttatctggagtattgttcagtgtcgggatcaaactaattgatttcaagattgaaattggtcgtttttttgaaggagagtaccaaagacttttaattgccgatgaaattagtccagatagttgccgcttgtgggacgttaaaagtggaaaaaaactcgacaaagacgtctttcggcgtgatttaggaagcctaacggatgcttatacggaagttgcgaataggttgggcttactacccaaaactaactctcaaattaaaccaagcttggttaaataa

SEQ ID NO: 312736 - DNA, 343 bp, Unknown
  Bacterial polypeptide expressing nucleotide sequence isolated from the Sargasso Sea
catgaataaaggtaataaattatacgagggtaaagcaaagataatttatgaaactaaagataaaaatttagttattcagcattttaaagatgatgctacagcctttaataatcttaaaaaagcaaaagttgaaggtaagggagttttaaacaatagaatttcagaatacatattatcgaatttatctcagtgcggaattaaaactcacttagtaaaaagaataaacatgagagaacaattaattaaaaaggcagaaatctttcctatagaatttattgtaagaaatatagccacaggctcactgactaaaagactggggatacctgaagggactaatttagaa

SEQ ID NO: 312737 - DNA, 569 bp, Unknown
  Bacterial polypeptide expressing nucleotide sequence isolated from the Sargasso Sea
aatgaataataaatttgagctgatttatgaaggcaaagcaaaaaaagtgttttttcataatgattcagataaagtaataattcaatttaaagatgatgctaccgcctttaatgcgttgaaaaaggctaaatttgaaggcaaaggaaaacttaattgtttaataagtgcaaagatttttgagcatcttttaaaaaataatattccaaatcattttattgaacttaaaaatgaaagtactatgattgctcaaaaaattaaaattattcccttagaaattgttctgagaaatactgcttatggttctttgtgtaaacaaacaacaattaaatctggtactttgctagcaaaacccttaatagatatttatcttaagaatgatgaacttaatgatccgttaattacaaaagatagaattgaattaatggacattataagctctaaagatttggatctaataatagatttaactttaaaaatcaatgcaattctgaaaagtttttttgaaaatattaagcttcaacttgtagattttaaattggagttcggttacaataaaaataaccagattg

SEQ ID NO: 312738 - DNA, 598 bp, Unknown
  Bacterial polypeptide expressing nucleotide sequence isolated from the Sargasso Sea
aatgaataaaggaaacaaactatacgagggtaaagctaaaatcatatacgaaactaaagataaaaatttagtaattcagcattttaaagacgatgctactgcttttaataatcttaaaaaggcaaaagttgagggtaaaggtgttttaaataatagaatttccgaacatatattaaccaacctttctcaaagtggcattaaaactcacctagtgaaaaggcttaatatgagagagcaattaattaaaaaagctgagatattcccaatcgaatttatagtaagaaatattgcaactggttccttatcaaaaagattaggtattcctgaaggaacagttttagaaagaccattattggaatattgctttaaaaaagatgaattgaatgatccattagtttcaaaagaacatatttatttgtttggctgggcgaccgaaagtgaaattaagaatattgatataataactttaaggattaacgatcttttaactggaatgtttagagctatcggtatcaaacttgtagattttaaaattgaatatggaaaaacgtggaataaggaattagaaaaaaaagaaatagttttagcagagaaataa

SEQ ID NO: 312739 - DNA, 526 bp, Unknown
  Bacterial polypeptide expressing nucleotide sequence isolated from the Sargasso Sea
tatggcccgccgtacgaaaatttatgaaggtaaagcaaaaattttatatgaggggcctgaacccggaactattgttcaatattttaaagacgacgcaacagcatttaatgctgaaaaaaaagaggtaatcgaaggtaaaggcgtattgaataaccgtctatctgagttttttatgtcaggcctcaataatataggagttccaactcattttattaagcgcttgaatatgcgagaacaacttgttcgcaattgtgaaataattcctcttgaagtcgttgtacgaaactacgctgcaggctctatgtcaaaaaggttaggattagaagaaggtacacagctgcctcgtccagtagtcgaatactattataaggatgatagccttggggatccgttagtatctgaagaacacatagcagcttttaattgggcttctccacaagatatggatgatattctgggtctagctctgagagtaaacgattttttatctggcataatgttcagtgttggaatcaaattaagttga

SEQ ID NO: 312740 - DNA, 436 bp, Unknown
  Bacterial polypeptide expressing nucleotide sequence isolated from the Sargasso Sea
tttgctagaatattaccttaaaaatgatgaactgggagatcctttaattagttcagagcatatattcacatttaattggctaaaattttcagaattagatttcgtaaataaagagtgtagaagaataaacgattttttacagggtatgttcagaggtgttggaattaagttggtagattttaaaatcgaatttggaaaaactaaatctgataataaaattattttagctgatgagattagtcctgatacatgcagattgtgggatgtcaaaactgaaaaaaaacttgataaagatagatttagaaaagacctgggaaatattattgaggcatatcaagaaatagctataagacttggtataattcatgagcagtcaaatattagacctttaaaattcacaaaaccaagagaagtaaaatttaaaaaaaataaatga

SEQ ID NO: 312741 - DNA, 628 bp, Unknown
  Bacterial polypeptide expressing nucleotide sequence isolated from the Sargasso Sea
tgctactgcattcaatgctcagaaaagagggtctgtagaccttaaaggagagatgaacaatgtgatcaccactcttatttttgaatacctgaatgaaaaagggattaagactcatttcattaaacaactgaacgaaagagaacagttggtaagaaaagtatctatcattcctttggaaatggtggtaagaaactattccgctggaagcatggctcagagattaggagtggaagaaggaataaaatctccggttaccatcttcgatatctgctacaaaaaagacgagttgggagatccgcttatcaacgatcaccacgcagtgttcttaggtgccgcaacgtatgaggaacttgatgaaatgtatgaattaacttcagacatcaatgaaatcttaattgatcttttcgataaaatgaacatcatccttgtagatttcaaaattgaattagggaaaactgcagatggtgaaatcattctggcagacgaaatttctcctgatacatgcaggctttgggacaaagatactatgaagaaactggataaagacagattcagaagagatcttggtgaagttaccgaagcgtatgttgagatttataacagattgaaagctgttcttaacaaataa

SEQ ID NO: 312742 - DNA, 268 bp, Unknown
  Bacterial polypeptide expressing nucleotide sequence isolated from the Sargasso Sea
gatgaataaaggtaaaaaactgtacgagggtaaagctaagattctttatgagactaaagacaaagatcttattatccaacattttaaagatgatgcaacagcttttaataatttaaaaaaagctaatgttgagggcaaaggagtccttaataatagaatatctgaatatattttaaccaatctttctcaatgcggaattaaaacacactttataaaacgtttgaatatgagagaacaactgattaaaaagctgaaatattccccatag

SEQ ID NO: 312743 - DNA, 667 bp, Unknown
  Bacterial polypeptide expressing nucleotide sequence isolated from the Sargasso Sea
actataattgagggcaaaggggttttaaataatcggatttcagaacatatcctctcaaatctatctcaaattggaattaaaaatcatttagttaaaagattaaacatgagggagcaagtaattaaattagtggagattattccaatagaatttattgtaagaaatgttgctactggatcattaaccaaaagacttggtattgaagatgggactgttcttaaagaaccattaattgaatattgctataaagatgacaagcttggcgatcctttaatagctgaagatcatatctttgcgtttgaatgggcaagtaaaaaagaaatagaaaaagtaaaaaaaatgatcttaagaattaacgactttatgattggaatgtttagaggtattggaattaaattaatagattttaaattagaatttgggagaataaaaattaatggtaaaaatgaaatcatacttgctgatgaaataagccctgacacgtgtagattatgggattctattactgataaaaaactagataaagacagatttagaaaagatcttggagatttaataccagcttatactgaggttgcaaaacgactaggtattcttcatgaacaatcaaatgttactgctgtcaatgtaacaaaactatcatcagttaaaaaaaaaaataaatgaa

SEQ ID NO: 312744 - DNA, 499 bp, Unknown
  Bacterial polypeptide expressing nucleotide sequence isolated from the Sargasso Sea
attgtaactggctctttaaccaaaagactagatatagaagatggaagtaagttgagtagacctttgatagagttttgttataaaagtgataaactcggtgatccattagttgcaagagaacatatttatgcttttgaatggtcatctcttaaagaattagattatataaacgaacaatgtttatgtattaatgattttttattaggaatgtttaaaggtattggaataaaattagttgatttcaaacttgaatttggaaaaagaaaatctgacggtaagattatattggctgatgaaataagtcctgatacatgcaggttatgggatgctgatacagataaaaaattagacaaagataggtttagaaaagatttaggtgatgttgttgaagcttatcaagaagttgcgagaagactggggattttacatgaacaagttaataatattagaccaattaaatttccaaaacctacagctgtaaaaatgaagaaaaaataat

SEQ ID NO: 312745 - DNA, 494 bp, Unknown
  Bacterial polypeptide expressing nucleotide sequence isolated from the Sargasso Sea
aatgattgcaaaaaaaataaaagttatacctttagaaattgttttgagaaatactgcttatggttctctttgtaaacaaacgactattaaagcgggcacagttttggcaaaaccattaattgatatttatcttaaaaatgatgaacttaatgatccgctaattacaaaagatagaattgcattaatgaatatcctaaacttacaagatttagaattagtaatagatttaactttaaaaattaatttaattctgaaaagtttctttaagaatattcagcttcaactcatagatttcaagttagagtttggttatgattttaaaaataatattttacttggagatgaaatcagtcctgataattgcagattatgggatctaaatcagaaaaatgatacaattgtaagtctagataaagatagatttagaaatgatttaggtggcctaattgaagcatatagtgaaattaaccgaagaatagatgatttcatttaac

SEQ ID NO: 312746 - DNA, 609 bp, Unknown
  Bacterial polypeptide expressing nucleotide sequence isolated from the Sargasso Sea
accttggtcaagtaggtattaaaaatcacttagtaaaaagaattaacatgagagaacaattaataaaatttgttgaaattatacctatagaatttattgtaagaaatatagctactggttcattaaccaaaagattagatattgaagatggaacagtcttagaaaatccattaattgaatattgttataagaaagatgaattaggagatcctttggttgcaaaagaacatatatacgcttttaattgggcttcgcgaaaagaaattgagaaaatagataaatatcttttgagaatgaatgattttatgattggcatgtttaggggtattggaattaaattagttgattttaaagtagaatttggaagatacaaaaataatggcaaaactgaaattatattagcagatgagattagcccagacacttgtagattatgggacatatcatcagataaaaaacttgataaagataggtttagaaaaaatttaggaaatgtaatgcaagcttatcaagatgtggctagaagacttggtattttacatgaagaatcaaatataagagccgtaaagtttcctaaaccgaaagcagtaaaaattaaaagaaagtaaa

SEQ ID NO: 312747 - DNA, 698 bp, Unknown
  Bacterial polypeptide expressing nucleotide sequence isolated from the Sargasso Sea
actgcttttaataatcttaaaaaaagcgaaggttgagggtaaaggtgttttaaataatagaatttctgaatacatattatctaatctctctcagtgtgggattaaaactcatttagtcaaaagattaaatatgagagaacaattgattaaaaaagcagagatttttccaattgaatttatcttaagaaatatttccacaggctcgttgacaaaaagacttggtattccggaaggtacggttttggaaaaaccattattagaatattgttataagaaagatgaattaaatgatccattaatttctaaagatcatatattttcttttggatgggctacagaaaaagaaatgaaaattattgataaaacaaccttaagaattaacgatatcttaacaggaatattcagagccattggaattaagcttgtagacttcaaaattgaatatggaaaagtttgggataagaataaagagaaaaatgaaattgtcttagcagatgaaattagtcctgacacgtgcagactttgggacgtaaaaactgaaaaaaaactggataaagacagatttagaaaagatttaggaaatattatacaggcataccaagaagtagccagaagattaggaataatgcctgaagagactaatatcagtgaagtgaactttggtaaaaccattccgttaaaattcaaaaaaaattaaa

SEQ ID NO: 312748 - DNA, 475 bp, Unknown
  Bacterial polypeptide expressing nucleotide sequence isolated from the Sargasso Sea
gctgggtatagaagatggaactgttttaaaagaaccattgattgaatattgttacaaggacgactctcttggagatccgctgatagctgaagaccatatttatgcatttgaatgggcaacaaaaaaagagatagaaaaggttaaaaaaatgatcttgagaataaatgattttatgattggaatgtttaggggagttggtatcaaattaattgatttcaaattagaattcggaagattaaaagttaatggaaaaaatgaaattattctagcagatgaaattagtcctgatacatgtagattgtgggactctattactgaaaaaaaacttgataaagatagatttagaaaagatttaggcgatctcatacctgcttatactgaagtagcaaaaagactaggtattcttcatgagcaatcaaatgtatctgctgtaaatgttactaaattatcctcagtcaaaaaaaaaaataaatga

SEQ ID NO: 312749 - DNA, 385 bp, Unknown
  Bacterial polypeptide expressing nucleotide sequence isolated from the Sargasso Sea
atgaataaaggtaataaattatacgaaggcaaagctaaaataatttatgaaactaaagataaagatttagttatccaacactttaaagatgatgcaactgctttcaataatcttaaaaaagcaaaagttgaaggtaaaggagttttaaataatagaatttctgaatacatattatcaaatctgtcccaatgtggaattaaaactcatttagttaaacgattaaatatgagagaacaattaattaaaaaagcggaaatatttcctatagaatttatcgtaagaaatattgccaccggttcattgactaaaagacttgggataccggagggcacatctttggaaaagcctttgctagaatattgttataaaaaagatggaacttaat

SEQ ID NO: 312750 - DNA, 631 bp, Unknown
  Bacterial polypeptide expressing nucleotide sequence isolated from the Sargasso Sea
aatgaaaaaaggtaaaaaactttacgagggaaaagccaagataatttattcaacctcagataaaaatttagtaatccaatacttcaaagatgatgctactgcatttaataatgaaaaaagaactattattgagggtaaaggagttctaaataatagaatttctgaacatatactcacaaatttatctcaaattggtattgaaaatcatttagtcaaacgactaaacatgagagaacaattaattaaatttgtagaaataattccaattgaatttgttattcgtaacgtggcgacaggatctttaactaaaagacttggaatagaggatggaactgtactaaaagaacctttaattgaatactgtttaaaagatgacaaacttggtgatcctttaatttcagaggatcatatttacgcatttgaatgggcaaataaaaaagaaattgaaaagataaaaaaaactatttttagaattaatgattttatgattggaatgtttagaggggtaggaataaaattaattgattttaaattagaatttggaagaactaaaattgatggaagaaaagaaataattttggctgatgaaataagccctgatacttgtagattgtgggattctgcaactgac

SEQ ID NO: 312751 - DNA, 559 bp, Unknown
  Bacterial polypeptide expressing nucleotide sequence isolated from the Sargasso Sea
atgaataaaggaaaaaaactgtacgagggtaaagctaaaattctttatgaaacaaaagataaaaatttattaatacaacattttaaagatgatgctactgcatttaataatttaaaaaaggcaagcgtagagggaaaaggtgttcttaacaatagaatatcagaacatattttaactaatctttctcaatgtggtattaaaactcactttataaaaagaatcaatatgagagaacagcttattaaaaaggctgagatttttcccattgagtttatagtcagaaatatcgctacgggatctttaacaaaaagacttggtatttcagaaggaactgttttggaaaaacctttactagaatattgttttaaaaaagatgaacttaacgacccaataatttcaaaagaacatattttctcttttggttgggcctctgaaaaagacattaaaataattgataaaatgacattaagaattaacgatttgcttgtaggaatgtttagaggaataggtataaaattagtggattttaaaattgaatatggaaaaacttggggataaa

SEQ ID NO: 312752 - DNA, 313 bp, Unknown
  Bacterial polypeptide expressing nucleotide sequence isolated from the Sargasso Sea
catgcctgaggaattactttacgagggaaaagccaaaaagcttttcatcacagaggattcgcaaattttgcgggttgagtacaaagatgatgcgaccgccttcaatggggaaaaatttgaccgtttgagagataaaggacgtctgaacaacgcgatcacgggttttttcttcgaacacctcgatacaaaagacattccgagtcactttgttcgcaagatttccgaaaccgagcagttggtcagaagggtgaaaatcatccccctggaagtggtggtccgcaatgtggcggcaggatctcttagtaaacgcatc

SEQ ID NO: 312753 - DNA, 574 bp, Unknown
  Bacterial polypeptide expressing nucleotide sequence isolated from the Sargasso Sea
agacttaatatgagagaacaggtaattaagcttgcagaaattattcctattgaatttatagtaagaaatatagcttcgggttctattacaaaaagacttggtatagaagatggtaccgtattaaaaaatcctttaatagagtactgccttaagaatgataaactaggagatccattaatcgctgaagaacatatactaacatttggttgggcaacaaagaaagaaattgaaaagatcaaaaaaatcattttaagaattaacgattttatgattggaatgtttagaggtgttggaattaaacttgtagatttcaaattagaatttggtcgtattaaatcgagtaataaaaaagatatcattctagctgacgaaataagtcctgacacatgtagattgtgggatgctttaactgaaaaaaaattagacaaagataggtttagaaaaaatcttggtgggttaatacctgcttatacagaagttgcaaaaagattgggtattttacatgaacagtcaaatgtaaattcttctaatgttactaatttaaacatatataaaaagaaaattaaaaaatgaa

SEQ ID NO: 312754 - DNA, 438 bp, Unknown
  Bacterial polypeptide expressing nucleotide sequence isolated from the Sargasso Sea
atataacagctggttctattgcaaaaaaattaggtattaaagaaggattaaagcttaaaaaacctttactagaatattattacaaagaagacagtttggatgacccaatgatttcaagagaccaccttatcacttttggctgggcaacaaactctgagctgaaaaaaatagataaaatgtctcttaaaattaataagcacttaagaaatcttttttttaaaaagaatatcatacttgtagatttcaaaattgaattcggtaggctctcatcgaaccccaaaaaaattgtattagctgatgaaataagtcctgattcttgtcgattatgggataaaaaaactaataagaaacttgataaggatgtattcagaagaaacctcggcagtttattaagtgcatatgaggaggttgcctcaagattaggaatcgtgcattaaa

SEQ ID NO: 312755 - DNA, 558 bp, Unknown
  Bacterial polypeptide expressing nucleotide sequence isolated from the Sargasso Sea
aatgaaaaaaggaaaaaaattatacgaaggtaaagcaaaaattatttatgcttcttctgataaaaatttagttatccaatattttaaagacgacgccactgcttttaataatcagaaaaaaagtaccatagagggaaaaggtgtattgaataatcgtatttcagagcacatactttctaatctgtctcaaataggaattaaaaatcatttagtaaaaagattaaatatgagagagcaattaataaaattagtagaaattattccaattgagtttgttgtcagaaatgttgctaccggctctttaacaaaaagacttggaattgaggatggaacagttcttaaagaacctctaattgaatactgtctaaaggatgatgaacttggagaccccttaatagcagaagatcatatctatgcttttgagtgggcctcaaaaaaagaaattgaaaaagtaaaaaaaatgatcttaagaattaacgatttcatgattggtatgtttagaggcgttggtattaagttgatagactttaaacttgagtttggaagaataaaaataaa

SEQ ID NO: 312756 - DNA, 715 bp, Unknown
  Bacterial polypeptide expressing nucleotide sequence isolated from the Sargasso Sea
aatgaaaaaaggtaaaaaactttatgaaggaaaagcaaaaattatatttgcttctcctgataaatatttagttattcaacactttaaggatgatgcaaccgcgtataacaatcaaaaaagagctagtattgaaggaaagggaattttaaataatagaatttcagagcacattttatcttctttaaaagatgtgggaattgaaaatcatttaattaaaagacttaatatgagagaacagctaattaatttggttgacataattccgattgaatttgtagtaagaaatattgttactggttctttaacaaaaagactgggtattgaggatggaactatattaaataagccattaatagaattttgttacaaaaacgataatcttggtgatccactagttgcaagggagcatatatatgcttttggatgggcttctttgcttgaactagattttataactaaacagtgtttacgaattaacgattttttacaaggtttgtttaaaggtattggaattaaattagtagattttaaactagaatttggaaaaagaaaatcagatgggaaaattattttagctgatgaaatcagtcctgatacatgcagattgtgggatgcaaatacagacaaaaaacttgataaagatagatttagaaaagatttaggaaatataatggaagcttatcaagaagtagctaaaagacttgggatattacac

SEQ ID NO: 312757 - DNA, 322 bp, Unknown
  Bacterial polypeptide expressing nucleotide sequence isolated from the Sargasso Sea
atgaaaaaaggtaaaaaaatttacgagggaaaagccaagataatttattcaacctcagataaaaatttagtaatccaatactttaaagatgatgctacagcatttaataatgaaaaaagaactactattgagggtaaaggagttttaaataatagaatttctgaacatattcttacaaatttatctcaaattggtattgaaaatcatttagtcaaacgactaaatatgagagaacaattaattaaatttgtagaaataattccaattgaatttgttatacggaatgttgcgacaggatctttgactaaaagactggaataga

SEQ ID NO: 312758 - DNA, 532 bp, Unknown
  Bacterial polypeptide expressing nucleotide sequence isolated from the Sargasso Sea
ataattcctatagaagtaattgtaagaaatattgcaactggatctcttacaaaaagactcgggattactgatggaaccattttagaaaaacctttattagaattttgttacaagaaagatgagcttgatgaccctttgattgcaaaagagcatatatttgcttttaattgggcaacgaaagaggaaatagaaactattgaggagatgacttttagaataaatgattttatgtctggtatgtttagaggaataggaattaaattagtggattttaaattagagtttggaagattttggaatgataataacaatgaaattattcttgccgatgaaattagtccagatacttgtagattatgggatataaaaagtgaaaaaaaattagataaagatagatttagaaaagatttaggaaatataattcaagcatatcaagaagttgctagaagattaggtatagttcctgaaacaactaatgtcagtgaagttaattttaagaagcctacatcaataaacataaaaaaaaaataaa

SEQ ID NO: 312759 - DNA, 418 bp, Unknown
  Bacterial polypeptide expressing nucleotide sequence isolated from the Sargasso Sea
gatgacaagcttggtgatcctttaatttcagaggatcatatttacgcatttgattgggcaaataaaaaagaaattgaaaagataaaaaaaactatttttagaattaatgattttatgattggaatgtttagaggcgttggaataaaattaattgattttaaattagaatttggacgaactaaaattgatggaagaaaagatataattcttgctgacgaaattagccccgatacttgtagattgtgggactctaaaactgacaaaaaacttgataaagatagatttagaaaagatttgggagatttattacctgcgtataccgaagttgcgaaaagacttgggattctgcatgagcaggcgaatgtttcggcagtaaatgtaacaagactatcctcaattaaaaagaagcgaaaatgat

SEQ ID NO: 312760 - DNA, 640 bp, Unknown
  Bacterial polypeptide expressing nucleotide sequence isolated from the Sargasso Sea
atgaaaaaaggtaaaaaactgtacgaaggaaaagcaaaaattatttttgcttctgatgagaaaaatttagtcatccagcattttaaagacgatgcaactgcttttaataatcaaaagagaacaatcattgaaggtaaaggaatattaaataatagaatttctgagcatattctgtcttttctaaaagaaataggaataaataatcatttaattaaaagacttaatatgagagagcaactgattgagttagttgacattatccccattgaatttgtaatacggaatatagctaccgggtctttaacaaaaagacttgatatagaagatggaacagttctcaattcaccattaattgaatactatttgaaaaatgatgaattaggcgacccaataatttcaagagaacatataattaattttggatggcttaaaaagttagaattagaatcaattaatgaacagtgtttaagaattaatgatttattacaaggaatgtttagaggaataggaataaaattagtagattttaaaattgagtttggaaaaagaaaatctgacgggaaaattattttagctgacgaaattagtcctgatacatgtagattatgggatgaagatactgataaaaaactagacaaag

SEQ ID NO: 312761 - DNA, 371 bp, Unknown
  Bacterial polypeptide expressing nucleotide sequence isolated from the Sargasso Sea
acttgcatttaaatggttaaaagtgatggaattggactggataaatgaagagtgcaaaagaattaatgattttttacaaggaatgtttagaggcgtaggtattaaattagttgattttaaaattgaatttggaaaaactaaatctgaaaataaaataatcttagcagatgaaataagtcctgacacatgcagactttgggacattaatacagaaaaaaaattagataaagatagatttagaaacaatcttggtaatttaattgaagcttatcaagatgtggcaagaagacttggtattcttcatgaacaatcaaatataagacctttaaagtttcctaaaccaaaagctgttaaattaaaaaaaaggtaaa

SEQ ID NO: 312762 - DNA, 658 bp, Unknown
  Bacterial polypeptide expressing nucleotide sequence isolated from the Sargasso Sea
atgaaaaaaggtaaaaaattatacgaaggaaaggctaaaatcatttatgctacaaatgataagaacttagttatccaatattttaaagatgatgcaactgcattcaataatcaaaaaaaaactaccattgaaggtaaaggtgtactaaataacagaatatcagaacatatactctcgaacctttctcaaataggaattaaaaatcatttagtaaaaagattaaatatgcgtgagcaaattataaagcttgtagaaataattccgatcgaattcattgtgagaaacgttgcaacaggttcaattaccaaaagattgggaattgaggacggtacagttttaaaagaacctttaatcgaatactgcttaaaagatgacaaacttggagatccattaatatctgaagagcatattttgacatttgattgggcgtcaaaaacagaaatagataaagttaaaaaaatgattttaagaatcaatgattttatgattggaatgtttagaggtgttgggattaagcttattgattttaaattagaatttggaagaattaaaattgacggaaaaaatgaagttattttagcagatgaaattagtcctgatacatgtagattatgggacagtattacagaaaaaaaattagataaagatcgatttagaa

SEQ ID NO: 312763 - DNA, 631 bp, Unknown
  Bacterial polypeptide expressing nucleotide sequence isolated from the Sargasso Sea
agaatttctgagcatattctttcaaatttgtcacaaattggaattaaaaaccattttgtaaaaaggttaaatatgcgagagcaactggtaaatcatgtcgaaattattcctatagaatttattatcagaaatattgcaacaggatcattaacgaaaagacttggtattgaagaaggtacatttatagaaaaacctctattagaatattgtttaaaaaatgataaactaggagatccgttaattagtagagaacacatattaacttttaattggctgagcgctaacgaattagacttaataaacgaggaatgcaaaagaataaatgactttttgcaaggcatgtttagagctgttggtattaaattagtagattttaaactagaatttggaaaaaaaaaatctgataataaaataattttagctgatgagattagtcctgatacttgtagattatgggactctgtaactgaaaaaaaacttgataaagataggtttagaaaagatttaggaaacataattgaagcatatcaggatatagctattagacttgggataattcacgaacaatcaaatatcagacctttaaaatttacaaaaccaagagaagtaaagttgaaaaagaataaatgaa

SEQ ID NO: 312764 - DNA, 752 bp, Unknown
  Bacterial polypeptide expressing nucleotide sequence isolated from the Sargasso Sea
aatgaaaaaaggcaaaaaactatacgaaggtaaagctaaaattctttatgctgctcctgaaaaaggatttgcaatacaacactttaaagatgacgctacagcttttaataatttaaaaaaatctacaattgaaggcaaagggattttaaataaccgaatatctgagcacattctgtctagtttaaatcatatagggattgaaactcatttggttaaaaggatcaatatgagagaacagttagttaaattagttgaaattattcctattgaattcattgtaagaaatatagcaagtgggtccttaactaaaaggcttgggattgaagaaggaactgttcttgaaaaaccgcttttagaattttgctataaaaatgattctttagaagatccgttaattgcaagagaacatatttatgcttttaactattgtgatatggcaacattagatcgtattaccaagaaatgttatagaataaatgattttttacaaggaatgtttaaagcaatagaaataaaattagtcgattttaaattagagtttggattaacaaaactagaagaagatgggtcaccggttgtaaaaatcttaatagctgatgaaattagcccagatacttgcaggctatgggatgcaacaacagataagaaacttgataaagatatatttagaaaagatttaggtaatttaattgaaggttatcaagaaattgcaagaagattaggaatattacatgaacaatctaatattagcc

SEQ ID NO: 312765 - DNA, 691 bp, Unknown
  Bacterial polypeptide expressing nucleotide sequence isolated from the Sargasso Sea
atgaaaaaagggaaaaaattatacgagggaaaagctaaaattatatacgcgacatcggataaaggtttagtaattcaatactttaaggatgatgcaacagcatttaataatcaaaagaaaagtactattgaggggaaaggagttttaaacaatagaatttcagagcatattctttcaaatctttcacaagttgggattaagaatcatttagtaaaacgtctcaatatgcgagaacaattgatcaagcttgtagaagtaattccaatagagttcataacgagaaatgttgcaacaggatcaattaccaaaagattgggtattgaggatggtacagttcttaaggaaccattaatcgaatattgtttaaaagatgatgctttaggagatccattaattgctgaggaacatatttatacttttgattgggcaacaaagaaagaaattgaaaaaataaagaaaatgattttaagaataaatgacttcatggttggcttgtttagaggcatcggaattaaactaattgattttaaattagaatttggaagaattaaaattaatggaaaaaatgaaattattttagctgatgaaataagtccagatacttgcagattgtgggactcaattactgacaaaaagctcgacaaagatagatttagaaaagatttaggagatttaattccagcctatacag

SEQ ID NO: 312766 - DNA, 787 bp, Unknown
  Bacterial polypeptide expressing nucleotide sequence isolated from the Sargasso Sea
atgaaaaagggaaaaaaactatacgaaggtaaagcaaaaatcatttatgcaacaaatgataaaagtttagttatacaatactttaaagacgacgcaacagcattcaataatcaaaaaaaaactactattgaaggcaaaggtgttttgaataatagaatatcagaacatattctttcaaatttatctcaaataggaattaaaaatcatttagttaaaagattaaatatgcgtgaacaaataattaaactagttgagataattccaattgaatttattgttagaaatgttgcaacaggatctatcactaaaagactaggtattgaggatggaactgttttaaaagaaccattaattgaatactgcttaaaagatgaccaattaggtgaccctctaattgcagaagagcatataattgcttttgattgggcaacgaaaaatgaaattgacaaagttaaaaaaatgattttgagaattaatgattttatgattggtatgtttagaggagttggaattaaattgattgatttcaaattagaatttggaagattaaaatcaaatggcaaacaagaagtaatcttagcagatgaaataagccctgatacatgtagactttgggacagtattactgataaaaaacttgataaggatcgatttagaaaagatttgggtgatttgataccagcttatacagaagttgctaaaagattgggtattttgcatgaacaatcaaatttaagtgctgtgaatgttacaaaattgtcatctgttaaaagaaagaacaaatgaa

SEQ ID NO: 312767 - DNA, 526 bp, Unknown
  Bacterial polypeptide expressing nucleotide sequence isolated from the Sargasso Sea
atgaaaaaagggaaaaaattatatgaaggaaaagctaaaatcatttatgcaacaaacgataaaaacttagttatccaatattttaaagatgatgcaactgcattcaataatcaaaaaaaaacaactattgaaggcaaaggtgttctaaataatagaatatcagaacatattctttcaaatctctcgcaaataggaatcaaaaatcatctggttaaaagattaaatatgagagaacaagttataaaactagttgaaataattccgatcgaattcattgtgagaaatgttgcaacaggttcaattactaaaagattgggtattgaagatggtacagttttaaaagaacctctaattgaatactgcttaaaagatgacaaacttggggatccattaatatccgaagaacatattttagcatttgattgggcgacaaaaacagaaatcgataaagtaaaaaaaatgattttaagaattaatgattttatgattggaatgtttagaggtgttggaattaaacttatcgatt

SEQ ID NO: 312768 - DNA, 562 bp, Unknown
  Bacterial polypeptide expressing nucleotide sequence isolated from the Sargasso Sea
aatatgagagaacaattaattaaacatgtgagtataattccaatagagtttatagtaagaaatattgcaacaggttcactgactaagaggcttgggatcgaggaagggaccgttttggataaccccttaatagagtattgtttaaaagatgataaattgggtgatccactgatatcaaaggaacatattttaactttcaagtgggctaccaaaaaagaaattgaaaaaattgataagcaattaaatagaattaatgattttcttgttggaatgtttaggggtgtgggaattaagttggtagattttaaagttgaatttggaagattaaaaaatagtaatgaagttattttggcagacgaaataagtcctgatacatgtaggctctgggatatgaataccgaaaaaaaattagataaagatagatttagaaataatttaggtaatttagtcgaagcttatcaagatgtggcaagaagacttggtattcttcatgagcaatcaaatataagaccaataaagtttccaagaccaaaagctgtaaaactaaaaaaaaataaatgaa

SEQ ID NO: 312769 - DNA, 739 bp, Unknown
  Bacterial polypeptide expressing nucleotide sequence isolated from the Sargasso Sea
atgaataataaatatgagttgatatatgaaggcaaagcgaaaaaagtatttactcataatgatgcaaataaagtaaaaattgaatttaaagatgatgctacagcgtttaatgcgttgaaaaaagaaaagtttgaaggtaaaggcaaacttaattgcttaataagcgcaagaatttttgagattctcattaagaaaaatattccaactcactttattgaacttgaaaatgaaaacacaatgattgcaaaaaaaatgcaagtaattccattagaaattgttctaagaaatactgcttatggttctttgtgcaaacaaaccactattaaacctaaaactttgttaccaaaaccattaattgatatctatctaaaaaatgatgaacttaatgatcccctcgttacaaaagatagaattgaattaatgaatatattaagctctcatgatttagagttaataataaatttaaccttaaaaattaatgtaatcttgaaaagtttttttaaaaatattcaacttcaacttgtagattttaaattggaatttggttatgattccaataacaatattattttgggtgatgaaataagtcctgataattgtagattgtgggatctaaatcaaaaaaatgatattattgtaagtcttgataaggatagatttagaaatgatttaggtggcctgattgaagcttatagtgaaatccacagaagaataaacgattttcttaaacctaattgaa

SEQ ID NO: 312770 - DNA, 784 bp, Unknown
  Bacterial polypeptide expressing nucleotide sequence isolated from the Sargasso Sea
aatgaaaaaaggcaaaaaactttacgaaggtaaagcaaaaataatatttgctacgagtgataagaacgttgtaattcaacattttaaagatgatgcaactgcatttaataatcagaaaaaagcaatcattgatggaaaaggaattttaaataacagaatttctgaacacatactttcatctcttacagaaataggtattaaaaatcacttaatcaaaagattaaatatgagagaacaacttgtagaaatggtaaacattataccaattgagtttgtaattagaaatattgcaactggatctttaactaaaagattaggaattgaagaaggaacagttttagattatccattaatcgagtattgtttaaaagatgataaacttggtgatccattaatttctagtgaacatattttaaattttaaatggctaaacataactgaattagatttaattaataatcaatgcctaagaataaatgattatcttcaaggtttatttagaggtataggaattaaattagttgattttaaagtagaattcggaaaaacaaaatcaaacgaaacaataatgctagctgacgaaattagtccggacacttgtaggttatgggatcaagaaactgataaaaaattagataaagatagatttaggaaagatttaggtaatattgtagaagcgtatcaagaagtagctagaaggcttggaattcttcatgaacaatcaaacataagaccaataaaattctccaaaccaactgcagtaaaaattaaaaaaggtaaatga

SEQ ID NO: 312771 - DNA, 772 bp, Unknown
  Bacterial polypeptide expressing nucleotide sequence isolated from the Sargasso Sea
aaactttatgaaggaaaagctaaaattatttatgctactacagataaaaatttagtcattcaatacttcaaagatgatgcaacagcatttaataaccaaaaaaaaagtactatagaaggtaaaggagttttaaataatagaatttctgaacatattctctcaaatttatctcaaataggaattaaaaatcatttagtcaaaagacttaatatgagagaacaagtaattaaactagttgaaattattccgattgaattcattgttagaaatgttgcaacgggatcaattacaaaaagattgggtattgaagatggaactgttcttaaagaacctttaatagagtattgtttaaaagatgacgctcttggagatccactaattgctgaggaacatatttatgcttttgaatgggccaataaagatgagatagaaaaagtaaaaaaaatgatcttaagaataaatgattttatgataggaatgtttagaggaattggaattaaacttattgatttcaaattagaatttggacgattaaaaaataatggaaaaaatgaaattattcttgcagacgaaattagcccggatacatgtagattgtgggattcaataacagataaaaaacttgataaagatagatttagaaaagatcttggagatttaattccagcttatacagaagttgcaaaaaggttaggtattcttcatgaacaatctaatgtaacagcggttaatgtaacaaaattatcttctgtcaaaaaaaagattaaatgaa

SEQ ID NO: 312772 - DNA, 754 bp, Unknown
  Bacterial polypeptide expressing nucleotide sequence isolated from the Sargasso Sea
atgacgcccgatcacggagagctgctttacgagggcaaggcgaagcgggtgttcgcgagtgcggatcccgaccgggtgctggtggagttcaaaaacgacgccacggccttcaatgcccagaaaaaagcccagctggagaacaaaggtcggctgaattgtcagatctcggcacggttgttcgagctgctggagcgcgagggggtgccgacccattactgcggtctggtcggggagacctggatgcaggtgcgacgggtggagatcattcccttggaggtggttctccgcaacaccgccacaggatcgctctgccgtcagaccccaatcgccgagggcacacccatcgatccagccctgttggatctgtattacaaggacgacgcccttggggatccgctgttgaccgaggcccgcgtgcatctgctgggtgtggcggacccagcgcaactgtcagcaattgaacaacttgcccgcagggtgaatggggtgctgcggcctttttttgaagaaattgatctgcagctggtggatttcaagttggagttggggctggcgtccgatggaacactcctgctcgctgatgagatcagccctgacacctgcaggctctgggaccgccgcaacagcaacgccgaggaccggattttggacaaggatcgcttccgcaaggatctcggcggggtgatggaggcctacggggaggtcctcaaacgggtccaaggcacctgcgcgaacccccgcaactgcctgtaag

SEQ ID NO: 312773 - DNA, 664 bp, Unknown
  Bacterial polypeptide expressing nucleotide sequence isolated from the Sargasso Sea
ggtaaaggagttttaaataatagaatctcagaacatattttaactaacctatctcagtgcggaattaaaacacacttcattaaaagattaaacatgagggaacaacttattagaaaggctgaaatctttcctattgaatttatagtaagaaatatagccacaggatctttaactaaaagacttggcattcctgaaggaacagtactagagcatccgctattggaatattgttttaaaaaagatgatttgaacgatccattaatttcaaaagaacatattttttcttttggttgggctacaaaaaaagaaataagtgagattaataaaatgacgttaagaattaatgatttattggtaggtatgtttaggggaataggtattaaacttgtggatttcaaaattgaatatggaaaagcttggaataaagaaaatgaggaaaaagaaatagttctagctgatgaaataagtccagatacatgtcgattatgggactcaaaaactgaaaaaaaacttgataaagacaggtttagaaaagatttaggaaatataattcaaggttatcaggaagtggcaagaagattaggtattatgcctgaagaaacaaatataagtgaagtcaattttggtaaaactattccaataaaattcaaaaaaaaaaaataaa

SEQ ID NO: 312774 - DNA, 787 bp, Unknown
  Bacterial polypeptide expressing nucleotide sequence isolated from the Sargasso Sea
atgaataaaggaaaaaaactttacgagggaaaagcaaaaatcttatacgaaacaaaagaaaaaggtttagctatccagcactttaaagatgatgcaaccgcctttaataaccaaaaaaaggcaaatgttgaggggaagggggtgctaaataatcgtatttcagaacacattttacaaaatttaaatcaagcaggtattaaaactcatttaataaaaagattaaatatgcgagaacagcttgtaaaattagtagaaataattccaatcgaagtaataataagaaacattgcaactggctccttaacaaagagattggggatagcagatggaacagttttagaaaaaccgttgttagaattttcatacaaaaatgatgagttgggtgatcctcttgtagctaaagaacatattttggcattcaattgggctacaaatgatgagcttaaaacaattgaagaaatgacttttagaattaatgattttatgtcgggtatgtttagaggtgttggtataaaacttgttgattttaaattggaatttggaagactttgggaaaataataaaaaagaagttattcttgctgacgagataagtcctgacacatgtagactttgggatgtaaaaagcgaaagaaaattagacaaagatagatttagaaaagatctaggaaatattattcaagcgtaccaggaggtagctcgaagactaggtataatgcctgagacaactaatattagtgaagtaaactttaagaagcccacatcaattagcattaagaaaaaataaa

SEQ ID NO: 312775 - DNA, 730 bp, Unknown
  Bacterial polypeptide expressing nucleotide sequence isolated from the Sargasso Sea
aatgaatgataaatatgaattgctttatgaaggtaaagctaaaaaagtattttctcatgatgataaagataaagttataattgaatttaaagatgatgctactgcttttaatgctttgaaaaaagctaaattcgagggaaagggcaaacttaattgcctaattagttcaaggatttttgaacttcttataaagaaccatattccaactcattttattgaacttaaaaatgaaaatacaatgattgcacaaaaaataaaagtaatacctttagaaattgtcctgagaaatactgcttatggttctttgtgtaaacaaactactattaaatctggcactgtcctagcaaaaccattaattgatatttatcttaaaaatgatgaacttaatgatcctataattacaaaagatagaattgaattaatgaatatactaagctctaatgacttagatttaataataaatttgactttaaaaattaatttaatcctgaaaagtttttttaaaaatattcagcttcaacttgtagatttcaagttagagtttgggtataattttaaaaataatatacttcttgcggatgaaataagtcccgataattgtagattgtgggatcttaatcagaaaaatgatacaattgtaagtctagacaaagacagatttagaaatgatttaggtggcttaattgaagcttatagtgaaattaatcgaagaataaacgatttcatttaa

SEQ ID NO: 312776 - DNA, 787 bp, Unknown
  Bacterial polypeptide expressing nucleotide sequence isolated from the Sargasso Sea
taagggtaacaaactatacgaaggtaaagcaaagataatttacgaaactaaagataaaaatttagtcattcaacattttaaggatgatgccactgcttttaataatcttaaaaaagcaaaagttgaaggaaagggtgttttaaataacagaatctcagaatacatcctcacgaatttatcgcaatgcggaataaaaactcattttgttaaaagacttaacatgagagaacaattaattaaaaaagctgaaatttttccgattgagtttattgtaagaaatattgcaacaggatctttaactaaaagattgggtattccagagggtacagttttagaaaaaccgttgttagagtattgttataaaaaagatgaattgaatgatcctttaatctcaagagaacatattttttcttttggatgggccaccgaaagtgagataaaaattatagataaaattacattacgaattaacgatattttgctaggtatgtttagaggaataggtatcaaactagtagattttaaaattgaatatggaaaaacatggaataaagaaactaataaaaaagaaattgttctagctgacgaaataagccctgatacttgtagattatgggactctaaaactgaaaaaaaattagataaagatagatttagaaaagatttaggaaatattattcaagcataccaagatgttgcaaggagattgggaattatgcctgaggagacaaatataagtgaagttaattttggcaaaactatacctataaaattcaaaaaaaaataa

SEQ ID NO: 312777 - DNA, 721 bp, Unknown
  Bacterial polypeptide expressing nucleotide sequence isolated from the Sargasso Sea
aatgagatcatctaaaactttatatgaaggtaaggctaaaaaaattattaaagggcctaaaaaaaacacactcattcaaatttttaaagacgatgctacagcctataataaaaagaaacataaaatttttaaaggcaaaggcgtacttaacaatcatatttctgcacacataatgcagtatcttaagtcaaaacgcatcccaacacattttgaagaaaagctgaatgaccgtgagcaacttataaaaaaatgtgaaattattccgattgaatttgttgtaagaaatattacagctggttctattgcaaaaaaattaggtattaaagaaggattaaagcttaaaaaacctttattagaatattattacaaagaagacagtttggatgacccaatgatttcaagagaccaccttatcacttttggctgggcaacaaactctgagctgaaaaaaatagataaaatgtctcttcaaattaataagcacttaagaaatcttttttttaaaaagaatatcatacttgtagatttcaaaattgaattcggtagactctcatcgaaccccaaaaaaattgtattagctgatgaaataagtcctgattcttgtcgattatgggataaaaaaactaataagaaacttgataaggatgtgttcagaagaaacctcggcagtttattaagtgcatatgaggaggttgcctcaagattaggaatcgtgcattaa

SEQ ID NO: 312778 - DNA, 784 bp, Unknown
  Bacterial polypeptide expressing nucleotide sequence isolated from the Sargasso Sea
atgaaaaaagggaagaaactatatgaaggtaaagcaaaagttatttttgctactgacaataaagattttgtaattcagcattttaaagatgatgcaactgctttcaataatcaaaaaaaagcaaagattgaaggcaaaggtgttcttaataatagaatctctgaacatatattaatgaatctagatcaagttggaataaaaaatcatttagtaaaaagactaaatatgagggagcagcttattaaacatgtcgaaattattccgattgaatttattgtaagaaatattgcaactggctctcttacaaaaagacttgggatagaagatggtactattttagaagatccattaattgaatattgcttaaaaaatgacgaactaggagatcctcttatatctaaagaacatatatatacttttaaatgggcaactaaaaaagaaatagaaaaaatagataaacaactactaaggataaatgactttatggtaggaatgtttagaggtgttggtattaaacttgtagattttaaagttgaatttggaagaattaaaaataatggcaaaacagatatattgctagcagatgaaataagtccagacacatgtagattatgggataataagactgataaaaaattagataaagatagatttagaaataatcttggaaatttaattaatgcatatcaagaagtagcaaaaagattaggtattcttcatgaacaatccaacatacaagctgtcaattttgaaaaaccaaaagcggtaaaaaacaaaaaataaa

SEQ ID NO: 312779 - DNA, 700 bp, Unknown
  Bacterial polypeptide expressing nucleotide sequence isolated from the Sargasso Sea
atgaaggaaaggctaaaaaaattattaaaggggcctaaaaaaaatacactcattcaaatttttaaagacgatgctaccgcctataataaaaagaaacataaaatttttaaaggcaaaggcgtactaaacaatcatatttctgcacacataatgcagtaccttaagtcaaaacatatcccaacacattttgaagaaaaactgaatgaccgtgagcaactcataaaaaaatgtgaaattattccgattgaatttgttgtaaggaatattacagctggctctatcgcaaaaaaattaggtattaaagaaggattaaaactaaaaaaacctttattagaatattattacaaagaagacagtttggatgatccaatgatttcaagagatcaccttatcacttttggctgggcaacaaactctgagctgaaaaaaatagataaaatgtctcttaaaattaataagcacttaagaaatctttttctcaaaaagaatatcatccttgtagatttcaaaattgaattcggtagattgtcgtcaaaccccaaaaaaattgttttagcagatgaaataagtcctgactcttgtcgattgtgggataaaaaaactaacaagaaacttgataaggatgtgttcagaagaaacctcggtagtttattaagtgcatatgaggaggttgcttcaagattaggaatcgtgcattaaa

SEQ ID NO: 312780 - DNA, 730 bp, Unknown
  Bacterial polypeptide expressing nucleotide sequence isolated from the Sargasso Sea
atgaataacaaacatgagttaatttatgaaggcaaagcaaaaaaagtatttactcatgatgatgtagaaaaagtaagaattgaattcaaggatgatgctacagcttttaatgcattgaaaaaagaaaaatttgaaggtaaaggtaaacttaattgcttaataagtgcaagaatttttgagattcttattgagaagaatattccaactcattttattgaacttgaaaatgaaaatacattgattgcaaaaaaaataaaagtaattccattagaaattgttcttagaaatattgcttatggttctttatgtaaacaaacgaccatcaaaccaggaactttcctatcaaaaccactaattgatatctatcttaaaaatgatgaacttaatgatccccttattacaaaagatagaattgaattaatgaacatattaagctcagatgatttagaattaataattaatttaactttaaaagttaataaaatcctgaaaagtttttttaaaaatattcaacttcaacttgtggatttcaaattggaatttggttatgattttaaaaataatattcttctaggagatgaaataagtcctgataattgtagattatgggatctaaaccaaaaaaatgatacaattgtaagcctagataaagatagatttaggaatgatttaggtggtttaattgaagcttatagtgaaattaaccgaagaattaacgattatctttaac

SEQ ID NO: 312781 - DNA, 898 bp, Unknown
  Bacterial polypeptide expressing nucleotide sequence isolated from the Sargasso Sea
aatgaattctaaatctataaagcatactaacttaaagaacaaaattcattcaggtaaagttagagatatatatgaaattgatgaggataagctactcttcgtagcaactgatagaatttcagctttcgatgtaataatggaacaaacagttcctggcaaaggtattgtgttaaataacttaagttcgttttggtttgatttttttagtaattacaacacacactttatttctaaagcagtagattttgatttctcaaatacaaattatgatgaaatttttgacttagaaatattaaaaagatcgactgtagttaagaaggctaaaaggatagatatggaatgtgttgttagaggatttattactggaagtgcttggaatgagtataaatctagaaatagcgtaaatttcaaaccaattatggaaaaccttttagaagctgaaaaatttaatactcctatatttaccccttctacaaaagctgaggaaggtcatgatgaagcattatctgaagcggaaggtaaaaatttggtaggttctgaaatttactcaaagttagaaaatttatcgattaatttatattctaaggctgctaaattttgtgaaaataaaggaattttacttgctgatacaaaatttgaatttggttttattgatgatcaaatagtcttaattgatgaagttttaactccagattcaagtagattttggaaatctagtgattataaattaggctattctcctgatccatttgataagcaattcttaagaaattggctaaatgatcaagtatgggataagactcctcctcctcctgatttacctgatagtgtaataaaaaacacattaaaaaggtatttagatatctatgaaattattactaatgataatctagaatag

SEQ ID NO: 312782 - DNA, 787 bp, Unknown
  Bacterial polypeptide expressing nucleotide sequence isolated from the Sargasso Sea
aatgaaaaaaggaaaaaaactatatgagggaaaagctaaaattatttatgcaacttctgataaaaatttagtcattcaatattttaaagatgatgcaacagcatttaataatcaaaaaaaaagtaccattgagggcaaaggtgtcctcaataatagaatttcagagcatatactcttaaacctaaatcaaattggaattaaaaatcatttagtaaaaagattaaatatgagagaacaacttgtaaaacttgtagatattattcctattgagttcattgtaagaaatattgtaactggatctttaacaaaaagattaggtattgaagatggaacagtacttgactatccgttgatagaatattgtctcaaagatgataagttgggtgatccaaacataagtagagaacacattcttgcatttaattggctgaacgctattcaacttgatttgattgatgaaaatttaaaacgactgaatgattttttattaggtttatttagaggagttggaataaaattagtcgattttaaagtagagtttggcttcactcatgaaagtggaaaaagtaatattattttagcagatgaaatcagtcccgatacttgtagattgtgggactcaattactgataaaaaacttgataaagatagatttagaaaagatctgggagatttgatcccagcttatactgaggtcgcaaaacgacttggtattcttcatgaacaatcaaacgtatccgcggttaacgttacaaaactttcgtctataaaaaagaagagtaaatga

SEQ ID NO: 312783 - DNA, 721 bp, Unknown
  Bacterial polypeptide expressing nucleotide sequence isolated from the Sargasso Sea
atgacatcatcaaagactttatatgaaggtaaggccaaaaaaataattaaaggcccgaaaaaaaacacacttattcagatttttaaagacgatgcaactgcctataataaaaaaaagcataagatatttaaaggcaaaggagtcatcaataataaaatttctgagtacattatggaatttctaaaaagtaaaaagattccaactcattttgaaaaaagattaaatgatcgagaacaattgataaaaaaatgtcagatcattcctatagagtttgtggttcgaaatgttgttgctggttctattgctaaaaaattaggactaaaagaaggaaccaagttaaaaaaaccgttattagagtattattacaaagaagatagtttagatgatccaatgatttctagagatcatgtagaaacatttggctgggctaatagatcagagttaaaaaaaatagatgccatgtctcttaaaattaattctttactcactaatttatttagaaagaaaaatatcattctagtagattttaaaattgaatttgggaggctagcctcaaattcaaaaaaaattgtactcgctgatgagattagtcctgactcatgcagattgtgggatataaaatcaaaacagaaactagataaagacgttttcagaagaaacctgggtagcctcatgggtgcctatgaagaggttgcctcacgattaggaatcgtgcattaag

SEQ ID NO: 312784 - DNA, 1105 bp, Unknown
  Bacterial polypeptide expressing nucleotide sequence isolated from the Sargasso Sea
atgagtcttgcagatcaagtattggcggtgaacgacgatttgccgatccgtaccgataaacccgtccattccggcaaggtgcgcagcgtctactggctgaccgccgcagacagtgcccgcctcatccgcgagaagggttacgacgtgccggcagatgcgccgctcgccatcatggtgatcagtgaccggatctcggccttcgactgcatctggcagggcgtggacgggctcaacggtgtgccgggcaaaggggctgcgctcaacgccatctccagccactggttcaagctgttcaaggagaaggggctggccgacagccacatcctggacatccctcatcccttcgtctggatcgtgcaaaaagcccgccccgtgatgatcgaggcgattgcccgccagtacatcaccggctccatgtggcgtgcctacaaggatggcgagcgcgagttctgcggcatcaccctgccggaaggactgaagaaggatcagaagctgcccgagatcctcattaccccctccaccaagggtgtgctgaccgggctggacggcgtgccggaagccgacgacgtcaacgtctcccgtgccgacatcgagcgccactaccggggcttcaacttcagcaagccggccgacatcgaccgctacgaagtgctgctcaaggaaggcttcaacgtcatcagtgacgcgctggccgagctggatcagatcttcgtcgacaccaagttcgagtttggctacgtcaatgatgccgccggcaacgagaagctgatctacatggatgaagtgggcacccccgacagctcccgcatctgggatggcgccgccctgcgtgacggccagatcgtcgagaagtccaaagagggtttccgccagtggctgctcaatcacttcccggatccggacatcctgctcaacaagcaccgcatgcccgagcgcttcgccctggcccgcgacaacaagttgccgaccgaggtgatgatggacatctccaacacctatgtggggatcgccgagaagatcatcggccagccgctggtacgcagcgccaatccgaagcaggagatcatcgaagtgctgcgcgcgcagtacgggctgatcgactgag

SEQ ID NO: 312785 - DNA, 781 bp, Unknown
  Bacterial polypeptide expressing nucleotide sequence isolated from the Sargasso Sea
aatgaaaaaaaaaaagaaattatatgaaggaaaagctaaaattatctttgctactgaggaaaaaaattttgttattcaacattttaaagatgatgcaactgcatttaataatcaaaaaaaatcagtaatagatggtaaaggtattttaaataatagaatttcagaacatattttaaataatcttggtcaaataggaattaaaaatcatctagtaaaaagattaaacatgagagaacaactcgtacatcatgttaaaataataccaattgaatttatagtaagaaacattgctactgggtcattaacaaaaagacttggaattgaggatggttcggttttagaacgtcctttaatagagtattgtcttaaaaatgatgagttaggagatccaatagtaagtcgagagcatatcttaacttttaattggttaaatattgttgaattagattggatatcaaaagaattattaagaattaatgattttttacaagggatgtttagaggtattggaattaagttggtagattttaaagttgaatttggaaaaacaaatgaaaataaaattatcttagctgacgagataagccctgatacatgtagattgtgggatgcttcaacagaaaaaaaacttgataaagatagatttagacaaaatttaggtaatttaattgaagcttaccaagaagttgcaagaagactaggaatattacatttagaatctaatataagacctattaaattttcaaaacctacagcagttaaattaaaaaaaaataaatga

SEQ ID NO: 312786 - DNA, 616 bp, Unknown
  Bacterial polypeptide expressing nucleotide sequence isolated from the Sargasso Sea
taataaaaagaaacatgaaattatcaatgaaaaaggaattcttaataatcttataagtgagtttattttcaaatatttaagtgaaaatggagtagaaaatcattttatagagcgattgaatgatagagagcagcttgtaaaaaaagtagatataattcctgttgaagttattattcgaaatatcgcaacaggaacactcactaaaagactaggtattcaagaaggattaaagttaaaaaaacctctaattgagtttacacttaagagtgatgagctagatgaccctattatatctgaggaacatgttgatgttttggaatacgctgaaaaggacgaaatcaaagatattaaagaacaagccctattaatcaataagcttcttttacaacttttttcttctataaatattcaattagttgattttaagattgaatttggtcgtcttactattgataaaaaagtaattttggctgatgagatcagtcctgattcttgtagattatgggacaaatcctcatctgaaaaactagataaagatagattcagaaaaaaccttggaggattaattgatgcttacaaagaagtagcgactcggttaggaataaaaattcaatag

SEQ ID NO: 312787 - DNA, 877 bp, Unknown
  Bacterial polypeptide expressing nucleotide sequence isolated from the Sargasso Sea
tatgcaatctaaagaattaaaaaatctcgaactcgtagccagaggcaaagtcagagacatttacgcggtggattctgaccacttactcatcgtgaccacagacagaatgtctgcgtttgatgtggttcttccaaacccaatcccaggcaaaggcgaagtgctaactcagctctcagagttttggtttgaaaagacacaatcgattgtaaaaaatcatatgactgacgatctcgatcttgttgatcttcttgatagtcctgatcaactcgattatttctcaaaaagaagcatgatagttaagcgactcagtccacttccaattgaggctgttgtgagaggatatctcataggctctggatggaaggactatcaagcaactggctctgtgtgcgggattgaattagaagaagggctccaaatggcgcaaaaattaccagaaccgatttacacacctgcaacaaaagctgaggtaggtgaacacgatgaaaacatttcttatgaaaaaacggtcgacttaatcggcgaagagctcgcaagcagagtgaagcaaattgcaattgatatatataactttggagtgaatcacgctaaagaaaaggggattatcattgcagataccaagtttgaatttggattagacggtgatggtgagctttatctcattgatgaggttcttactccagactcctcaaggttttgggccattgagaattatgagctgggatcaagtccgccaagctttgacaaacaatatcttagagattatctagagacactggattgggataaaacggcaccaggacccgaattgcctcaagaagtgattgataatacagcgtcaaaatataaaaatgcgttcaaacaaatcgctgagtaa

SEQ ID NO: 312788 - DNA, 715 bp, Unknown
  Bacterial polypeptide expressing nucleotide sequence isolated from the Sargasso Sea
aatggaaaaacgcgacgagctttaccgcggtaaagcaaaaactgtttattacactgatgatagcgataaacttattcttcactttagaaacgacacttcggcgtttgatggtgagaagattgaacagctagaacgcaaaggtgaagtaaacaacaagtttaatcactttattatgacaaagcttgaagaagcaggcattgcaacgcaagttgaggcgctggtttctgacactgagtctttggttaagaagctcgacatgatccctgttgagtgtgtggtgagaaacttgtctgctggctctttagttcgcagactgggtgtggaagagggcaaagagcttaacccacctattttcgagtttttcttaaagaatgatgcacttcacgacccaatggtaaatgactaccatattttatcatttggttgggcaaccgaagcgcaaattgctgaaatgaaagcattgaccttcaaggttaacagtgttttgaaagcactctttgatgacgcgggtatgttgcttgtagactataaactagagtttggtgtcgacaaagatggcaatatcgtactaggtgatgagtttacaccagatggctgtcgcttgtgggataaagaaacccgtaaaaagatggacaaagaccgctttagacaaggtttgggctctgttgtcgagacatatattgaagtggctgagcgcttaggcttatcgctttaa

SEQ ID NO: 312789 - DNA, 787 bp, Unknown
  Bacterial polypeptide expressing nucleotide sequence isolated from the Sargasso Sea
aatgaaaaaaggtaaaaaactttacgagggaaaagcaaagattttattttcaacaagtgataaaagtcttttaatccaacattttaaagatgacacaactgcattcaataaccaaaaaaaagccaaaatagagggaaaaggtgttctgaataatagaatatcagaatatattttaaaaaacttaagtcaaattggaataaaaaatcatctcataaaaagattaaatatgagagaacaattgattaaaaacgtagaaataattccaattgaatttatagtaagaaatatagcaactggctcactaacaaaacgacttggcattgaagagggaactgttttagataatcctttattagaatattgccttaaaaatgataaactaggtgatccaattatctctaaagaacatattattgcttttaaatgggcaacaaataaagagttagataaaattgataatatgctactaaggattaatgactttatggttggcatgttcagcggcattggcataaaattagttgattttaaacttgaatttggaagattaaaattaaatcacaaaaaagagataatacttgcagatgaaattagccctgatacttgtagattttgggattccaaaacagataaaaagttagataaagatagatttagaaaaaatcttggagatgttttgctagcctacaaagaagttgctaaaagacttggaattctttacgaagaagcaaacttaaaagtagtaaatttttctaagcaaaaaacaatcaaatttaaaaagaaataa

SEQ ID NO: 312790 - DNA, 721 bp, Unknown
  Bacterial polypeptide expressing nucleotide sequence isolated from the Sargasso Sea
atgagatcatctaaaactttatatgaaggtaaggctaaaaaaattattaaagggcctaaaaaaaacacactcattcaaatttttaaagacgatgctacagcttataataaaaaaaaacataaaatttttaaaggcaaaggcgtactaaacaatcatatttctgctttcattatgcagtaccttaagtctaaacgtatcccaacacattttgaagaaaagctgaatgaccgtgagcaacttataaaaaaatgtgaaattattccgattgaatttgtcgtaagaaatataacagctggctctattgctaaaaaattaggtattaaagaaggattaaagcttaaaaaacctttactagaatattattacaaagaagacagtttggatgacccaatgatttcaagagaccaccttatcacttttggctgggcaacaaactctgagctgaaaaaaatagataaaatgtctcttcaaattaataagcacttaagaaatcttttttttaaaaagaatatcatacttgtagatttcaaaattgaattcggtagactctcatcgaaccccaaaaaaattgtattagctgatgaaataagtcctgattcttgtcgattatgggataaaaaaactaataagaaacttgataaggatgtgttcagaagaaacctcggcagtttattaagtgcatatgaggaggttgcctcaagattaggaatcgtgcattaaa

SEQ ID NO: 312791 - DNA, 892 bp, Unknown
  Bacterial polypeptide expressing nucleotide sequence isolated from the Sargasso Sea
gatgtctaccctctacgaatccacgctccgctcgctgccgctcctcggtcgcggcaaggtccgcgataactacgcggtcggcaacgacaagctcctgatcgtcacgaccgatcgcctgtcggcattcgacgtggtgatgggcgagccgattccgaacaagggccgcgtgctgaaccagatggcgaacttctggttcgacaagcttgcgcacatcgtgccgaaccacctgacgggcgacgcgccggaagcggttgtcgccgccgacgaggtcgagcaggtgaagggccgcggcgtggtcgtcaagcgcctcgagccgatcatgatcgaagcagtcgtgcgcggctacctggccggcagcggctggaaggaataccaggcgtcgggcgccgtgtgcggcgtgcagctgccggaaggcctgcagaacgcgcagaagctacccgagccgatcttcacgccggccgcgaaggccgagatgggcgagcacgacgagaacatcacgttcgaggaaaccgagcgccgcatcggcaccgagctggccgcgacgatccgcgacatctcgatcaagctgtacaaggaagcggccgactacgcggccacgcgcggcatcatcatcgccgacacgaagttcgaattcggcctcgacaaccacggcaagctgtacctgatggacgaagtgctgaccgccgattcgtcgcgcttctggccggccgaccagtacgaagtcggcacgaacccgccgtcgttcgacaagcagttcgtgcgcgactggctcgaggcgcagccgtggggcaagaccgcgccggcgcctgcgctgccggccgacgtcgtcgagaagacggccgcgaagtatcaggaagcgctcgagcgcatcacgggccagtcgctggcctga

SEQ ID NO: 312792 - DNA, 488 bp, Unknown
  Bacterial polypeptide expressing nucleotide sequence isolated from the Sargasso Sea
caagcgccttgatatgattccggccgagtgtgtcgttcgtaatgtcgcgacgggttctttgtgccgtcgtctgggggtggaagagggcttggatcttgtgccaccgaccttcgagttctttttaaagaatgatgaactgcacgatcccatgatcaacgagtatcacattgcgtcttttggctgggccagttcggccgaagtcgaatcgatgaaagcccagaccttccgagtcaatgaaatcctgagcaagctttttgccgacggggacatgattctggtggacttcaagctggagttcggccgttttgacggtgaactgctgctcggagacgaatttacacccgatggatgccgactctgggatgccgatacccgtaagaaactcgataaagatcgattccgtcaggggctcggtggtgtcgtggaggcctatgaagaggtggctctgcggcttggtgtcgatcttgaggccaccattgcgggctgat

SEQ ID NO: 312793 - DNA, 787 bp, Unknown
  Bacterial polypeptide expressing nucleotide sequence isolated from the Sargasso Sea
atgaaaaaaggaaaaaaattatacgaaggtaaagcaaaaataatttttgcaagtaatgataaaaaatatgttatccaacattttaaggatgatgcaaccgcatttaataatcaaaaaaaagcagtgatggatggtaaaggaattttaaataataggatttctgaacatatattaactcagttgaataatgttggtatcaaaaatcatttagtaaaacgtttaaatatgagagaacaactcgttcagcatgttgaaattatacctatagaatttattgtaagaaatatagcaaccggatctttaactaaaagattgggtattgaagatggaacagtcttagataatcctttaatagagtattgtttaaaagatgatgatttaggagatcccttagtaagtactgaacatatcttagcttttaagtggatggaaaaagatgaattaaacttaataaacaaagaattaaatagaattaacgattttcttcaaggcatgtttagaggtgttggaattaaacttgtagattttaaggtagaatttggaaggtacgagaaaaacggaaaaaaagagatcatgctcgcagatgaaataagtccggatacttgcagactatgggatgtaaatagtgataaaaaattagataaagatagatttagaaaaggtcttggtaatctaattgaggcttatcaagaagttgcaagaagattagatatacttcatgaacaatcaaatattagaccattaaaatacacaaaaccacaagcagtaaagattaaaaagaagtaat

SEQ ID NO: 312794 - DNA, 718 bp, Unknown
  Bacterial polypeptide expressing nucleotide sequence isolated from the Sargasso Sea
aatggcggtaaaattgaaaaaattatatgagggaaaagcaaaaattatttatgccaaaaatagtaaagaagtcatagccacttataaaaatgatgctacagcttttaataatttaaaaaagggctcgataaaaaataagggtgcaattaataatgctatatcgagttatttatttcaaattttgaatcattgtgatattccaacacactttataaagaaaattgataaaaaatctcagcttttaaaaaaggtagatattattccaattgaagttttagttagaaatttctttgctggctctttatctaaaaagtttggtgttaaagaaggaacacaattatctgatacgctaattgagtattgtttaaaatcggatgaacttggcgatcctcatataagttctgaacatattcttaatttaggtttatgtgattttaatgaattagagttaatagatgaatattctttgagaattaatgacatattaaggtctacgttctattctataggaataaatctagttgactttaaattagaatttggaatttgtaaaaaaactgacgagcttgttttagcagatgaaatttcaccagatacatgtcgtttgtgggatttaaaaacaaataaaaaacttgataaagatcgatttcgtagagatctaggaaatatcgaagaagcatatgaagaggtgcttaataggttaaacttgaagatttaa

SEQ ID NO: 312795 - DNA, 877 bp, Unknown
  Bacterial polypeptide expressing nucleotide sequence isolated from the Sargasso Sea
atgcaatctacggaattaaaaaatctcgaactcgtcgccaaaggtaaggttagggatatttatgcagtggattctgatcacttgctgattgtcaccacagacaggatgtctgcatttgatgtggttcttccaaatccaatcccaggcaaaggtgaagtgctgactcagctttcagaattttggtttgaaaaaacacaatcgattgtaagcaatcatatgacagataatctcgagctcattgatcttctcgatagtcccgatcaattggactatttctctaagcgcagcatgattgtaaagcgtttgaatccgcttccaatcgaagcagtggttcgaggatatctcatcggatctggatggaaggattatcaagccactggatctgtgtgtggaattgaattggaggaaggtctccaaatggcgcaaaaattacctgagccaatctatacgcctgcgaccaaagcggaagttggggaacacgatgaaaatatttcctatgaaaaaacggtcgatttaatcggcgaagaacttgccaaccgagtaagacaaattgccattgatatttataattttggtgtcaaccatgcaagagaaaaggggatcattattgctgataccaaatttgaatttggattggatggcgatggtgagctttacctcattgatgaagtcctcactccagactcatcaagattttgggccattgagaattatgagttgggatccagcccaccgagctttgataaacaatacctcagagactatcttgaaacactggattgggataaaacggcacctgggccagaattgcctcaggaagtcatcgataatacggcttcaaaatacaaaaacgcattcagacaaatcgcagagtaag

SEQ ID NO: 312796 - DNA, 469 bp, Unknown
  Bacterial polypeptide expressing nucleotide sequence isolated from the Sargasso Sea
atagaagatggaactgtattaaaagaacctttaattgagtactgtttaaaagatgacaagcttggtgatcctttaatttcagaggatcatatttacgcatttgattgggcaaataaaaaagaaattgaaaagataaaaaaaactatatttagaattaatgatttcatgattggaatgtttagaggagtaggaataaaattaattgattttaaattagaatttggacgaactaaaattgatggaaggaaagatattattttggctgatgaaataagtcctgatacttgtcgactatgggactcagcaactgacaaaaaacttgataaagatagatttagaaaagatttaggagatttattgcctgcgtataccgaggttgctaaaagacttggaattctacatgagcaatcgaatgtttctgcagtaaatgttactaaactttcctcaattaaaaagaagcgaaaatgaa

SEQ ID NO: 312797 - DNA, 308 bp, Unknown
  Bacterial polypeptide expressing nucleotide sequence isolated from the Sargasso Sea
ttttatgtcaggaatgtttagaggaataggaattaagttagtagactttaaattagagtttggaagaatttggaataataataatagagaagttattcttgctgatgaaattagtcctgatacttgtaggctttgggacataaaaagtgaaaagaaattagacaaagatagatttagaaaagatttaggaaatattatccaagcataccaagaagtagcaagaagactaggtatagtcccagaaacaacaaatgtgagtgaagtaaactttaagaaacctacatcaataaatattaagcaaaaataaa

SEQ ID NO: 312798 - DNA, 721 bp, Unknown
  Bacterial polypeptide expressing nucleotide sequence isolated from the Sargasso Sea
atgtcgccaagcaaaactctatatgaaggtaaagcaaagaaaattttaaaagggccttctaaaaatactcttattcaagtttttaaagatgacgctacggcttataacaaaaaaaaacataagatttttagcggtaaagggattctaaataatctaatctctgaacatataatggaacatttaatgtctaagggtatagaaactcactttaaaaaaagactaaataatcgtgaacaactaattaaaaaatgtgagattattccaatagagtttgttgttagaaacatagttgcaggatcaattgcaaaaaaacttggattaaaagaaggcactaaattgaaaaaacctcttcttgaatactattataaagaagacagtttggatgatccgatgatttcaagagatcacgttgaagcgtttggatgggctacaaaatctgagcttaaaaagattgataagatttcaaccaagataaataaaatactaagtagtctgtttattaagaaaaaaattgtattagtggatttcaaaattgaatttggaagattaacctcaaatcctaaaaagattgtactcgcagatgagattagtcctgactcatgtcgtctatgggataaaaaatcaaaaaagaagttggataaagatgtatttagacgcaatcttggaagtcttattaaggcttatgaagaagttgcttccagattaggaatcgtgcaataag

SEQ ID NO: 312799 - DNA, 577 bp, Unknown
  Bacterial polypeptide expressing nucleotide sequence isolated from the Sargasso Sea
gaacatttaatgactaagttaaatgacatgggtatttcaacacattttattaaaagactaaatatgagagaacagcttgtaagaaaagcagaaataatcccattggaggttgtggttagaaatactgttgccggttcacttgctgaacgacttggcctaaaagagggagaaaatttatctaggtctataattgaattcttttataaatcagatgaactaaatgaccctttagtaacagaagagcatattactgcttttgattgggcatctccccaagaaatggatgagttaatttcaacaactttacgaataaatgattttttgtctggattattttttggagtaggaattaaattaattgactttaaattagaatatggaagagtttttattgatgatcaatttaaaataattttagcagacgaaataagtccagactcatgcagactatgggatatgaatactaatgaaaaattagataaagatagatttagaagagacctaggaagtgctgaggaagcataccaagaagttgcaagaaggcttggggttttacctgaaaatacaaacggctaga

SEQ ID NO: 312800 - DNA, 1105 bp, Unknown
  Bacterial polypeptide expressing nucleotide sequence isolated from the Sargasso Sea
catgagtcttgctgattccgtattagccgtaaacaacgatttgcccatccgcaccgatagcccagttcatagcggcaaggtacgtagcgtttactggctaaccgacgccgacagccgccgtttaatcaaaaccaagggctacaatgtgcccgaagatacgccgcttgccattatggtaattagcgatcgcatctccgccttcgactgcatcttccacggtgaaggcggattaaaaggcatcccaggtaaaggcgcggcattaaatgccatttctaatcattggtttaagctatttgccgaaaatggtttagccgacagccatattttagatattccgcatcccttcgtttggatagtccaaaaagcccgcccaattaaagttgaagccatttgccgccaatacattaccggctccatgtggcgcgcctactccaagggcgagcgcgtattctgcggtatcaccctgccagaaggcttagagaaagatcaaaaactgccagatttgctgatcaccccttcgaccaaaggcattttaactgggatccccggtgtacccgcgcaggatgacgttaacatcagccgcagcgatatcgaagccaactaccaagcctttggttttgaaaaggtagaagatatcgacctgtacgagaagctgttaaaagatggctttaaggtgatcgctaaagcactggccgaccttgaccaagtatttgtggataccaagttcgagtttggttatgtgaccgataaaaacggcaactccaaactgatctatatggatgaagtgggcaccccagactcatcccgcatttgggacggcgccgcctaccgcgatggtaaaatccttgaaaactctaaggaaggcttccgtcagttcctgctgaaccacttccccgatccggacattctgctcaacaaggacagaatgccagagcgcgaagcccttgcccgcgataacgccctgccattagaggcgatgacgcaagtgtcacgcacttacaccggcatcgccgagaaagtgaccggcgcagcaattccgctgccagcgaatcctaaggcagatattattaagatcctacgggaagagtatgatctgattgtttaa

SEQ ID NO: 312801 - DNA, 787 bp, Unknown
  Bacterial polypeptide expressing nucleotide sequence isolated from the Sargasso Sea
atgaaaaaagggaaaaaattatatgaaggaaaagctaagatcatttatgcaacaagtgataaagatttagtaattcaatattttaaagatgatgcaacagcttttaataatcaaaaaaaatctaccatcgagggaaaaggagttttaaataatagaatttctgaacatatactgtcaagcctttcacaaataggtatcaaaaatcacttagttaaaagattaaatatgcgtgaacaagttgttaaacttgttgagataattcctatagaatttattgttagaaatgttgcaacaggatctttaacaaaacgtcttggaattgaagatggaactgttttaaaagaacctttaattgaatattgcttaaaagatgacaaacttggtgacccgttaatcgctgaagaacatattcttgcatttgattgggcatcaaaaaaagaaattgaaaaagtaaaaaaaatgattttaagaattaatgattttatgatcggtatgtttagaggagtaggaattaagctgatagactttaagttagaatttggaagactgaatgctaatggaaaaaaagatgttattttggctgacgaaataagtcctgatacttgcagattatgggacagtttaactgataaaaaattagataaagacaggttcagaaaagatctaggagatctaatcccagcatacacggaagttgcaaaaagacttggtattcttcacgaacaatccaacctaagtgcagtaaatgtaacaaaactatcttcagttaaaagaaagcgtaaatgaa

SEQ ID NO: 312802 - DNA, 271 bp, Unknown
  Bacterial polypeptide expressing nucleotide sequence isolated from the Sargasso Sea
aatgatcagtacttctcataaggttaatgaacttttaacaaaactttttgctgattcaggaatgatattggttgattttaagcttgaatttggtgtctctaatggaaaaatcttgctaggcgatgaatttactcctgatggttgcagattgtgggatgatgaaactcttgaaaagcttgataaagatagatttagacaagatttaggagatgttatcgaatcctaccatatggttgcacatagattaggaatgcaaataaaagttgactaa

SEQ ID NO: 312803 - DNA, 292 bp, Unknown
  Bacterial polypeptide expressing nucleotide sequence isolated from the Sargasso Sea
gtttcgaggtgttggcataaaattagtagattttaaattagaatttggacgactttgggaagatgataaaaaacaagttattctagccgatgaaattagtcctgacacatgtagactttgggatgtaaaaagcgagagaaaacttgataaagatagatttagaaaagaccttggaaatattattcaagcttatcaagaagttgctcgacgattaggaattttacccgaaactacaaatattagtgaggtaaattttaaaaaacctacatcaataagtattaagaataaataa

SEQ ID NO: 312804 - DNA, 781 bp, Unknown
  Bacterial polypeptide expressing nucleotide sequence isolated from the Sargasso Sea
atgaaaaaaggcaaaaaactttacgaaggtaaagcaaaaataatatttgctacaagtgataagaacgttgtaattcaacattttaaagatgatgcaactgcatttaataatcagaaaaaagcaagcatagatggaaaaggaattttaaataacagaatttctgaacacatactttcatctcttacagaagtaggtattaaaaatcacctaatcaaaagattaaatatgagagaacaacttgtagaaatggtaaacattataccaattgagtttgtaattagaaatattgctaccggatctttaactaaaagattgggaattgaagaaggaacagttttagattacccattaatcgagtattgtttaaaagatgataaactcggtgacccaataatttctagtgaacatattttaaattttaaatggctaaacataactgaattagatttaattaataatcaatgcctaagaataaatgattatcttcagggtttatttagaggtatagaaattaaattagttgattttaaagtagaattcggaaaaacaaaatcaaacgaaacaataatactagctgacgaaattagtccagacacttgtagattatgggatcaaaaaactgataaaaaattagataaagacagatttaggaaagatttgggtaatattgtagaagcctatcaagaagtagctagaagacttggaattcttcatgaacaatcaaacataagaccaataaaattctctaaaccaactgcagtaaaaattaaaaaaaagtaaa

SEQ ID NO: 312805 - DNA, 358 bp, Unknown
  Bacterial polypeptide expressing nucleotide sequence isolated from the Sargasso Sea
atgagtcccgaccacggcgagctgctgtacgaaggcaaggcgaagcgcatctacgccaccgaccacccggatcaggtgctggtggagtacaaaaacgacgcgacggcattcaatgcccagaagaaggcacaactggcggataaaggacggttgaactgccagatctcggctcggttatttgagctgctggaggggcagggtgtcccaagccactatttggggttggcgggcgacacctggatgctggtgcagcgggtggaggtgattccgctggaggtggtgctgcgcaacatcgcgaccggatcgctgtgtcgtcagacgccgattgccgagggaactccgatcaatccagccctgc

SEQ ID NO: 312806 - DNA, 790 bp, Unknown
  Bacterial polypeptide expressing nucleotide sequence isolated from the Sargasso Sea
atgaaaaaagggaaaaaaatttatgaaggaaaggcaaaaatagtttttgcaacagaaaataaaaatttagtaattcaacattttaaagatgatgctactgcatttaataatcaaaaaagagctaagattgaaggaaaaggcgtcttaaacaacagaatttctgaacacattctaaccaacttaaatcaaattggtattaaaaatcatttggtgaaacgaataaatatgagagaacaactaattaaatttgtggaaattattccaattgaatttattgttagaaatattgccacaggatctataacaaaaagacttggtatagaagatggaactgttttggatgaacctttaattgagtattgtttaaaaaacgacaagttaggtgacccgttaatatctaaagaacatatacttgcctttaaatggtctaacaaaaaagaaatagaaaaaattgataaatatattcttagaataaatgattttttggttgggatgtttagaggagttggaattaaattagtagattttaaagttgaatttggcagatacaaaaataatggaaaaacagaagttatattagccgatgaaattagtcctgatacatgtaggctttgggatataaatactgaaaaaaaacttgataaagatagatttagaaatgatttaggtcatttaatagaagcctatcaagatgtggcaagaagactaggtatacttcatgaacaatcaaatataacacctattaagttcactaaaccaagagcggtaaaatttaaaaaaaataaatgaa

SEQ ID NO: 312807 - DNA, 396 bp, Unknown
  Bacterial polypeptide expressing nucleotide sequence isolated from the Sargasso Sea
atgatgaactagatgatcccatgatacttgaggaacacataacagcatttaattgggctagccattctgagcttgatgaaataatgagtttagcgcttaggatcaacgattttatgtgtggcctttttttgggaataggaattagactggttgacttcaagatagaatttggacgtttatgggtggatgatagtttaaagatagtacttgctgatgaaatcagcccagatagttgcaggctttgggacgcaaagactaacaagaagctcgataaagatagatttagaagcgacatgggtgaggttgaagaggcataccaagaggtggataggcggttaggtattttgcctgaggcccatttgttaaaggctgaaggcccaaaattagttaaatagg

SEQ ID NO: 312808 - DNA, 727 bp, Unknown
  Bacterial polypeptide expressing nucleotide sequence isolated from the Sargasso Sea
catggaaagagacgtgcctgaggaactactttacgagggaaaagccaaaaagcttttcatcacagaggatccgcaaattttgcgggttgagtacaaagacgatgcgacggccttcaacgggaaaaaattcgaccgtttgagagataaaggatgtctgaacaacgcgatcacggtttttttcttcgaacacctcgaaacaaaagacattccgagtcattttgttcgcaagatttcagaaaccgagcagttggtccgaagggtgaaaatcatccccctggaagtggtggtccgcaatgtggcggcaggctctcttagtaaacgcatcggttgggaggaaggaaaggaacttcctcatccgattgtggagttttactacaaggacgatgacctgggtgacccgctccttgcagaagaacacatccgattacttgaattggcttctgaagcgcaaatcgaagagcttaagaaaagaggtttagcggtcaatgaagctttagagtccctgatgctttccaagggaatacggctcatcgatttcaaactggaatacgggttagatcaaaaaggagagattctgctggcagatgaaatttctccggatacctgccgtttttgggatatagagtcagggaaaattttggacaaggatcgtttccggagggatctgggtggagtcactgaagcctatctggaaatccaccaacgcctcacggaagagattacatga

SEQ ID NO: 312809 - DNA, 787 bp, Unknown
  Bacterial polypeptide expressing nucleotide sequence isolated from the Sargasso Sea
aatgaagaaaggtaagaagttatacgaaggtaaggcaaaaataatattcgcaactagtgataaaaatttagttattcagcatttcaaagacgatgcaacggcatttaataaccaaaaaaaagatcaatttgaaggtaaaggaatattaaataatagaatatctgaatacattttaaaaaatttaaatcaggtaggaataaagaatcacttgataaaaagaattaatatgagagagcaactggtgaaaaatgttgaaataatacctatagagtttgttgtaagaaatatagcaacaggatctttaaccaaaagacttggtatacaagaaggtactatatttgatgagccactaattgaatattattataaaaatgatgaacttttagacccacttatctcaaaagagcatattgatatttttaaatgggcccaaaaaaaagaaattgataaaatagataaatatttaaaaagaattaacgattttatggttggtatgttcagaggagtgggaattactttagttgatttcaaagttgaatttggaaggtataaatctaataataaatctgaaattatacttgctgacgaaataagcccagatacatgccgactgtgggatgttataacagaaaaagttttggataaagacagatttagaaatgatttaggtaatgttttagatgcatatcaagacgttgctagaagattgggaatactacatgaacaatcaaatgtgaggccattgagattcagcaaacccaaagcagtcaaaataaaaaaaaaataa

SEQ ID NO: 312810 - DNA, 396 bp, Unknown
  Bacterial polypeptide expressing nucleotide sequence isolated from the Sargasso Sea
tattgctgaagacatatttatgctttttgatttgggctaataaaaatgaaatagaacaagtaaaaaaaatgattttacgaattaatgattttatgatcggaatgtttagaggaattgggattaaactaattgattttaaactagaatttggaagaataaaaattaatggtaaaaatgaagttattcttgctgatgaaataagccctgatacttgtagattgtgggactcaataactgataaaaaacttgataaagatagatttagaaaagaccttggagatttaattccagcttatactgaagtagcaaagagattaggcattctccacgaacaatcaaacatatctgcagttaatgtaactaagttatcatcaataaaaaaaaaaaataaatgaa

SEQ ID NO: 312811 - DNA, 784 bp, Unknown
  Bacterial polypeptide expressing nucleotide sequence isolated from the Sargasso Sea
atgaaaaaaggtaaaaaactctacgaaggtaaagcaaagattatttttgctacaagtgataaaaatattgttattcaacattttaaagatgatgcaaccgcatttaataatcaaaaaaaatcaaatatagatggaaaaggaattctaaataacagaatttcagaacacttgttaaaatctctttcagaaattggaattaaaaatcatcttattaaaagattaaatatgagagaacaactagtagaaatggtaaatatcattccaattgaatttgtaattagaaatattgcaacaggatccttaacaaaaagattaggaattgaagaaggaacagttttagattatccattaatcgaatattgtttaaaagatgatacacttggggatccaataatttctcgtgaacatattttaaattttaaatggcttagtttaattgaattagacttaattaatgatcaaagtctaagaataaatgattatctccaagggttatttagaggtattggaattaaattagttgattttaagttagaatttggaaaagcaaaatcagatggaacaataatattggctgacgaaataagtcctgacacttgcagactatgggatcaagaaactgataaaaaattagacaaagatagatttagaaaagatttgggtaatattgtagaggcttatcaagaggtagctagaagacttggaattcttcacgaacaatcaaacataagaccaataaaattctctaaaccaactgcagtaaaaatcaaaaaaaataaatgaa

SEQ ID NO: 312812 - DNA, 628 bp, Unknown
  Bacterial polypeptide expressing nucleotide sequence isolated from the Sargasso Sea
tagaatctctgaacacattctttctaacttaaatcaaattggaataaaaaatcatcttgtaaaaagaattaatatgagggagcagcttgtaaaagttgtggagataattccaattgaatttgttgttagaaatattgccgctggatcgcttactacaagacttggtatagaagaaggtacagttttggaatatcctataattgaatattgccttaaaaatgatgatttaggagatcctttagtgagtagagaacatatcttatcattggattggatgaatgttatggagttagaactgattaacgaacaatgtaaaagaataaatgattttctattaggattttttagaggagttggcataaaactagtcgattttaaaattgagtttggaagatcagcaaaagacaatagtataattttagcagatgaaataagtccagatacttgcagactttgggactcatctactgaaaaaaaactagataaagatatatttagaaaagatttaggtaacttgattgaagggtatcaagaggtagctagaagactaaatattcttcatgaacaatctaatattagacctataaaatttccaaaaccaaaagctgttaaaattaaaaaaaaataa

SEQ ID NO: 312813 - DNA, 754 bp, Unknown
  Bacterial polypeptide expressing nucleotide sequence isolated from the Sargasso Sea
catgacccctgatcacggagatctgctctatgagggcaaggcgaagcgggtgtatgcggcctcccagacagaccgggtgctggtggagttcaagaacgatgccaccgccttcaatgctcagaagcgggcccagcttgcggacaagggccgactgaactgccagatttcagcccggctgttcgagcgactggaggccgaaggcatccccacccattacctgggtctggcctcagacacctggatggtggtgcagcgggtcgcgatcattccgctggaggtggtgctgcgcaacatcgccaccggctccctgtgccgtgagaccccgatcgccgagggcacggtgatcgatccagccctgctcgacctctactacaaggacgacggcctcggggatccgttgctcagcgaagcccgggtgcgactgctgggggtggttgaacccgagcaactgtcagcgatcgaacaactcgcgcgccgtgtgaacgatgtgctccagccgtttttcgccgatttggatctgcagctggtggacttcaagctggagctgggcttcaacgctgcgggtcagctgctgctggcggatgagatcagccctgacacctgccggctctgggaccgacgcagcagcgatgcccaggaccgcatcctcgacaaggatcgattccgacaggacctcggcggtgtgatggaggcctacggggaggtcctcaaacgggtccaagcctcctgcgccgacccccgcaactgcatgtaa

SEQ ID NO: 312814 - DNA, 295 bp, Unknown
  Bacterial polypeptide expressing nucleotide sequence isolated from the Sargasso Sea
attaataaatatctcaaagatttatttctgaaaattggtatcaaattagttgattttaaattagaattcggaagactaaactctcaagaaaaaaaagagattgttttagctgatgagattagccctgacaattgcagactttggaatgagcaagacaatgcatcgcttgataaagatcttttcaggcaaagtaagggtgatataaaggaagcgtatattgaagttgcaaatagattaggtgttttgacacaaaaagtttcatcaaaactatcagaaaataaattatcacactaag

SEQ ID NO: 312815 - DNA, 541 bp, Unknown
  Bacterial polypeptide expressing nucleotide sequence isolated from the Sargasso Sea
aatgaaaaaaggtaaaaaattatacgaaggaaaagctaaaattatttatgcaactactgataagaatttagtaattcaacattttaaagatgatgctacagcttttaataatcaaaaaaaagatatcattgaaggaaaaggaattttaaataatagaatttcagaacatattcttactcagttaagcaatattggaataaaaaatcatttagtaaaaagacttaatatgagagaacaactgataaagttagttgaaattattccaattgaatttgttgtaagaaatattgctacaggatccttaacaaaaagattaggaatagaagatggaacagtgcttgattatcctttagttgaatattgcttaaaaaatgatgatctaggtgatcctctcgtaagcagagagcatattttagcttttaagtggatggatgttttcgaattagattttatttacgaagaagtaagaagaataaatgattttcttcaaggtatgttcaggggcgttggaattaaattagtagattttaaagttgaattt

SEQ ID NO: 312816 - DNA, 721 bp, Unknown
  Bacterial polypeptide expressing nucleotide sequence isolated from the Sargasso Sea
atggaaaaagtaaaagaaattgcagctggtaaagctaaatcaatgtttaccaccaacaatccaaatgaattaataatggagttcagagatgatgcttctgcatttgacggaaagaaaagagcttctttagctggaaaaggagcagtgaataatcaatttaatgcatttattatggattaccttggtgataacggtgtagatcatcatttaattaatctcatggataatacacattctcttgtgcacagcctagatatgtttcctatcgagtgtgtaataaggaatagggctactggatcaatatgcagaagactggggacagaagatggtctaatccttgagaagcctctctttgaattcttcttaaaagatgatgatttaggtgatccattaattaatagaaaccatatagtttcatttggatgggcaaaagatgatgagctagatgaaatgatcagtatttctcataaggttaatgaacttttaacaaaactttttgctgattcaggaatgatattggttgattttaagcttgaatttggtgtctctaatggaaaaatcttgctaggtgatgaatttactccagatggttgcagattgtgggatgatgaaactcttgaaaagcttgataaagatagatttagacaagatttaggagatgttatcgaatcctaccatatggttgcacatagattaggaatgcaaataaaagttgactaat

SEQ ID NO: 312817 - DNA, 517 bp, Unknown
  Bacterial polypeptide expressing nucleotide sequence isolated from the Sargasso Sea
atgaaaaatagaaaaaaaatatacgaaggaaaagctaaaatactttatcaaggtccagaaccaaatacattgattcaatatttcaaagatgatgcaactgctttcaataacaaaaagaaagatcagattccaggaaaaggtgtattaaataacttcatttcggagttgataatgacaagattaaaagacgttaacatttcaaatcacttaataaaaagaatgaatatgagagaacaacttatcaagaaattggatataataccaattgaggtagttgttagaaacattgcaacaggatcaatagttcaaagattgggtataaaggagggaaaagtattaaatagacctataattgagttttacttaaaaaatgataaattaaatgatccgattataaatgaagaacacataatcgtttttgaatgggctacaccaaacgaacttgaggaaattatttctttaagttcacgaattaatgattttttaaccaggttacttcttttctctaaatatcaga

SEQ ID NO: 312818 - DNA, 787 bp, Unknown
  Bacterial polypeptide expressing nucleotide sequence isolated from the Sargasso Sea
atgaaaaaagggaaaaaattatatgaaggaaaagctaagatcatttatgcaacaagtgataaagatttagtaattcaatattttaaagatgatgcaacagcttttaataatcaaaaaaaatctactattgagggaaaaggagttctaaacaatagaatttcagaacatatactctcaagtctttcacaaataggtatcaaaaatcacttagttaaaagattaaatatgcgcgagcaagttgttaaacttgttgatataatccctattgaatttattgttagaaatgttgcaactggatctttaacaaaacgtcttggaattgaagatggaactgttttgaaggagcctttaattgaatactgcttaaaagatgacaaacttggtgacccgttaattgctgaagaacatattcttgcatttgattgggcatcaaaaaaagaaattgaaaaagtaaaaaaaatgattttaagaattaatgattttatgatcggtatgtttagaggagtaggaattaagctaatagactttaagttagaatttgggagactaaatgctaatggaaaaaaagatgttattttagctgatgaaataagtcctgatacttgcagattatgggacagtttaactgataaaaaattagataaagacaggtttagaaaagatctaggagatctaatcccagcatacaccgaggttgcaaaaagacttggaattcttcacgaacaatccaacctaagtgcagtaaatgtaactaaattatcttcagttaaaagaaagcgtaaatgaa

SEQ ID NO: 312819 - DNA, 895 bp, Unknown
  Bacterial polypeptide expressing nucleotide sequence isolated from the Sargasso Sea
tatggaaatagaaaataaaaatattgtacttgaaactaatttacctaatcaaaatttgattaatcgaggtaaggttcgcgacttatatgatatgggagattctcttttaatagtatctagtgatagaatatcagcatatgatgcggtccttccaacaggcattttgggtaagggtgaagttttaacaaaattatctaaattttggttctctctgactgaaaatataattcaaaatcactttataacagacaatgttacagaggcatatccttctctcaaagaacatgaggaaattcttaaaggcagatctatgatagtaaaaaaagcaaaaccattagctgttgaatgtatcgttagagggtatattacgggttctggctggtctgaatataaaaaacaaggaacggtttgtggtataaggcttaaagatggtttacttgaatccgaaaagctcagcccaacaatctttacaccttcaaccaaagctgaacaaggtgagcatgacgagaatatagactttgaaacttgtgttggaataattggacaagaactggcagagaaagtgcgtgactattcgataaaaatatactctacagctcatgattatgctaaatcaaaaggaattattattgcggatactaaatttgaatttggtcttgtgggagatgagcttattttaattgacgaagtcctaactccagactcatcgagattctggcctctaggattatatgaagaaggaagaggtcagcaaagctatgataagcaatttgttagggattacctaacttctgttggatgggataaaaacccaccagctccgcagcttcctgaggatatcgcttcattaacatcaaagaaatatattgaagcaatagacttgctaaccgcatag

SEQ ID NO: 312820 - DNA, 481 bp, Unknown
  Bacterial polypeptide expressing nucleotide sequence isolated from the Sargasso Sea
atgaaaaaaggtaaaaaactttacgaaggtaaagccaaaataatttatgcaacatctgacaaaaattatgtaattcaatattttaaagatgatgctactgctttcaataatcagaaaagatctgtgatagaaggcaaaggtgtattaaacaatagaatatctgaacatatattaaagaatttatctcaaatcggtattaaaaatcatttagtgaaaagattaaatatgagagaacaattaataaaatttgtagatattataccaattgaatttatcgtaagaaatattgcaacaggctctcttactaaaagacttggcatagttgaaggaacagtcttaaatgacccgttgattgaatattgcttaaaaaatgatgatttaggagatcctttaatttcaagagaacatatttatgcgtttaattgggcaaaaaagaacgaaatagaaaaaattaataagcaacttctaagaattaatgatt

SEQ ID NO: 312821 - DNA, 787 bp, Unknown
  Bacterial polypeptide expressing nucleotide sequence isolated from the Sargasso Sea
atgaaaaaaggtaaaaaattatatgaaggtaaagctaaaattatttattcaaccaatgataagaatttagtaattcagcattttaaagatgatgctaccgcatttaataatcagaaaaaagatgtaattgaaggtaaaggaattttaaataatagaatttctgaacatatccttacccaattaagcaatgtaggaattaaaaatcatttagttaaaagacttaacatgagagaacaacttgtgaagttggtagagattattccaattgaatttgttgtaagaaatatagcaactggatcattaacaaaaagacttggtatagaagacggtacggtattagattatccactagttgaatattgtctaaagaatgatgaattaggcgatcctttagttagtagagagcatattttagcttttaaatggatggatgtatttgaattagattttatttacgaagaggtaagaagaataaatgactttttacaaggtatgtttagaggtgtgggtattaaattagttgactttaaggttgaatttggaagatctgaagctgatggaaaaagagaagttatgttggctgatgaaattagccctgatacatgcaggctctgggacatgaggactgataaaaaattagataaagatagatttagaaacgatctaggaaatctagttgaagcttatcaagaagttgcaattagacttaatctacttcatgaacagtcaaatatcagacctttaaattatcctaaaccaaaagctgttaaaattaagaaaaaatgaa

SEQ ID NO: 312822 - DNA, 787 bp, Unknown
  Bacterial polypeptide expressing nucleotide sequence isolated from the Sargasso Sea
atgaaaaaaggtaaaaaactttacgagggaaaagcaaaaataatttattcgacttcagataaaaatttagtaatccaatactttaaagacgatgctacagcatttaataatgaaaaaagaactactattgagggtaaaggagttttaaataatagaatttctgagcatatacttacaaatttatctcaaattggtattgaaaatcatttagtcaaacgactaaatatgagagaacaattaattaaatttgtagaaataattccaattgaatttgttattcgtaatgtggcaacaggatctttaactaaaagacttggaatagaagatggcactgtactaaaagaacctttaattgaatactgtttaaaagatgacaaacttggtgatcctttaatttcagaggatcatatttacgcatttgattgggcaaataaaaaagaaattgaaaagataaaaaaaacaatttttagaataaatgattttatgattggaatgtttagaggagtaggaataaaattaattgattttaaattagaatttggaagaactaaaattgatggaagaaaagaaataattttagctgatgaaataagccctgatacttgtagattgtgggactctgcaactgacaaaaaacttgataaagatagatttagaaaagatttaggagatttattaccagcgtataccgaagttgccaaaagacttggaattctacatgagcaatcaaatgtttctgcagtgaatgtaactaaactatcctcaattaaaaagaagcgaaaatgaa

SEQ ID NO: 312823 - DNA, 1105 bp, Unknown
  Bacterial polypeptide expressing nucleotide sequence isolated from the Sargasso Sea
catgagtcttgctgattccgtattagccgtaaacaacgatttacccatccgcaccgacagcccagtccatagcggcaaggtacgtagcgtttactggctaaccgacgccgacagccgccgcttaattcaaaccaagggctacaatgtgcccgaagatacgccgcttgccattatggtgattagcgaccgtatctcagccttcgactgcatcttccacggtgaaggcggattaaaaggcattccaggtaaaggcgcggcattaaatgccatttctaatcattggtttaagttatttgccgaaaacggtttagccgacagccatattttagatattccgcatcccttcgtttggatagtccaaaaagcccgcccgattaaagtcgaagccatttgccgccaatacattactggctcaatgtggcgcgcctactctaagggcgagcgcgtattctgcggtatcacactgccagaaggtttagaaaaagatcaaaagctgccagatttgctgatcaccccttcgaccaaaggcatcttaactggaatccccggtgtgcccgcgcaggacgatgtgaacatcagccgcagcgatatcgaagccaactatcaagcctttggttttgaaaaggtagaagatatcgacctgtacgagaagctgttaaaagatggctttaaggtgatttcaaaggcgctagccgaccttgaccaagtatttgtggataccaagttcgagtttggttatgtgaccgataaaaacggcaactcaaaactgatctatatggatgaagtgggcaccccagactcatcccgcatttgggacggcgccgcctaccgcgatggtaaaatccttgaaaactctaaggaaggcttccgtcagttcctactgaaccacttccccgatccggatattctgcttaacaaggacagaatgccagagcgcgaagccctcgcccgcgataatgccctgccattagaggcgatgatggatgtgtcacgcacttacaccggcattgccgaaaaggtgacaggcgcggcaatcccgctgccagccaatcctaaggcagatattattaagatactcaaagatgagtatgatctgattgtttaa

SEQ ID NO: 312824 - DNA, 769 bp, Unknown
  Bacterial polypeptide expressing nucleotide sequence isolated from the Sargasso Sea
tatgtctaaaaagaaaattttatatgatgggaaagctaaaaccatctttgaaggccctacctcagatacagttatacaatattttaaagatgatgccactgcaaacaatgctgaaaaacattccataattaatggtaaaggagttttaaataattctatttctgactacttgatgcaaaaattaaatgagattggaataccaactcattatattaagaagttaaatatgagagaacagcttgtgagaaaagttgaaataatacctgtagaatttgttgttagaaatattgctactggatccattgtaaaaagacttggtttaaaagaaggtagtgttttttcaagacccctaattgaacattatttaaaaaaagatgagttgggtgatccacttataaacgaagatcatatacttaactttcagtggggtactagagatgaattagaggaaatgcaagaatacggtcttaggattaatgattttttaagaggcctgttttttggaataggtcttaaacttgtagattttaaaattgagtttggaagatattattctgaagatggcaattcaattttactattagctgacgaaataagcccagacaactgcagattatgggacattaaaactaataagaaaatggataaagatttgtttaggcaagaattaggtgggttaaaagaggcatatcaagaagttgcaaatagattaggtattattcctgagaaaaaaaattactctagcgctaaacctaaaatagtaaaataa

SEQ ID NO: 312825 - DNA, 552 bp, Unknown
  Bacterial polypeptide expressing nucleotide sequence isolated from the Sargasso Sea
tgtccaaaccactactggggttggcgggcgacacctggatgctggtgcagcgggtggaggtgattcgctggaaagtggtgctgcgcaacatcgcgaccggatcgctgtgccgtcagacgccgattgcggagggcaccccgattaatccagccctgctggatctctattacaaagacgatgacctgggtgatccgttgttgacggaagcccgggtgcggctgctggggctggtggatgacgccagagtgtcagcgattgaacaactggcgcggcgaatcaacggcgtgctgcagccatttttcgacggccttgagctgcagttggtggatttcaagcttgaactcgggctcaacagggcgggcgagttgctgctggctgatgagatcagccctgacacctgccgcttctgggatcagcgcagcagcgatgccaatgatcggattctggacaaggaccgcttccgcaaggatctcggtggtgtgatggaggcctacggggaggtcctcaaacgggtccacaccgcctgcccgaacccccgcaactgcctgtaag

SEQ ID NO: 312826 - DNA, 802 bp, Unknown
  Bacterial polypeptide expressing nucleotide sequence isolated from the Sargasso Sea
aatagatgaaaatagtctattaatagtatctacagatcgtatttctgcttatgatgttgttatacccacagcaattcctggaaaaggtgcaatattaaatcaaatgtcaacattctggtttaataaaacgaaatcaattataagtaaccatctaatgaaacctgcattgggggacgattctttacctgaatcaattcaaagaagagcaatgtttgtccgtaaggcaaatcgcatagacatagaatgcgttgcaagaggttatataactggtagcgctcttgaagaatataacgatacccaaactgttgccaagataaaaatgccaaaagatttagtagacggagacaaattccctgaacctatatttactccggcaactaaagcctcagaaggtcacgatgaaaatataagcatcgaagatatgaaaaacattataggaaatgatcttacaaatcgacttaaagaactaaccttaaatatatataaatatgcccatgactatgctattgaaagagatataattattgctgacactaagcttgaatttggtttcattgatggcaaattatctttaatcgatgaactgttaacacctgattctagccgtttttgggatttacatgggtacagtccgggaaaaactcagcctaattacgataaacaatttgtaagaaattggctcttatcacaagactgggacaggcagcctcctgcaccaaaattacctgataatatagtagctaatactattgctagatatcatgatgtatttaataaattaactaaccagcaaatacaatag

SEQ ID NO: 312827 - DNA, 718 bp, Unknown
  Bacterial polypeptide expressing nucleotide sequence isolated from the Sargasso Sea
tatgacaaaaaaagaactcatttatgaaggcaaggctaagacattattcttttatgatgataataaaataattcaatactttaaggatgacgccactgcatttaataaaaagaaacatgaaattattaatgaaaaaggaattcttaataattttataagtgagtttattttcaaatatttaagtgaaaatggagtagaaaatcattttatagagcgattgaatgatagagagcagcttgtaaaaaaagtagatataattcctgttgaagttattgttagaaatattgcaacaggaacactaactaaaagactaggcattcaagagggattaaagttaaaaaaacctcttattgagtttacacttaagagtgatgagttagatgacccaattatatctgaggaacatattgatgttctggaatacgctgaaaaagacgaaatcaatattattaaagagcaagccctattaatcaataatcttcttttgcaacttttttcttctataaatattcaattagttgattttaagattgaatttggtcgtcttactattgataaaaaagtaattttggccgatgaaatcagtcctgactcttgtagattatgggacaaatcctcgtctgaaaaactagataaagatagattcagaaaaaaccttggaggattaattgatgcttacaaagaagtagcgactcggttaggaataaaaattcaataa

SEQ ID NO: 312828 - DNA, 877 bp, Unknown
  Bacterial polypeptide expressing nucleotide sequence isolated from the Sargasso Sea
attgcataattcaaatcttaaaaattataagaaaattcattcaggaaaagtgagggatatatatgaaattgataataatacccttctaattgtaacaactgatagaatttctgtctttgacaaggttcttccaaatataattcctgaaaaagggattattcttaatgaaatttcaaatttttggtttaaaagatataagaatttaataccaaaccatattattgattacgatataaacagtcttgaaattagtaaagacgaaattaaagaaattgcacaaagatcaatcacagtaaaaaagcttaagacctttcctatagaagctattgtaagattttatctatcaggaagtggttacaacgaatatttaaaggatggatatgtatgtggtattaaattaccaaaaggccttcgtcaatctgaaaaacttccagagccgatatttacgccatctactaaagctaacgtaggtgatcatgacctaaatattactcatgactcatgcataaatataattggaaaaaataattttgagtttataaaaaaaattagtattgaaatttttaatgatgcatttttatacctcaaagaaagaggtattatattgtcagatacaaagtttgaattcggctttgactcaaaagataatatttttttgattgatgaggttttgacaccagactcatcaagattttggcttgagaaagattataaaatagattgttcgccaaaaagtttagataaacaatatattagagattatgtaaaattttctggttggacagatgaccaggatcttcctagtctacctgacgatatcattcgtaatactactgaaaaatacaaatatataaggaagattattcaaaatgattaa

SEQ ID NO: 312829 - DNA, 793 bp, Unknown
  Bacterial polypeptide expressing nucleotide sequence isolated from the Sargasso Sea
atgaataaaggtaacaaattatacgagggtaaagcaaagataatttatgaaactaaagataaaaatttagttattcagcattttaaagatgatgcgactgcatttaataatcttaaaaaagctaaagtcgagggaaagggagttttaaataacagaatttctgagtacatattgtctaatttatctcaatgtggtgtcaaaacacacttggttaaaagattaaatatgagagagcaactgattaaaaaagctgaaatttttcctattgaatttattgtaagaaatgtcgccactggctctttgactaaaagattaggaataccagagggaacaattttagaaaaacctttattagaatattgtttcaaaaatgatgaattaagtgatcctttaatctctaaagaacatattctcacatttgggtgggctactgagaaagagttaaatttaatcgataaatcaactcttcgaattaacgatattctttcaggaatgtttagagctataaatatcaagcttattgattttaaaattgaatacggaaaaatatggaataaggatatagaaaaaaaagaaattgttttggctgatgaaattagtccagatacttgcaggctgtgggatgctagaactgaaaaaaaacttgataaagatagatttagaaaagatttaggcaatattattcaagcttatcaagaagttgctaggagatttggtataatgcctgaagaaacaaacataagcgaagtaaattttggtaaaactatcccgataaaattcaaaaaaaaataaa

SEQ ID NO: 312830 - DNA, 571 bp, Unknown
  Bacterial polypeptide expressing nucleotide sequence isolated from the Sargasso Sea
aatgaaaaaagggaaaaaattgtacgaaggtaaagcaaaagttatttttgctactgacaataaagactttgtaattcagcacttcaaggatgatgctactgcttttaataaccaaaaaaaagcaaagattgaaggcaaaggtgttttaaataatagaatttcagaacatattttaatgaatttagatcaagttggaataaaaaatcatttagtaaaaagacttaatatgagagaacaacttatcaaacatgtcgaaattattccgattgagtttattgtgagaaatattgcaactggttctcttacaaaaagacttgggatagaggatggtaccattttagaagatccattaattgaatattgtttaaaaaacgatgaactaggagatcctcttatatctaaagagcatatctatacttttaaatgggcaactaaaaaagaaatagaaaaaatagataaacaactactaaggataaatgacttcatggtaggaatgtttaggggtgttggtattaaacttgtagattttaaagttgaatttggaagaattaaaaataatggcaaaatagat

SEQ ID NO: 312831 - DNA, 721 bp, Unknown
  Bacterial polypeptide expressing nucleotide sequence isolated from the Sargasso Sea
aatggaaaaagtaaaagaaattgcagctggtaaagctaaatcaatgtttaccaccaacaatgcaaatgaattaataatggagttcagagatgatgcttctgcatttgatggaaagaaaagagcttctttagctggaaaaggagcagtgaacaatcaatttaatgcatttattatggattaccttggtgctaacggtgtagaacaccatttaattaatctgatggataatacgcattctctagtgcgcagcttggatatgtttcctatcgagtgcgtaattaggaatagggctactggatcaatatgcagaagactaggaacagaagacggtttaatccttgagaagcctctctttgaattcttcttaaaagatgatgatttaggtgatccattaattaatagaaaccatatagtttcatttggatgggcaaaagatgatgagctcgatgaaatgatcagtacttcgcataaggttaatgaacttttaacaaaactttttgctgattcaggaatgatattggttgattttaagcttgaatttggtgtctcaaatggaaagattctgcttggcgatgaatttactccagatggctgtagattatgggatgatcaaactttagaaaaactcgataaagacagatttagacaagatttaggagatgtgatcgaatcatatcatatggttgcacatagattaggaatgcaaataaaagttgactaa

SEQ ID NO: 312832 - DNA, 769 bp, Unknown
  Bacterial polypeptide expressing nucleotide sequence isolated from the Sargasso Sea
atgaacaagggtaaaaaactttacgaaggaaaagctaaaatcatctacgaaaccaaagaaaaaggtttagcaattcaacattttaaagatgatgcgacggcttttaataatcaaaaaaaagcaacagttgaaggcaaaggtgttctcaataatagaatttcggaacatattcttcagaacttaaatcaagttggaataaaaaatcatttagtaaaaagattgaatatgagggaacaattaataaaactggttgaaattatacctattgaagtcattgtgagaaatattgctacaggctcactaactaaaagattaggagtaactgacggtacagttttagaaaaaccattaatagagttttgttataaaaaagatgaacttggtgatccacttattgctaaagaacatatttttgcttttaattgggcaacagaaaatgagataaaatcaattgaagaaatgacttttagagttaatgattttatgtcgggaatgttcagaggaattggaataaaactagtagattttaaacttgaatttggaagaatatggaatggagataatagagaggtaattcttgcagatgaaataagtcctgacacatgtagactgtgggatattaaaagtgagagaaaattagacaaagatagatttagaaaagatttagggaatatcattcaggcgtatcaagaagttgctcgaagattgggaatagttccagaaacaactaatgtaagtgaagttaactttaaaaaacctacatcaataa

SEQ ID NO: 312833 - DNA, 721 bp, Unknown
  Bacterial polypeptide expressing nucleotide sequence isolated from the Sargasso Sea
tatgaataaagttaaagaaataacctcaggtaaagctaaaaccatgtttacaacttcctcagaagatcaattaataatggagtttcgtgatgatgcttcagcatttgatggtaagaaaagagcttctcttgctggaaaaggctcaattaataatcaatttaatgcttttataatggattatctgaaagaaaatggaattaaaaatcattacattgagtctcttgatagaacacattcactagtacacagtctcaagatgtttcctattgaatgtgtcatcaggaatatagcaactggatcaatatgtagaaggctaggaactgaagacggtcttaaattaaaaactcccttgtttgaattttttctcaaggatgatgaacttggggatccattaattaataaaaatcacataatttcattcagttgggctgaagaacatcaaataaatgaaatgattgaaataacatatcgagtaaatgaacttttgagtaaattgtttgcaaatgccggtatgattttggttgattttaagttggagtttggtttaaggggtgaagaaattcttttgggtgacgaatttactcctgacgggtgtagattatgggatagtgtgactcatgaaaaacttgataaagacagattcagacaagacttgggtgatgtaatagaatcttatcatcttgtagcggatagattgggcatagacattaaagttgactaa

SEQ ID NO: 312834 - DNA, 787 bp, Unknown
  Bacterial polypeptide expressing nucleotide sequence isolated from the Sargasso Sea
aatgaaaaaagggaaaaaattatatgaaggtaaagctaaaattatttatgctactcaagataaaggtttagttattcaatactttaaagatgatgcaacagcatttaataatcaaaagaaaagcactattgagggaaaaggagttttaaataatagaatttcagaacatatccttacaaatctttctcaaatcggtattaaaaatcatttagttaaacggcttaatatgagagaacaggtgatcaaacttgtggagataattccaatagaatttataacaagaaatgttgcaacgggatcgattactagaagattaggtattgaagatggaacaattcttaaggaaccattaattgaatattgtctaaaagatgatgctttgggagacccgttaattgcagaagagcatatctatgcttttgattgggccactaaaaaagagatagaaaaaattaaaaagatgattttaagaattaatgacttcatggttggtatgttcagaggtattggaattaagctaattgattttaaattagaattcgggagaataaaaactaacggaaagaatgaaattattttagctgatgaaatcagtccagatacttgtagattatgggattctataactgacaagaagttagataaagacagattcagaaaagatttaggtgatttaattcctgcatatacagaggtagcaaaaagattaggtattctacatgagcaatcaaacgtgtcagcagtaaatgtaacaaaattatcttctgtaaaaaagaaaagaaaatga

SEQ ID NO: 312835 - DNA, 793 bp, Unknown
  Bacterial polypeptide expressing nucleotide sequence isolated from the Sargasso Sea
tatgaataaaggaaataaattatacgagggaaaagctaagattatttatgaaactaaagataaaaatctagtaatccaacatttcaaggatgacgcgactgcttttaataatctgaagaaagcaaaagttgaaggtaaaggtgttttaaataatagaatatctgagtatattttatccaatctttctcaatgtggaataaaaaatcatttagtaaaaagacttaatatgagagaacagctgattaggaaagctgaaatttttcctattgaatttatagtaagaaatatagctactggctcattaacaaaaagattaggcatacctgagggtactcatcttgaaaagcctttattagaatactgttataaaaaagacgaacttaatgacccattaatctcaaaagatcatattttctcattcggttgggctactgaaaatgaaattaaaataattgatcaaatgaccctgagaataaatgatcttttaactgggatgtttagggcaataggcattaagttagtagattttaaacttgagtatggaaaagcgtggaacaaggatactgaaaaaaaagaaatcgttcttgcagatgaaataagtccagatacttgtagattgtgggatgtaaaaactgaaaaaaaattagataaagatagatttagaaaagatttagggaatattattcaagcttatcaagaagtagcaagaagattaggtataatgccagaggaaacaaatattagtgaagtaaactttggaaaaacaattccaattaaattcaaaaaaaaataa

SEQ ID NO: 312836 - DNA, 661 bp, Unknown
  Bacterial polypeptide expressing nucleotide sequence isolated from the Sargasso Sea
aatgaaaaaaggtaaaaaattatacgaaggaaaagcaaaaattatctttgcaactaatgataaaaatacagtaattcagcattttaaggatgatgctactgcttttaataatcaaaaaaaggcaaggattgatggtaaaggaattttaaataatagaatttcagagcatatactttcttctctctcagaaataggaattaaaaatcatttaattaaaagacttaatatgagagaacaacttgtcgagttggttgaaattattccaattgagtttgtaataagaaacatagctacagggtctctaacaaaaagagttggtattgaggaaggtacagttttagactctcctttaatagaatattgtcttaaaaatgatgaattaggtgatccaattatctcaagagagcacataataaattttaattggttgaaaactgttgagctagatttaataaatgagcaatgttttagaataaatgattttttacaaggaatgtttaaaggtgttggaattaaacttgttgattttaaagttgaatttggaaaagcaaaatctgatggtagaataattttggctgatgaaataagtccagactcatgcagactttgggatcaagaaactgaaaagaaattagataaagatagattagaaaagattagg

SEQ ID NO: 312837 - DNA, 486 bp, Unknown
  Bacterial polypeptide expressing nucleotide sequence isolated from the Sargasso Sea
aatgaaaaaaggaaaaaaattatacgaaggaaaggcaaaaattttatacgcttcacctgaaaaaaatttagctattcaacattttaaagatgatgctacagcttttaacaatcaaaaaaaagcaactattgaaggaaaaggaattttaaataatagaatttctgaacatatactctctaatttaaatcaaataggaataaaaaatcatcttataaaaaggattaatatgagagagcaacttgtaaaaattgttgaaataatacccattgaatttattgttagaaatattgcttctggttcattaacaaaaagacttggaatagaagaaggtactatattaagccgtccattaatcgaatattgcctgaaaaatgacgaccttggagatccgttaataagtagagaacatattttaacttttgattggttaaatataatggagttagattggatttcagaagaatgcagaagaataaatgatttttt

SEQ ID NO: 312838 - DNA, 718 bp, Unknown
  Bacterial polypeptide expressing nucleotide sequence isolated from the Sargasso Sea
atggcaacaaaattaaaaaagttatatgagggaaaagcaaaaattatatatgcaaaaaatagcaaccaagtaatagccacctataaaaatgacgctactgcttttaacaatttaaaaaaaggttctataaaaaataagggtgctattaataacactatctcgagttatttatttcagattttgaatcactgtgatatcccaacacactttatcaaaaaaattgacaaaaaatctcagcttttaaaaaaggcagatattattccaattgaagttttggttagaaatctctttgctggatctttatcaaaaaaatttggcattaaggagggcactccattatctgatacacttatagagtactgtttaaaatcagatgaacttggcgatccacatataagttctgagcatattcttaatttagggttatgcgactttgatgaattagaattaatagatgaatattctttgagaattaatgatgttttaagatctacatttttttcgatcggaattaatttaattgattttaagttagaatttggaatttgtaaaaaaagcaatgaacttgttctagctgatgaaatatctccagatacttgccgattatgggatttaaaaacaaataaaaaacttgataaagatcgctttcgaagagatttaggaaatgttgaagagtcatatacagaggtgcttgatagattaaacttaaagatttaat

SEQ ID NO: 312839 - DNA, 694 bp, Unknown
  Bacterial polypeptide expressing nucleotide sequence isolated from the Sargasso Sea
ggcttttaataaccttaaaaaagcaaaaattgagggtaaaggtgtgcttaataatagaatatcagagcatttattaacaagtttaaaaaattgtgggattaaaaaccatttaattaaaagactcaatatgagagagcaacttataaaaaaagttgaaattattcctatagaatttattgtaagaaatattgctaccggatcactttcaaaaagacttggtattcaagaaggtactaaacttgataatcctttattagaatattgccttaaaaatgatgatcttggtgatccaattatttcaaaagaacacatctatgcttttaattggtcatcagaaagtgaagtcaaagagattgataaattgtctttaagagtcaacgatattctatcaggaatgtttaaggcaataaatataaaattagttgatttcaaattggaatacggaaaatattggaataaagataaagatagatttgaagtaattctagctgatgaaataagtcctgacacctgtaggctttgggatgaaaaaactgaaaaaaaattggacaaagaccgttttagaaaagatttaggaaacattattcaaggttatcaagaagttgcaagaagattaggtataatgcatgaggaaacaaatattaaagaagtttcattctctcgtccaacttcaattaaatttaaaaagaagtaa

SEQ ID NO: 312840 - DNA, 787 bp, Unknown
  Bacterial polypeptide expressing nucleotide sequence isolated from the Sargasso Sea
atgaacaaaggtaaaaaactttacgaaggaaaagccaaaataatttacgaaactaaagaaaaaggcttagctatacaacatttcaaagacgatgctacagcttttaataataaaaaaaaagctacagttgaaggcaagggtgtattaaacaatcgaatatcagagcatattttaaataatttaaatcaagtcggtattaaaaatcatttggtaaaaagacttaatatgcgagagcaacttataaagcttgttgagatcatacctatagaagttatcgtaagaaatatcgctactgggtctcttactaaaagattgggtgttactgatggaaccgttcttgaaaaacctttaattgaattttgttataaaaaagatgagcttgacgatcctcttattgcaaaagagcatatatttgcatttaattgggcaactgaagaggaaataaaaataattgaggaaatgacttttagaattaacgatttcatgtcgggtatgtttcgaggtataggcattaaacttgtagactttaaattggaatttggaagaatttggaataacgatcagaaagaggtcatacttgcagacgaaattagccctgatacttgcagactctgggatattaaaagtgaaaaaaaattagataaagacagatttagaaaagatttgggaaatataattcaagcttaccaagaagttgctagaagacttggtatagttccagaaacgaccaatgttagtgaagtaaattttaaaaagcctacatcgataaatattaaaaaaagataaa

SEQ ID NO: 312841 - DNA, 721 bp, Unknown
  Bacterial polypeptide expressing nucleotide sequence isolated from the Sargasso Sea
atggaaaaagtaaaagaaattgcagctggtaaagctaaatcaatgtttaccaccagcaatccaaatgaattaataatggaattcagagatgatgcttctgcatttgatggaaaaaaaagagcttcattagctggaaaaggagcagtgaacaatcaatttaatgcatttattatgcattaccttggtgataacggtgtagaacaccatttaattaatcttatggataatactcattctcttgtgcacagcttggatatgtttcctatcgagtgcgtaattaggaatagggctacaggatcaatatgcagaagactgggaacagaagatggtttaatccttgagaagcctctctttgaattcttcttaaaagatgatgatttaggcgatccattaattaataggaaccatatagtttcatttggatgggcaaaagatgatgagctagatgaaatgatcagaacttctcacagggttaatgagctcttaacaaaactttttgctgattcaggaatgatattggttgattttaagcttgaatttggtgtctctaatggaaagattttgcttggcgatgaattcactccagatggttgtagattgtgggatgatcaaactctggaaaaactcgataaagacagatttaggcaagatttaggagatgttattgaatcctatcatatggttgcacatagattaggaatgcaaataaaagttgactaat

SEQ ID NO: 312842 - DNA, 787 bp, Unknown
  Bacterial polypeptide expressing nucleotide sequence isolated from the Sargasso Sea
aatgaaaaaaggtaaaaaattatacgaaggtaaggctaaaattatttatgcaactactgataagaatttagtaattcaacatttcaaagatgatgctacagcttttaataatcaaaaaaaagatgtcattgaaggtaaaggaattttaaataatagaatttcagaacatattcttacacaattaagcaatgttggaataaaaaatcatttagtaaaaagacttaatatgagggaacaacttgttaagttagtagagattattccaattgaatttattgttagaaatattgcaacaggttctttgacaaaaagattaggaatagaagatggaacagtacttgattatccactagttgaatattgcttaaaaaatgatgatctaggtgatcctcttgtaagcagagagcatattttagcatttaaatggatggatgtttttgaattagattttatttacgaagaagtaagaagaataaatgattttcttcaaggcatgtttaggggcgttggaattaaattagtagattttaaagttgaatttggaagatttgaagctgatggtaaaagagaaattatgttagctgatgaaattagtccagatacatgcagactttgggatatgagaacagataaaaaactagataaagatagatttagaaataaccttggaaacttggtagaagcttatcaagaagtggcaattaggcttaatatattacacgaacaatcaaatataagaccattaacttatcctaaacctaaagcagtaaaaattaagaaaaaatga

SEQ ID NO: 312843 - DNA, 447 bp, Unknown
  Bacterial polypeptide expressing nucleotide sequence isolated from the Sargasso Sea
aaccgctcatagaatattgttataaaaatgatgaattaaatgatcctttgattgcaagagaacatattaattcatttggttgggctaatgacatagaattagattggataaccaaacaatgctttagaataaatgatttcatgcaaggcatgttcaaaggagttggtattaaactggtagattttaaacttgagtttggaagattaaatcaaaatggaaaagaaagaattttactagcagatgaaattagccctgatacatgtagattgtgggatgcagctagtgaaaaaaaactagataaagatagatttagaaaagatttaggaaacattcttgaggcatatcaagaagttgcgagaagactagatatactgcatgagcaaaatactaatataagaccaattaaatttcctaaacctacagctgtaaaaatcaaaaaaaaataaa

SEQ ID NO: 312844 - DNA, 787 bp, Unknown
  Bacterial polypeptide expressing nucleotide sequence isolated from the Sargasso Sea
atgaaaaaaggtaaaaaattatacgaaggaaaagctaaaataatttatgcaacaaatgataaaaacttagttattcaatattttaaagatgatgcaactgcattcaataatcaaaaaaaaactacaattgagggcaaaggtgttttaaataatagaatatcggaacacatactctctaatctctctcaaataggaattaaaaatcacttagttaaaagattaaatatgcgtgagcaaataataaagcttgtagagataattccaatcgaattcattgtgagaaacgttgcaacaggttcaattacaaaaagattgggtattgaggacggtacagttttaaaagaacctcttattgaatactgcttaaaagatgacaaacttggagatccattaatatctgaagagcatattttagcatttggttgggcatcaaaaatagaaatcgataaagttaaaaaaatgattttaagaattaatgattttatgattggcatgttcagaggtgttggaattaaacttatcgattttaaattagaatttggaagaattaaaattgatggaaaaaatgaggttattttagcggatgaaattagtcctgatacgtgcagattatgggacagtattacagaaaaaaaattagataaagatcgatttagaaatgatctgggtgatttgattccagcctatactgaggttgctaaaagattaggtatacttcatgaacaatctaacgtttcagcagtaaatgtaactaaattatctgcagttaaaagaaagaaaaaatgaa

SEQ ID NO: 312845 - DNA, 652 bp, Unknown
  Bacterial polypeptide expressing nucleotide sequence isolated from the Sargasso Sea
aatgaaaaaaggtaagaaattatacgaaggaaaagcaaaaataatttttgcttctgctgaaaaaaatttggttattcaacatttcaaagatgatgcgacagcgtataacaatcaaaaaaaggacactatagaaggaaaaggaattttaaataatagaatttctgagcatattttatcttcattaaaaagtataggaattgaaaatcatttaattaaaagacttaatatgagagagcaattaatcgatttagttgatattgtgccaatcgaatttgtattaagaaatatcgttactggtactctagcaaaaagactgggtattgaagacggaactgttttaagcaaaccgttaatagaattttattataaaaatgatgatcttgatgatccattagtagcaagggaacacatttatgcttttggttggacatctgaacccgaattagactggataacaaaacaatgttttcgtatcaatgattttttacaaggcctgttcaaaagtgtagaaattaaattagttgatttcaaagttgaatttggaaaaagaaggtcagatggaaaaattatattagctgatgagattagcccagatacatgtagattgtgggatgcaaatacagataaaaaattagataaagatagatttaga

SEQ ID NO: 312846 - DNA, 784 bp, Unknown
  Bacterial polypeptide expressing nucleotide sequence isolated from the Sargasso Sea
atgaaaaaaggaaaaaaattatacgaaggaaaggcaaaagttatttttgctactgacaataaagactttgtaattcagcactttaaggatgatgcaacagcttttaataatcaaaaaagagcaaagattgaaggcaaaggtgttctaaataatagaatttctgaacatatattaatgaaccttgatcaagttggaataaaaaatcatttagtaaaaagacttaatatgagagagcaacttatcaggcatgtcgaaattattccgatcgaatttatcgttagaaatattgcaactggttctcttacaaaaagacttgggatagaggacggcaccattttagaagatccattaattgaatattgtttaaaaaacgatgaactaggagatcctcttatatctaaagaacatatctatacttttaaatggtcaaataaaaaagaaatagaaaaaatagataaacagctactaaggataaatgacttcatggtaggaatgtttagaggtgttggcattaaacttgtagattttaaagttgaatttggaagaattaaaaataatggcaaaacagatgtgttactagcagatgagataagtcctgacacttgtagattatgggacaataagactgataaaaaattagataaagatagatttagaaataatcttggaaatttgataaatgcatatcaagaagtagcaaaaagattaggtattcttcacgaacaatccaatatacaagctgtcaactttgaaaaaccaaaagcggtaaaaaacaaaaaataaa

SEQ ID NO: 312847 - DNA, 787 bp, Unknown
  Bacterial polypeptide expressing nucleotide sequence isolated from the Sargasso Sea
atgagtagaagaaaattaatttatgaaggtaaagcaaaaatcctttacgaaggtccagagagaaataccatggtccaatactttaaagatgatgctacagcatttaataatgaaaaaaaagcaattattgaaggtaagggagttttaaataacagaatttctgaatttatatataatcagttaaatgatgttggattagaaacacatttaataaaaagattaaatatgagagagcaactgattaaatcatgtgaagtattgccaattgagttcgttgttagaaatattgctgctggatcaatagttaatagattgggtttaaacgaaggatctattttaaaaaatccgattgttgagtattattacaaaaatgacgctctaggagatccaattgtaacaatagagcatattaaaattaatgattgggcaaatgaggaagaaattaaaaaggctactaatatttctttacgtataaatgatattttatcaggtttgtttagagcggtaggaattaagctggtggattttaaattagagtttggtagatattggaataatgaagaaaaaaaaataattttagttgatgagattagtcctgatacctgtagattgtgggatactaaaaatgaaaaaaaactcgataaagacagatttagaaaagatttgggtggattaattgaggcttatcaagaagttgcaaagaggcttggaatcatgccagaaggtactaatatcaaggaaattaaaacaggtatttctaaaacaattaaattaaaaaaaagttaaa

SEQ ID NO: 312848 - DNA, 790 bp, Unknown
  Bacterial polypeptide expressing nucleotide sequence isolated from the Sargasso Sea
aatgaatagaggtaaaaaactttacgaaggaaaagcaaagataatttacgagactaaagaaaaaggtctagctatccaacatttcaaagacgacgcaactgcttttaataataaaaaaaaagccacagttgaaggaaaaggtgttcttaataatcgaatatcagaacacattctgaataatttaaatcaagttggtattaaaactcacttaataaaaagacttaatatgagagaacaattaatcaagttagttgagattataccaatagaagttattgtaagaaatattgcaacaggctctcttacaaaaaggcttggggtaactgatggtactattttggaaaaacctttattagaattctgttacaaaaaagatgaactagatgatccattaattgccaaagaacatatctatgcctttaattgggcgagtgaagaagaaattaaatccattgaagatatgacttttagaataaatgactttatgtctggaatgtttagagggattggaattaagctcgttgattttaaattagaatttggaagatactgggaaggagataaaaaagaggtaattctagctgacgaaataagtcctgatacttgtagactttgggatattaaaagtgaaagaaaattagacaaagatagatttagaaaagaccttggaaatattatccaagcgtatcaagaagttgctagaagactgggtatagttcctgaaacaacgaatgttagcgaagttaactttaagaaacctacatcaataagcattaagaaaaataaattg

SEQ ID NO: 312849 - DNA, 787 bp, Unknown
  Bacterial polypeptide expressing nucleotide sequence isolated from the Sargasso Sea
atgaaaaaaggtaaaaaattatacgaaggaaaagctaaaatcatttatgcaacaaatgataaaaacttagttattcaatattttaaagatgatgcaacagcattcaataatcaaaaaaaaactactattgaaggtaaaggtgttctaaataatagaatatcagaacatatactctctaacctctctcaaataggaattaaaaatcatttaattaaaagattaaatatgcgtgagcaaattataaagcttgtagaaataattccgatagaatttattgtaagaaatgttgcaacaggttcaattacaaaaagattaggtattgaggatggtactgttttgaaagagcctttaattgaatactgcttaaaagatgacaagcttggagatccattaatatctgaagagcatattttagcatttgattgggcatcaaaaactgaaatagataaagttaaaaaaatgattttaagaataaatgattttatgattgggatgtttagaggtgttgggattaaacttatcgattttaaattagaatttggaagaataaaaattgatggaaaaaatgaagttattttagcagatgaaattagtcctgatacatgcagattgtgggacagtattacagaaaaaaaattagataaagatcgatttagaaaagatttgggtgatttaatcccagcctatactgaggttgctaaaagattgggtatactccatgaacaatctaatgtttctgcggtaaatgtaactaaattatcttcagttaaaagaaagaaaaaatgaa

SEQ ID NO: 312850 - DNA, 400 bp, Unknown
  Bacterial polypeptide expressing nucleotide sequence isolated from the Sargasso Sea
ccctctaattgcagaagaacacataatagctttcgattgggctagtaggaacgaaattgataaagtcaaaaaaatgatattaagaattaatgactttatgattggaatgtttagaggagttggaattaaattgattgatttcaaactagaatttggaagattaaaatctaatgggaagcaagaagtaatactagcagatgaaattagcccagatacatgcagactttgggacagtattactgataaaaaacttgataaagacagatttagaaaagatttaggtgatttaattccagcgtacacagaagttgctaaaagattaggtattttgcatgaacaatcaaatgtaagtgcagtgaatgtaacaaaattatcatctgttaagagaaagaataaatga

SEQ ID NO: 312851 - DNA, 355 bp, Unknown
  Bacterial polypeptide expressing nucleotide sequence isolated from the Sargasso Sea
aaaactgaaatagataaagttaaaaagatgattttaagaattaatgactttatgattgggatgtttaggggtgttggaattaaacttatcgattttaaattagaatttggaagagttaaaattgatggaaaaaacgaaattattttagcagacgaaattagtcctgatacttgcagattatgggacagtattacagaaaaaaaattagataaagatcgatttagaaaagatctgggtgatttaattccagcatatactgaggttgctaagagattgggtatacttcatgaacaatctaatgtttcagtagtaaatgtaactaaattatcttcagttaaaagaaagaaaaaatgaa

SEQ ID NO: 312852 - DNA, 898 bp, Unknown
  Bacterial polypeptide expressing nucleotide sequence isolated from the Sargasso Sea
tatggatatacaaaataaaaacatcatattagaatcaaatataaaatcatgtcctttaattaataggggaaaggttagagacctttatgatcttggtgatcaactcttaattgtttcatctgatagaatttcagcatatgattcagttctagcttctggtatttatgcaaaaggtgaagtactaactcaattatcaaaattttggttttcactaacagaagatattgttgaaaatcattacataactgatgatattgcaggcttttcgcaaaaattagtggatgacttagatgtgcttcagggcagatcaatggtagttaaaaaagcaaagccgcttcctatagaatgtattgttagaggatatataacaggatctggatgggcagaatataaaaaacaaggaactgtttgtggtcttaaattaaacgatggattagtagaatcagaaaaacttagtgagccaattttcacaccttcaacaaaagcagagcaaggtgaacatgatgaaaatatcaactttgaacaatgtgtaaatatagtaggaagcgaggttgccaataaggttaaggatttatcaatagcaatttattctaaggctagagattatgctgaaagtaaaggaattctaattgcggatacaaaatttgaatttggaacactagataatggtaaaataatcttaattgatgaagtcctgactcctgactcatctaggttttggccaaaagctttatatgaagctggtagaggtcaagaaagttacgataaacaaattgtcagagattatttaacttcaataggttgggataaaaaaccgcctccccctaaattaccagatgaaattgcagaaaaaacatctaacaaatacatagaggtattagatttattaacccagtag

SEQ ID NO: 312853 - DNA, 551 bp, Unknown
  Bacterial polypeptide expressing nucleotide sequence isolated from the Sargasso Sea
aattataaagcttgttgaaataattccgatcgaattcattgtgagaaatgttgcaacaggctcaattactaaaagattgggtattgaggacggtactgttttaaaagaacctctgatcgaatactgtttgaaagatgacaatcttggagatccattaatatctgaagaacatattttagcatttgattgggcgtcaaaaacagaaatagataaagttaaaaaaatgattttaagaattaatgattttatgattgggatgtttagaggcgttggaattaaacttatagattttaaattagaatttgggagaattaaaattgatggaaaaaatgaagttatcttagcagacgaaattagtcctgatacatgtagattatgggacagtattacagaaaaaaaattagacaaagaccgatttagaaaagatctgggcgatttaattccggcctatacagaagttgcaaaaagattaggtatacttcacgaacaatctaatgttgcagcagtaaatgtgactaaattatcttcggttaaaagaaagaaaaaatgaa

SEQ ID NO: 312854 - DNA, 727 bp, Unknown
  Bacterial polypeptide expressing nucleotide sequence isolated from the Sargasso Sea
cctgaaaaaaacttagtaattcaacattttaaagatgatgcaactgcttttaataatcaaaaaaaggcaacaatagatggaaagggaattttaaataatagaatttcagaatatattctctcaaacttaaatgaagtaggaataaaaaatcatctaattaaaagaattaacatgagagaacagcttgtaaaaagtgttgaaattatacctattgaatttgttgtaagaaatattgctacaggctcattaacaaagagacttgggatagaagaaggaacacttttagattatccattaattgaatattgccttaaaaatgatgatttaggagacccgttggtaagtcgtgaacatatactgtcatttaattggatgaatataatggaattagaattaataaatgagcaatgcaaaagaataaatgattttttacaagggatgtttagaggtgttggtataaagcttgttgatttcaaattagaatttggaagatcaggacaagataatgaaataattctcgcggacgaaattagtcctgatacatgtagactgtgggactcaagaacagaaaaaaaattagacaaagatatatttagaaaagatcttggaaatttaattgaaggataccaagaagtagcaaagagattagacattcttcatgaacaatctaatataagacctataaaatttccaaaacctaaagcggttaaaattaaaaagaaataat

SEQ ID NO: 312855 - DNA, 700 bp, Unknown
  Bacterial polypeptide expressing nucleotide sequence isolated from the Sargasso Sea
gatgatgcaacagcttttaataataaaaaaagagcaaagattgacggaaaaggtattttaaacaacagaatatctgaacatattcttaaaaatcttggtcaagttggaattaaaaatcatttggttaaaagattaaatatgagagagcaattaataaaatctgtagaaattgtgcctatagaatttatagtaaggaacattgctaccggatctttaacgaatagattaggaattgaggatggtacagttttagaaagtcctttaatagagtattgctataaaaatgatgaacttggggatcctttaatttctaaagagcatattttttcttttaactgggctacgagaaaagaaatagaaaaaattgataaatatttacacagaataaatgattttatgattgggatgtttagaggtattggaataaagctagtagattttaaagttgaatttggaagatataaaagcggtaataaaagtgagataattttagctgatgaaatcagcccagatacttgcagattatgggacataaattcagaaaaaaaacttgataaagacagatttagaaaaaatttaggtaatgttatgcaggcatatcaagatgtggctagaagactgggtattcttcatgaagaatcaaatataagagctgtaaagtttccaaaacctaaagcagtaaaaataaaaagaaaatgaa

SEQ ID NO: 312856 - DNA, 400 bp, Unknown
  Bacterial polypeptide expressing nucleotide sequence isolated from the Sargasso Sea
tatgatacgcaaacgtgtgcgtcggcagaaaaacgcaatatttatcgttaattcacacccaggagtaataaagatgcaaaagcaagctgagttgtatcgtggtaaagcgaagaccgtatacagcacggaaaacccggacctgttggtgctcgaattccgcaatgatacgtcagcaggggatggcgcgcgcattgaacagtttgaccgtaaaggcatggtgaacaacaaattcaaccatttcattatgactaaactgcaagaagcgggtattcctacccagatggagcgactgctttctgataccgaatgtctggtgaaaaagctggatatggtaccggttgaatgtgtggtacgtaaccgcgcggcaggctctctggttaagcgtttaggcgttgaggaa

SEQ ID NO: 312857 - DNA, 674 bp, Unknown
  Bacterial polypeptide expressing nucleotide sequence isolated from the Sargasso Sea
taataaaaaagctaattatagaattagtaatccaagatattatgccacccactctctgtttaatttacattataaaaatctagataatactagagcaacaattaaaaacattaatctaaaattaataggagaacataatgttcttaatgcatctgccgccgccgctgtttgtataaatctaggagtaaaaactgatattattaaaaaggctttaaaaaacttcacaggagttcaaagaagaatgactaaagtattgaaaaaaaatgaaaatgaattttttgatgattatgctcatcatccaactgaaatttcttctatcttagaaggagtgcgtaaagtttataataacagaaaaattatctccgtttttgaacctcatagatactccagagtaatgtcactaaaattagatttctctaaagcatttataaagtcagatttagttttaatttgccctatatatgctgcaggtgaaaagagaaatttaaagtttaatttaattaattttgcaaaattaatatctaaaaattcaaacacccaggtggtgattgtgaaaaatcaaaaagaattgtcaaattattttaaaaggaatttaataaataatgaaattataattggtatgggtgctggctccatctctaagtggatgagagaattaaagtttagtttatgaa

SEQ ID NO: 312858 - DNA, 349 bp, Unknown
  Bacterial polypeptide expressing nucleotide sequence isolated from the Sargasso Sea
gtttggaacaaatactcggttaggaaaaggagaatggataattgttgaagcagacgagtctgatggaacatttttaaaactagatccatatatttcagtagtgacaaatatcgataaagagcatttagagtattacggaaactacaatgaacttaaaaaaagttttaggaggtttatctcaaatattccattttatggttttgcagttgtatgcatagatgatccttctattaaatcattagttcaaataataaaaaatactaatattataacttacggtacagacaaaaaaagtaatattagggcttttaatattagatataagaaagaaaaaacattttttgatatt

SEQ ID NO: 312859 - DNA, 621 bp, Unknown
  Bacterial polypeptide expressing nucleotide sequence isolated from the Sargasso Sea
agtttgacttaaatataaaattacctaataaaaaaaaccaaataataaaaaaattcaaaattccattattgggaaatcataacattaaaaattctgtagctgcggcagcattagcgttaacagtagggttatcaattaacaatattaaaaaaggacttaaaaattttaaaggagttcaaagaagatttaataaaattttcaattttaataatgtagatttttatgatgattatgcgcaccatcctacagaaataaaagaagtactagatggtgtaaaaaatgtttatagagattatgaaaagatatgtattttccaaccacatagaatatcaagattaaaagatttaaaaaaagaatttacctttgcttttaagaatgcagatagagttattttgtttccaatttatactgctggagaaaaattaaggcttggatttaattatataaattttgcaaaagaaataattaaaaactcaaaagttcagctatttttagtagatgataaacttcaattagcaaaatttattaaagcaaacatatatgggaaaaaaattgttataggaatgggtgctggaactatttcaagttggatgcgagaattacctaaattattatcatgaa

SEQ ID NO: 312860 - DNA, 964 bp, Unknown
  Bacterial polypeptide expressing nucleotide sequence isolated from the Sargasso Sea
atgaaaggaatgggatttaaaattcaaggtagcgatatatctccaaataaaaatattgaaagattaaaaaaaaataatgttaaagttattattggacataacaaaaaaaatattaataaggcaactatcatagtaatttcatcagcaattaaaaagaataatccagaagttttatttgctaaaaaaaaaaatttaccaatttataaaagaggtgacatgctaggacatattacatctttaacaaaaaatataacagttgtgggctctcacggaaaaactacaactacatcacttatttcaggtattttttctaaaacaaagttggatcctacaataataaatggaggggttattaattctttagataattcagcaaggctgggtaaaagtgaatggagtatattagaattagatgaatcagacggaagttttataaaagttttacctacatattccattattacaaatatagatagagaacatatggactattacaaatcaatggataatttgtttaaattatttaaagaatttattggcaaagttccatcatttggtaaatcatttatttgtttagatgataaaaataacaaaaaacttatagataagattaaatttaaaaacttttatacttatggaataaataaaaaatctcaatttcaaattaaaaatatttatcaatcaaaaagttattccaaatttgatttaaatatacaattacaaagtaaaaaaaatactttaattaaaaatataaaaattccactaataggattacataatataagaaatgctacagctgctgtagcagtttcatggattattggaatttcaaaagatattataaaaaagggtttaaatgaatttaaaggtgtacatagaagatttaataaaatatttgagtttatgggcgtgaaattttttgatgattatgcacatcatcctagtgaaattaaagaagtattaa

SEQ ID NO: 312861 - DNA, 505 bp, Unknown
  Bacterial polypeptide expressing nucleotide sequence isolated from the Sargasso Sea
atgaaaattcatatcctaggaatctgcggaacatttatgggagggttggctcgaattttaattgagtccggtcataaggttactggatcagataacaatttttatcctccaatgtcagatcaactaagagaattagatgttgaattaacaaaaggatttgagccgtcctcaatgcctgaagctgatctctacgtaattgggaatgcgctttctaggggaaataagtgcgtggaagaaattttaaacaaaaacctcccttataaatctggacccgagatgcttggtgacattatcaaagatagatttgtgatagctgtctctgggactcacggaaaaacgacaacatccttcatgattgcaaagatatttcagtctttgggtaaagatataggttatctcataggaggtatatcacctgatttctcattctctgcaaaaataggtagtgatgaaatcttcataattgaggcagatgaatatgattctgcattttttgacaagagat

SEQ ID NO: 312862 - DNA, 509 bp, Unknown
  Bacterial polypeptide expressing nucleotide sequence isolated from the Sargasso Sea
attagcatttacaattggtttgcctgaaaaatatatcaaacttggactttataattttaaaggagttcagagaaggttttctcatttatttaatcacaacaagattagtttttatgatgattatgcccatcatccaacagagataagttcagtattaagtggtgtgaaaaatgtccataaaaataaagaaattgtttgtgtctttcaacctcatagagtttcaagagtaaaaaatctcaaaaaagaattttcaaaatgttttaaaaaggcagacacagttttattatgtccaatttatacagctaatgaaaaactaaagcttaattttacatatcatgcctttgcaaagttaataataaaaaattcaaatgttaaactaattcaggttaataacgagtcacaattacgaagttttataaggcaaaatgcatttggtaaaaaaatttacataggtatgggggcaggatcaatatcaaactggatgaaaaatttaaaaaatatattttaat

SEQ ID NO: 312863 - DNA, 247 bp, Unknown
  Bacterial polypeptide expressing nucleotide sequence isolated from the Sargasso Sea
atgaatttattaaaaaaaattaaacatattcattttgtaggaatcggtggtgctggaatgataggtatcgctagaatacttttgaaaaaaggctttaaaatatcaggctctgacattgcacataataatgatttaagaaaactttctttaagaggcgcaaagatatttattggacatgacgaaaaaaatgttaatggcgcaaatcttcttgttgtatcttcagcaataaataataagaatgtttgaa

SEQ ID NO: 312864 - DNA, 412 bp, Unknown
  Bacterial polypeptide expressing nucleotide sequence isolated from the Sargasso Sea
atgaaaattcacatcctaggaatctgcggaacatttatgggaggattggctcgaattttaattgagtctggtcataaggttactggatcagataacaatttttatcctccaatgtcagatcaactaagagaattagatgttgaattaacaaaaggatttgagccgtcctcaatgcctgaagctgatctatacgtaattgggaatgcactttctaggggaaataagtgcgtggaagaaattttaaacaaaaacctcccttataaatctggacccgaaatgcttggcgacattatcaaagatagatttgtgatagctgtctctggaactcacggaaaaacgacaacatccttcatgattgcaaagatatttcagtctttgggtaaagatataggttatctcataggaggtatat

SEQ ID NO: 312865 - DNA, 965 bp, Unknown
  Bacterial polypeptide expressing nucleotide sequence isolated from the Sargasso Sea
tctgttacaaaaccaaggcatagatttaataaatggttatgaattaaaagatctacctaaagcagattgttatgtaattggaaatgctctatctagaggcaatcctctagtagaagaaatattaagaagaaactataactttatttctggaccagaatggatcttgcaaaatattctaactgagaagaaagtgattgcagtatcgggtactcatggcaagaccactacaacctcgatgatagcttggattctagaagacttaggttttaaaccaggttacttgatagcagggaaaccaaaaaattttgatgcatcatcttctttaggttctggtgatatttttgttatcgaagctgatgaatatgacacagcattttttgataaacgagcaaaatttattcactataggcctgaagttctagtcatcaataatttagagtttgatcatgctgatatctacaaagatcttgaacaaattaaagtccaattccatcatttagttcgtaccatgtcttcagactctaccgttatcaccccaatgaatgaagaagcaatagatgaagtcttatctatgggtttatggagtaatttaatccaatacggatatggcaatgattcaaagtactcctataaaaatctaaatgaagatttttcaaagctacagttttctataaatggaagtgaaggtagtctagagtgggatcaattcggggaatacaatgccatgaatgctatgtcggctgtcatttcgttggaacattttggaattaatattgctgattcaattaatgcattaaagagatttaaaggtgtagctagaagacaggagattctattagatacagaaaatttagtgatcatagatgattttgcacatcacccaactgcaattaaacaaactctagaaggattaagaaatagataccctaacaagaagattatttcattaattgaattaagatcaa

SEQ ID NO: 312866 - DNA, 763 bp, Unknown
  Bacterial polypeptide expressing nucleotide sequence isolated from the Sargasso Sea
ttaggacacagtaaaaaaaatatacaatctgtcactgcagttgtattttcttcagctattaaaaaaaataatcctgaaattaaagctgctgtttcaaaaaaaataccaattctttctagagccgacatgctagcagaattaatgaaaaataaaaaatctatagcaattgctggatcacatgggaaaacgactactacaagtatgataggtaatattttaaaccaaagtaatttagacccaacaattgttaatggtggtattattaattcattatcaaaaaataataaatacggaaaaggtgaatggatggttgttgaagcagatgaaagcgatggatcatttttaaaactccctcatcaaatatcaataattactaatttagatattgaacatttagatttttataaatcaagggataatttgattaaatcttttgaaaactttgtaaatatgcttccattttatggaactgcaatcatttgttttgatgataaaaatcttaaatccataataaaaaaaaataaaacaagaaatattattacttattcaataaaaaataaaaaagccgatgtatttatttatgatattataaaaaagaccacaaaaacctcatttaaattaaatataaataataataaaattactcataacaataattataaatttatattgactgcaattggaaatcataatgttttaaatgctactgcaagtattattgcttcaaaattagttggggttaacaaatattttaataaataga

SEQ ID NO: 312867 - DNA, 154 bp, Unknown
  Bacterial polypeptide expressing nucleotide sequence isolated from the Sargasso Sea
gttggggttaacaaatattttaataaatagagctctaaataattatattggtgtaaaaagaagattttcatatttaggaaaaaaaaataaagcctttatatatgatgattatgctcaccatccaactgaaatctctgcaacattagatgctgca

SEQ ID NO: 312868 - DNA, 264 bp, Unknown
  Bacterial polypeptide expressing nucleotide sequence isolated from the Sargasso Sea
aatgaacaaaattaaaattaatttaaatcaaaaaatccattttgttggaattggtggaattggcatgagcggtctcgctcaaataatgaaaaatatgggttttaaaattcaagggagtgacatggcaagtagcaaaaatgtagagagatgtagaaaaatcgggattaaagtttttagatcgcacaaaagggaaaatatttataatacctcgatactagtaaaatcatcagctatcaaaagtaacaatccagaaataaaggcagc

SEQ ID NO: 312869 - DNA, 685 bp, Unknown
  Bacterial polypeptide expressing nucleotide sequence isolated from the Sargasso Sea
tcagcgataaaaaaaaataattcagaatacattgaagctagaagaaaaaaacttccaattattacccgaggaagaatgttagctcatattgtttcccttatgaaaaatattgttgtggttggttcacatggcaagaccacaacaacttctttgattacctcaatattgcaaaaaactaaattagatccaacaattattaatggaggggtaataaattctatcaaaaatactgctaaattaggaaagagtgattggacagttttggaagcagatgagtctgatggaagtttccttcatataccccctacttattcaattataacaaatatagacagagagcatatggatttttacaaatctatggatgacttagagaaatattttattgattttataaaaaaagttccttcttttggaaaatcatttatttgtttagatgaccctgtaaataataagataattaaaaaattaaggaatagaaatttttatacctatggacttaatccaaaatcaaatttttttattaagaatatcaatcaaaataaaaattttacagaatttgatatattagtaaatgtcccaaataagaaaaaaataaagatcaaaaaaataagaataccattattgggtattcataatgtaagaaattatgttgcggctactgcagttgcaattactattggta

SEQ ID NO: 312870 - DNA, 145 bp, Unknown
  Bacterial polypeptide expressing nucleotide sequence isolated from the Sargasso Sea
aatgaaaattgaactagctaaaaacgaaattatacattttattggaattggtggaatcggtatgagtggactttctttagttatgaaaggtaagggatttaaggttcaaggaagtgatttaagtttaaataaaaatattgaaaga

SEQ ID NO: 312871 - DNA, 163 bp, Unknown
  Bacterial polypeptide expressing nucleotide sequence isolated from the Sargasso Sea
gatgagtgaacttcccctatccatcggcaccctgcatttcaccggcattggcggcatcggcatgagcggtatcgccgaaatcctgttcgaactcggctatcaggtgcagggaagcgacagctcagaaaacgccaatgtgcgccgccttcgcgagaagggtatc

SEQ ID NO: 312872 - DNA, 907 bp, Unknown
  Bacterial polypeptide expressing nucleotide sequence isolated from the Sargasso Sea
acaacaagctgtataaaagcaggtatcaaagtatatataggtcattcaaaaaaaaatgtaaaaagttctacaattatagttagatcttccgcaataaagaacgacaactcggaaataaaatttgcaagagaaaaaaaaattccaatttattcacgagcagaggtacttgctgatgtagtttctcttaaaaaaaatattattataactggttcacatggaaaaactacaacgacatctttagtatcaaaaattttgtctgatcaaaaacttgatcctacaattattaacggaggagtaataaattcattaaatagtaatgcaaaattaggtaaaggggagtgggctattcttgaagctgacgaatccgatggaagctttttaaaattaccaattaattactcaattgtaacaaatatagattatgagcatattgatttctataaaaattaccaaaatttagaaaaatcttttattaaatttattgaaaaaacacctccgacaggaaaagcaataatttgtattgatagtaaaaaaattaaaaaaatatttagtaaaattaaaaataaaaatatattaacatatggtgaggataaaaaagccaattacaagatttctaacatcagatacaaagtcgattattcaagtttcgatttaatttataaagatttaaaaaaaaattataaaaagattaaaaatattcaattaaaattactaggaaaacataatgtacttaatgcggcagcagcggtgactgtttgtttaaatttaggtgttaatcaaaatataataaaaaaatcattaaaaaaattctctggtgttcaaagaagaatgacaaagatttttacaaaaaataaaaacgatttttatgacgactatgcacatccacccgacagaaataaactcaatt

SEQ ID NO: 312873 - DNA, 926 bp, Unknown
  Bacterial polypeptide expressing nucleotide sequence isolated from the Sargasso Sea
tatgaaacagcacatttactttcttgggataggcggcacgctaatgggtagccttgctcaactggcgaaaagccaaggctaccaggtctccggaagtgacaatcaaatttacccacctatgagcgatttattagctgatgcaaaaattgaagtgttcaatcattttgatcccgcccaactaacaccaacacctgatcaaatcgtcattggcaatgctagccaagcccgcggtaacccagcgatcgaatacatattagatcaaggccttgattatgtatcaggcgcagaatggctgggcagtcaaatcttaagagacaagtgggtaatcgctgtttctggtactcatggaaaaactactacggcgagcatgttggcctggatccttgaaaaagcaggactcgaaccgggctttctgatcggcggctcaccagccaacttcaattgttcggcgcgtcttggaaaatctcctttttttgtcgtggaagctgacgaatacgatactagcttttttgatcgtcgatccaagttcgttcactatcgtcccaaaaccctggtcattaacaatttagagtatgaccatgcggacatcttcccgtccattaaagaaatccagaaccagtttcacttgctaattcgatctataccgagtgacggactcattatcacgccagctgacgaccaaaccattcaagagacattagacatgggttgctggactcctcatcagacaatccaaacaatgtcaggagaaaccgaatcagatcaagtaacaaagtcctgtgactgggcctcccacggagaagccacaaacttccaggtttttgaaaaaggtaaactagcaggccaagtcagatggtctctctttggagagcataatcggtgcaacgggctcagtgcgattgcagctgctagtcacgtcggcgtat

SEQ ID NO: 312874 - DNA, 889 bp, Unknown
  Bacterial polypeptide expressing nucleotide sequence isolated from the Sargasso Sea
cgattagaaaaaaaagttgtatcaggtcccgattggttgtatcaaaatatactgtcaaacaaaaaagtgattgcagtctctggtacgcatggtaaaacaactgtgacttccatgattgcacataccttaattaataataattttgatccaaattatctaatagcaggcattccaaagaaattagaaaaatcgtggaatataagcaatgatgaggtatttgttattgaagcagatgaatacgatacctgctattttgataaacgtccaaaattctttcattatcggcctaatatcctattaataaataatattgagtttgatcatgcggacatttacgaaaacatagaaatgattgaaaaaaacttttttgaactaataaaaacaatgccatcaaagtcaaaagtattaataaatgagaaaaaggtaagtaaatcttttagaaataagttaaataaggaaaaacttaaaacgacattacaattcctttctttgaatacatctaatattcatgaagaaaataagcttttagctgctcatgcaattgaagacttaatctcaaaggaaaaagttttaaatggcttaaaggactacagtggtgtcaaaagaagatttgaaactatttttaataataaaaattttaagttaattgatgatttcgctcatcatcctacagcaatagaagaaactattaaaatgattagagaacaaactgatagtttaacgcttatagttgaactgggatcaaattccatgaaaagaggagtccatgataaaagattagtagatatttttaaaaatcaagaaacatacactattaatgcatctgctgagcaagaaaaaattttttctgtgcatgcaaaagaattaacaaatgatgatatttgttaaa

SEQ ID NO: 312875 - DNA, 856 bp, Unknown
  Bacterial polypeptide expressing nucleotide sequence isolated from the Sargasso Sea
atcaattgttacccaccaatcagtgatcagttggatgaaatgggtattgatgtgattcccaattatgatgtcgatcaacttaaattatctcctgatttgattgtgattggcaatgtcatgacaagagatacggagatcatagagtatattcttaaccatggtttaacatatacttcagggccagaatggttaggtaaaaatattcttgctaatagaagggttatctcagttgctggcacgcatggcaagaccacaacctctagcattattgcatctgcgctaaaagagttgggtgaagatcctggctatctcattggaggtgttccaataaattttgaggcatccgcatcactgggaagctcaccatattttgtgatcgaggcagacgagtatgacaccgctttttttgataaaagatcaaagtttatccactatccagctgaaacatttataatcaataatcttgaatttgatcatgctgatattttcaaagatttagaccaaatcaaatggcattttcaccagttaatcaggtctttgccttcaaagacagaagtgagagtaccgattaatgatgacaatatttcagatttattggatatgggcaattggtcttccactaaatcatttggtatgagcaatgaagctgactattcaatcatttcaaatgatgagaatcttcatataaaagaaggcgatgtattgcatggaaatcttagtcccaaattatttggcaagcacaactttatgaatattatttcagctttctcagcattgcgatcaataggttttgaaggcgataaaatccttgatgcaatcaatcaatttaatggagtaaagagaaagcttcagcaac

SEQ ID NO: 312876 - DNA, 812 bp, Unknown
  Bacterial polypeptide expressing nucleotide sequence isolated from the Sargasso Sea
cttagctgaatttttatgtaaaaattatactattacaggctctgatttaagcaataatgaaatatcaacaaaattgaaaaaaaaggggataaaagtttacgagcaccaattagctgaaaacatcacaaatcaaaatcttgttatttatacatccgcaataaaaaaaaataatccagagttggttgaagcaaaaaaaagaggaattaagtgtattacaagagggaaagctttaggtgaatttacaagaaacgataaaaatatctgcataactggaactcacggaaaaagtactaccacaaattatttagcacaaatattattaaattgtgaaaaaaaaccttcagttttcttaggagctataaatactaaattaaaaacaaactttatttacaatcgtagtagtctcaatgtaattgaagctgatgaaagtgacaacagcttcaattttctaaactcaatgtattcagttatcactaatattgattttgatcatatggacttttataaaacaaaaaagaacctttattttgcatttgaaaatttcataaaaaaaactacaaataaagtaatagtaaatattgactgtccaaatattaaaaaaattattactaaaaatccaaataaaagaattgttagatttagcaatattgacaaaaatattgaattttattttgaaataataaaccgtaaaaaaagtacagaaatcatcttatataagaaaaagaatattcttggtttatttaaatttcaaagaataagtcaatataattgttacaatgttgtcagctctattgttacagctattgaaatgg

SEQ ID NO: 312877 - DNA, 535 bp, Unknown
  Bacterial polypeptide expressing nucleotide sequence isolated from the Sargasso Sea
ataaaaaatgctgcttctgcagtcgctgtttctttttcaattggaatatctgataatttaattaaaaaaggcttgtcagaatatactggcgtacaaagaagatttaattatttgtttgaacacaataggtcaatttttgttgatgattatgctcaccatccaacagaaataagatcagttttagatggagttagaaaagtatataataaaaaagaaattatatgtgtttttcaaccgcatagaatttctagagttaaaaatttaaaactagaattttccaaatgttttaaaaaggcagatacagttttactttgcccaatttataaagccaatgaaaatataaatttaggattttcttataattcttttgcaaaactaattattaaaaactcaaaagtaaaattaattaatattgaaaacgaattaaatttaagaaaatttttaaagcaaacagcatatggtcaaaaaatatatattggtatgggagcaggctcaatatcaaattggatgaaaaatttaaaaaataatatttaat

SEQ ID NO: 312878 - DNA, 382 bp, Unknown
  Bacterial polypeptide expressing nucleotide sequence isolated from the Sargasso Sea
atgaaaattaaaagtaaaattcattttataggtatttcaggaataggaatgtctggaattgcagaattgatgttagataaaggatatttgattcagggtagtgatatatcaattaacgacaacacaaaaagattaaagaaaaaaggtataaaattttttttaggacataataaaaaaaatattaaatatgcccatgctgtcgtttattcatcagctataaaaaaaaataatcctgaaataagagaggcatatattaagaagatccctgttctttctcgagctgatatgctttcagaattaatgaaaaataaaaaatctattgccatagctggatctcatgggaaaactactactactagtttggtaggcaaccatttttaat

SEQ ID NO: 312879 - DNA, 163 bp, Unknown
  Bacterial polypeptide expressing nucleotide sequence isolated from the Sargasso Sea
aatgaaaaaaattaatttaggtcaaaaagatgtaatacattttgttggtattggcgggattggtatgagtggtttagctcaaataatgaaaaatatgggttttaagattcaaggaagtgatcaaacaaaaaataaaaacaccataagttgctccaaagcaggt

SEQ ID NO: 312880 - DNA, 448 bp, Unknown
  Bacterial polypeptide expressing nucleotide sequence isolated from the Sargasso Sea
ggcgtgcaaagaagatttaataaaattttttcttataacaatatagatttttatgatgattatgctcatcacccaacagaaataaaatttgttttggatggagtagataaagtttataagaaatatgaaaaagtatgtattttccaaccccacagagtttcaagattaaaagatttaagaaaagaattttcttttgcttttaaaaaggcaaatactgtcattttatgtccagtttatactgctggggaaaagatgcaattaggttttgactatctaaattttgcaaaagatataattaaaaattcaaaagtgaaactttttttagttaatgataattatcaattagctaaatttttaaaaaataacatgtatggcaataagatagttattggcatgggtgccggaacaatttcaaattggataagaaaactaccagatttaatgtaat

SEQ ID NO: 312881 - DNA, 373 bp, Unknown
  Bacterial polypeptide expressing nucleotide sequence isolated from the Sargasso Sea
cttgataggtatcggtggttcagggatgatgggtatcgctgaattacttcacaatcttggatttaaagttagaggctctgatattcaagagaataacgctatcaagagattgcgagaaatgaaaataaaagtattcattggacatgactctaaaaatatagatcttagagatatcatagtattttcaaacgctatacaaaaaaataatattgagcttaagttctctcgacaaaatagtctcactgttcttagccgtatggagattctcgcagaactcatgagattgaaatatggaatttcgattaccggctctcatggtaaaacgacgactaccagtttactcagccatattatgtacaaaaataaaacttga

SEQ ID NO: 312882 - DNA, 718 bp, Unknown
  Bacterial polypeptide expressing nucleotide sequence isolated from the Sargasso Sea
atgcatattcatatattaggtatttgcggaacgttcatgggcagtcttgctgttcttgcaaaagaatcaggccaccatgtgaccggttcagatatcaattgttacccaccaatcagtgatcagttggatgaaatgggtattgatgtgattccgaattatgatgttgatcaacttaaattatctcctgatctgattgtgattggcaatgtcatgacaagagatacggagatcatagagtatattcttaaccatggcttaacatatacttcaggaccagaatggttaggtaaaaatattcttgctaatagaagtgtcatctcagttgctggcacgcatggcaagaccacaacctctagcattattgcatctgctctaaaagagttgggtgaagatcctggatatctcattggaggtgttccaataaattttgaggcatctgcatcactgggaagttcaccatactttgtgatcgaagctgatgagtatgacaccgcgttttttgataaaagatcaaagttcatccactatccagctgaaacatttgtcataaataatcttgaatttgatcatgctgatattttcaaggatttagaccaaatcaaatggcactttcaccagttaattagatctctgccatcaaagacagaactgcgcgtacctatgaatgatgacaatatttcagatttactgggtatggggaattggtcttccacttaaa

SEQ ID NO: 312883 - DNA, 244 bp, Unknown
  Bacterial polypeptide expressing nucleotide sequence isolated from the Sargasso Sea
aatgaagttatttaagaaaacaaaaaatattcactttgtaggcattggtggtgcaggaatgatcggtattgcaaaagtattattgcaaaaaggatacaagatatctgggtcagatatttctgactcacaagaactaaaaaaacttaggaatgatggagcaaaagtttacataggacattctgaaaaaaatataagtggatctgatttattagttatgtcttctgcaattgataaaaaaaatcct

SEQ ID NO: 312884 - DNA, 808 bp, Unknown
  Bacterial polypeptide expressing nucleotide sequence isolated from the Sargasso Sea
gacccaatgaaaactgttctagaaaaatctaacataaaatatcaagaaggatataatcaaaaaatattaaataaaaaatttgatttaattatagtgggtaacgttatgtcacgaggcatgcctataattgaaaagctaattgaatccaaaattaaatatatttctggaccccaatggttatatgaaaatgtattatacaataaatttgttattgctatatctggaacacatggcaaaacaactacttcttctctagttgcatggatcttaaagtatgcaaagcttaatccaagttatctaattggtggacaacccatgaacttcagttccccggctaaactaacaaattccaagtacttcgtcatagaggctgatgaatatgatacatctttttttgacaagagatccaaatacattcactataaacctaacattctaattattaataatattgaatttgatcatgcagatatatttgaagatataaatgcaatagtcaaaaattttcatcacttgattagaatcattcctaaaaatgggaccatcatatataatcatgatgataaaaatatacaggacttaatagaaaaaggtctgtggtcaaaacaaaaatccttaactatggggaaaagtaaaaataactctatgtggtcacttaagaatgtaggcgataaatatcttctttctaaaggccataaaaaatcaaatattgaaacaagtttacttggtcttcataattataaaaatatctcacaagcaattcttgcggcgctggagataaaactcacaatgtcaaaaaatgtattaa

SEQ ID NO: 312885 - DNA, 598 bp, Unknown
  Bacterial polypeptide expressing nucleotide sequence isolated from the Sargasso Sea
gatatattaaaaaacataaaaagacgggtaatcacatttggtttaaataaaaaaagtgacattacaattagtgaaatcaattacttctttgattatgttgattttaaagtatatataaaagacacaaataaaaaacataaattcaggttatcacttcaggggaaatacaatatttataatgctgttgctgctatagcagttgctatagaggagggaattagtattcagacaatcagggctgcattgaaatctttttctggtgtcgaaaggagactagagagatttaagctaataattaaaaataaacaagttactcacattgatgattatggacatcatcctaaagaaattgagcaagtaatagtttctttaagaaggcattttaagaaaaaaaaagttctcatgatttttcaacctcatagattttcaagaacaaaaatgcttttaaaggattttatttcaacattaagcaaagttgataaggtatttttattgccaatttattctgcaagtgaaaaagaaattaagggagtctcttcaaaaaatatggcgcaaaaattaaatacaataaatggaaaagacttttgcagtctcgtaa

SEQ ID NO: 312886 - DNA, 340 bp, Unknown
  Bacterial polypeptide expressing nucleotide sequence isolated from the Sargasso Sea
atgaaaattgagctagcaaaaaaagaaataattcattttattggaataggtgggataggaatgagtggactttcattaatcatgaaagggaaaggttttaaagttcaagggagtgatatttcaaacaataaaaatatagaaagacttaaaaaagaaaaaatcaaaattttttttggtcactataaaaaaaatttgaagaaagtaacaattgtagtcatttcctctgcaattaaaaaaaataatccagaactaattgaggcaaaaaaaaaaagaattccaataattaaaagaggtaaaatgttagcaagcattgtttctttaatgaaaaatatgtcgtagt

SEQ ID NO: 312887 - DNA, 328 bp, Unknown
  Bacterial polypeptide expressing nucleotide sequence isolated from the Sargasso Sea
atgaaattttttaaaaaagtaaaacatatccattttgtaggaattggtggagcaggaatgataggcattgctaaagtattgctcaaaaagggatacaaaatatcaggttctgacatatcagactctcgtgaattaagaaaattagaaaaacatggtgcaaaggtatttattggtcattcatctaaaaatattaagggtgcagatttgctagttatatcttctgcaattagttccagaaatcctgaattagtccaagctaaaaaagattctattacatcaataccaagggccgaaatgcttggaagtataatgatcggatatgaaagta

SEQ ID NO: 312888 - DNA, 742 bp, Unknown
  Bacterial polypeptide expressing nucleotide sequence isolated from the Sargasso Sea
gaaacaaaacttgatccaacagtaataaacggtggtgtattaaaatctctttcaaattctgcacgtttaggtaaaagtgattggtgtatacttgagtctgatgagtcagatggaagttttttaaatttaccccccacatattcaatagtgactaatatagataatgaacatttagattattataaatcatatagaaatttagaaaatcattttttaaattttattaaaaaaacaccctcttttggtaaatgtttcatatgtttagatgatgagaatataaaaaaaattataactaaattaaaaaataaaaactttttaacatacggaattaataataaatctaattttaaattgatcaatgtttcacaaggagaaaaattttcggtgtttgatttagtagtcaaacttcctaataaaaaaaaaaaaattttaaaaaatatttcgatacctctgatcggaattcataatcttctaaatgctactgcggcaattgcagtatcttactatattggtataccttttttgaaaattcatgatggattaaaaaattacaaaggtgttgaaagaagatttaataaaatattaaaatttagaaattcacaaattttcgatgattatgctcatcatccaacagaaattaaaaaggttttagagggtgtaaaaaaagtatatttaaataaaaaattaatatgtatatttcaacctcacagagtatctagatttaattctctttataaagatt

SEQ ID NO: 312889 - DNA, 351 bp, Unknown
  Bacterial polypeptide expressing nucleotide sequence isolated from the Sargasso Sea
tacaacctcataggtattcgcgtttaaaggatttatttgaagatttttgtacctgttttaatgatgccgatacggtcatcgtcgcagatgtttacccagccggtgaaataccaattaatggaattaaccgcgacaacctgatcaacggtttgagatcacatggacatcgcgacgttcttccattgaaagacggggaatctctctctagcctcattaaagagattgcgaccgatggtgacatcgtaatttgccttggcgctggtaatattacgagctgggccaataatttaccacacgaactttctgctaattcaggggccaataatttaacaaacgaggcaaacccttgaa

SEQ ID NO: 312890 - DNA, 662 bp, Unknown
  Bacterial polypeptide expressing nucleotide sequence isolated from the Sargasso Sea
ttttttaataaaaaatattcgtcaaaataaaaaatttaccaaatttgatttgttggtaaatcttccaaataaaaaaagattcatgctaaaaaagataaaaatacctttattgggtattcataatgtaagaaattcagtggcagctgtagccgtcgctcttacaattggtatttctactttaaatattaaaaaaggattgttaaattttaaaggagttcaaagaagatttaataaaatttttacatataatgaaatagatttttatgatgattacgctcatcatcctacagaaatcaaatttgtgttagatggagttaataaggtttataaagcttatgataaagtttgtgtatttcaaccacatagaatttcaaggttaaaagatttaagaaaagaattttcttttgcttttaaaaaagctgataccgttgttttatgcccagtgtatacagcaggagagaaaatcaaattgggatttaattatcttaattttgcaaaagaaataataaaaaattcaaaagtaaaactgtttttagttcataacaagaatcaattagcaaaatttcttaagaaaaatatgtatggaaaaaaaattgtcattggaatgggtgcaggttctatttcaaattggatgagagaacttccagaattaatgaaatgaa

SEQ ID NO: 312891 - DNA, 187 bp, Unknown
  Bacterial polypeptide expressing nucleotide sequence isolated from the Sargasso Sea
aatacaagaaagactgatttctcttgatgcagttagagcgaatattgaatctagcctcgcattgaaacctcaagcaagtgtggtcgtggtttctgatagagatgccgatgctggattgcttgtcagagtaatcgatcaatccaggcttgccggtgccagcagtgtatctttggcggctcaaaagtag

SEQ ID NO: 312892 - DNA, 824 bp, Unknown
  Bacterial polypeptide expressing nucleotide sequence isolated from the Sargasso Sea
ttataaatctataggaaacttgaaaagtaaatttatagaatttgttaacaaaacaccatcttatggaaaatgttttatttgtagtgatgacaaaataaataaatcaattataaaaaaaattgaaaataaaaatttttttacttatggtattgaaaaaaaatcaaatttttcgattaaaaatatttctcaaacaaaaaatttctctaaattcgatgtccaaatttcacttcctaataaaaaaacaaaatatattaaaaatatagttattccaatgattggaatacataacataaggaattctactgctgcacttgcggtttcatacataataggtgtaacagataatataatacttaaaggcctcaaaacttttaatggagttcaaagaagatttaactatttgtttaaacttcaggggacagattttgtcgatgactatgctcaccatcctactgagatatcatcagtattagaaggtgttaaaaaagtatataaagaagagaaaatctattgcattttccaaccacatagaatttcaagattaaagtcattaaaagatgaattttcaaaatctttttcaaatgctgactatctaatattatgcccaatatataaagcaggcgaaaatattaaattaaattttaagtatgaacaatttgcaaaacaaataatcaaaaattctaaagttaaattaataatgataaataatgaaaacgaattaaaaaaatatgtaacgcaaaatatttacggaaaaaacattgttataggcatgggcgctggctcaatatctcaatggatgcgtaatttgccaaataaattgtgat

SEQ ID NO: 312893 - DNA, 334 bp, Unknown
  Bacterial polypeptide expressing nucleotide sequence isolated from the Sargasso Sea
agctaagagtcttaaaaataaagtaatagttgtttttcagccacacagatacactagaactaaaatactaattaaagaatttataaatgttttatctaaagttgattatttatttttattagaaacctattcagctggagagaagattatcaagggtgcaacttcaaaagatatattctctaaaatattaaaaaaaaataaaaatactacatatttaaagaatataggtgatttaaataaattaatgaaaactcatactatgaaccaaaatactattgtttttatgggtgcgggttcaatatcaagtattgcaaaaaaatatttgaataactaa

SEQ ID NO: 312894 - DNA, 198 bp, Unknown
  Bacterial polypeptide expressing nucleotide sequence isolated from the Sargasso Sea
aatgaaaattaatttaggaaaaaccgaactcattcatttcgtaggaataggaggcattggaatgagtggcttagctttgataatgaatgaactagggtttaaaattcaaggaagtgatatttcaaataataaaaatattgaacgtttaaaaaaaaaaaaaattccaatttttttaagtcataataaaaaaaatgtaaa

SEQ ID NO: 312895 - DNA, 730 bp, Unknown
  Bacterial polypeptide expressing nucleotide sequence isolated from the Sargasso Sea
tttgctttcagactctcctctcaaaatttacttttccgggatctgcgggacggccactgcctccctggccatcctcatgaaaaatcgtggtcatgaggttcaaggttctgatgaaaacatttatccgccgatgagcgatcttcttgaacaaaatcagattagagtcgattccggcttccatcaatccaacctggagcctaaacccgatctggtcgtcatcgggaatgctctttcaagagggaatcctgaagtagaagccgtactttcccgtaaaatcccttacatttctgtttcagaactgcttaaaaatcatttcatccaaaattgctgttccttggttgtcagcggcacccacggaaaaacgaccacatcatccctgcttgcatgggtttttgaatgtgctggccttaacccaggattcatgatcgggggggttgctgagaattttggatcaggatgccgggatggagagggaaattacttcatcacagagggggatgaatatgatactgcattttttgacaaacgctcgaaattcctgcattacctccctgatcaattgatcatcaataatattgaatttgatcatgcggatatttttgaatcgcttgagagcatcgaatattctttccgcatgcttctcaggctggtaccggaaaatggggtaattgtggccaatggagatgaaccgacagtcatgcgtgtccttcaaaacgcctactctccagtc

SEQ ID NO: 312896 - DNA, 199 bp, Unknown
  Bacterial polypeptide expressing nucleotide sequence isolated from the Sargasso Sea
aatgaaaattaaattagcaaaatcagaactaattcatttcgttggaataggtggaataggcatgagtggcttagcactgattatgaaaggcaaaggctttaaagttcaaggaagcgatattgcaagtaataaaaatattgaaagattaaaaaaagaaaaaataaaagttttcattggacataaaaaacaaaatatagat

SEQ ID NO: 312897 - DNA, 759 bp, Unknown
  Bacterial polypeptide expressing nucleotide sequence isolated from the Sargasso Sea
gtaaatcaatcatatgtatagatgataaaaatataaaaaaaatatttagtaaattgaaaaacaggaatgtacttacctatggcgagagtagtaaggctgattacaaagtttttaatgtccgttttaaaactgattattcaatatttgatttaatcttcaaggatttaaagaaaaaaaatagaacaattaaaaatattcatttgaaacttcttggcaaacataatgttctaaatgctgcagcggctgtgacagtttgtttaaatcttggagtaaatcaaaatataataaaaaaatcattgaagaaatttacaggagtgcaaagaagaatgacaaaggtatttacaaaaaatcaaaacgatttttacgacgattatgcgcatcatccaactgaaattaaatcgattttagagagtgtaaaaaatgctcataaagaaagaaaaataatctctatttttgagccacataggtattctagggtcttatctcttaaagacaaattttcgaaatcttttttgaacagtgatcttgttctactttgtccattatatgcagccggtgaaaaaaaaagccacaaatttgataaaataaatttcgcaaaacacatatctaaatattctaaaactcaagtaattattataaataatttcgatgaacttggaaattttttaaagagctttttaaatagtaacgaaataattataggcatgggagccggatcaatatcaaaatggatgtcagaacttaaattggtagtatgag

SEQ ID NO: 312898 - DNA, 538 bp, Unknown
  Bacterial polypeptide expressing nucleotide sequence isolated from the Sargasso Sea
ccattattgggaaatcataacattaaaaattctgtagctgcggtagcattagcgttaacagtagggttaccaattaacaatataaaaaaaggacttaaaaattttaaaggagttcaaagaagatttaataaaattttcaattttaataatgtagatttttatgatgattatgctcaccatcctacagaaattagagaagtattagatggtgtgaagaatgtttataaagagtatgaaaaaatatgtatttttcaaccacatagaatatcaagattaaaagatttaaaaaaagaatttacctttgcttttaaaaatgcagataaagtaattttgtttcctgtttatactgcaggagaaaaattaaggcttggatttagttacataaattttgcgaaagaaataattaaaaattcaaaagttcaattatttttagtagatgataaattccaattagcaaaatttattaaggcaaatatatatggaaaaaaaattgttataggaatgaaagctgggactatatcgggttggatgagagaat

SEQ ID NO: 312899 - DNA, 688 bp, Unknown
  Bacterial polypeptide expressing nucleotide sequence isolated from the Sargasso Sea
tatgaaaattaatataggtcaaaaagaaattatacactttatcggaatgggcggaataggtatgagcggtcttgcccaaattatgaaaataatgggttttaaagttcagggaagtgatatcagtatgaataaaaatattgagaattgcaaaaaattaggaattaagttctttctaggccagaagaaaaaaaatattaaaaaagcaactattctcgtaaagtcatctgcaattaaaagtaataaccaagaagttaaagaagcaaaaaaaagaaaactacctatttatgagagggtagaagtactagctaacattgtttcattaaaaaaaaatataattatttctggttcacatggaaaaacaacaactacatcattagtttcaaaaatactattagagtctagattggacccaacgataataaatggtggtgtaataaactctatcaaaaacaatgcaaagcatggaaagggagaatgggccgttctagaggcagacgagtctgacggaagttttttaaaacttcctattaattattcaatagttacaaatattgataacgagcatatagattattacaaaaattataaaaatttagagaatagttttttacagtttataaacaaaactccaccaattggtaaatgcataatatgtatagatgataaaaatatcaaaaaactcaaaaaa

SEQ ID NO: 312900 - DNA, 884 bp, Unknown
  Bacterial polypeptide expressing nucleotide sequence isolated from the Sargasso Sea
catgatgcctgataaaacttattttatttataatggatttgataagactattgttgaagccgatgaatttgacaggtcatttctgaatcttcagccttattcaggctgtattacatcaattgacgcagatcatttagatatatataaaaatcataattcacttaaaaaagcatttatagatttttctaaaaaaataaaaaataagttgataattcatcattcaattccattagatgggattacttatggaataaatgtaaaagctgattatgtttttaataatcttgtacaatcaaaaaatggttattatgttgatctaattactcctggacaaaagattttaaatgtcttttgtagagtattaggaaagtataacttagaaaatatgttagcagctattgctcttgctgatcaatcaggtcaaaatattaacgaaatcatatcttctcttaaatcttttcaaggcatttatagaaggatgtcaatttatgaaataaaaaataaaatattaattgatgattatgctcaccatcctactgaaatttcatctgttcatgaagcattaagagaaaaatatccagattcatttattgaagtagtttttcaaccacatttgttttctaggacaagagattttattgatgactttgcatttcagctatcaaaatttgatagaattaaattgatgaaaatctatccagctagagaaaatccaattaaaggaataaatagtaaaaatcttcttaaaaaaattacttcaaatgcatcatttttaaatgataaatattttaataaaaacttagatgaaaataacgcaaatgtaattgctgttttgggcgctggaagtataggagagttttttaataactatataaaattaaaat

SEQ ID NO: 312901 - DNA, 136 bp, Unknown
  Bacterial polypeptide expressing nucleotide sequence isolated from the Sargasso Sea
tatgagtaaaatcgaaattggattaaaagaaaaaattcattttattggtattggtggaatcggtatgagcggattagcccaggtaatgaaaactatgggttttatggttcaaggaagtgatttatcaagtagcaaa

SEQ ID NO: 312902 - DNA, 893 bp, Unknown
  Bacterial polypeptide expressing nucleotide sequence isolated from the Sargasso Sea
tcttcacaagaaaggatataacatttcgggttcagatatcttcaaaacaaaagatctggatgagttagcaaagtcaggcgttgacgtaacttactcgcacaaaagcaagaatataaacaataaagacttaattgttttatcctccgcaattgattcttcaaatgtagaagtatcctgtgcaaaaaagaaaaatataccaattattcctagggctgaaatgctaagtggtatttccagaggataccaaggaatagcagttgctggcagccatggaaaaacaaccacaacaagcttaattgctcatatctttaatcaagctttattaagtccaacttatgtaattggaggaaaaatacttagttcagacgggaactcacgtcttggtgacgggaattttttcatatttgaagcagacgaaagtgataaatcttttttaagtttttatcctgattccgctgttataacaaatatagatgatgatcatcttgaggcttatgaggacaatattaacaacttgaaaaaatcttttttagatttttcagataatattcctttttttggatatgtcattgctaattatgatgataaaaatactagggatatattaaaaaacataaaaagacgggtaatcacatttggtttaaataaaaaaagtgacattacaattagtgaaatcaattacttctttgattatgttgattttaaaatatatataaaagacacaaataaaaaacataaattcaggttatcacttcaggggaaatacaatatttataatgctgttgctgctatagcagttgctatagaggagggaattagtattcagacaatcagggctgcattgaaatctttttctggtgtcgaaaggagactagagagatttaagctaataa

SEQ ID NO: 312903 - DNA, 611 bp, Unknown
  Bacterial polypeptide expressing nucleotide sequence isolated from the Sargasso Sea
catggcggcggcgggcgcgagcgtcgtcgtcgtctcgagcgcgcgcgcgagcgcgcgaggggggggagaaggggacgacgcgcgacggggatcgaaggcgtgggtgacgtcgttggcgggggcgatcgcgggggcgagcgcgcgcgtgtgcgtggcgccgttggatgtggtgaagattcggctgcaggtgcagctcgaggcgggcgcggcgggcaagtacagagggttgacgcacgcggtgagcacaatcttgcgagaggaaggggtgcgcgcgatgtgggcgggaacgacacccgcgttgcttctgtgggtgccgtacacggcgattcagtttacggtgttgaacgcgttcaaggacgcggcggacgagtgggaacgcgcgcggcccggatcgacgcgcggcgtgccgatgaatttcatcggtggcgccgtcgccgggtcggcggcaacggtggtgacgtacccgttcgacgtcatacgaacgttgctcgcgagtcagggccacccaaaggtgtacaagggcattctcgacgccgccgcgggcgtcgcgcgcgaacgaggcgtcgcgcgcggcttgtacgcgggcatctcggtgacgctcgccgagatcg

SEQ ID NO: 312904 - DNA, 578 bp, Unknown
  Bacterial polypeptide expressing nucleotide sequence isolated from the Sargasso Sea
tatgaagatacatatcttaggtatttgtggtacttttatgggaggccttgctcaaatactccaggagtctggacatgaagtatctggtacagatcttcaattttatccaccgatgtcagatcaattaaattctatgggaattactttaatttctggatatgaatcttcaaatcttcctaaagcagatttgtatgtgataggaaatgcactttcaagaggaaacaaatcagtagaatatattttaaatgagaagctgccttttaaatctggcccagaaatcttaggagaaattttaaaagaaaaaaatgttatcgcagtttctggaacacatggcaaaacaaccactgcatatatgatagctcatattttaaaacaaaataagaaggatattggttacctagttggaggcatttcaccaaattttaaggattctgcatcattaggttcagacaatatttttgttatagaggccgatgaatatgattcagctttttttgataaaagatctaaatttattcattattctccaaatactttattaataaataatatcgaatttgatcatgctgatattttta

SEQ ID NO: 312905 - DNA, 952 bp, Unknown
  Bacterial polypeptide expressing nucleotide sequence isolated from the Sargasso Sea
atttcaagtatttttactgaagctaaattagatcctacaattataaatggaggaatactcaatctttttggcaattctgcgaaattaggaaaaagcaattggtgtattatagagtcggacgagtcagatggaagtttcttgaagattccatttacttattcaatagtaacaaatattgatgccgaacatctggattattataaatctttaaacaaaataaaagagagtttttctcaatttcttgaaaaaatcccttctgtggggaaaggatttttgtgtattgatgataaaaatataaaagaaattttaaagaaaaccaaaaataaaaatttttatacatacggaataaaaaatcattcaaattttcaaatattaaatatttctcaaaaagcaaatttttcaagatttgatataaaaatcaatatcccaggtaaaaaaaaattaataaaaaacattaagataccattgatagggttacacaatattaaaaatgttacttcagtttttgcagttgctttttctattgggatatcagaaaaaattattaaaaaaggacttcttggatttaaaggagtgcaaagaagatttagttttttgtttaagcatagagatgcaatttttatagatgactatgcgcaccatcctactgaaataagttcagttctagatggagtgaaggaagtatacggaaaaaaagagattatttgtgtttttcagcctcatagaatttcaagagttaaaaaccttaaaatagaattttctaaatgtttcaaaaaagcagatacggtattgttatgtccgatctataaggcaaatgaaaatttaaaattaggattttcgtattcttcatttgctagacttataattaaaaattctaaagttaaactaataaatgtaaacaatgatatagaattaaaaaaatttcttaaacaaacagcatatgggaaaaaat

SEQ ID NO: 312906 - DNA, 241 bp, Unknown
  Bacterial polypeptide expressing nucleotide sequence isolated from the Sargasso Sea
atgcaaaaaattaatttaggacaaaaagaagtaatccattttgtcggtataggtggaatcggaatgagtggattagctcaaattatgaaaaatatgggttttaaagttcagggaagtgatcaaaataaaaataaaaatacaatcacctgcataaaagctggaataaaagtttttattggtcactcaaaaaaaaatgttagaagctccacaatattagttagatcatcagcaattaaaaata

SEQ ID NO: 312907 - DNA, 865 bp, Unknown
  Bacterial polypeptide expressing nucleotide sequence isolated from the Sargasso Sea
gaaaggtaaaggttttagagttcaaggtagtgatatttctattaacaaaaatatagaacgaattaaaaaagaaaaaataaaagttttaattggacataaaaaacaaaacataaataaagcaacaatactagttgtatcttcagcaataaaaaaaaataatccagaaatgttagaggcgataaaaaaacaattacctatatataaaagaggagagatgttagcaaatattgtatctttgacaaaaaacattgttgtagtggggtctcatggtaaaactactactacatctctaataacttctatttttcaagaaaccaaaatagatcctactatcattaatggaggagtaataaactctataaataattctgctaaacttggtaaaagtgaatggtcaatattagaagctgatgaatcagacggtagttttgttcatactcctcctacgtacgcaatcataacaaatattgatagagaacatatggactattatggttctatggataaattaaataagtattttgtaaattttgttaaaaaagttccatcatttggaaaatcatttatatgtctggataataaaaataacaaagttctaataaaaaaattaaaaaataaaaatttttatacttatggagtagatgacaaatctaatttttgcattaaaaatataaaacaatttaaagaatattctaaatatgatttaaaaattaaattaccgaataagaaaattaaaacatttaaacaaataaaaattccactattaggtttacataatattaaaaattcagcagctgcatcagccttagcacttactgttggtttaagtatttcaaatataaaaaaaggacttagaaatttttaa

SEQ ID NO: 312908 - DNA, 343 bp, Unknown
  Bacterial polypeptide expressing nucleotide sequence isolated from the Sargasso Sea
ggttggaaaaggaggattgttgttgcttttcagcctcatttgtatagtaggacattgcaatttcacaaagagtttgcaaaatctttacaaattgctgatgttataataataactgatatttatccagcaagggaggaaccaattattggagtatctgcgagaatgatttataatcatttagataaagataagaaagggaattgttattttattcctgatcttaatcatctagaaaaagagttggacaatatacttcaacccaatgatttatttttaacgataggtgcaggcacaatttggcgttacaatgaatcctacactagacatttaagtcaaatttaga

SEQ ID NO: 312909 - DNA, 623 bp, Unknown
  Bacterial polypeptide expressing nucleotide sequence isolated from the Sargasso Sea
aatgggagtatccattgtttgtggtgatgacactgtcgtgaaagagttgaagatcaacttccaaagacctcatataagttatggttttgagccttcgaatgattatgttctgtcaagttacagtacagatggaaggaactcttattttaaattaacttcgaataccgattcatttgactttaagcttaatatgcttggaaagcataacgttcttaatgcagctgcagcgattgtactatgtttacaagaagggatagcagttaaagtcattcaggattctctgtccaactttatgggcatagataggcgaatgcaaattttaggtgagaggaaaattggaagtactacctgtctctacatcgatgattatggacatcatccaactgaaattaaaaaaaccattgaggcaataagaacttcttttcctgactttgagctgaaaatggtttttcaaccccatagatttacaagaacaaaagatttatatgaagaatttattgaagttttaagacatgtggacgagttatttcttttagatatatattctgctggggaaaatccaatagaaggcgtcaatagttccaatatacaaagttctttgattagatcaggttttgataatg

SEQ ID NO: 312910 - DNA, 649 bp, Unknown
  Bacterial polypeptide expressing nucleotide sequence isolated from the Sargasso Sea
ggcgtcgtaccaagtttcggcagcaacgcccgcaatggcgccagtgatctgctcgttgcagaagctgatgaatcagacggctccttggtgcgcttccgtcccagcgttggcctgctcaccaacctcgagctggatcacaccgatcactaccccaacctggaggcactgattgcaaccatgcagcgcttcgcaggcaactgctcaagcctgctggccaaccatgacgatccaatcctccaagagcacttcaggcccgatcactggtggagcacccagccaggcagcgcggcagatttccgcgctgagcccatccacctggccggtgatggcagccgagctgactacatcgagcagggacaacatctgggtgaggttcatctcccgctggcgggacatcacaacctcagcaatgctctagccgcgatggccgcctgccggctggtcggcgccgcgttcgagccgctgcagcgggccctgcgtcagctgcagccccccggacgtcgctttgatctgcgcggtgaaattgccggtcgtctgatcgtcgatgactacgcccaccatcccagtgaggtggaagcgaccttgacgatggcccagctgatggtgagcagcggccgcagcaccctgccttgggtgccccagcgggtgg

SEQ ID NO: 312911 - DNA, 283 bp, Unknown
  Bacterial polypeptide expressing nucleotide sequence isolated from the Sargasso Sea
atgactaaaattgatatcgggaagaaagaaaaaatccattttgtaggtatcggtggtattggaatgagcggtcttgctcaaataatgaaagtgatgggctttaacattcaaggcagtgatttgagcaaaaacaagaacattgaaaattgtaggaaaagtggaataaagatttttattggacattcaaaaaaaaatatatccaaagcaactattgtcgttaaatcaactgcaatcacaaaatacaatattgaattagttgaagctagaaaaaagaaaataccaa

SEQ ID NO: 312912 - DNA, 871 bp, Unknown
  Bacterial polypeptide expressing nucleotide sequence isolated from the Sargasso Sea
ggcagtcttgctgttcttgcaaaagaatcaggccaccatgtgaccggttcagacatcaattgttacccaccaatcagtgatcagttggatgaaatgggcattgatgtgattcccaattatgatgtcgatcaacttaaattatcccctgatcttattgtgattggcaatgtcatgacaagagatacggagatcatagagtatattcttaaccatggcttaacatatacttcaggaccagaatggttaggtaaaaatattcttgctaatagaagggttatctctgttgctggcacgcatggcaagaccacaacctctagcattattgcatctgccctaaaagagttgggtgaagatcctggctatctcattggaggtgttccaataaattttgaggcatcagcatcactgggaagctcgccatattttgtgatcgaggcagatgagtatgacaccgctttttttgataaaagatcaaagtttattcactatccagctgaaacatttgtaatcaataatcttgaatttgatcatgctgacattttcaaagatttagaccaaatcaaatggcactttcaccagttaatcaggtctttgccttcaaagacagaagtcagagtacctattaatgatgacaatatttcagatttattggatatgggtaattggtcttccaccaaatcatttggtatgagcgatgaagctgactattcaatcatttcaaatgaagagaatcttcatataaaagaaggcgatgtattgcatggaaatcttagtcccaaattatttggcaagcacaacttaatgaatattatttcagctttctcagcattgcgatcaataggttttaagggcgataaaatccttgatgcaa

SEQ ID NO: 312913 - DNA, 172 bp, Unknown
  Bacterial polypeptide expressing nucleotide sequence isolated from the Sargasso Sea
atgaaaattaatatagcaagcaatgaagtaattcattttataggtattggtggcataggcatgagtggtttagctcagataatgaataatatgggttttactatccagggcagcgatttaagtcgaaataaaaataccgacagattaactaagtcaggagtcaaagtttaca

SEQ ID NO: 312914 - DNA, 328 bp, Unknown
  Bacterial polypeptide expressing nucleotide sequence isolated from the Sargasso Sea
gcatcaggtcatgaggtttcaggttcagataatcaattttttccccctatgtctgactatattaggaatataggccttataactttcgaagggtactcaaaaaaagcccttccaaaagcagatttgtatgttattggtaatgctctttcaagaggtaatgaaagcgtcgaggagatattagaaaagaagttgccttttgtgtctggcccggagatgcttggaagagaactaaagagtagagatgtttttgccgtttctggaactcatggcaaaacaacaacttcatacatgcttgctcacatttttagagatcaaggaaaggatgtgg

SEQ ID NO: 312915 - DNA, 839 bp, Unknown
  Bacterial polypeptide expressing nucleotide sequence isolated from the Sargasso Sea
atatactggtcaaacaaaaaagtgattgcagtctctggtacacatggtaaaacctttgtgacttccatgattgcacatactctaattaacaataattttgatccaaattatctaatagcaggcattccgaagaaattagaaaaatcgtggaatataagcaatgatgaggtatttgttattgaagcagatgaatacgatacctgctattttgataaacgtccaaaattctttcattatcggcctaatatcctattaataaataatattgagtttgatcatgcggacatttacgaaaacatagaaatgattgaaaaaaacttttttgaactaataaaaacaatgccatcaaagtcaaaagtattaataaatgagaaaaaggtaagtaaatcttttagaaataagttgaaaaaagaaaaacttaaaacgacattacaattcctttctttgaatacatctaatattcatgaagaaaataagcttttagctgctcatgcaattgaagacttaatctcaaaggaaaaagttttaaatggtttaaaggactacattggtgtcaaaagaagatttgaaactatttttaataataaaaattttaagttaattgatgatttcgctcatcatcctacagcaatagaagaaactattaaaatgatcagagaacaaactgataatttaacgcttatagttgaactgggatcaaattccatgaaaagaggagtacatgataaaagattagtagatatttttaaaaatcaagaaacatacactattaatgcttctgctgagcaagaaaaaattttttctgtgcatgcaaaagaattaacaaatgatgatattgt

SEQ ID NO: 312916 - DNA, 320 bp, Unknown
  Bacterial polypeptide expressing nucleotide sequence isolated from the Sargasso Sea
tcatcagcctcacaggtatacccgtcttaacgctctattcaaagatttttgttcctgttttaacaacgccgacattgttgcaattggggatgtttattccgctggagaaaagaaaattccaggagcaagtagagatgatctaataactggcttggttagtcacggtcatcgtcatgctgttgcggtttctaatttacaagacttgacacaactgatcgcaaaaaatgctaaatctggcgatattgtgatatgtctcggggctggaactataagttcctgggctaatagccttccaaaattattactttccgagtgttaat

SEQ ID NO: 312917 - DNA, 814 bp, Unknown
  Bacterial polypeptide expressing nucleotide sequence isolated from the Sargasso Sea
gtccggtcataaggttagtggatcagataacaatttttatcctccaatgtcagatcaactaagagaattagatattgaattaacaaaagggtttgagccatcctcaatgcctgaagctgatctatatgtaattggaaatgcactttctaggggaaataaatgcgtggaggaaattttaaataaaaacttcccctataaatctggacccgagatgcttggcgacattatcaaagatagatttgttatagctgtctcagggactcacggaaaaacgacaacatcctttatgattgcaaaaatatttcagtctttgggtatggatataggttatctcataggaggtatatcacctgatttttcattctctgcaaaaataggtagtgatgaaatcttcgtgattgaggcagatgaatatgattctgcattttttgataaaagatcaaaatttatacattactctccaaatattcttttgataaataatattgagtttgatcacgcagacatatttaatgatttagatgagataaaaaaacaattccatcacctgttaaagattattccgagcagcggaaaaattattttatttaaccatgataaaaatgcattagatgttatcaataatggatgctgggcagatattatcgaaattaatggtgatgctagcagggctagctttgattcatcttcttcaaagattaaatttgatgaaaattcagtctatataaatgatttacctttttatggctctcataacaacctaaatgcagctgcagcaatcatttctgctgcatcttatggaataaaatcttaa

SEQ ID NO: 312918 - DNA, 346 bp, Unknown
  Bacterial polypeptide expressing nucleotide sequence isolated from the Sargasso Sea
actttagatacaattgataaaatatatccgcgtaaaaaaataataatgatcttccaaccccaccgatactcgaggacaaaagcctattggagattatttaaagatgtatttaaaaaacttgatcaaattattttactgccaacttactcagctggtgaaaaaaacaattcgtatgattcattattcttgtatgggaaaattataaataaaaataaatcattactccattctcttaatgatgtcagtgttgctctgaataatattaatttgggtaattccatacttgttctgcagggagctggtgatataaaaaatataataaatcttattaagagaaaaaaatgat

SEQ ID NO: 312919 - DNA, 184 bp, Unknown
  Bacterial polypeptide expressing nucleotide sequence isolated from the Sargasso Sea
aatgaaaaaaattaacctaggtcaaaaagatgttattcattttgtcggtattgggggaataggaatgagtggcttagcccaaattatgaaaaatatggggtttagaattcaaggaagcgatcaaagtaaaaataaaaacacagtcaattgttcaaaattaggaattaaagtatttatcggtcat

SEQ ID NO: 312920 - DNA, 466 bp, Unknown
  Bacterial polypeptide expressing nucleotide sequence isolated from the Sargasso Sea
tatgaaaattcatatcctaggaatctgcggaacatttatgggaggattggctcgaattttaattgagtccggtcataaggttactggatcagataacaatttttatcctccaatgtcagatcaactaagagaattagatgttgaattaataaaaggatttgagccatcctcaatgcctgaagctgatctatacgtaattggaaatgcactttctagaggaaataaatgcgtggaagaaattttaaataaaaacctcccctataaatctggacccgagatgcttggtgacattatcaaagatagatttgtgatagctgtctccgggactcacggaaaaacgacaacatccttcatgattgcaaagatatttcagtctttgggtaaagatataggttatctcataggaggcatatcacctgatttctcattctctgcaaaaataggtagtgatgaaatcttcataatt

SEQ ID NO: 312921 - DNA, 725 bp, Unknown
  Bacterial polypeptide expressing nucleotide sequence isolated from the Sargasso Sea
ccttcttttggaaagtcatttgtgtgtattgacgataaaataaaccatagtctcataaaaaggttaaagtctaataatttttatacttatggaacaaatccgaaatctaatttctttataaaaaaaataaatcaaaatattaaatacactgaatttgatttaagcactaatgttcctaataaaaaaaaattattaattaaaaatattaagattcctctattaggaattcataatgttagaaatgctgtagccgctacagctgttgctttgacgattggcatatctgttaaagatattaaaaaaggattactaaactttaaaggtgttgaaagacgatttagcaaaatatttagatataataatatcgatttttatgacgattatgctcatcatccaacagaaatcaaaatggtgctggatggagtaaataaagtttatccaaattttgaaaaagtttgcatttttcaacctcatagaatttcaagattaaaagatcttaaaaaagaattttcttttgcttttagaaatgctgacacggttattctgtgtccaatttttacggcaggtgaaaaaataaagttgggatttaaatattcaagttttgctaaagaaattataaaaaattcaaaggtaaaattgtttttagtaaacgatttaaaacaattagcgatttttttaaaaagaaatatgtatggaaaaaaaattgtgattgggatgggcgcagg

SEQ ID NO: 312922 - DNA, 421 bp, Unknown
  Bacterial polypeptide expressing nucleotide sequence isolated from the Sargasso Sea
ttttacatttaataatatagatttctatgatgactatgcacatcatccgactgaaatagaatttgttttagatggcgttgataaagtttataaaaattatgaaaaaatttgtgtttttcagcctcatagaatttcaagattaaaagatctaagaaaagagttttcttttgcgtttaaaaaagctgatatggttattttgtgtccgatttatactgctggggaaaaaattaagctgggcttcagttatttaaagtttgcaaaagagattataaaaaattctaaagtaaaacttttttttgtaaaaaacaacgatcatctagcaaaatttcttaaaagaaatatgtatggaaagaaaattgtgattggaatgggtgctggaacaatatctagctggatgagaaaaattccagaattaatgtga

SEQ ID NO: 312923 - DNA, 599 bp, Unknown
  Bacterial polypeptide expressing nucleotide sequence isolated from the Sargasso Sea
tatgaaaattcatatcctaggaatctgcggaacatttatgggaggattggctcgaattttaattgagtccggtcataaggttagtggatcagataataatttttatcctccaatgtcagatcaactaagagaattagatgttgaattaagaaaaggatttgagccatcatcaatgcctgaagctgatctatatgtaattggaaatgcactttcacggggaaataaatgcgtggaagaaattttaaacaaaaacctcccttataaatctggacctgagatacttggtgaaattatcaaagatagatttgtgatagctgtttcagggactcacggaaaaacgacaacatccttcatgattgcaaaaatatttcagtctttgggtatggatataggttatctcataggaggaatatctcctgatttcacattctctgcaaaaataggtagtgatgaagtcttcgtaattgaggcagatgagtatgattctgcattttttgacaagagatcaaagtttatacattactctccaaatattcttttgataaataatattgagttcgatcacgcagatatatttaatgatttagatgagataaaaa

SEQ ID NO: 312924 - DNA, 808 bp, Unknown
  Bacterial polypeptide expressing nucleotide sequence isolated from the Sargasso Sea
ggtattggtatgagtggtttagctttaataatgaaaggcaaaggttttagggtccaaggtagtgatatctctattaataaaaatattgaaaggctcaaaaaagaaaaaataaaagttttaatagggcataaaaaacaaaatataaataaggcaacaatattagttatatcttcagctataaaaaaaaataatccggaaatgttagaggcaattaagaaacagttgcctatttataaaagaggcgaaatgttagcaaatactgtgtctttaacaaaaaatattgttgttgtgggctctcatggaaagactactaccacatctctaattgcttctatttttcaagaaaccaaaatagatccaactattattaatggaggtgtaattaactctataaataattctgcaaaacttggcaaaagtgaatggtcaatattagaagccgatgagtcagacggtagctttgttcatacccctccaacttacgcaatcataacaaatattgatagagaacacatggactattatggttcaatggataaattaaataaatattttgtaaattttgttaacaaagttccatcctttggaaaatcatttatttgtttagataacaaaaataatagaaatttattaaaaaaattaaaaaataaaaatttttatacttatggtatagatgacaaatctaactatagcgttaaaaatattaagcaatttagagaatactcggagtatgatttaaaaattagattgcctaacaagaaaatagtaataataaaaaaaataaagattccattattaggcttacata

SEQ ID NO: 312925 - DNA, 712 bp, Unknown
  Bacterial polypeptide expressing nucleotide sequence isolated from the Sargasso Sea
aatgccaaaaatcaagaagcccattataacatatggagagtctaaaaaagcagattatcgtgctaaaaatattaactattccaagaataaatctaaatatgatctcttttataaaaataaaaatattggtgagattagaattaatgttccaggcaaacacaatgttttgaattctttggctgcaatagctttgggaatggagattaatgtgccaattaataatttaaaaagaggcattaatagctataaaggtgttcgaagaaggtttgaaatcaagaaaaacaaaactgatattatccttgtagatgattatgctcaccatcctactgaagtaaatgctactattagagctgcaaaaaatggatggaataaaagaatcatatctgtttttcagccacacctttttagtagaacaagagatttttttaaagaattcgcattagcacttttagagtcagatgaaataattatcacggaaatatatgctgccagagaggaaccaattgatgatattaaatcaaaattgattcttgatgagctaattcttttaggacataacaatacacatcatctccaaagcttagataatttaaatagcctattaacagaaattgtaaaacctggagatatggttattacaatgggtgcgggaaatatatggcgttacagtgataaatataatcaatacctgaatgataatcatgatggatag

SEQ ID NO: 312926 - DNA, 292 bp, Unknown
  Bacterial polypeptide expressing nucleotide sequence isolated from the Sargasso Sea
atgaaaattaaattagcaaaatccgaggttatacattttgttggtatcggaggtattggaatgagtgggctcgctctagtaatgagtcgaatgggatttgaggttcaaggcagtgatataaatattaataaaaatattgaaagattaaaaaataataaaattaaaatttttattggccatgaaaaaataaatatctctcgcgcgactataattgtaatctcatctgcagtaaaaaaaaataatatcgaagttatttctgctaaagctaggagcctaccagtctataaaagag

SEQ ID NO: 312927 - DNA, 199 bp, Unknown
  Bacterial polypeptide expressing nucleotide sequence isolated from the Sargasso Sea
atgaaaattaaattagcaaaatctgaactaatacattttgttgggataggtggaataggtatgagtggcttatcacttatcatgaaaggaaaaggttttaatgttcaaggaagtgatatttcgaataacaaaaatattgagagattaaaaaaagaaaaaataaaaatttttattgggcataagaagcaaaatatagata

SEQ ID NO: 312928 - DNA, 322 bp, Unknown
  Bacterial polypeptide expressing nucleotide sequence isolated from the Sargasso Sea
atgaccaataaaaatagtagcataaaaatatatttcattggcattggaggtattggtatgtcaggaatagcagaattaatgtatgaaattggatatactgttttgggtagtgatgaaatagagagtgaaaatgttaaaagattaaaaaaaattggaattaatataaaaatagggcataataaaaaaaatttaaaaaacgttaatgctgttgtttattcttcagctataagtcaaaaaaatcctgaaattcaagaagctaaaaataaaaaaattccgatagttagtcgggctgatatgttatcagaaattaatgaaaaataaa

SEQ ID NO: 312929 - DNA, 658 bp, Unknown
  Bacterial polypeptide expressing nucleotide sequence isolated from the Sargasso Sea
ttggaaaatcattttatttgcatagatgataagatcaacaatgatattgtaagaaaattaaatagtcaaaacttttatacctatggattgaattcaaaatctaattttttaattaagaatattaaacaaaatataaaatttactgaatttgatttatttgtaaatgttccaaataaaaaaaaaataattataaaaaaaataaaaatcccattactcggagttcataatgttagaaattcagttgcagcaatagcagttgccttaacagaaaaaatatcaatctcaaatattaaaaaaggattattaaattttaggggagttcaaagaagatttaataaaatttttacatataataaaatcgatttttatgatgattatgcgcatcatcctacagagataaaagttgtattagaaggagttaataaagtttacaaaggttacgataaagtttgtatttttcagcctcatcgaatttctaggttaaaagatctaagaaaagaattttcttttgcttttcaaaatgctgatactgttgttttatgtccaatatataccgcaggagaaaaaataaaattaggctttagctattttaactttgcaaaagaacttataaaaaattcaaaagtaaaattatttttagtcaatgacagtaagcaat

SEQ ID NO: 312930 - DNA, 757 bp, Unknown
  Bacterial polypeptide expressing nucleotide sequence isolated from the Sargasso Sea
caagggtatcaaaaagagcaattaccagaggctgatctctatgtcataggtaatgcactatcaagaggcaatgagtgcgtcgaagaaatattagacaaaaaattaccatttgtttcaggacctgaaatgttagggaaagagcttaaaaataggaatgtttttgctgtatcaggaactcatggaaaaactactacttcttatatgcttgcgcatattttaaaaaaacagggtaaagatattggattcttaatcggaggaatttctaaaaactttgaaaattctgcaaaacttggtacagataaatcttttgttatagaagcagatgagtacgattcagctttttttgataaacgttctaaatttatacattattctccacaaaacttggttataaataatattgaatttgatcatgcagatatttttgatgatatcgatgatataaaaaaacaatttcaccatctcataaaaattgttcctcagtcaggtaatattatttattttaaagatgataaaaatagcactgatcttattaaggatggttcatggtgtggtaaaacagagatcaattcagattcaataaaaatagattttaaattaatgcagctagagatagataataagaagttttcacttgaagacctaccattaataggccaacataattttaagaactacatttctgcaattcttgcagcaaaacttgatggtgttccaattaatgactcaattgagtcactcaaaacttttaaaggtg

SEQ ID NO: 312931 - DNA, 378 bp, Unknown
  Bacterial polypeptide expressing nucleotide sequence isolated from the Sargasso Sea
aatgaaaaaaattaatttaggtcagaaagaattaatccattttattggaattggtggaattggcatgagtggtcttgctcaaatcatgaagaacatgggttttaaagttcaaggaagtgatcaaataaaaaataagaatacaatatcttgtaataaagcgggtataaaagtttttattgggcactctaaaaaaaatgtaaagagcacctcaatagttgttaaatcatctgcaataaaagaaaataatagtgaaattagatatgcaaagcaaaaaaaaataccaatttattcaagagcaaacgtgcttgcagatatagtttcacttaaaaaaaatatcgtaattactggctctcacgggaaaacactacaacatcatta

SEQ ID NO: 312932 - DNA, 895 bp, Unknown
  Bacterial polypeptide expressing nucleotide sequence isolated from the Sargasso Sea
tgggcatcaaatcttaagagacaagtgggtcatcgctgtttctggtacccatggaaaaactactacggcgagcatgttggcctggatacttgaaaaagcaggtctagaaccaggctttctgatcggcggctcaccagccaacttcaattgttccgcgcgtcttgggaaatctcctttttttgttgtcgaagccgacgaatacgatactagcttttttgatcgtcgatccaagtttgttcactatcgtcccaaaaccctggtcattaacaatttagagtatgaccatgcggacatcttcccgtccattaaagaaatccagaatcagtttcacttactaattagatctataccgagtaacggactcattatcacgccagctgacgaccaaaacattcaagaaacattagacatgggctgctggactccccatcagacaatccaaacaatgtcaggagaaacggaatcagatcaagtaacaaagtcctgtgactgggcctcccacggagaggccacaaacttcgaggtatttgaaaaaggcaaactagcaggccaagtcaagtggtctctctttggagggcataaccggtgcaacggactcagtgcgattgcagctgctagtcacgttggcgtatcggtcgacaaagcctgtgaagcattgagttccttcaaaggagtaaaaaggcgactggaaaccatttatcgatcagacaccatcaccgtatatgatgacttcgcccatcaccctagtgcaatcaaaaaaactctcgaaggaattaggaagcaatatccgcacgagcttatcctagccgcaatcgaacctcgcacacacacaatgtcgctgggcgcacttcaagctgacctagtttcatgtaacaaggatgcagatcaaaccttt

SEQ ID NO: 312933 - DNA, 409 bp, Unknown
  Bacterial polypeptide expressing nucleotide sequence isolated from the Sargasso Sea
ggacatcaccccgaagaaataaaagctgccttaagtgctgccaaattaattaaaaataacagcaaaattttggcaatttttcaaccacatagatatactagattgaaaaaccattttgaagaattttgttcaagtttcaatgatgcagacaaagtgattttgttaaatatatatgctgctggggaaaaaaaattaattaattatgaaaacacagatttagaagaaggtattagaaattatggtcacaagaacgttgagagtttaaaagatgatgaaaaaatatttgaaaaaatttttaagaatttaaaaaattttgacataattatatttctaggtgctggtaacataactaatattgcaaattctctgagtaaacaagttaaaactttgagaggaaatattcaatgaa

SEQ ID NO: 312934 - DNA, 846 bp, Unknown
  Bacterial polypeptide expressing nucleotide sequence isolated from the Sargasso Sea
aattactcaataattaccaatattgataatgaacatttagactactataaaactttgagaaatctaaaaaatagatttgtagaatttatagataaaactccttcatttggaaaagcttttttatgttctgacgataaaaatataaatgatattttgccaaaacttaaaaacaataattattatacttttggattaagcacaaaatcaaattttcaaatttttaatattattcagaacaaaaatttttcaaaatttagtgtaaaaatcaaaatacctggaaaaataaaaacaataaaaaatattgctataccattactaggattacataatataaaaaatgcagcatctgctttagctgttgcattttcaattggtgtatctgataaagtaattaaatcaggtttgaaaaattttaaaggagttcagagaaggtttaattatttatttgatataaataatgtgccattttttgatgattatgctcatcaccctactgaaatagcttcggtattggatggtgtgaggaaagtttataatcaagaagacattgtgtgtatttttcaacctcacagaatatcgcgagtaaaaaatttaaaaaatgaattcacaaattgttttaataaagcagatacaattttgctttgccccatatataaagctggagaaaagctaaagttaggattttcttataattcatttgcaaaactaatagcaaaaaattctaaagtaaacttgataatgattaaaaacgagctggaattaaaaaaattaataagaacttatgcatatggtaacaaaatttttatttctatgggtgctggttcaatttctaattgggtaagaaat

SEQ ID NO: 312935 - DNA, 322 bp, Unknown
  Bacterial polypeptide expressing nucleotide sequence isolated from the Sargasso Sea
aatgaaaaaaattaatttaggtcaaaaagatataattcattttataggtatcggcggtatcggcatgagtgggcttgctcaaataatgaaaaatatgggttttaaagttcaaggaagtgatcaagctaaaaataaaaatataatttcctgtattaaaaatgggataaagacttttataggtcattcaactaaaaatctaagaggagcgactataattgtcaaatctacagcgataaaaaataataatatcgaaattaaatttgctaaaaaaaataaaattccagtctataacagagttgaagttttagcagatgcagtttca

SEQ ID NO: 312936 - DNA, 246 bp, Unknown
  Bacterial polypeptide expressing nucleotide sequence isolated from the Sargasso Sea
aatgaaaattgatttaggcaaaaatgaacttattcattttgttggtattggtggaataggtatgagtggtttagcaatgattatgaatggattaggctacaaagttcaaggtagcgatattgtaaataatcgaaatattgagaggttaaatgaaaaaaaaataagggtatttttaaatcataaaaaagcgaatataaaaaaaacgactgttctggtgatttcctcagctattaaaaaaaataaccc

SEQ ID NO: 312937 - DNA, 850 bp, Unknown
  Bacterial polypeptide expressing nucleotide sequence isolated from the Sargasso Sea
tttaaaattcaaggtagtgatcaaaacaaaaataaaaatactataagttgtaataaagcaggaataaaagtttttataggacactcaaaaaaaaatgtgaaaagttcaactatattagttagatcttccgcaataaaaaataacaacagcgaaattaagtatgctagagaaaaaaaaattcctatttactccagagctgaagttctagcagacgtggtctcattaaaaaagaatatcattattacaggttctcatggaaaaacaaccactacatcgttggtttcaaaaatattatctgatcaaaaacttgatcccacgattataaatggtggtgtaataaattcttttaatagtaatgctaaattaggcaaaggggagtgggcaattttagaggcggatgaatctgatgggagttttctaaagcttcctattaattattcaatagtaacgaatattgacaatgaacatgtagatttttataaaaattttaaaaatctagaaaattcttttatcaaatttattgaaaaaactcctcccacaggaaaatctataatatgtatagataacaaaaatattaaaaaaatatttaatagattgaaaaataaaaacattctgacctatggagagtctataaatgcaaattatcaaattacaaatataaggtataaaattgattatacaatttttgattttagctacaaagatataaagaaaaaaaataagaaaataaaaaatattcaattaagattgttaggaaagcacaatgtatttaacgctgcagcagctatttcgatatgtttaaacttaggcgttagtcgtaatattatgaaaaaatccttaaaaaactttt

SEQ ID NO: 312938 - DNA, 307 bp, Unknown
  Bacterial polypeptide expressing nucleotide sequence isolated from the Sargasso Sea
atgaaggatattagaataggacaaaaagagattattcatttcgtaggtatcggaggaattggcatgagcggtctcgcccaagttatgaaaactatgggtttcaaaattcaaggcagtgatcaaaataaaaataaaactacccaaaattgtttaaaagcaggtataaaagtttttatcggacacgcaaaaaaaaatattcaaaacgttactattgttgttaaatccaccgccattaaggataataatattgaaattaaagaagctaaaaaaagaaaaatatctatatattctagagctgaaattttag

SEQ ID NO: 312939 - DNA, 445 bp, Unknown
  Bacterial polypeptide expressing nucleotide sequence isolated from the Sargasso Sea
ttttaaaggagtgcaaagaagatttaattacatatttgaaaaaaatggaacacattttttcgatgattatgctcatcatcctacagaaatatcatccgttttagatggggtaaaaaaagtttataaaaaaaaagaaattgtttgtatttttcaacctcatagaatttcaagattaagaagcttaaaatcagaattttcaaaatgttttataaaggcaaatactataattctatgtccaatatataaagctggagagaatataaatttaggtttttcttatatttcttttgcaaaacaaattataaaaaattctaaagtgaacttaataatgattaaaaatgaaacagatttaaaaaaagttgtgggaaatttagcttttggaaataaaatatttattgcgatgggtgccggatcaatttctggatgggttagaaatttaaaataa

SEQ ID NO: 312940 - DNA, 856 bp, Unknown
  Bacterial polypeptide expressing nucleotide sequence isolated from the Sargasso Sea
gaaaaaattggcataaaaactatatcaggatttaaagaagatacacttcctgatgctgatttatatgtaattggaaatgcaatgtctagaggaaacgaatgtatagaaaaaatcttagaaaaaaaattcccctttgtatcagggcctgagctgttaggaaaagagctaaaagaaagaaaagtatttgcagtttcagggacacacggcaaaacaactaccgcatatatgctagctcacatttttactgaacagggaagggatattggctatttaataggaggtatatcgaaaaattttaaaaatccagccaaacttggatccgatccaacatttgtcattgaggcagacgagtatgattcagctttttttgataaacgttcaaagtttattcattattttccttcgaatcttattataaataatattgaatttgatcatgccgatatttttgatgatatcaatgatattaagaaacagtttcagcaccttcttaaaataataccctgtgatggaaatataatttcctttgatgatgatacaaatacaaatgatattttcaaacaaggtatatggtgcaatcagatatgcataaataaagatgaagtttttgcagactataaaaaaagggaattaaaggtagataacgtgaaattctcacttaatgatttacctcttattggtgaacacaactttaagaattatgtttgcgcgattatggcagcaaaacttgatggaattcaaataagcgactcaattaaatgtttaaaaaattttaatggagtcaaaagaagaatggattttgtcagagaaatagaaaagataaaaatatttgatgactttgcccatcatccaacag

SEQ ID NO: 312941 - DNA, 883 bp, Unknown
  Bacterial polypeptide expressing nucleotide sequence isolated from the Sargasso Sea
tatgagtgccttagctatttatttaaagaaaaataagataaacattactggcagtgatattacgtttaatgctaatactgtaaatttagaaaaatataaaataccagtatttattggtcacaaatcttcaaatataaaagatagagatattatattttattcttcagctattaaaaataaccctgaaatcaaagaagcaaaaaaaaataaaatcccatgctataatagatcaaaacttcttcagttaatatgtaaagataaattcacaattgttgtatctggctctcatgggaaaacatcaactacttctatcttaggacacttattggttcgtgcaggtcttaacccaactatcatttccggaggtattatgcagaattttggacaaaatatttaccttactaatagtaattatgtagttgtggaagctgatgagagtgatggaacagtatttaaattaagtccaaaatatttattatttttgaatgttgatagagagcatattgatttttataaaacctattctaattttaaatcaaaaattaaaaattatattctgggtcaaataaaaaaagatgttaaaatttttataaataatgatgattatttccttttttcattaaaaaaatactctaaaaacataaaaacatttggttcaaatacaaaagcaaattatagctataaattaattaatttgactgataaaaaatcttcatttgatatctttaaaggcaaaaaaatcatatcaaagaacttatctacaaatttattgggtgaacacaatgtacaaaatctaacagcagttctatctattgtagatgacttaggatatgaaataaaaaaatctcatatccttaattttaaggtactaaaagaagaatga

SEQ ID NO: 312942 - DNA, 539 bp, Unknown
  Bacterial polypeptide expressing nucleotide sequence isolated from the Sargasso Sea
taatattaaaaattcagtagctgcaactgcggtagcacttaatgttggcttaagtatttcaaatataaaaaaaggacttaaaaattttaaaggtgttcaaagaagatttaataaaatttttacctttaacaaagttgatttttttgatgattatgctcatcatccaactgaaattaaagaagttcttaatggagtaaaaacagtttattcaaattacgaaaaaatatgtatttttcaaccacataggatatcaagattgaaagatttaaagtcagagtttgcctctgcatttaaagatgcagacaaagtaattctttttccaatatatactgcaggtgaaaaaatcaaattaggttttagttattataattttgcaaaagaaataataaaaaaatccaaagttgaattatttttagtgaatgacaaatatcaactagcaaaatatataaaacataatatttacggagataaaatagtaataggtatgggagcgggttccatttcattgtggatgagagaaatgccaaaatttttgtaat

SEQ ID NO: 312943 - DNA, 379 bp, Unknown
  Bacterial polypeptide expressing nucleotide sequence isolated from the Sargasso Sea
tatgtatagagtttgtggaacaggaatgggagcagcggcttgcttattaaaagaaagtggttatgaagttgaaggtggagatatcacttatactccaccaatgagtgaatatttacaaacaacgggcataatatgtcatgacttaaacaagctagaaaaaaactatttaagtgggtttgatttaatagtggtaggaaatgtagtgccgaaaggaagtagagatgcagatttaatagagaactcaaatgtttcttatacatcttttccagcagcactaggagcactagttttaaaagactttaatgttgttggtgtctcaggtactcatggaaaaacaacaactacatattttttatcgcaaatgtttactcattttaat

SEQ ID NO: 312944 - DNA, 661 bp, Unknown
  Bacterial polypeptide expressing nucleotide sequence isolated from the Sargasso Sea
tatggataaaaaaacgtattattttataggcattaacggaattggaatgagtggccttgctgaaatcctaatcaataaagggcaggtggtattggggtctgatacttcacccacgcttcgttcggatcattttaaagccttgggaatatcagtgtttgaaaaacaggaaaaacaaaatattctttccagcgattggattattgtgatctccagtgcgattaaagatgataatgaggaattgttacaagcaaagaaattagggtgtcaaattattaaacgaggcaaattattggccatgatctttgatgaatttgaagaaaaaattgcaatcatagggacacatggaaaaacaacaacaacatccttggtgattaaaatattttctgagcaaatggaaaagccatcgtattttgttggtggccatttagagggggttccccatgccaatttacaatcctcaaaaacgtttattacggaacttgatgaaagtgatggctcatttttagatgcgatcccaacaagcacaatcattacaaatattgaacatgagcatattgatttttacaagacaaaaaatgatgtaatggatgcctttttacggtttatttcaaacacaattaataataacggaaaatgcacaattaatattgatgacccaatt

SEQ ID NO: 312945 - DNA, 734 bp, Unknown
  Bacterial polypeptide expressing nucleotide sequence isolated from the Sargasso Sea
aatgcatattcatattcttggtatctgcgggacatttatgggaggcctagctcaaatcgcaaaagcattaggtcatgaggtaacaggctctgatcaaaatatgtatccaccaatgagtgaagaactaattaaactcaatatcgatgttatggttggttatgaacctgagcatctatattctcagccagatttggttctagtgggtaataccttgtctcgcggtaatccagtgattgaatatatgctgaatcaaagattattatttacctctggaccggaatggctttatcgagaggttttacataaaagacatgtgctggccgtctcaggaacacatggaaagacaacaacaacgagtattttaagttggatcctcgagtttgcgggacttaatccctcatttcttattggtggagtagccgaaaattttgaaaaatcagctagttatactgattctcaatttttcgttatcgaggcagatgagtacgatacggctttttttgataaacgttctaagtttattcattatcacccagatacgctaataataaacaacatcgagtacgatcatgctgatatctttcatgatcttgctgctataaggcgcgaattccacaatcttatacgcatcctcccaaaagatgcgaaaatcatctatccatcagaagataaggaaattgagcgcgttttaagcatgggttgctggacggcatctgagacgtttctaggcggtg

SEQ ID NO: 312946 - DNA, 593 bp, Unknown
  Bacterial polypeptide expressing nucleotide sequence isolated from the Sargasso Sea
aagtaaaaaaaatactttaattaaaaatataaaaatccccctaataggattacataacataagaaatgccacagctgctgttgcggtttcttggactattggaatttcaaaagatattataaaaaaaggtttaaatgaatttaaaggtgtgcacagaagatttaataaaatatttaaatttagaggtatagaattttttgatgattatgcacaccaccctagtgaaattagagaagtattaagtggtgtcaaagatgtttataaagaagaaagtataatttgtatatttcagccacatagaatttctagattaaaagatcttaaaaaagaatttacgctttcatttaaaaaagcagaccaagtaattttatgccccgtatatgcagcaggggaaaaaattaagttaggatttaattattataactttgctaaaaatattgctaaaaattcaaaagttaaaatttttttagttaaagatcaatttagtttggcaaaatttattaaacagaatatttatggaaaaaaaattgtaataggaatgggagcaggatcaatttctaattggataaagggcttaccaaatttgatataat

SEQ ID NO: 312947 - DNA, 878 bp, Unknown
  Bacterial polypeptide expressing nucleotide sequence isolated from the Sargasso Sea
gcgcagggtattgaaattaaggagggctatcaggttagtcatctgaagcctgctccggatctagtgatcataggcaacgcactttcgaggggaaatgttgcggtagagtatgtgattgaggaaggactcccttacgtatcagggcctcagtggttggctgagaatgttcttcgcgataagtgggtattaggtgttgccggaacgcatggaaagacaacgacgagtgcaatgcttgcctggattttggaatttgcgggctctaaaccagggtttttaattggaggagtaactaataattttcctgattcggctcgcttgggagattcgcaattttttgtagtacaagcagacgaatatgatagtgctttcttcgataagagatcaaagtttgttcattattcccctcgaacagcgattctaaataacttggagttcgatcacgctgatatttttaataatctcgaagaaatagaaaagcaatttcatcatttgattcgcactattccgggaaatggaacaataatcagtccccatgaagattctgggatagaaaaggttatagacatgggttgttggtcttacagacaacattttggagtgaacctcccggatttgaaatgtaaaaaagcggcgcttgatatggaaatattttggaacgccgaatttgaaggagaacaaggaaacgagttccaattggtaaaatatgagaaaaaatcaggacaggtgataaaaacagaaggattggttaagtggagccagaatggtcagcacaatgtaaaaaatgcgctggcagcggtggccgcggcaaaccaagttggggtagatttatccgttgctgtgaaggccttggaaaactttgagggagtgaaaaggcgaat

SEQ ID NO: 312948 - DNA, 841 bp, Unknown
  Bacterial polypeptide expressing nucleotide sequence isolated from the Sargasso Sea
tcaatagttacaaatatagactcagagcatctagatttctataaatcagtaaataatttaaaaaaaaatttttctgattttatagaaaaaacaccttctttgggaaaaacatttatatgtattgacgacaaatacagtagagaaatattaaaaaaaataaaaaaaaaaaattattattcttatggattaaataaaaaagctaactttcaaattcataatatttttcaaagtgaaaaattttccaagtttgatttaaaaattagaattccaggtaaaaaaacaagcatctctaatattaagatacctttgattggtttacataacattaaaaatgccacatctgcgtttgcagtttctttttctattggaattaattcttcaattattaaaaatggattattaaaattcaaaggagttgaaagaagatttaattttttatttaaaaaaaataatgcaatcttttttgatgattatgctcatcacccaacagaaattacatcagtgctagatggtgttaaaaaagtatacaataaaaaagaaataatttctatttttcaacctcacagaatttcaagagtaaaaaatttaaaatttgaattttctaagagttttattaaatcagatacagtattattgtgtccaatttataaggcaagtgaaacgattaatttaggtttttcttacaattcttttgctcaattaataataaaaaattcaaaagtaaaattaattatcattaaaaatgagaaagaattacaaaattttttaaaacaaactgcttatgggaataaaatttatataggtatgggggctggatccatttcaaattggatgagaaatc

SEQ ID NO: 312949 - DNA, 518 bp, Unknown
  Bacterial polypeptide expressing nucleotide sequence isolated from the Sargasso Sea
ctgctttgatagtttgtttaatcttggagccaatataagtttaattaaaaactctcttaaaaaattttcgggagttcagagaagaatgaccaaggttttttcaaaaaacaaaaatgatttttacgatgattatgctcatcatccaacagaaattagctcaattttagacggagttcaaaaagtaaactcaaacagaaaaataataagtgtatttgaaccacatagatactcaagagttttatctttaaaaaaagaattttcaaaatgtttttttaaatcagatatagttctcctatgcccaatttatgctgcaggtgaaaaaaagaatttaagttttgatcttattaaatttggaaaattaataggtaaatattcaaaaacacaggtaataattataaaaaatgagttagaactttgcaaatttcttagaaaaaacttgattaaagatgaaattattattggaatgggagcaggcgctatttcaaaatggatggcaaatctaaaaaacactttatgac

SEQ ID NO: 312950 - DNA, 481 bp, Unknown
  Bacterial polypeptide expressing nucleotide sequence isolated from the Sargasso Sea
aatgaaaaactcaataacacaatatctaaaaaataagtctttcttcttaataggtattggtggtgcagggatgatgggtatagctgaattacttcacaatcttggatttaaagtgcgaggttctgatattcaagataataatgccattaagagactacgaaaaatgaaaataaaagtattcattggtcatgactctaagaatataaatctaaaagacgtcgtagtattctcaaacgctatacaaaaaaataatattgagcttaagttctctcgtcaaaatagccttactgttcttagtcgtatgcagatcatagcagaacttatgagattgaaatatggaatttcaatcacaggttctcatggtaaaactacaactactagtttactcagtcatattatgtataaaaataaacttgatcccacatatcttatcggtggtaaattgaaaactgatgatcctcatgtgaaattaggtaatagt

SEQ ID NO: 312951 - DNA, 811 bp, Unknown
  Bacterial polypeptide expressing nucleotide sequence isolated from the Sargasso Sea
tttgataatagttggtaacgttatgtcgaggggaaatcctgttattgagtatattttaaaacataaaattatttttacgtctggccctaaatggctatatgaaaatattttgaaagataaaaaagttattgcagtcagcggcacacatggtaaaacaacaacaacatcaatgattgtgcatataatgaataaaaataagctaaatccaagttacctgataggtggtgatcctaatggtaaaacctcttcagttaaacttactaaatcaaaatactttgtaattgaagctgatgagtatgatacggcattttttgataaacaatctaaattcttacattataatccttatattttgttaattaataacatcgaatttgatcacgctgatatctttaaagacatagatgaaatcatcaaaacgtttcataatttaattaggcatgtcccttctaacggaaagattattataaataaaaatgatctcaacattaaaaagcttattaaaaatggttgctggtctaaaatcattacaatcgacgataaaagaacaaatggggatttaaacctcgttagtgacaaaaaacatatgttggtattaaataataatagatacaaattgcctgagcatatgattggacagcacaattacttaaatgccacagcagctattgcagtatgttgccaattaaaaattagtatcagtaaacaaatcaaaagtttagagacatttaagggcgttcaaaaaagaatggagtatatagggcaaatcaatggaataaaaatatatgatgactttgcacatcaccccaca

SEQ ID NO: 312952 - DNA, 242 bp, Unknown
  Bacterial polypeptide expressing nucleotide sequence isolated from the Sargasso Sea
aatgaaaattaaattagcaaaaacagaacttatacattttgtaggaataggtggaataggtatgagtggcttagcacttattatgaaaggtaaaggttttaaagttcaaggcagtgatattgcaaataataaaaatattgaaagattaagaaaagaaaaaataaaagttttcattggacacaagaaacaaaatttagaaaaagggaccatcctagttgtgtcttctgctattaaaaaaataa

SEQ ID NO: 312953 - DNA, 791 bp, Unknown
  Bacterial polypeptide expressing nucleotide sequence isolated from the Sargasso Sea
tgatttaagcagtaatgaaatatcaacaaaattgaaaaaaaagggtataaaagtttacgaacatcaactagctaaaaacattacaaatcaaaatcttgttgtttacacatccgcaataaaaaaaaataatccagagttagttgaagcaaaaaaaagaggaattaagtgtattacaagaggaaaagctttaggtgaatttacaagaaaggatacaaatatctgcatcactggaactcacggaaaaagtactacgacaaattatttagcacaaatattattaaattgtgggaaaaaaccttcagttttcttaggagctataaacactaaattaaaaactaattttatttacaatcgaagtagtctcaatataattgaagctgatgaaagtgacaacagcttcaattttttaaactcaatgtattcagttatcactaatattgattttgatcatatggacttttataaaacaaaaaagaacctttattttgcatttgaaaatttcataaaaaaaactacaaacaaagtaatagtaaataatgactgcccaaatattaaaaaaattatcacgaaaaatccaaataaaaaaattgttagatttagcaatattgataaagatattgaattttattttgaaataataaaccgtaaaaaaagtacagaaatcatcttatataaaaaaaagaatatcattggtttatttaaatttcagagaataagtcaatataattgttataatgttgtcagttctattgtcactgctattgaaatgggtatatccacgaaagaataaa

SEQ ID NO: 312954 - DNA, 439 bp, Unknown
  Bacterial polypeptide expressing nucleotide sequence isolated from the Sargasso Sea
atgaaaaaaattaatcttggtcaaaaagaagttattcattttgttggtgtcggtggaataggcatgagtggtttggcccttatcatgaagaatatggggtttcaaattcaaggcagtgatcaaaataaaaataagaatactataacttgcgcgaagtcaggtattaaagtttttattggacactcaaaaaataatgtaaaaagttcatcaatattagtcaggtcatcagctattaaaaataataatatcgaaattaaatatgctagaaaaaaaaaaattcctattttttcaagagctgaaatacttgcagatgtcgtttctttaaagaagaacattatcattaccggctctcacggaaaaacaacaacaacttccttagttgcaaaaattctatctgatcaaaaattggatccaacaattattaatggtggagtaataa

SEQ ID NO: 312955 - DNA, 346 bp, Unknown
  Bacterial polypeptide expressing nucleotide sequence isolated from the Sargasso Sea
aagttatgatattgccaaacaaatatctgataaaaaaatagtaattgtttttcaacctcatagatatacaagaacaaaaattttacaaaatgaatttgtaaaaattttaacaaaagtagatatattatatatcctcgatatttattcggcaggagaaaaatctattccaaatataaattcaaaaaatttagtaaaaaaaattaaaattaaaaataaaaatactttttatataaagaatcctaaaattttaagatctcttcttaaagaatattttaacgataaaaatattattgtatttatgggggctggctcaataacgaatttggcaaatgagctaatttcttaa

SEQ ID NO: 312956 - DNA, 520 bp, Unknown
  Bacterial polypeptide expressing nucleotide sequence isolated from the Sargasso Sea
atgaaaatttgtgttctgggtgtatcaggaaccttcatggcgaatgtggcggtactggctgtgtcgttggggcatgaggttgtagggtacgataaccaatgctatccaccgatgtcagctgtattggagcaggcgggcatcgatgttttcccattcccgaatacgccatccgttcccaccgatgtggattgtattatcgttggtaattgtgtgcgactagatggcccctggccagcctacttagaaacgctttccattccctgcaagtcgggtcctgagtggcttcgtgaaacgattctacaggatcgtcttgtcatcgcggtgagcggcacacacggtaaaacaaccacaaccagtctgttggttcatgccatgcgagcgcacggtgaaaacccaggctacttgattggtggtgttcctcaggggttagccagctccactgcgctgggggaaagtcctttttttatcattgaagcggatgaatacagcacggcttatttgaccgaggccccaagttcat

SEQ ID NO: 312957 - DNA, 760 bp, Unknown
  Bacterial polypeptide expressing nucleotide sequence isolated from the Sargasso Sea
ggataaattaaacagatattttgaaaattttgttaataaagttccttcatttggaaaatcatttatttgtttagatgacaaaaatatcaaaaatttaataaagaaaattaaaaacaaaaacttttatacatatggtttagataaaagatcaaatttttctattaaaaatataagacaatcgaaaaaattttctgagtttgatttaaatataaaattacctaataaaaggaatcaattaattaagaaatttaaaattcctttattaggaactcataatattaaaaattctgtggctgcagcagcattagctttaactgttggtctaccaataaataatataaaaaaaggacttaaaaattttgaaggagttcaaagaagatttaacaaaattttcaattttaataatgtagatttttatgatgattacgcccatcatcctacagaaatcaaagaagtactggatggtgtaaacaatgtttataaagattatgaaaagatttgtattttccaacctcatagaatttcaagactaaaggatttaaaaaaagaatttacatacgcttttaaaaatgcagataaagttattttgtttccaatttacaccgctggagaaaaattaaaacttggatttaattatatgaattttgcgaaagaaataattaaaaactcaagagtccaattatttttagttgataataggtttcaattagcaaaatttattaaagcaaacatatatggaaaaaaaattgttataggaatg

SEQ ID NO: 312958 - DNA, 907 bp, Unknown
  Bacterial polypeptide expressing nucleotide sequence isolated from the Sargasso Sea
tgaattgacgaatgcggcgttagcgcaaattgatacggtcgtggttggtaatgtgttgtcccgtggcaacgcggcactggaatcggttattgagtcaggtttgccgtatgtgtcgggcccacagtggttgtatgagcacgtgctaagtcggcgccgtgtgtgtgctatagccggtacgcatggtaaaaccaccacgtcatccatggtggcgtggatattgcaatgcgcgggtttaaatccagggtttttgattggtggtttgccgcataattttcaaacatcggcccgattaactgactcggaattttttgttatcgaggcggatgagtatgacaccgctttttttgataagcggcctaaatttttacattatcgcccacgcacgttggtgctaaataatttggaatttgaccacgcggatatttattctgatcttgaagcgattcagcagcagtgtcattatttattgcgtaccgttcctgcaaaaggtggtgttattttaaatgcagatgatccgcacttgcctgctgtgcttaagaaaggttgttggtcacgccaaacaacgttttctttgttacagtcagcccactggcaagcgcacaaacgaacgcaagacgggtcggtgtttgatctttggtaccatggtcaaaccattggtgaggtgacgtggtcgttggttggagactacaatctatcaaacgcgttagctgcagcagcagcggcatttgactgtggtgtgagctttgaggcgattttgactgggttatcgacttttaccggcgttgctaagcgtatgcagtgtgtggttgagaatgacaatattaaagtgcatcgggattttgcacaccatcctactgcaatcgaaaatgtaattacagcggttcgctcgcaaccagaaacgcagcgt

SEQ ID NO: 312959 - DNA, 491 bp, Unknown
  Bacterial polypeptide expressing nucleotide sequence isolated from the Sargasso Sea
tatatctatttcagatattaaaaaaggtttattaaattttaaaggagttgaaagaagatttaacaaagtttttaaatataatggtatcgatttttatgatgattatgctcatcatccaacagaaataaaagtagttttagatggagttaaaaaagtttatcagaattttaacaaggtttgtatattccagccacatagaatttctagactaaaaaatttaaggaaagagttctcttatgcctttgaggatgctgacacagttatactatgtcctatatatactgctggagaaaagattaaattagggtttaattatcttaaatttgctaaagaaattataaaaaattcaaaagtgaatttatttctagtagaaaataataatcaattagcaaaatttattaaaaacaatatgtatggaaaaaaaattgtaattggaatgggtgccggttctatttctaattggatgagaaagattcctcaattaatttaat

SEQ ID NO: 312960 - DNA, 718 bp, Unknown
  Bacterial polypeptide expressing nucleotide sequence isolated from the Sargasso Sea
actaagagaattagatgttgaattaacaaaaggatttgagccgtcctcaatgcctgaagctgatctatacgtaattgggaatgcactttctaggggaaataagtgcgtggaagaaattttaaacaaaaacctcccttataaatctggacccgagatgcttggtgacattatcaaagatagatttgtgatagctgtctctgggactcacggaaaaacgacaacatccttcatgattgcaaagatatttcagtctttggataaagatataggttatctcataggaggtatatcacctgatttctcattctctgcaaaaataggaagtgatgaaatcttcataattgaggcagatgaatatgattctgcattttttgacaagagatcaaaatttatacattactctccaaatattcttttgataaataatattgagtttgatcacgcagatatatttaacgatttagatgagataaaaaaacaattccatcacttattaaaaattataccgagcagtggaaaaataattctatttaaccatgataaaaatgcattagatgttataaatgagggatgctgggcagatattattgaaattaatggaaatgccagcagggctagctttgattcatcttcttcaatgattaaatttgatggaaagtcagtctgtataaacgatttacctttttatggttctcataacaatctgaatgcagctgca

SEQ ID NO: 312961 - DNA, 127 bp, Unknown
  Bacterial polypeptide expressing nucleotide sequence isolated from the Sargasso Sea
gatgtttaggaaaacaaaacatattcatttcatagggataggtggtattggaatgagcggaatggctgaattattgtcaaaattaggatataagatatctggatctgataaacaaacctcagaaata

SEQ ID NO: 312962 - DNA, 442 bp, Unknown
  Bacterial polypeptide expressing nucleotide sequence isolated from the Sargasso Sea
ggagtcaaaagaagattcagttttttaggtaaaattaagaaagcatctatttatgatgattatgcccaccatccttcagaaataaaagcaagttatgaaattgctaaacaaatatcagaaaagaaaattgtaattgtattccaacctcatagatattcaagaacaaagattttacaaaatgaatttattaaaattttaatgaaaatagatgtattatatattcttgatatttacgcagcaggagaaaaatcaattttaaatataaattcaaaaaatttagtaaaaaaaattaaaattaaaaataaaaaaacattttatatacagaatcctaaaaatttaaaatttcatctaaaagaattttttaatgaagaaaatattattgtatttatgggggctggttcaataactaatttagcacatgagttagtttctaaaaagtgag

SEQ ID NO: 312963 - DNA, 772 bp, Unknown
  Bacterial polypeptide expressing nucleotide sequence isolated from the Sargasso Sea
ttggataaagatttaatacctaaaattcattttcactttattggagtgggaggtattggaatgtcagcagtagcaatgggtttactgaaaaaaggttattcagtttcaggatctgatttagttaaaaacaatgaaactaataaattaaagaaattaggtgcaattatctttaattctcaagttggacaaaatattgaatttattacttcaaaatttaacaacaaattgattaattttgttgtaagcacagctatcaagcctgaaaacaaagaattatcatactgcagagaaaaaaatttaccggtaaaacatcgttcagagattctcgcactgttgatgcagtcttatacttcattggctgtagcaggtagccatggaaaaacatcaacctgtacatttctatctacactactcgagttatgtacgcatagttcttcttcaataactggggggataattcctatttacaattctaattgttatttagaagatacaaaattcttagtagctgaagttgatgagtctgatggcacaataactagatataaatctagtattggaataattaataacattgattttgatcattgtgatcatttctctgatttaggggaagtcatatcttcttttaaagatttcgctaaaaattctaaaaaattattaattaattttgattgtgaaatcacacgaaataattttaattctgaaaataagtggtcaaacactacaccaagcaacgtagcttatgccttaattccgactgtaattaata

SEQ ID NO: 312964 - DNA, 196 bp, Unknown
  Bacterial polypeptide expressing nucleotide sequence isolated from the Sargasso Sea
aatgaaaattaaattagcaaaaacagagcttattcattttgtaggtattggcggtatagggatgagtggattatctctaataatgaaaggtaaaggatttagagttcaaggcagcgatttattttttaacaaaaatatagaaagattaaaaaaagaaaaaataaaaatttttataggtcaaaaaaacaaaatttaa

SEQ ID NO: 312965 - DNA, 388 bp, Unknown
  Bacterial polypeptide expressing nucleotide sequence isolated from the Sargasso Sea
attttagaatctggaaaacttgatccaacaattgttaatggaggaataataaattctatatcaaaaaataataaatttggaaaaggcgaatggatggttgtagaggctgatgaaagtgatggttcctttttaaaattacctcaccaaatatctataataacaaatttagatattgagcatcttgattattataaatcttcagcaaatttaaatttagcttttgaacaattcgtaaaaaatttgccattttatggaatttcagtcataaatgaagataataagaatcttaaaaaattaattttgaaaaacgatacaagaaaaatcatttctttttcaaataaaaataagaatgctaatgtttacatagaggaagttaatttttacaaaa

SEQ ID NO: 312966 - DNA, 808 bp, Unknown
  Bacterial polypeptide expressing nucleotide sequence isolated from the Sargasso Sea
aatgggcattgatgtgattcccagttatgatgtcgatcaacttaaattatcccctgatctgattgtgattggcaatgtcatgacaagagatacggagatcatagagtatattcttaaccatggcttaacatatacttcaggaccagaatggttaggtaaaaatatacttgctaatagaagggttatctctgttgctggcacgcatggcaagaccacaacctctagcattattgcatctgctctaaaagagttgggtgaagatcctggctatctcattggaggtgttccaataaattttgaggcatcagcatcactgggaagctcgccatattttgtgatcgaggcagatgagtatgacaccgctttttttgataaaagatcaaagtttatccactatccagctgaaacatttgtaatcaataatcttgaatttgatcatgctgacattttcaaagatttagatcaaatcaaatggcactttcaccagttaatcaggtctttgccttcaaagacagaagtcagagtacctattaatgatgacaatatttcagatttattggatatgggcaattggtcttccatcaaatcatttggtatgagcgatgaagctgactattcaatcatttcaaatgatgagaatcttcatataaaagaaggcgatgtattgcatggaaatcttagtcccaaattatttggcaagcacaacttaatgaatattatttcagctttctcagcattgcggtcaataggttttgagggcgataaaatccttgatgcaatcaatcaatttaatggagtaaagagaagg

SEQ ID NO: 312967 - DNA, 453 bp, Unknown
  Bacterial polypeptide expressing nucleotide sequence isolated from the Sargasso Sea
aaaggcggtttacgcatgtggatactatcaatggtgtaaaaataatagatgattatgggcatcatccagcagaaatatcagcggtcttaaaatctgtgagggatacgacaactggcaggattattgctgtacatcagccccatcggttttcgagattaaaattattatttgatgagttttgtacttgctttaatgatgctgatttagtcctaataagtgatgtttattctgctggagaaaaagaattggaaggcataaataagcaggcgttggttgatggtttaatcaaccatgggcacaaaagagttttctcccttgagcatgaaagtcaattgaagaattttttcttagagcatacggcgcctggtgacgtttttgtttgtttgggtgcaggttcaataactgattgggctaatgttctaccatcacaaataagaaatgaaaaattttaaa

SEQ ID NO: 312968 - DNA, 877 bp, Unknown
  Bacterial polypeptide expressing nucleotide sequence isolated from the Sargasso Sea
acaacaacaacagcaatgattgcacatatatttaaagctcacgactaccccaccttaccccttgttggtggaaaaacaaaagagaccccttttccttcacttaaaaaaccccactacatcattgctgaagctgatgagtctgatggctcttttacaaaatacaggcccaaccacagcatcgtaaccaatatagattttgagcacccagactactactcttcatataagatgttattcaaaacatttgaaatccacacaaaaaagattcatccaggtggagctctcatctataatgatgataacaaaggctcaaaagagctgggcaacaattacctgggaaacaaaacctcctatggattaaacacgaattcaaaccttcgagggggtgattacaaactctcaccaacagaaaccctgtttaccgtaacacataaaacgaatcgttatcgttgtcgaatcaaacaacttgggcttcacaatatatcaaatgccttagcctccatagcaacaggactctattatgatattagcccaaaaatttcttgtgaatcattatcaacattttctggcgtagcacgaagacttgagcttatatatcacaaccccttaaaaaatatttttatctatgatgactatgcgcacaacccagaaaaaacatactctgcaataacagcacttaaaaatacctatcctcaactcaaactacatgccattttccaaccacacagatactctcgtattcaggggttatataacaattttacatcttctttcaaatctgcgaattctgtcaatttagttcctttttgctctgctggagaggaaaaaccaaactccctcagattagaaaaatttagtgccgacatttccttgcata

SEQ ID NO: 312969 - DNA, 520 bp, Unknown
  Bacterial polypeptide expressing nucleotide sequence isolated from the Sargasso Sea
gcagcagcttctctagcatttacaattggattgccagaaaaatatatcaaacttggattatgtaattttaaaggagttcagagaagattttctcatttatttgatcacaacaaaataagtttttatgatgattatgctcatcatccaactgaaataagttcagttttaactggtgttaaaaaagttttcaaaaataaggaaatcgtatgtgtttttcaacctcatagaatttcaagagttataaacttgaaaaaagaattttcaaaatgttttaaaatggcagatactgtcatattgtgcccaatttactcagcaaatgaaaaactaagactaaattttacatatcaatcctttgcaaaattaataataaaaaattcaaatgttaagttaatacaggttgatgatgaattacaattacaaagttttataaagcagaatgtatttggtaaaaaaatttatataggaatgggtgcaggatccatatcaaattggatgaaaaatttgaaaaatattttttaat

SEQ ID NO: 312970 - DNA, 211 bp, Unknown
  Bacterial polypeptide expressing nucleotide sequence isolated from the Sargasso Sea
aatgaaaaaaattagtctaggccaaaaagatgttattcattttgtcggtattggcggcataggaatgagtgggttagcccaaatcatgaaaaatatgggatttagaattcaaggtagtgatcaaaataaaaataaaaacacaattaattgctcaaaattgggaataaaaatatttattggccattcaccaactaatgtaaaaggctctact

SEQ ID NO: 312971 - DNA, 304 bp, Unknown
  Bacterial polypeptide expressing nucleotide sequence isolated from the Sargasso Sea
atgaaaattaaattagcaaaatcagaattaattcactttgtaggaattggtggcataggaatgagcggtcttgcaattataatgaaagagttagggtttaaagtacaaggaagtgatatttcaaataataaaaatatagatagggttaaacaaaaaaatattaaaatttatatagggcataaaaaacagaatattaacaaatcaactattttagttatttcatctgcaattaaaaaaaataattcagaagtattgtggcaaaaaaaaggaaaataccgatttatacaaggggtgaaatgttagc

SEQ ID NO: 312972 - DNA, 781 bp, Unknown
  Bacterial polypeptide expressing nucleotide sequence isolated from the Sargasso Sea
tttttagaatttttgaatagcgttcctttttatggagccgcaattttatgtttagatgatccaaaccttcaatcacttcttccaaaaatagaaaaaagaacaattacctatgggttaaaaacccaagctgattacacagcacgagaaatctctgttagcgaactaaaaactaattttactgttttttatcaagggaaaaaacttgggggcatttcatcctgttctttgggaaaccataatatttgtaatacattggccgccgttgcagtaggaatggaattgaatatggattttccaaccatagcagatgccttgaaaggtttttcgggtgttcagcgacgatttgaaattcttcatcattcagattctttgattatcgtagatgattatggccatcatccagccgaaatccaggccaccctctcaaccgcgaaagaagtctggcccaatcgtagattggtagttgtttttcaaccacatcgtttttctcgcactcagcatctgatggaaagtttttattcatcatttaacaatgcagatcaactatttcttctggatatctatggtgcaggagaaaaacctatcgagggaattcactctcgcaaaatggcagaaggcatacgagagtttggacataagaacgtgaattacattgaaaaggtagacattctttttccacatttacaaaattctttgcaatccggtgatgtggttttaactctgggtgcaggaaatattggagaattagcacataagctcgttgctcaattccatgattagt

SEQ ID NO: 312973 - DNA, 361 bp, Unknown
  Bacterial polypeptide expressing nucleotide sequence isolated from the Sargasso Sea
atgaaaaagtttgaaaaggtaagaaatatccactttgttggcattggtggtgccggcatgataggcatcgctcgtgttttacttaaaaaaggttataaagtatcaggttcggacattgattattcaaatgatttaaaaaaattaaaaaacgatggagcaattgtttatgaaggacatcatgagaaaaatattaaagataaggatttattagttgtttcctcagccattgattcagaaaatgtagagttgcttcaggctaaaaaagactctatcacaataattcccagagcagagatgctaggtagtcttatgattggatatgagagcatagcggtggcaggtagtcatggaaaacaacaac

SEQ ID NO: 312974 - DNA, 804 bp, Unknown
  Bacterial polypeptide expressing nucleotide sequence isolated from the Sargasso Sea
tataactaaccagttgaatcaagatggcataaaagtagattttaatttaaataatttaaaatattctaagaaaatactttatatttattcatcagctatttcaattaacgaaacaacgctaaaagattatttagatagtgataatgttttatcaagaccagaatttcttaatatattatcaaaagaaaataaaattattggaattactggaactcatggaaagacatcaactactgcactgctagctcacatattccattataacgaaaggaatgtctcatacatatttggaggtatcacctcattccatgggatagggggacattatggtgatcagaatcaacctattattttagaaacagatgaggcgtttaatacatttaaagacattaatatcgatgatttattagtaacaaatattgatgttgatcatcttgattattttaaaaattttaaaaacttgctcaatgcattcaagcatgtaatcgagaacgttaaaggtaatttagtactaaattttgatgatcagaacttaagagaattgaaaacaagcaataattgcattagttattcttcatcagaaattgctgatattcaaattcaatacccaaacaaaattattatagaaaatgaggaatatgttgttactacaaaattaatcggcaatcattttatttcaaatatagctggagctatagctttagcttatctcaatggaataaagatagaagactccatagaagctgttgaaactttcccaggagtaaaaagaagaactgaatatcttggctcaataaagggtat

SEQ ID NO: 312975 - DNA, 535 bp, Unknown
  Bacterial polypeptide expressing nucleotide sequence isolated from the Sargasso Sea
aatggtttggaatgcacttgcagcaatatctgttgcaagaataatgaatgtttcaataaacaagattattaatagcttagaaaaatttgatggagtaaaaagaaggtttgatataataaacaatgatgaatctctaatggttgttgatgactatggacatcaccctgttgaagtagaaagtgtaataaaagctataaaagataattggaatagaagattggtggtagcatttcagccgcatctatactcgagaacagagcagttttttaaagaattttcagaatctcttttgctagctgattctgttctgataactgagatatttgcatctagagaattggataataattctattaattcgcaaatgattgtagatgagatgctaaggttgggacatcagtctgttatgcctactacattagaaaatttagttgatgatgtggaatcagtttataaaaaaggcgacataatcctaacaattggcgcaggaaacatatggagatattcagatttaattaaagaaagattaatatga

SEQ ID NO: 312976 - DNA, 616 bp, Unknown
  Bacterial polypeptide expressing nucleotide sequence isolated from the Sargasso Sea
tatgagaatacatatcttaggtatatgtggtaccttcatggctgggcttgctcaaatcttaaaagagtctggacatgatgtttcaggttctgacattcaattctacccacctatgtcacattacctagagagcttaaatataaaaacctctaaaggatataaaaaagataccttaccaaaagctgacttatacgtaatcggtaatgcgatctcaagaggtaatgattgtgtagagtatattttagaaaataatttacctcatacatctggaccagaaatccttggaagagagcttaaaaatagaaaagtttacgcaatttctggtacacatggaaaaacaactacttcatatatgcttgcacatattttttctaaaattggaatagacatagggtacttaattggagggatgtctaaaaattttgctgatccagcaaaacttggttccgataaaatttttgttatagaagctgatgagtatgattcagccttttttgataagcgttctaagtttgttcactacaaccctacaaatctaataattaattgtatcgagtttgatcatgcagatatttttgatgacattaaagatataagaaaacaatttaatcatctt

SEQ ID NO: 312977 - DNA, 604 bp, Unknown
  Bacterial polypeptide expressing nucleotide sequence isolated from the Sargasso Sea
atgcatattcatatattaggtatttgcggaacgttcatgggcagtcttgctgttcttgcaaaagaatcaggccaccatgtgactggttcagacatcaattgttacccaccaatcagtgatcagttggatgaaatgggcattgatgtgattcccaattatgatgtcgatcaacttaaattatctcctgatctgattgtgattggaaatgtcatgacaagagatacggagatcatagagtatattcttaaccatggcttaacatatacttcaggaccagaatggttgggtaaaaatattcttgctagtagaagggttatctcagttgctggcacgcatggcaagaccacaacctctagcattattgcatctgctctaaaagagttgggtgaagaccctggctatctcattggaggtgttccaataaattttgaggcatcagcatcactgggaagctcaccatattttgtgatcgaggcagacgagtatgacaccgctttttttgataaaagatcaaagtttatccactatccagctgaaacatttgtaatcaataatcttgaatttgatcatgctgacattttcaaagatttagaccagaattaaa

SEQ ID NO: 312978 - DNA, 671 bp, Unknown
  Bacterial polypeptide expressing nucleotide sequence isolated from the Sargasso Sea
tatgaaaattcatatcctaggaatctgcggaacatttatgggaggattggctcgaattttaattgagtctggtcataaggttactggatcagataacaatttttatcctccaatgtcagatcaactaagagaattagatgtcgaattaacaaaaggatttgagctatcctcaatgcctgaggctgatctatacgtaattggaaatgcactttctaggggaaataaatgcgtggaagaaattttaaacaaaaacctcccttataaatctggacccgagatgcttggtgatattatcaaagatagatttgtgatagctgtctccgggactcacggaaaaacgacaacatccttcatgattgcaaagatatttcagtctttgggtaaagatataggttatctcattggaggcatatcacctgatttcccattctctgcaaaaataggtagtgatgaaatcttcgtaattgaggcagatgaatatgattctgcattttttgataagagatcaaaatttatacattactctccaaatattcttttgataaataatattgagtttgatcacgcagatatatttaacgatttagatgagatcaaaaaacaattccatcacttattaaaaattataccgagcagcggaaaaataattctttttaaccatgataaaaatg

SEQ ID NO: 312979 - DNA, 745 bp, Unknown
  Bacterial polypeptide expressing nucleotide sequence isolated from the Sargasso Sea
atagctaaatatttggttcaacaaaatattgatgtagctggctacgatcaacggaaatcatttataactaaccagttgaatcaagatggtataaaagttgattttaatttaagtaaattaaaatattctaagaaaatactttatatttattcatcagctatttcaattaaggaaacaacgctaaaagattatttagatagtgataatgttttatcaagaccagaatttcttaatatattatcaaaagaaaataaaattattggaattactggaactcatggaaagacatcaactactgcactgctagctcacatattccattataacgaaaggaatgtctcatacatatttggaggtattacctcattccatgggatagggggacattatggtgatcaggatcagcctattattttagaaacagatgaggcgtttaatacatttaaagacattaatatcgatgatttattagtaacaaatattgatgttgatcatcttgattattttaaaaattttaaaaacttgctcaatgcattcaagcatgtaatcgagaacgttaaaggtaatttagtactaaattttgatgatcagaacttaagagaattgaaaacaaccaataattgcattagttattcttcatcagaaattgctgatattcaaattcaatacccaaacaaaattattatagaaaatgaggaatatgttgtaactacaaaattaatcggcaatcattttatttcaaata

SEQ ID NO: 312980 - DNA, 495 bp, Unknown
  Bacterial polypeptide expressing nucleotide sequence isolated from the Sargasso Sea
ttagcattaactgttgggttacctatattaactataaaaaaaggacttagaaattttaaaggtgttcaaagacgatttaataaaatttttacttataataaagtagatttttttgatgattatgctcatcacccaacagaaataaaagaagtgatggaaggagttgaccatgtttataaggattttgaaaaaatttgtatttttcaacctcatagaatttcaagactgaaagatcttaaaaaagaatttacttattcttttaaaaatgctgataaggtaattttatttccaatttacgctgctggtgaaaaaattaaattaggatttaattataaagattttgcaaagcagataatcaaaaattcaaaagtgcaattatttcttgttgatgataaatttcaattagctaattacattaaaaataatatctatggaaaaaagatagtgataagtatgggagcaggaactatttcaagttggattagagaattacca

SEQ ID NO: 312981 - DNA, 298 bp, Unknown
  Bacterial polypeptide expressing nucleotide sequence isolated from the Sargasso Sea
atgaaaattgaattagcaagaactgaagttgttcattttataggaattggcgggattggaatgagtggactttctttgataatgaaaggaaagggatttaaagttcaaggaagtgatatttcagaaaataaaaatattgatagattaaaaaaagaaaaaataaaaatttttattggtcaaaaaaaacaaaatcttaaaaatgcaactatagttgtaatatcttcagcaataaaaaaaaataatccagaaatggctgaggcaaaaagaaaaaatatacctattattacaagaaggtaaa

SEQ ID NO: 312982 - DNA, 798 bp, Unknown
  Bacterial polypeptide expressing nucleotide sequence isolated from the Sargasso Sea
tgagaaaaaattttgggaactttatgaaacgtttgccgttttatggcgttgcttatgtctgtgcagacgatccagaagcacttgatctcataagggatattaaagcaaatgttgttacctatggtttaaatgagggggcagattatagagcattgcacgtaaagcatgagaacggtaaagaaatttttgacctttctatttctggtcgctcgaataacatcccattcgtacttaatatgtctggcgagcataatgtccaaaatgcgttggccgctattgcagtggctgtcgacttaggaatagagataaataccttaaaaagaagtttggaaatcttcggtggcattgataggagatttcaggtttacgagaaagtgaagctctcttcctctctggttacggttgtggatgattacagtcatcatccaacggaaataaaagcagttataaaaacaatacggcgtagatggcctaataatcggctagtaatcctttttcagccacacagattttctagaactaaggagttgtttgaagatttcgttaacgtcttatctgagtcagatatggttattctttttgaagtctacagtgcgggtgaaaaacagattgttggagcggatggaagaagcttagcgagatcacttaggaatcgtggaaactttgatccggtttttctggaccattttgtaagtttagatgtggcagtttcggcagttgcgaagaatggcgatgtaattgcagttataggagctggaagtataggacgtcttgttgaagagtttttggcagcgtaga

SEQ ID NO: 312983 - DNA, 803 bp, Unknown
  Bacterial polypeptide expressing nucleotide sequence isolated from the Sargasso Sea
aaaaaattttattaattttatagaaaacaccccatcattcggaaaatcatttatatgcctggatgataaaaataatagaaatattatcaaaaaacttaaaacaaaaaattacaatacatatggagtaaataaaaatgcgaattttcaaataaaaaatatttttcaaaattctaatttttccaaatttgatcttaaagtaaccttattaggtgcaaagtcttatttaataaaaaatataaaaattcctacaataggactacataatattagaaatgctactgctgctatcgctgtagctgtttcagttggtatatcgaaaaaaattattttaaaaggtttaaaagaatttaaaggagtccaaagaagatttacaaagatttttacttttaaaggagtaactttcttcgatgattatgctcaccatccaaccgaaataagagaagttttaaatggagtaaaaaatgtttacaacaataaagagataatttgtgtatttcaacctcatagaataagtagagtaaaaaatttaaataaagagttctcattttcatttaaaaaagctgatacggtagttttgtgtcctatttataaagctggagaaaatataaaattaggttttaaatatattaattttgcaaaatcaataattaaaaattcaaaggtaaatttaatattaattaaaaataactttgatttaattaaatatacaaagcaaaatatatttggagataaaattgtaattggaatgggcgcaggatctgtatctaattggataagagacctacccaatcacttaaaatgaa

SEQ ID NO: 312984 - DNA, 460 bp, Unknown
  Bacterial polypeptide expressing nucleotide sequence isolated from the Sargasso Sea
gtataattttaaaggagttgaaagaaggttttcacatttatttaattacaataaaattagtttttatgatgattatgctcatcatccaactgagataaactccgtgctgagtggtgttaaaagtgtttataaaagtaaagaaatagtatgtgtttttcaaccccacagaatttccagaataaataatttaaaaaaagaatttactaaatgttttaaaatggcagatacagttttattgtgccctatttacaccgctaatgaaaaattgagagtaaattttacatatgattcctttgcaaaattaataataaaaaattcaaaagttaaactaatacaaattgaaaatgagatacaattaaaaagatttgttaagcagaattcattcggtcaaaaaatttatataggtatgggagctggctcgatatctaactggatgaaaaatttaaaaaatattttctaa

SEQ ID NO: 312985 - DNA, 191 bp, Unknown
  Bacterial polypeptide expressing nucleotide sequence isolated from the Sargasso Sea
aatgaatattaaattagccaaagaagaaattatacattttgtaggaattggaggaatagggatgagtggtctcgctctaataatgaaaggtttgggatttaaagttcaaggcagtgatattgctaataataaaaacatagaaaggttaaaaaaaaaaaaaataaaaatattttttaatcaaaaaaaaaaca

SEQ ID NO: 312986 - DNA, 517 bp, Unknown
  Bacterial polypeptide expressing nucleotide sequence isolated from the Sargasso Sea
agctgcagtagcattttcagtgggtataccgtcaaaaattataaaaaaaggattggaaaaattttcaggtgttcaaagaagatttacaaaagttttctcctttcaaaatgttccattttttgatgattatgctcatcacccaacagaaattactgaggttctgaatggtgttagagaggtttataaaaaaaaggaaatagtgtgtatttttcagcctcacagagtttctagattaaaaaacctacacgaggatttttcaaaatcattcaaaaaagcagactcagtaattttgtgcccgatatatagagcaggagagaatattaatttaggatttacctacaataattttgcaaaaaaaataataaaaaactccaaagtaaagcttatattaattaaaaataatctagatttagtaaaatatgtaaaacaaaatatatatggtaataaaatagtcatagggatgggggctggatcaatttctaattggataagagatttaccaaagcatataaaataa

SEQ ID NO: 312987 - DNA, 301 bp, Unknown
  Bacterial polypeptide expressing nucleotide sequence isolated from the Sargasso Sea
atgaaaaaaattagtttaggtcaaaaagatattattcattttgttggtataggtggtatcggtatgagtggtttggctcaaataatgcataatatgggatttaaagttcaagggagtgatttagctagaaacaaaaatactttgagctgttctaaagttggaataaaaatttttgtcggtcattcaaaaagaaatgttaaaagttccactatcttagtaaaatcctcagcaataaagaataataataaagagttaagatatgcaagaaaaaaaaaaattccagtctatcaagagcagaaat

SEQ ID NO: 312988 - DNA, 191 bp, Unknown
  Bacterial polypeptide expressing nucleotide sequence isolated from the Sargasso Sea
tatgaaaattaatctaggaaaaaaagaaataatccatttcattggcataggaggcattggtatgagtggattggcattaataatgaaacaacttggttttaaaatacaaggaagtgatatttcagtaaataaaaacattgaaagactaaaaaaaagtaatattaaaatttttacaaaacacaaaatttcaa

SEQ ID NO: 312989 - DNA, 537 bp, Unknown
  Bacterial polypeptide expressing nucleotide sequence isolated from the Sargasso Sea
gaaatgcaacagctgcgtttgctgtagcgtcaagcattggtctttcaaaaaaaattattaaaaagggtttactaaactttactggtgtacaaagaagatttaacgaattatttaaaataagagaaacacttttttttgatgattatgctcatcacccaacagaaatagtcgaagttttaaattcggtaaaagaagtttataaaaacaaagaaataattgttatatttcagccgcatagaatttctagagttaatgatttgagaagagagttttcaaattcttttaaaaattgcgattcattagtactttgcccaatatattctgcaggagaaaaaataaaattgaaatttaactataaaaaatttgctaaggaaattatcaaaaattctaaagtaaaattatttatggttagaggagaagaagatttatataaatttattaatcaatcaatctatggaaataaaattgtaattggaatgggcgctggatcaatatctaactggatgagaaatttaaaaaataaaattaacaattgaa

SEQ ID NO: 312990 - DNA, 118 bp, Unknown
  Bacterial polypeptide expressing nucleotide sequence isolated from the Sargasso Sea
atggaccatcttaataaaaaaggaagaatttttttagttggtataggcggcataggaatgagtggaatagctgaaatacttcacaatttagggtatgaggtaacaggctcagatcaaa

SEQ ID NO: 312991 - DNA, 328 bp, Unknown
  Bacterial polypeptide expressing nucleotide sequence isolated from the Sargasso Sea
atgaaaattaatttaggaaaaaatgaacttattcattttgttggtattggaggaataggtatgagtggtttagcattgattatgaatggcttaggttacaaagtccaaggtagtgatattgctaataatcgaaatattgaaagattaagtgaaaaaaaaataagggtatttttaaatcataaaaaagaaaacataaaaaaaacgactgttcttgtgatttcctcagctataaaaaaaaacaatccagaattagttgaggctaacaaacaaaatttaccaatttatacaagaggagatatgttaggtcatatagtatctttcatgagga

SEQ ID NO: 312992 - DNA, 556 bp, Unknown
  Bacterial polypeptide expressing nucleotide sequence isolated from the Sargasso Sea
cttcataatattagaaatgctactgcgtctgctgctatatgctattccataggtattcccaaaaaaataattagacatggcttattcaaatttaatggtgttcaaagaaggtttactcatttatttgatatgaatggttctaaattctttgatgattatgctcaccatccaacagaaatagaatcagtattagagggtgtcaggaatgtttataaaaaaaaccaaattttttctatttttcaaccacatagaatttcaaggttaaattctttgaagaaagaattttcaaaaagttttataaattcagatactgtcttgctatgtccaatttatagagcaggggaaaatataaagcttaaattttcatatgaaaaatttgcaaattcaataattaagaattcaaatgtaaaattaatattaattaaaaatgaactagaattatataagtatataaaaaatgtagcatacggaaataaaatttttattggtatgggcgctggctctatttcaaactggttaaaaaacataaagattagattaaatgcatttagatgat

SEQ ID NO: 312993 - DNA, 193 bp, Unknown
  Bacterial polypeptide expressing nucleotide sequence isolated from the Sargasso Sea
aatgaaaattaatcttggaaagactgagctgatacactttgttggaattggtggtattggaatgagtggtttagcattaataatgaatagtttaggatttaaaattcaaggtagtgacattgcagataataaaaatcttacgactttaagaaaaaaaaaaataccaatatatttaaagcacaacaaaaaataa

SEQ ID NO: 312994 - DNA, 765 bp, Unknown
  Bacterial polypeptide expressing nucleotide sequence isolated from the Sargasso Sea
ctacagggaagtctattatttgtttagataataaaaatttaaaaaaggtattaagcaaaataaaaaataaaaacatccttacttatggtgaaaataaatattcgaattatagaatttcaaatataaagtataatactaatttctctagttttaatttgagttttaaagatataaataaaaaaagaaaaactattgagaatattcaacttaaacttttgggaaaacataatgttttaaatgctgcagctgcaatttcagttagtttaaatttaggtattaatcaaaatattttaaaaaaatcgttgaaaaatttttcaggagtacagagaagaatgactaaaatttttacaaaaaatggaaatgattttttcgatgattacgcccatcatccaacagaaataaagtctactctagatagtgttaaaaacgtatttaaaaacagaaagataatctcaatatttgaaccacatcgtttttcaagagttttatctttaaaaaaagaatttgctaaatccttcttgaaatcaaacatagtcatgctttgtccaatttatgcggcgggtgagaagaagagttataaatttagtatggtgaaatttgcaaaattaatttcaaggttttcaaaaactcaagtaataataattaacaattttaaggaaattaaaaattatttaaaaaaaaatttattaaataatgaaataataataggtatgggtgctggacaaatttcaaagcaaatgagagaacttaaaaattttttatgag

SEQ ID NO: 312995 - DNA, 245 bp, Unknown
  Bacterial polypeptide expressing nucleotide sequence isolated from the Sargasso Sea
aatgaaaattaaattagcaaaaacagaattaatacattttataggcattggtggcattggcatgagtggtttagctctaataatgaaaggtaaaggttttagagttcaaggtagcgatatatctattaataaaaacatagaaagacttaaaaaagaaaaaataaaagtctttattggacaaaaaaaagaaaatataaacagtgcaacaatattagttgtatcctcagctattaaaaaaaataatc

SEQ ID NO: 312996 - DNA, 649 bp, Unknown
  Bacterial polypeptide expressing nucleotide sequence isolated from the Sargasso Sea
atgaaaattcatatcctaggaatctgcggaacatttatgggaggattggctcgaattttaattgagtccggtcataaggttactggatcagataacaatttttatcctccaatgtcagatcaactaagagaattagatgttgaattaacaaaaggatttgagccatcctcaatgcctgaagctgatctatacgtaattggaaacgcactttctaggggaaataaatgcgtggaagtaattttaaacaaaaacctcccttataaatctggacccgagatgcttggtgaaattatcaaagatagatttgtgatagctgtctccggaactcacggaaaaacgacaacatctttcatgattgcaaagatatttcagtctttgggtaaagatataggttatctcataggaggcatatcacctgatttctcattctctgcaaaaataggtagtgatgaaattttcgtaattgaggcagatgaatatgattctgcattttttgacaaaagatcgaaatttatacattactctccaaacattcttttgataaataatattgagtttgatcacgcagatatatttaacgatttagatgatataaaaaaacaattccatcacttgttaaaaattataccgagcagcggaaaaataattc

SEQ ID NO: 312997 - DNA, 652 bp, Unknown
  Bacterial polypeptide expressing nucleotide sequence isolated from the Sargasso Sea
tttgaaaaaataccatccgttggtaaagggtttatatgtagtgatgatcacaatcttaaaaaagttctaaaaaaatcaataaacaaaaatttttatacatatggtgaaaataaaacgtcaaattttcaaataataaatataaagcaaacagctaaattctctaatttcgatataaaaatcaatatacctagtaaaaaaaaaataattaaaggaattaaacttccaatgattggtatccacaatattcaaaatgcaactgctgcagtttctttagcatttacaattggactacctgaaaagtatatcaaacttggactttacaattttaaaggagtgcagagaaggttttctcatttattcagtcataacaacataagtttttatgatgattatgctcatcatccaacagaaataagttcagtcctaagtggcgttagaaatatttataaagacaaagaaattgtatgtgtttttcagcctcacagaatttcaagagtaataaatttgaaaaaagaattttcaaaatgttttaaattggcagatacagttttattatgtcccatatacacagccaacgaaaaaataaaacttaattttacttatcattcattcgcaaaattaataataaaaaattctaatgttaaattaatac

SEQ ID NO: 312998 - DNA, 610 bp, Unknown
  Bacterial polypeptide expressing nucleotide sequence isolated from the Sargasso Sea
catggtaaaactaccaaataaagataatattcaaattaaagatattaaaatacctctattaggtattcacaatatcagaaatacagtaggagcaatcggagtagctttaacagttggtataccaattcaaaaaatcaaaagtggattaaataattttaaaggtgttcaacgtaggtttaataaaatattttcatacaataatattgatttttatgacgattacgctcaccatccgaccgagattaaagttgtgcttcaaggtgtgaaacaagtctataagaattatgaaaaaatatgtatttttcaacctcatagaatttctagagtgaaagatttaaaaaaagaatttagtaatgcatttaaagacgccgacaaagtaattctttgccccatatacacagctggagaaaaaatgaaattaggatttagttatgaaagttttgctgaaaagatcattaaaaactctaatgtaaaattatttatggttgaaaataataatcaattagcaaaatatttaaaacaaacaatgtacggaaaaaaaattgtaatatctatgggtgctggatcaatttccaattggataaaagaattaccagatttaatgaaatga

SEQ ID NO: 312999 - DNA, 721 bp, Unknown
  Bacterial polypeptide expressing nucleotide sequence isolated from the Sargasso Sea
aagattataaataaagttaaaaataaaaatattttgacttatggagaaaatccaaatgcaaattttcgagtctctaatataagatttaaattcaattacactgtctttgacttagattataaaagtcaagatagaaaaaaaataaaaataaaaaatatttacttaaaactcttaggaaggcacaatgttttaaatgccgtcgcagctatagtagtatgtttaaacattggtgtaagcacaagaattataaaaagttctttgaaaaaattttcgggggttcaaagaagaatgacaaaaatattcacaaaaaataataatgatttttatgatgattatgcacatcacccaaccgaaatctcctcaacattaaatgggataaagaatgtatcgaaaaaaaggaaaattatatctgtttttgaaccacatcgctactctagagttttatctttaaaaaaagaatttgctaaatcttttgttaaatctaatatagttattctttgccctttgtatgctgctggtgaaaagaaaaattctaaatttagccaaattaattttgcaaaattaatttctaaaatgtcaaaaacccaagtaattgtattaaaaaaaaatgaggagttgaaaagatacttaaaaaagaatttatttgaagatgaaattgtagttggcatgggcgcaggattaatttcaaaatggatgagggatttaaaagatattttatgaa

SEQ ID NO: 313000 - DNA, 829 bp, Unknown
  Bacterial polypeptide expressing nucleotide sequence isolated from the Sargasso Sea
aagtgatattaataagaacaaaaatattgaaaaattaaaaaaacagagtgttagagtttttattggtcacaaaaaacaaaatttaaaagatgttacaattgtagtaatttcctctgcaattaaaaaaaataatccagaattactagaagctaaaagaagaaaattaccaattataagaagagggaagatgttagcaaatcttgtatctttaatgaaaaatattgtagtagttggctctcatggtaaaacaactacgacatccttggtaagttctatttttgaaaatactaagttagatcctacaattattaatggaggcataataaattcaattaaaagtactgcaaaattaggtaaaagtgattggtctatcttagaagcagacgagtctgatggaagctttactcatatttccccaacatactcaattattacaaacatagatagagaacatatggatttttataaatctatgaatgatttaaaaaatcatttcatacactttattaaaaaagttccctcgttcggaaaatcttttatttgtattgatgataaagtgaataatgaattaattaaagatataaaaaataaaaatttttatacttacggaattaagtctaaagctaattttcttatcaaaaatattattcaaaacaaacatttctctaagtttgatttatttgtaaatttaccaaataaaaaaaaaataattttaaaaaagtttcaaatcccattattaggtattcataatattaaaaactctgttgctgcaattgcagttgctcttaccgttggaattccagtatctaatattaaaaaaggtctaaaa

SEQ ID NO: 313001 - DNA, 568 bp, Unknown
  Bacterial polypeptide expressing nucleotide sequence isolated from the Sargasso Sea
tttatcaactaatctattaggagaacacaatgtccaaaatttaaccgcagtcctctctattatagacgacttaggatataaaataaaaaaatcacatatacttagttttaaaggaactaaaagaagaatgaatattcttggtaaattaaaaaaaacaatatttattgatgattatgcacatcatcctactgaaatagaaaagttaattaatgtcatatctttatataaaaaaaagaatatttgtttaattatagaaccacatagatattcaagattaaatgatttatataacgaatatttaaaagtattaaaaaatataaataatttaattatattaaaaacttatgaggctggagaaagctataagaagggtatgaaaaattcaaaaaacttagttaatgatttgaatgttttaaataatcaaaaaactaaatatattgataattatagtgatttatttagtttattagatcaatatgtgaaaaataaaagagaaaatatgattatttctgctggagcaggtgaaatttcaaaccaaatccgttttttttatgactctaaaaaataa

SEQ ID NO: 313002 - DNA, 632 bp, Unknown
  Bacterial polypeptide expressing nucleotide sequence isolated from the Sargasso Sea
atattctttttttgatctattgattaatgttccaggaaaaaataaaaaaactattaataaaattaaaattcctttgataggtaaacataatataagaaatgcaacagctgcgtttgcagtagcatcaagtattggtctttcaaaaaaaattattaaaaagggtttgttaaactttactggtgtgcaaagaagatttaatgaattatttaaaataagagaaacacttttttttgatgattatgctcatcacccaacagaaatagttgaagttttaaattcggtaaaagaagtttataaaaacaaagaaataattgttatatttcaaccgcatagaatttctagagttaatgatttgagaagagagttttcaagctcttttaaaaattgcgattcattagtactttgcccaatatattctgcaggggaaaaaataaaattgaaatttgactataaaaaatttgctaaggaaatcatcaaaaattcgaaagtaaaattgtttatggttagaggagaagaagatttatataaatttgttaatcaatcaatctacggaaataaagttgtaatcggaatgggtgccggatcaatatctaactggatgagaaatttaaaaaataaaattagcaattgaa

SEQ ID NO: 313003 - DNA, 892 bp, Unknown
  Bacterial polypeptide expressing nucleotide sequence isolated from the Sargasso Sea
acctatgtagtaattactaatattgatagagagcatatagatttttatagaacatttgataatttaaatagggcttttagaaattttgtggagaatattcctttttacggtgttgcctttatctgtatagactctccggatacagaaaacttgtgtaaggatattaaatataggaaattaattacttatggatttaatagaaaatctgacctgatgatttctaatgtaaaggtcaaaaattctctcacttattttgatattaccataaataaaagtaatttatctaaaaataaatttattaaaaatttagtaattccaattcctggagatcataatattaggaatgcatgtgcatcaattgcagttgctttagaattaggtattaaagaaaaaactatcaaagatgtgttaaaaaattttagaggagtagaaagaaggtttagtttcgtaggctcagttaataatattaaaattatagacgattatgctcatcatcctacggaaataaaaaatactttaaaagcagcaagattattatgtaatggtaaactaattgttgtattcgaacctcatagattttctagaataatagatctatatgatgaatttattaattcattttttgatgcagatatattatttgttacaaagatttatagtgcaggtgaaaaacaaattgcagacataaatgaaaaaataatagcaaattctatacagaaaataggccataaaaatgtaaaatgttttaaggatgagaaatttatggaagtagaattatctgaagtttcttcaagtaatgattttataatttttctaggtgcaggatcaatttcaaaaaaggcaagaagtatggaagaatctatgttaaaaataattaggaaagaatttaaga

SEQ ID NO: 313004 - DNA, 286 bp, Unknown
  Bacterial polypeptide expressing nucleotide sequence isolated from the Sargasso Sea
atgaatataaacttagcaaagtccgaaattatacattttgtgggaataggtgggattggtatgagcggattagctctaataatgataggactaggttttgaagtacaaggaagcgacaaatctcttaataaaaatgtagaaaggttaaaaaaaagacgtattaaattttttttaggccactcttcatctaatattaaaaaagcaacaatcttagtaatttcctcggcaattaaaaaaagcaatatagaggtaagagaggcaaaaaaaagaaatttaccgatttaag

SEQ ID NO: 313005 - DNA, 842 bp, Unknown
  Bacterial polypeptide expressing nucleotide sequence isolated from the Sargasso Sea
caactaacagaattagatattgaattaacaaaaggatttgagccgtcctcaatgcctgaagctgatctatacgtaattggaaatgcactttctaggggaaataaatgcgtggaagaaattttagacaaaaacctcccttataaatctggacccgagatgcttggcgaaattatcaaagatagatttgtgatagctgtctccgggactcacggaaaaacgacaacatcctttatgattacaaagatatttcagtctttgggtaaagatataggttatctcataggaggcatatcacctgatttctcattctctgcaaaaatgggcagtgatgaaatattcgtaattgaggcagatgaatatgattctgcattttttgacaagagatcgaaatttatacattactctccaaacattcttttgataaataatattgagtttgatcacgcagatatatttaacgatttagatgagataaaaaaacaattccatcacttattaaaaattatacctagcagcggaaaaataattctatttaaccatgataaaaatgcattagatgttatcaatgaggggtgctgggcagatattattgaaattaatggaaatgccagcagggctggctttgattcgtcttcttcagtgattaaatttgatggaaagtcagtctgtataaacgatttacctttttatggttctcataacaatctaaatgcagctgcagcaatcatttctgctgcatcttatggaataaatcttaatgttgctcataacgggctaaaagattttagtggcgtacttcgcagactcgaagagaaggggacttttaatggaataacaatact

SEQ ID NO: 313006 - DNA, 415 bp, Unknown
  Bacterial polypeptide expressing nucleotide sequence isolated from the Sargasso Sea
tttgtttgatataaataatacaccattttttgatgactatgcacaccatcctacagaaatttcatgcttattagaaggtgtaagaaaagtgtacaacaaaaaagagattgtatgtatttttcaacctcatagattatcaagactaaaaaaattaaaacacgaatttagtaaatgtttcagtaaagcagatacaatatttctctgtccaatatataaagcaggcgaaaatataaaattaggtttttcatattattcttttgccaaattattagcaaagaattccaaagttaatttaattatgcttaaggatgaatttgaattaaaaaaggttacaaagaatttagcttttggcaataaaatttttatagctatgggggctggctctatttcgaactgggttagaaatttaaattag

SEQ ID NO: 313007 - DNA, 841 bp, Unknown
  Bacterial polypeptide expressing nucleotide sequence isolated from the Sargasso Sea
ggtcataaggttagtggatcagataataatttttatcctccaatgtcagatcaactaagagaattagatgttgaattaacaaaaggatttgagccgtcctcaatgcctgaagctgatctatacgtaattgggaatgcactttctaggggaaataaatgcgtggaagaaattttaaacaaaaacctcccttataaatctggacccgagatgcttggtgacattatcaaagatagatttgtgatagctgtctctgggactcacggaaaaacgacaacatccttcatgattgcaaagatatttcagtctttgggtaaagatataggttatctcataggaggtatatcacctgatttctcattctctgcaaaaataggaagtgatgaaatcttcataattgaggcagatgaatatgattctgcattttttgacaagagatcaaaatttatacattactctccaaatattcttttgataaataatattgagtttgatcacgcagatatatttaacgatttagatgagataaaaaaacaattccatcacttattaaaaattataccgagcagcggaaaaataattctatttaatcatgataaaaatgcattagatgttataaatgagggatgctgggcagatattattgaaattaatggaaatgccagcagggctagctttgattcatcttcttcaataatacaatttgatggaaaatcagtttgtataaacgatttacctttttatggttctcataacaatctgaatgcagctgcagcaatgatttctgctgcatcttatggaatagatcttaatgatgcttatgacgggctaaaagattttagtg

SEQ ID NO: 313008 - DNA, 610 bp, Unknown
  Bacterial polypeptide expressing nucleotide sequence isolated from the Sargasso Sea
tatggataatcaaagaagtaaaaaatatgccttttgcattaggcagcctggttttcataatatttataacgctacagcttctatagctgtatgtatagaagaaggtctaactataaatgcaataaaaaaaggcattaaagaatttacaggagttggcagaaggtatgagaaggcagacattgaaattaattcgaataataaaattctaatagatgattatggtcatcatccaatagaaattctctctaatataaaagcatgcaaagaggaatttcctagaaaaaagatatgtatgatatttcaacctcatcgattttcaagaacagcacaattattcgatgattttattcaagttcttaaaaaagttgattcattgataatgctggatatttatgctgcaagtgaaaatcctatcaaaggcattgattcaagaaccattgttgaaacacttaaacaaaacggacataaagatgtttcgtatatcaaaaaacataatgatgtaattaaacttattcaatcaaaagaaaatagtttcgatgttcttattacccaaggagcaggcagtgtttcaagcgtatgcgaattaataaaagaaacatggaagaaataa

SEQ ID NO: 313009 - DNA, 673 bp, Unknown
  Bacterial polypeptide expressing nucleotide sequence isolated from the Sargasso Sea
atatgaagtttctggatgtgattttaatacctatccgcccatgtcagatcttttacaaaatcaggatatagatttaattactggctatgatgttaaagatttaccaaaagcagattcttatgtaattggtaatgccctttcaagaggcaacccgcttatagaagaaatattaaataaaaagaaaaactatatttctggaccagattggatttatcagaatgtcctcaaagaaaggagggtaattgctgtttcaggtactcatggtaagacaacaactacttcgatgattgcttggattttagaagatctaggatataacccaggatatttggtggcaggtaatcccaaaaattttggtaaatcttcatcattaggttcaaaagatatttttgttattgaagctgatgaatatgacacagctttttttgataaacgggctaaatttattcactacagacctgaagttttagtcattaataatttagaatttgatcatgctgatatttatcaagatcttgaacaaatcaagattcaatttcatcatttagttagatcaatgtcttcaaactcttccattgtgactcctactaacaacaaagctatagatgaagttttatctatgggcttgtggagtaatttagttcaatatggaagtgaaagtgaatcaaagtat

SEQ ID NO: 313010 - DNA, 200 bp, Unknown
  Bacterial polypeptide expressing nucleotide sequence isolated from the Sargasso Sea
aatgaaaattaatttaggcaaaactgaacttatacattttattggaattggaggaattggtatgagtggtttagctataattatgaatggattggggtttagagttaaaggaagcgacatatcaaacaataaaaatattgaaagattaaaagaaaaaaaaattttaatatttttaaaacataataaaaaaaatttaaaaa

SEQ ID NO: 313011 - DNA, 853 bp, Unknown
  Bacterial polypeptide expressing nucleotide sequence isolated from the Sargasso Sea
gtcaccaatatagaatatgaacatgttgatcattataaaaatatagaagaattaataaaaaccatgcaaaaatttgagcaaaactgtgaacaattaattgccaattttgactgtaaaaacgtaaaaaataatataaaaggatctatatggttctcaacgaaaaaaattcatcaaatggattttgcactcattcctaaagaatctaatggatatgaaataattgcagaatattatgaaaaagaaaaatttatagatatcatacaagtgcctattcctggcatacacaatttaagtaataccattgcagctattgctgcatgtagaacagctggtattgtttttaaggatcttaaaaaagctataaagcttttaaagttacctgaaagaagatttgactacaaagggttatggaaaaacagattaatagttgatgattatgctcatcatcctagtgaaattgatgcggcaatatcaatagcctcaagtatcattaaaacaaaaaataatatgtctaaattatctccaaaaagattagtaagtgtatttcagcctcatcgatttacaagaactaaaacatttaaaaaagaattagcaaaaagtctcgttaaatccgatttagtatttgtaactccaatttactctgctggagaagatttaattgaaggaatcgataatcattctataggaagtgaaattaaaaaattaaaccctaatatagaaatctatactccaaataataataaagaattaatcaagctaatcaaagagaaaacaatcgaaaatgacttaattttaataatgggagcaggagatattaatactgtatttacgaatttatttttagaactaatcg

SEQ ID NO: 313012 - DNA, 241 bp, Unknown
  Bacterial polypeptide expressing nucleotide sequence isolated from the Sargasso Sea
aatgaaaattaaattaggaaaaactgagctaatacactttataggcatcggtggtattggaatgagtggattagccttaataatgaaggaactaggttttaaagtccagggtagtgatatttcaataaataaaaatatagaaagattaaaaaaaaataaaattaaagtttttgaaggacataaaatttcaaaccttaataaaacaacagttttagtaaaatcttcccgcataaaaaaataa

SEQ ID NO: 313013 - DNA, 667 bp, Unknown
  Bacterial polypeptide expressing nucleotide sequence isolated from the Sargasso Sea
atgaatcaaaaaccatcaggcaaactacgaagaggatggacaacaggggcgtgtgctgctgcagcaactaaggctgcttaccaggcactgatcacaggtgatttcccagatactgtaagtattgttttgccaaaaggcgaggtgccagttttccagctttttaacaaagaaataggtcctgattttactgcagcaagcattattaaagacgctggtgatgaccctgatgtgacagacagagctgaaataaaaattaaagtcatgtgggggatcaagggatcaggagtggttttcaaagctggtcccggtgttggaactgtaactaagtccggacttaagctggaaattggtgaacctgcaatcaatccagtccctcaacaattaatgagaaatgtagtcactgaaattgctgaaaaatttcaggacaccggagatctagtaattaccgtatccgttccaggtggtaaggaactagctaagaaaacatggaatccaaggcttggtattgttggaggaatttccatcctaggcacaacaggaattgtaataccttattcatgttctgcatggatacattctatccatcgaggcattgacgtggctcgcgcaaattttctgcctcatgttgcaggttgcactggttccaccagtgaaaaagcccagtaaa

SEQ ID NO: 313014 - DNA, 536 bp, Unknown
  Bacterial polypeptide expressing nucleotide sequence isolated from the Sargasso Sea
tattagaaacgctactgcagcagcagccgtatctatcactattggaatatcaataaatattattaaagaatctttaagtagatttgagggtgttcaaagaagatttaataaagtttttacttttagagatgttaatttttttgatgactatgctcaccatccaacagaaataactgaactaattaacggggttaataaagtttataaaaaagaggaaatatattgtgtatttcagccccatagagtttcaagattaaatgatcttagaaaagaatttagtttaagtttcaaaaaagctgatgctgttattttgtgtccggtatacaaggcaggagaaaaaataaagcttaattttaattatttaagttttgcaaaagaaattattaaaaattcaaaggtaaaagtttacttaattaatgatcaatatgaattaggtaaatttattaaacaatatattcatcctaataaagttgtaattggaatgggtgctggttcaatttctaattggatgagacaattaccgaaactattatgaa

SEQ ID NO: 313015 - DNA, 234 bp, Unknown
  Bacterial polypeptide expressing nucleotide sequence isolated from the Sargasso Sea
aatgaaaattaaattagcaaaatcagaattaatacatttcgttggtataggaggaataggcatgagtggtttggccttaattatgaatcagcttggatttaaaattcaaggtagtgatatatcttataacaaaaacatagaaagattaaaaaaaaataaaattaagataataattggacacaaaaaacaaaatatatcaaattcaactattttagttgtatcttcagcaattaa

SEQ ID NO: 313016 - DNA, 472 bp, Unknown
  Bacterial polypeptide expressing nucleotide sequence isolated from the Sargasso Sea
atgcttaaaaaaagaaatgttcattttattggtattggtggaataggaatgagtgcaattgctgaaattcttcatggcaaaggtttcaatgtttctggaagtgacataaacgataatttgattattaaaagattaaggaaaaaaggaattaaaattttttccagacacacacaccaaaatgtaataaatgcagacatagttgtatattcatctgcaattaagttttctaatttagagatcaagtcagcacttaaaaaaaaaattcctctgtattctagagcaatgatgcttgctgatgtaatgagactcaaatcttcaataacggtatcaggatctcatggcaaaacaacatctacctcacttatttcaagtatactagaaggtgccaattttgacccaacaataataaacgggggtataataaataaaattggtgcaaatgcaaagttaggtaagggtgaatggattgttg

SEQ ID NO: 313017 - DNA, 716 bp, Unknown
  Bacterial polypeptide expressing nucleotide sequence isolated from the Sargasso Sea
catgattgcaaaaatactaagtgttgcaaatttaagcccaacatatattgttggaggaaaagttttaagtacagatgagaattctgacttaggtaaaggaaaatatattgtcgcagaagcagatgagagtgatggatcatttgttcaccttcaacctgatgtcgctgttttaacaaatatagatgatgatcatctggctcattttaataacatctttgaaaatcttttagattcgtttgttttgttttcagaaaacgtacctttttatggatatctgataatcaatggcgatgataagaacataaaaaaaatctcaaaaagaatatctagatcacaagttacgtttggagaatcgaaagaatgtgattataaaattaccaaaatcatttcaaaaaacggtaagcaagattttcaaatttttgataaaaaaacaagaaaggttcataaatttaaaattaatcttcctggtaagcataatgtttttaatgcaacagctgcaatcgctgttgcgttggaggaaggcatttcaattagctcaataaggaatggcattaaagaatttacaggggttggaagaagatatgaaaagcatgatattaaaattgatgaaaaatcattagccttaattgatgattatggtcatcatccgttagaaattgaatcaaatataaaggcgtataaagaggaatataaaaataaaaaagtatgtatgattt

SEQ ID NO: 313018 - DNA, 787 bp, Unknown
  Bacterial polypeptide expressing nucleotide sequence isolated from the Sargasso Sea
atgaaaattcatattttaggcatttgtggcaccttcatggggggccttgctcagattcttgttgaaaaagggcattcagtttctggaagtgataagcaattttatcctccgatgtcagatcagcttgattccttaggtgtagatatggtgatgggttatgaagaatctgatttgcctgctgccgacctttatgtaattggtaatgcattaagcagaggtaatccgtctgtcgaacatatcctcaatcacaagcttgagtatacttcgggtccaaaaatattgggggagattattcaagataaaacaataattgctgtatccggaacacatggcaaaacctctacatcttttttaatttgtgaaatttttaaagctagaggcattgatgttggatttttggttggaggtgttagcgagtcatttaaaaattctgcacgccttggatcatctaatttttttgtcgttgaagccgatgaatatgattcagccttttttgataagcgttcaaaattcatccactatcatcctcatactttcatcataaataatattgaatttgatcatgcggacatatttgaagacttatcagatatcctgaaacaatttcatcatgcagtgagaacagttccagaaaatggtcacattttatttcatggcaaagataaaaatattttaaaactaatagatatgggttgttggtcaaacttgcatcaaataggcgataaagaaaatatacagcttgcaatcgaggagggcgtaatcaaatatgattccgaaaaaatataat

SEQ ID NO: 313019 - DNA, 447 bp, Unknown
  Bacterial polypeptide expressing nucleotide sequence isolated from the Sargasso Sea
tcctctattaggacttcataatatgaaaaattctgtagccgcagctgcattagctttaactgttggtttaccaataaataatataaaaaaaggacttaaaaattttaaaggggttcaaagaagatttaataaaattttcaattttaatgatgttgatttttacgatgattatgctcatcatccaacggagattaaagaagtacttgatggagtaaaaaatgtttataaagaatatgaaaaagtatgtattttccaaccacatagaatatcaagattaaaagatcttaaaaaagaatttacttttgcttttaagaatgcagataaagttgttttatttccaatttatactgctggagaaaaattaaaccttggatttagctatataaattttgcaaaagaaataattaaaaattcaaaagttcagctatttttaattgatgataaatt

SEQ ID NO: 313020 - DNA, 137 bp, Unknown
  Bacterial polypeptide expressing nucleotide sequence isolated from the Sargasso Sea
aatgaaaattaaattagcaaaaacagaacttatacattttgtaggaataggtggaataggcatgagtggcttagcacttataatgaaaggtaaaggttttaaagttcaaggcagcgatattacaaataataaaaata

SEQ ID NO: 313021 - DNA, 334 bp, Unknown
  Bacterial polypeptide expressing nucleotide sequence isolated from the Sargasso Sea
ggcagttgtgcagccgcaccgttatagccgtctctctgctttattcgttgatttttgtggctgtttccatgacgcagatgaggtactcgttgccaatgtttatgctgcaggagaaacaccaattgagggtgttgatcgcgacgcgttggttagtggattgcgtgatcatggtcacaaagccgccagcccattgttacaccaagatgatttggccggtgaaattgttgcccgcacatctagtggtgatctggttatgtgccttggcgccggagatattaccaattgggcggctaatctaccagatgagctagaaaaactcggaggaacagaatga

SEQ ID NO: 313022 - DNA, 748 bp, Unknown
  Bacterial polypeptide expressing nucleotide sequence isolated from the Sargasso Sea
tatttgtatagatagtaaaaatattaaaaaaatatttagtagaattaagaataaaaatattcttacttatggtgaaaataaaaatgcgaactatcgaatttctaaaattagatataaagttgactattcaatttttgatttaagttatagagatataacaagaaggaaaaaaacaattagaaatattcagctaaagcttttaggaaaacataatgtattaaacgctgctgcagctattacagtatgtttaaatttaggagttgatcaaaatattatgaaaaaatctttgaaaaaattttccggagttcaaaggagaatgacaaaaattttttctaaaaataagaatgatttttacgatgattatgcccatcatcccactgaaatagcttctattttagaaggagtaaaaaatgtctataaaaaacgaaaaataataactatctttgaacctcatcggtattcaagagttttatctctaaaaaatcaatttgccagatcatttgaaaaatctgatttagttttaatttgtcctatatacccagcaggtgaaaaaaaagactctagatttaaaattacagagttttcaaaacaaatttcaaaattatcaaaaactcaagtgattataataaaaaactttaaagagatccaaaattatttaaaaaagaatttagtaagtgatgaaattattataggaatgggtgcaggtgttatttcaaaacatatgagagaactagaaacttttttatga

SEQ ID NO: 313023 - DNA, 793 bp, Unknown
  Bacterial polypeptide expressing nucleotide sequence isolated from the Sargasso Sea
gatgcaatcaaatcattcaaatttgaagtcaatattttttgcgggaatatgcggaacaggcatggcatcacttgccgtgctgctgaaattacgaggccatattgttagcggttccgatgaaaacgtttatcctcccatgagtgatttacttgcagaaaataatgttgcagtacatgagggattttcaccaaaaaaccttgagcccctgccggaccttgttgtaatcgggaatgctctttcaagagggaatcctgaagttgaagccatacttgatttgaaacttccgtatatttcaatggctgaattgctgaaagagcatttcatacgtggaaaaaagtctctggttgtcactggaactcatggtaaaacaactactacctcattgcttgcctgggtttttgaaaccgctgcgaaaaaccccggttttatgataggaggtattgcagaaaattttggaaccagctgccgtgatacaaaaggcagtttttttatcaccgaaggagatgaatatgatacggctttttttgacaagcgttcaaaatttttccattaccttccggaacaattaattcttaacaatcttgaatttgaccacgctgatatattcaattcacttgatgaaatcaaaaaagcatttcggctgatgcttcgtctcattccaaagagcggtctgattgcagcaaatggagacgatctaaatgttcaggctgtactgcatgctgctaactctccagttataagatttggttttggagaaccatgtgatgtaagagtagatagcataaaaaacagc

SEQ ID NO: 313024 - DNA, 550 bp, Unknown
  Bacterial polypeptide expressing nucleotide sequence isolated from the Sargasso Sea
taatgttcttaatgcagctgcagcgattgtattatgtttacaagaagggatagcagttaaagtcatacaggattctctgtctaactttatgggtatagatagacggatgcaaattttaggtgagaagaaaattggaagtagtacctgcctttacatcgatgattatggacatcatccaactgaaataaaaaaaaccattcaggcaataagaacttcttttcctgactttgatctaaaaatggtttttcaaccccatagatttacaagaactaaagatttatatgaagaatttattgaagttttaagccatgtagatgagttatttcttttggatatttattctgctggagaaaatccaatagaaggcatcaatagttcaagcttacaaaattctttgattagatcaggttttgataatgtaaagttattgaatagcaatgaagtagctaaagaatatgataaagatttagctaaagataccatctttgttttccagggtgcaggtgacatatcctccattagccaaagtatatttgaggaatttaaataa

SEQ ID NO: 313025 - DNA, 472 bp, Unknown
  Bacterial polypeptide expressing nucleotide sequence isolated from the Sargasso Sea
catgcatatacacatactgggcatctgcggcacgttcatgggaggcctcgcggccttggcgcgcgaggcagggcacaaggtgacgggctgcgacgccggggtctacccacccatgagcgaccagctccgcgcgctgggcatcgacctgatcgaaggcttcagcgccgaccagctcgcgcttcagcccgacatgtttgtggtgggcaatgtggtcagccgcgcccggttggccgacggctcccccaagtttccgttgatggaagccattctggacgcaggcctgccgtacaccagcggcccccaatggctggccgagcatgtgctgcagggccgccatgtgctggccgtggctggcacgcacggcaagaccaccaccacctcgatgctggcgtggattctggagtcggccgggcagcagccgggctttctgatcggcggggtgccgctgaactttggcgtgtccgcgcgcctg

SEQ ID NO: 313026 - DNA, 373 bp, Unknown
  Bacterial polypeptide expressing nucleotide sequence isolated from the Sargasso Sea
atgaatttgcattcagactctcctctcaaaatttacttttccgggatctgcgggacagccactgcctccttggccatcctcatgaaaaaccgtggtcatgaggttcaaggttctgatgaaaacatttatccgccgatgagcgatcttcttgaacaaaaccagattagaatcgattccggcttccatcaatccaacctggagcctaaacccgatatggtcgtgatcgggaatgctctttcaagagggaatcctgaagtagaagccgtactttcccttagaatcccatacatttctgttccagaactgctcaaaaatcatttcattcaaaatcgctgttctttggttgtcagcggcacccacggaaaaacgacca

SEQ ID NO: 313027 - DNA, 199 bp, Unknown
  Bacterial polypeptide expressing nucleotide sequence isolated from the Sargasso Sea
aatgaaaattgatttaggaaaaaatgaacttattcattttgttggaattggtggaataggtatgagcggtttagcactgattatgaatgggttaggctacaaagttcaaggtagtgatattgcacataatcgaaatatcgaaagattaaatgaaaaaaaaataaaggttttattaaatcataagaaagagaatataaaa

SEQ ID NO: 313028 - DNA, 642 bp, Unknown
  Bacterial polypeptide expressing nucleotide sequence isolated from the Sargasso Sea
atatttttaatataatccagagtagaaaatattcgaaatttagtattaggattaaaataccaagcaaaacaaaaattataaaaaatatttcaatacctttattaggtttgcataatataaaaaatgcagcatctgcattggcagtagcattttcgataggtgtatccgataaaataatcaaattagctctaaaaaattttaaaggtgttcaaagaagatttaattacttatttgaaataaataaagtcccattttttgacgattacgctcatcatccaacggaaatttcatctgtattagatggtgtaagcaaggtatatgataaagagaaaatagtatgtatttttcaaccacatagaatttcaagagtaaaaaatttaaaaattgagttttctaattgctttaaaaatgcaaatacagttttactttgtcctatctataaagctagtgagactataaaattgggtttctcatacacctcatttgcaaaattaattgcaaagaattctaaagtgaatttgataatgcttaaaaatgaagcggatttaaaaaaaattgtcagaaatatagcatttggaaataaaatttttatctccatgggtgctggatctataactaattgggtaagaaatcttaattaac

SEQ ID NO: 313029 - DNA, 206 bp, Unknown
  Bacterial polypeptide expressing nucleotide sequence isolated from the Sargasso Sea
aatgaaaaaaattaacttaggaaataaagaagttatccattttgtcggaataggtggaattggaatgagcggattggcgcagattatgaaaaatatgggttttaaaattcaaggcagtgatcaaaataaaaataaaaatacaataagttgtgtaaaatcaggtattaaagttttcgttggccactcaaaaaaaaatgtaaaaaaag

SEQ ID NO: 313030 - DNA, 1396 bp, Unknown
  Bacterial polypeptide expressing nucleotide sequence isolated from the Sargasso Sea
tatgcacatccacatcctcggcatctgcggcacgttcatgggcggactcgcggtcctcgcgcgcggcgcgggccataccgtgacgggctgcgacgccggcgtctacccgccaatgagcacgcaactcgaggcgcaaggcattcgtctgatcgaaggttatggcgctgagcagctggacggcctcaatgccgatctgttcgtggtcggcaacgtcgtgacgcgcggcaatccgctgatggaagcgattctcaatcgcggcctgccgtacgtctccggcccgcagtggctcggcgaacatgtgctgaacggcaagtgggtgctggcggtagccggcacgcacggcaagaccaccaccagttcgatgctgacctggctgcttgaagacgcggggctcaatccgggcttcctgatcggcggcgtgccgctgaatttcggggtgtcggcgcggctgaccgattcgagcttcttcgtgatcgaagccgacgaatacgacaccgcattcttcgacaagcgttccaagttcgttcactaccggccgaaaaccgcgatcctgaacaacctcgagttcgatcatgccgacattttcccggatctggccgcgatcgagacgcaattccatcacctgatccgcaccgtgccgggcatcggccgtattgtgaccaacggtcgtgaagacgcgctcgagcgtgtgctgacgcgcggttgctggagcgaagtcgagcgcttcggcgtgcaaggcggctgggaaaccctcccggcggaagacggcgagccggtcgacgagcgctttgccgtgtatcacaacagcgagcgtgtcggggtcgtcgagtggcaggttcagggtgagcacaaccgcatgaacgcgctggccgcgatcgccgccgcgcgccatgtcggcgtgccgccggcacaagccgcgaagtcgctcgcgagcttccgcaatgtgaagcgccgcatggaagtgcgcggcagcgtcgacggcgtgaccgtctatgacgatttcgcccatcaccctacggcgatcgagaccacggtagccggcttgcgcgcccgtgtcggtcacgaaaacacgcgaatcctggccgtgctggaaccgcgctcgaataccatgaagctcggcgtgatgaaagctcaactgccggcgagcctcgccggcgccgatctggtgttcggctacggtgcgccgtccggccgtgacgcgctcggctggaatctcgccgaagcgctcgcgccgctcggcggcaaggcgcaggctttcgacaatctcgacgcgctggtcaaggcggtggtccacgccgcgcgccccggcgaccagattctggtgatgagtaacggcggcttcggcggcgtgcatcagaagctgctcgacgcactttccgcgcgaggcacgtcgtga

SEQ ID NO: 313031 - DNA, 895 bp, Unknown
  Bacterial polypeptide expressing nucleotide sequence isolated from the Sargasso Sea
tggaagttttgttttcatacccccaacatactcaatcatcactaacatagatcgagagcatatggattactatggcactatggataaattaaataaatattttgaaaattttgttaataaagtcccctcatttggaaaatcatttatttgtttagatgagaaaaataatagaaatttaattaaaaatatcaaaaataaaaacttctatacatatggtttggataaaaaatcaaatttttgtataaaaaatataaaacaattcaaagaattctctgagtttgacttaaatataaaattacctaacaaaaaaaatcaaataataaaaaaattcaaaattccattattgggaaatcataatattaaaaattctgtagctgcaacagcattagcgttaacagtagggttaccaattaataatataaaaaaaggacttaaaaattttaaaggagttcaaagaagatttaataaaattttcaattttaataatgtagatttttatgatgattatgctcaccatcctacagaaatcaaagaagtactggatggtgtaaaaaatgtttataaagattatgaaaagatatgtatttttcaaccacatagaatttcaagattaaaagatttaaaaaaagaatttacctttgctttcaaaaatgcagataaagttattttgtttccaatttataccgctggagaaaaattaaagcttggatttagttatacgaattttgcaagagaaataattaaaaattcgaaagttcagttgtttttagtagatgacaaatttcaattagcaaaatttattaaagtaaatatttatggaaaaaaaatcgttataggtatgggtgcagggactatttcaagttggatgcgagaactacctaaattattatcatga

SEQ ID NO: 313032 - DNA, 1387 bp, Unknown
  Bacterial polypeptide expressing nucleotide sequence isolated from the Sargasso Sea
tatgcacatccacattcttggcatctgcggcaccttcatgggcggtctcgccgtactcgcgcgcgaggcgggccacacggtgacgggttgcgacgcgggcgtctatccgccgatgagcacgcagctcgaggcgcagggcatcacgctgatcgagggctacggcgccgagcagatcgacctgaaaccggacctgttcgtgatcggcaacgtcgtcacgcgcggcaatccgctgatggaggcgatcctggatcgcggcctgccgtacgtgtcgggcccgcaatggctcggcgagcacgtgctggccggcaaatgggtgctcgcggtcgcgggcacgcacggcaagacgaccacgtcgtcgatgctcgcgtggctgctggaagacgcgggcctgaatccgggcttcctgatcggcggcgtgccgctgaacttcggcgtgtcggcgcggctcaccgattcgagcttcttcgtgatcgaggccgacgaatacgatacggcgttcttcgacaagcgctcgaagttcgtccactaccggccgcgcaccgcggtgctgaacaacctcgaattcgatcacgccgacatcttcccggatctcgctgcgatcgagacgcaattccaccatctcgtgcgtacggtgcccggtgtcggccggatcgtcacgaacggccgctcggatgcgctcgagcgcgtgctggcgcgcggctgctggagcgaggtcgagcgcttcggcgtcgacggcggctggcaggcgctgccggccgaggacggcgtgccggtcgacgagcgcttcgcggtgtattcgcacgcggaacgcgtcggcgaagtcgcgtggcaagtgcagggcgatcacaaccggatgaacgcgctcgcggcgatcgcggccgcgcgccatgtcggcgtgccgcccgcgcaggcggccgaatccctcgcgtcgttccgtaacgtgaagcgccggatggaagtgcgcggcagcgtggacggcgtgaccatctacgacgacttcgcgcaccatccgaccgcgatcgacactacgatcgccggccttcgtgcacgcatcggccgtcagaatgcccgcatcctcgcggtgctcgagccgcgctcgaacaccatgaagctcggcgtgatgaagtcgcaattgccggcgagcctggccgacgccgatctcgtgttcggctacggcgcgccgaccgggcgcgatgcgctcggctggaatctggccgaggccctggcgccgctgggtgagaaggcgcacgcattcgacgatctgcacctgctggtgaagtccgtcgtcgcggccgcgcgcccgggcgaccacgtgctcgtgatgagcaacggcggcttcggcggcgtgcaccagaagctgctcgacgcgctcgggagccgcccgtga

SEQ ID NO: 313033 - DNA, 526 bp, Unknown
  Bacterial polypeptide expressing nucleotide sequence isolated from the Sargasso Sea
tatgcgaatacatatcctaggcatttgcggaacctttatggcaggtttagcacaaattcttaaggaatcaggtcatgatgtatctggaaccgatattcaattttatccaccaatgtctgaatatattgaaaaaattggtattaaaacttttaaaggttatgaaaaaaaatctcttcctaaagcggatttatatgtaattggtaattctctttcaagaggaaatgaatgtgtagaagaaattttagaaagaaatttaccctacgtttctggtcctgaaatacttgggaaagagctaaaggaaagaaaagtttttgcggtttctggaactcatggaaagacgaccacttcttacatgcttgctcatatctttcttgaacaagggagagaaattggatatctagtagggggcatttctaaagattttgaaaactcagctagtcttggtcgagattcaattttcgtaattgaggcagatgaatatgattcagctttttttgataagcgatcaaaaattattcattactgt

SEQ ID NO: 313034 - DNA, 1009 bp, Unknown
  Bacterial polypeptide expressing nucleotide sequence isolated from the Sargasso Sea
atgtcagcattagcaatgggtttacttaaaaaaggttgttcagtttcggggtctgatttagttaaaaacgatgaaactaataaattagagaaattaggtgcagtgatctttacttctcaaattcgacaaaatatcgaatttattatttcaaaatttaccaacaaattaattaattttgttgtaagctcagcaattaaaccagaaaatgaagaattttcgtactgcagagaaaaaaatttatcaataaaacatcgttccgagatacttgcaatgctaatgcgcacttacactgcattggcagtagcaggaagccatggaaaaacatcaacaagtacatttctttctacaatacttgagttatgtacaaataattcttcttcaataactggaggaataattcctatctacaactctaattgtcatttagaaaatacaaaatacttagtagctgaagttgatgaatctgatggaacaattaacaaatataaatctgatattggaataatcaataacatagattttgatcattgcgatcacttttctaatttaagtgaagtcatatcttcatttaaaagtttcgctacaaactctaaaaagttattacttaattttgattgtgaaacctcaagaaataatttttattctaattgtaagtggtcaaacactacggctaaaaacgtagcttatgcaataatcccaactgaaattaattcaaagtatacaattggaaaatattatgaaaatggaaattttataagtagtttaaatattccaattccaggattacacaatctatctaatatcactgcggcaatagcagcttcaagaatgataggtgtagattttatagaaataaaaaaaaatataaaacatctgaaactaccaaaaaaaagatttgaattcagaggccaaatagatcaaagaagtttatatgatgattatgcgcatcacccaaacgaaataaaagagacaattaaattaggggagattatttattcagcaaaataaa

SEQ ID NO: 313035 - DNA, 964 bp, Unknown
  Bacterial polypeptide expressing nucleotide sequence isolated from the Sargasso Sea
tatgagaatacatattctaggtatatgcggaacctttatggcaggtttggcacaaatacttaaagaatcaggtcatgaggtttcaggttcagataatcaattttacccccctatgtctgactatattgggaatataggcattaaaactttcgaagggtactcaaaaaaagaccttccaaaagcagatttgtatgttattggaaatgctctttcaagaggtaatgaaagcgtcgaggagatattagaaaagaagttgccttttgtgtctggccctgagatgcttggaagagaactaaagagtagagatgtttttgccgtatctggaactcatggcaaaacaacaacttcatacatgcttgctcacatttttagagatcaaggaaaggatgtgggctatctaattggaggaatatcagaacaatttttagattcagctaaacttggtactgataaaatatttgttattgaagcagacgaatatgattcagcattttttgataaaagatcaaagtttattcattattcaccattaaatttgataatcaacaatatagaattcgaccatgctgatatttttaataatataaatgatataaagaaacaatttcatcatcttgtaaaaattattcctaaatcaggcagcttaatttatttcgatgatgaccagaatagctcagatgtaataaaaagtggtctgtggtgtgataaagttgtcataggaagcgatcatattgcaatagatatccttcataaggccttaattgtagataaaaagaaatattcacttaaagacatgcctctatcaggtgaacataattttaaaaattatgtttgtgcaattcttgctgcaactaaaggaggcctaactattgaacaatctatagattcattaaaaagattcagaggcgtaaaaagaagaatggacctcgttgcagacatatcaaatatcaaagttacgatgatt

SEQ ID NO: 313036 - DNA, 1342 bp, Unknown
  Bacterial polypeptide expressing nucleotide sequence isolated from the Sargasso Sea
atgcatattcatatattaggtatttgtggaacgttcatgggcagtcttgctgttcttgcaaaagaatcaggccaccatgtgaccggttcagacatcaattgttacccaccaatcagtgatcagttggatgaaatgggtattgatgtgattcccaattatgatctcgatcagcttaaattatctcctgatctgattgtgattggcaatgtcatgacaagagatacggagatcatagagtatattcttaaccatggcttaacatatacttcaggaccagaatggctgggtaaaaatattcttgctgatagaagggttatctcagttgctggcacgcatggtaagaccacaacctctagcattattgcatctgctctaaaagagttgggtgaagatcctggctatctcataggaggtgttccaatagattttgaggcatccgcatcactgggaagctcaccatattttgtgatcgaggcagacgagtatgacaccgctttttttgataaaagatcaaagtttatccactatccagctgaaacatttgtaatcaataatcttgaatttgatcatgctgatattttcaaggatttagaccaaatcaaatggcactttcaccagttaatcaggtctttgccttcaaagacagaagtgagagtgcctattaatgatgacaatatttcagatttattggatatggggaattggtcttccaccaaatcatttgggatgagcgatgaagctgactattcaatcatttcaaatgatgagaatcttcatataaaagaaggcgatgtattgcatggaaatcttagtcccaaattatttggcaagcacaacttaatgaatattatttcagctttctcagcattgcgatcaataggttttgagggcgatgaaatccttgatgcaatcaatcaatttaatggagtaaagagaaggctccagcaactggatcaatttataagtcacaatgtattcgatgattttgctcatcatccaaccgcaatcaaatacggtatcaatgcaatcaaggaaagattccctgataagaagttatgtgtgctggcagaattggcttcgaatacaatgaggaaaggaacattgaaagatgaagtagtgaattctttttctgaagctgattatgcattcattagtgccagtgatgattttgaatgggatattgagaatgaatttggatctcatgaaggagttcatgtagtgaaatccaatcaagatttgatcaataaattagcatcaatcgatactgatgggcttaattttctaataatgaccaataaaagctcccttccttttatcaatgctctggaaagcaggatctaaa

SEQ ID NO: 313037 - DNA, 715 bp, Unknown
  Bacterial polypeptide expressing nucleotide sequence isolated from the Sargasso Sea
tatgcatgtacatattttaggcatttgtggaagttttatgggcggcatcgccgctattgctaaatcactcggccacaaagtaacagggtctgataaaaacgtttatccgcccatgagcacccagcttgaagcattaggcatcgagttgaccgaaggttattgcgaaagccagtttgatccagcgccagatatggtagtgattggtaacgcgatgtcgcgcggtaaccccgccgtcgaatacgtgttaaatagaaatcttccttataccagtggcccacaatggttgcttgataacttactaaaagatcgttgggtaattgggttatcaggtacccacggtaaaacaaccaccagcagtatggtcgcgtggattttagaacacgctagtcttaaccctggttatttgattggcggcgtaccagagaattttggcgtatcggctcgcgtgggtgaaagccccttctttgtcattgaagctgacgaatacgacagcgcatttttcgataagcgttctaagttcgtgcactatcgcccaaaaaccttggtaattaacaaccttgagtttgaccatgcagatatttttgctgaccttggggctattcaaacccagttccaccatttggttcgcatggtgccagaaaacgggcttattcttacacctaacaatacacccgcaattgaggatatgctcaagaaaggttgctggtcttctcgc

SEQ ID NO: 313038 - DNA, 1114 bp, Unknown
  Bacterial polypeptide expressing nucleotide sequence isolated from the Sargasso Sea
atgcatattcacattttaggcatttgcggaacattcatgggcagtcttgcgcttttagcgagagaatctggccatgaggttacaggctcagacattaattgctacccacccattagtgatcaactcgatgaaatgggcattgatatcattccaaactatgatattgatcagctcaatatagagcctgatctagttgtcatcggtaacgttatgtcgagagatatggagatcattgagcacattcttgacaaaggttttgcctatacttctgggcctgaatggctgggaaaaaatatactctctgatagaaaagtgatttctgtcgctggaacccatggtaagacaaccacctcaagcatcatcgcatcggcattaaaacatatgggcgaagatcctggatatcttatagggggagttccgattaactttgaagcatcggcggcattgggcagctctccatattttgtcattgaagcggatgagtacgacacagctttttttgataagcgatccaaattcatacactacccagctgagacattggtaataaataatcttgaatttgatcacgcagatatttttaaagatttggatcaaatcaaatggcacttccatcaattaattagatcgcttccatcacaaacaaaagttcgagttccctttggcgatgaaaatattaaagacttgcttagcatgggaaattggtcatccaccaaatcattcggctttaacaaggaagctgactatacaatgataattaaagatgatcactttatgatcaaagaatgcgatgcaatagaagggaccatgaagcccaaattatttggcaaacacaacctaatgaatattgtttcagctttttcagcattgagatctttgggttttgatagagaaaggatttttgaagccattaaccaatttgatggagtgaaaagaaggcttcagcatctacaacagtttgaaaatcaccttgtttttgatgattttgctcatcatccaacttcaatcaagtttggcatcgatgcagtaaaggaaagggatccaaataaaaaattatgcgtattggctgaattggcttcaaacacaatgagacaaggcacattaaaggacgaag

SEQ ID NO: 313039 - DNA, 991 bp, Unknown
  Bacterial polypeptide expressing nucleotide sequence isolated from the Sargasso Sea
tatgagaatacatatcctaggtgtttgcggaacattcatggccggattagctcatatattgaaagagtcagggcatgaagtatctggatctgatgtccaatactacccaccaatgtcagattatctcgaaaaaataggcattaaaataattcaaggctatcaaaaaagtcttatgcctaaatctgatctttatgtaataggtaatgccttgtcgcgtggcaatgaatcagtagaggaaatattagataaaagacttccatttgtttcaggtcctgaaatgcttggtaaagaactcaaaaatcgaaatgtttttgctgtatcaggaactcatggaaaaactacaacagcatatatgcttgctcatatattgaaacatcaaggaaaagatatcggctatttaattggcggaatctcaaaaaactttgataatcctgcaagccttggaacacacaaatcatttgttatagaagctgacgaatatgattctgctttttttgataaacgctcaaaatttatacactattctcctatgaatttgattataaataacattgagtttgatcatgctgatatctttgatgatattaagagtataaagaagcagtttcataatcttattaagattattccatgctcaggaaatattatttattttgaagatgatgaaaatagtaacgacttaattaatgacggtatatggtgtcaaaaaacggctattaattcagacataatcaaaactaattttaaaaatatggaatttactttaaacgaaaataaattttcacttaaagatttgcctttgataggggaacataattttaaaaattatgttgcagcaatacttgcagcaagattagataaaatttcaataaatgactcaatagagtctcttaaaacttttaaaggtgttatgagaagattagagccaattgcagagaccctaaatataaagatatatgatgactttgcccatcatcccacagcaatttga

SEQ ID NO: 313040 - DNA, 1300 bp, Unknown
  Bacterial polypeptide expressing nucleotide sequence isolated from the Sargasso Sea
tatgagaatacatatcctaggcatttgtggaacctttatggccggtcttgcacaaattcttaaggaatctggacacgatgtatctggagcagatgctaagttctatccaccaatgtctgattatttaaaaaaaataggcattaaaacaattgaaggctatgaaaaaaaatctctccctgaagctgatctttatgtaattggtaatgctttatcgaggggaaatgagtgtgtagaagaaattttagatcaaaaattaccatacgtttctggacctgaaatgttaggaaaggaattaaaaaatagaaatgtttttgcaatatctggaacgcatggaaagacaacaacttcatatatgttagcgcatatatttttagatcaaggaagagaaattggatatcttgtcgggggcatttctgatgattttgataattcagcatgcttaggaaaagatcctatttttgttattgaagctgatgaatatgattctgctttttttgataaacgctcaaaatttattcactactctcctactaatctaattataaataatatcgaatttgatcatgcggacatatttaacgacatcgaagatatcaaaaaacaatttcatcatctaataaaaattattaaatcatcaggcaatattatttattttgatgatgatagtacctccaaagaagtaattgaaaaaggaatttggtgtaacaaaattggaataaattcaaatggagtaaaagctgactttgaatctaaagaattaataatagatgatgaaatatttcaattgaacgaacttccattaataggtgaacacaactttaaaaattatgtttgttcaatattagcagctaagcttgtgggaatttcagaaacagaatcaattaattctcttaaaaaatttaagggtgttaaaagaagaatggatttcattaaagaaatttcaggcataagaatatatgatgattttgctcatcatccaacagcaataaaattatcatgcagtgcaatccgaaataaatattcagataaaaaaattcttggtcttatcgagttgggttcaaacacaatgtcatcaggttaccataaagaaaatttgataaattcttttgattcattggacgaatttttaatgttagatcctaacaagaattataaaattaataatgcgtttgattctgaaaatgaacttttaaaaaatttggaagaaaaaatttttgactatgatattattttgattatgactaacaaagatagtcgaaagtttataaatccaataattaatagcattgaaaaaaaataa

SEQ ID NO: 313041 - DNA, 1405 bp, Unknown
  Bacterial polypeptide expressing nucleotide sequence isolated from the Sargasso Sea
aatgcgcactccctttactggaaaaggcagcggtatgcacattcacatcctcgggatctgcggcaccttcatgggtggtctggcggtgttggcaaaacagcttggttaccgggtgaccggttcggatgccaacgtctatccccccatgagtactcagctcgagcaacagggcatcgaactgaccgaaggctatgacccttcccagctcgatccggcgccggatctggtagtggtcggcaatgccatgagccgcggcaacccctgtgtggagtatgtgctggaccgcaatctgccctacatctccggcccccagtggctgctggagcacgtgctgcaggatcgctgggtgctggccgtcgccggtacccacggcaagaccaccaccgccagcatgctggcctgggtgctcgaatacgccaagctggagcccggtttcctcatcggcggcgtgcccggcaacttcccggtctccgcccgtctcggctccgctcccttcttcgtcatcgaggcggacgagtatgactgcgccttcttcgacaagcgctccaagttcgttcactaccacccgcgcaccctggtgatgaacaacctggagttcgaccacgcggatattttcccggatctcgccgccatccagcgccagttccaccacctgatgcgcaccgtgccgagcaacggccgggtgctcttccccaagggggacgagaacctggccgccgtgcgcaagatgggctgctggagcgaagtggagcttgtgggtcaggacgacgcccagtggaaggcggtcaagctggccgacgacggctccgccttcgaggtgtggctggacggggtgaagcagggcgaggtgcactgggagtgcatcggcgagcacaacgtcaacaacggcctgatggccatcgccgctgcccgccacgccggtgtgatggtggagcacggcattgcggcgctctgtcagttcaagtcccccaagcggcggatggagctcaaaggcgaggtagccggcatcagcgtctatgacgacttcgcccaccaccccaccgccatcgagaccaccctcggcggactgcgcgccaaggtgggcaaggcccgtatcctggcggtgctggagccccgctccaacaccatgaagctgggggttcacaaggaggagctggctggctgcttcgatggcgccgacgaggtgttcttcttccagccgcccaacatcggctgggatctcggcgaggtgaccgcccacatgacccggccggccaaggtgttcaacgatctggaaaccctgatcaaccgactggtggccgagtgccgcgatggcgatcatattctgatcatgagcaacggtggcttcggcggcattcatgacaagctgatcgcccgcctcaaggactatcacggccagctatga

SEQ ID NO: 313042 - DNA, 580 bp, Unknown
  Bacterial polypeptide expressing nucleotide sequence isolated from the Sargasso Sea
gatgcatattcatatattaggtatttgcggaacgttcatgggtagtcttgctgttcttgcaaaagaatcaggccaccatgtgaccggttcagacatcaattgttacccaccaattagtgatcagttggatgaaatgggcattgatgtgattcccaattatgatgtagatcaacttaaattatcccctgatctgattgtgattggcaatgtcatgacaagagatacggagatcatagagtatattcttaaccatggcttaacatatacttcaggaccagaatggttaggtaaaaatattcttgctaatagaagggttatctctgttgctggcacgcatggcaagaccacaacctctagcattattgcatctgccctaaaagagttgggtgaagatcctggctatctcattggaggtgttccaataaattttgaggcatcagcatcactgggaagctcgccatattttgtgatcgaggcagatgagtatgacaccgctttttttgataaaagatcaaagtttattcactatccagctgaaacatttgtaatcaataatcttgaatttgatcatgctgacatt

SEQ ID NO: 313043 - DNA, 946 bp, Unknown
  Bacterial polypeptide expressing nucleotide sequence isolated from the Sargasso Sea
atgaaaattcatattcttggaatttgcggcacctttatgggcggacttgcaaggatattatctgagtcagatcatgatatttctggttcagatgttgccttttatccacctatgtcagatcaacttaatgacttaggaattaatctaacttctggatatgcagctaaggatcttccaggtgctgatttgtatatcattggcaatgctctttctagaggcaatgaaagtgttgaatatattcttgaaaagaaacttaattttacctctgggccagcgatgcttggcaatgtcctcaaagataaaaatgtcttagcagtatcaggtactcatggcaaaacaactaccgcagcaatgctttgtaaaatcatgcacgacaaatataaagatataggatatttggttggaggtgttgccgaagatttagagggatcagcaaagcttggaaaaggtgaatatttcattattgaagctgatgaatatgattcagctttttttgataagcgatcaaagtttattcattattctcctaatactttaataataaataatattgagtttgatcacgctgatatattttctgacgttgatgaaatttataagcaatttcatcatctagtaagaattattccaaataatggcaacatcatatttcattctgatgataaagatgtagggaagctaattcagatgggatgctggtcgaatctttttgctctgggagaggaaagtatttcttataaccaacaagaaaatattatttcagctgacaataatcattttccgattgataagttaccattttttggaagacacaattatcaaaatgcagtcgcagcaatgcatgcagcttacttaaatggcgtggattataaatctgcattcaattcattgcagggagtttggtggcgtaaagagacgattgcaggttgtatacaacaaagataat

SEQ ID NO: 313044 - DNA, 829 bp, Unknown
  Bacterial polypeptide expressing nucleotide sequence isolated from the Sargasso Sea
tatgcatattcatattttaggtatttgtggcacttttatgggcggtattgccgctattgcaaaaagtcttgggcataaagtgacaggctctgatgccaatgtgtacccacctatgagcactcagctggaacaattgggtattgaattgacccaaggttatgatccggtgcagctgcaacccgctcctgatctggtgattattggtaatgctatgtcgcgtggtaatccggcggtggagtacacactggatcaaaatattccctataattctggcccacagtggttggcggagcaggtgctgcatcagcgctgggtgctcgctgtatctggtactcatggtaaaactacgaccagcagcatgttggcctgggtgctggagtatgcaggtctaaaacctggctttttgattggtggtattccgcagaactttgacagctcagcccgtttaggcgactcgcctttttttgtcattgaagcggacgaatacgacacagccttttttgataaacgttctaagtttgtgcattacagaccccggactttggtcatcaataacctggaatatgatcacgctgatattttcccggatttagctgctattcagcgtcagttccatcatttgctgcgtatggtgccgtcgactggtctggtgttaagcccggccaaggttgaagctgtggatcaaaccctcgctatgggctgctggagcgaacaacagcgttatggcaaagactggactgtggagttaaaacagccggatggcagcgtatttgagctgttttatcaaagtgtttcgcaaggcaccttaagtttgggatttatgtggtaa

SEQ ID NO: 313045 - DNA, 803 bp, Unknown
  Bacterial polypeptide expressing nucleotide sequence isolated from the Sargasso Sea
gaaaaaatcttttttagatttctcagataatattcctttttttggatatgttattgctaattatgatgataaaaacactagggatatattaaaaaaaataaaaagacgggtaatcacatttggctcaaataaaaaaagtgacattataattagtgaaatcaattacttctttgattacgttgattttaagatttatataaaagacacaaataaaaagcataaattcaggctatcacttcagggtaaatacaatatctacaatgcagttgctgctatagcagttgctatagaggagggaattagtattcagacaatcagggctgcattgaaatctttttctggtgtcgaaaggagactagagagatttaagctaataatcaaaaataagcaagttactcatattgatgattatggacatcatcctaaagaaatagagcaggtaatagtttctttaagaaagcattttaagaaaaaaaaagttcttatgatttttcaaccccatagattctcaagaacaaaaatgctttttaaggatttcgtttcaacattaaacaaagttgataaagtatttttattgccaatttattctgcaagtgaaaaagaaattaagggagtctcttcaaaaaaaatggcgcaaaaattaaataaagtaaatggaaaagacttttgcaatctcgtaaaccatgaaaatgtaaatgatatggttgagcaatgtatacataaatatgatgttgtaataactcaaggagcagggaatgtttctatggtttcaaagggtttaatcaagagatggaagatatgaa

SEQ ID NO: 313046 - DNA, 349 bp, Unknown
  Bacterial polypeptide expressing nucleotide sequence isolated from the Sargasso Sea
cacgacacagcatcagaaatatggaaaaacaaaaaaaaagattgttgtttttcaaccgcatagatacacgcgaaccaaggatctttttgatgaattcataaaaactctttcaaatatagaaaaccttttattgcttgatatttatcctgcaagcgagaagataattaaaggctatgaaggcaaagatctatttcatgctcttaaaaaaaatggctcaaacgtagtattttgtcaaaatcataatgaggtaattgaaaaacttgaaaatatgaccgctggaaatgaggtcatcataactcaaggagcagggacgacctcagaacttgcaagaaagatatcaaatcaatga

SEQ ID NO: 313047 - DNA, 654 bp, Unknown
  Bacterial polypeptide expressing nucleotide sequence isolated from the Sargasso Sea
ttatcaaaaatataattcaagacaaacttttttcaaaatttgatttatctataaatttaccaaataaaaaaaaaacaatcttaaaaaactttaagataccattattaggtgttcataatataagaaactccacagctgcaattgcagtcgctcttactttaggaattccagtatctaatattaaaaaaggtctaaaaaactttaaaggtgtccagcgaagatttaataagatatttacatttaatggagttgatttttatgatgattatgcacaccatccaacagagataaagtctgtgttagagggagtgaaaaaagtttttgataagtgtgaaaaggtatgcatttttcaaccacatagaatatcgagattaaaagatttaagaaatgaatttacacattgtttcagagatgcagatacaattatcttatgccctatttatacagctggagaaaaaataaaattaggttttaattataatgactttgcaagggaaattataaaaaattcaaaagtaaaactatttatgattaaaaataatctcgaattagctaaattcctcaaacaaaatatttatgggaataaaattgtcataggaatgggcgccggctcgatttcaaattggatgaaaaaattacctaaattaatgtaat

SEQ ID NO: 313048 - DNA, 403 bp, Unknown
  Bacterial polypeptide expressing nucleotide sequence isolated from the Sargasso Sea
catgagaagacgaattagaaaaaagaatgaagaaagcgagatcaatatcacgcctatgctggatattgttttcatcatgctgatcttctttattgttaccacctcttttgtcaaagagatatcaatcgatgtgaatcgtccaaccaaatcacccataaaggaacaaaagaaatcggatgtgatttcagtgcgaatattagacagtggacaaatattgatacaagagagattgatcgcactcgatgcagtgagagcgaatattgaatcaaacctagcattgaaaccacaggccagtgttgttgttgtctctgatagagatgcagacgcaggtttgcttgtaaaagtgatcgatcaatcgaggcttgctggtgcaagcaatgtgtctttagcagcacaaaaatag

SEQ ID NO: 313049 - DNA, 403 bp, Unknown
  Bacterial polypeptide expressing nucleotide sequence isolated from the Sargasso Sea
catgaaaagacgcatcaaaaagaagaacgaagagagcgagatcaatatcacaccaatgctggatattgtatttattatgctgatcttctttattgtgactacttcattcgtgaaggagatctccattgacgtcaatcgtccaacaaagtctccgattaaggagcaaaagaaatcggatgtaatttcagtgcgaatattagacagcggacaaattttaatacaagaaagactgatttctcttgatgcagttagagcgaatattgaatcaagcctcgcattgaaacctcaagcaagtgtggtcgtggtttctgatagagatgccgatgctggattgcttgtcagagtaatcgatcaatccaggcttgccggtgccagcagtgtatctttggcggctcaaaagtag

SEQ ID NO: 313050 - DNA, 1039 bp, Unknown
  Bacterial polypeptide expressing nucleotide sequence isolated from the Sargasso Sea
aactacaacaacatctttaattagttcaatttttgcaaaatcaaatatagatgcgacagtgataaatggtggaattttgaatgcctttgaaaattctgctaggcttggaaagagcaattggtgtattcttgagtctgatgaatctgatggaagttttttaaacttacctttgacttattcaattgttacaaatttagactcagaacatttagattattataaatcattagaaaatttaaagaaaaattttataaattttataaacaaaacaccctcattcggaaaaaattttatttgtatagatgataaaaataataaatctatattatctaaactgaaaaatacaaattttctaacatacggagttgataaaaaatcaaattttagaatttttaatatttcccaaaatatttattactccaaatttgatataaaaattgctataccaggaaaaaaagataagtatctaagaaatctaaaaatcccattaaatggtctgcacaatattagaaatgcaacagctgcttctgcagttgcttcaactgttggaatatcaaaagattttataaaaaatggtttaaaaagttttaagggtgttcaaagacgttttagtttcttatttaaatacagagattcaatatttattgatgattatgcccaccacccaaccgaaataagtgaagttctcagtggtgtgaagaatgtatataaaaataaaaaaattatttgtgtttttcaacctcatagaatttcaagagtaaaaaacttaaggaaggaatttagtaaatcttttaaaaatgcggatgaggtaattttatgcccgatatataaagctggtgaaacctcaaaaacagaaattaactatgataattttgcaaaagaaattataaagaattcagatgtgaaactaattttaataaatgaccaatatgaactatcaaaatatgttagacaatgtgtttatgggcaaagtatagttattgggatgggtgctggcacaatttctaattggatgaaaatgatacctaatttaatttaa

SEQ ID NO: 313051 - DNA, 469 bp, Unknown
  Bacterial polypeptide expressing nucleotide sequence isolated from the Sargasso Sea
gatgagctataataaatatttttttattggagtgggaggaattggaatgtcttctatagcaagctatcttattgatactaagaatattgtttttggatatgatagatcatcgaataaactagttgataagttaatagataatggacttaagtttaccgataaactagacataggtctagtacctcaggagttcttagaagataatgttattgttgtatatactcccgcaataaaaaatgacaatgtatttcttgatttttttgctaataaaaaaagaaataaaatttttaaaagatctgaaatattgggtcaaatatcagcaaattcaaaatgtatagcagttgcaggaactcatggtaaaacttctactactgctatcttaagtcatttattatactccaatcaagttaaattcagatcatttgttggtggaataatgaaaggatttgattcgaattacttatctacc

SEQ ID NO: 313052 - DNA, 1300 bp, Unknown
  Bacterial polypeptide expressing nucleotide sequence isolated from the Sargasso Sea
atgagaatacatatcttaggtatatgtggtaccttcatggctgggcttgctcaaatcttaaaagagtctggacatgatgtttcaggttctgacattcaattctatccacctatgtcatattatctaggtagcttaaatataaaaacttctaaaggatacaaaaaagacagcctaccaaaagctgatttatacgttatcggtaatgcgatctcaagaggtaatgattgtgtagagtatattctagaaaataatttacctcatacctctggaccagaaatccttggaagagaacttaaaaatagaaaagtttatgcaatttctggtactcatggaaaaacaactacttcatatatgcttgcacatattttttctaaaattggaaaagatatagggtacttaattggagggatgtctaaaaattttgatgatcctgcaaaacttggtaccgatcaaattttcgttatagaagctgacgaatatgattcagccttttttgataagcgttcaaagtttattcactacaaccctacaaatctaataattaattgtatcgagtttgatcatgtagatatttttgatgatattaaagatataagaaaacaatttaatcaccttattaaaactattaaaaagtctggaaatgtaatttattttaaggatgatcacaattcagctaaagttattgagaatggtatatggtgcaataacataataattaattcggatgagatagctaccaatttttctaaaagagagttactttatgatgaaattacttattctcttgatagtcttccgttaataggtgggcataattttaagaattatgtttgcgcaattgttgccgctaggctggaaaatatttccatagaagaatcaattaaagccctaatgtcttttgaaggagttaagagaagaatggataaaattgctgaaatatctggagtaaaaatatttgatgattttgctcatcatccgactgcaataagactatcaacttcagcacttaaagataattatcctgataaaaagatattaggtattttggagttgggttcaaatacaatgtcctctggttttcataaggaagatttgctaaattcactcgcctcattagatcaaacacttatcttagatcataaaaatgtatacactcaagataatatctttaatgatcttgattgtttactaagtaatataaaagatacaattattgattatgatattattttaattatgacaaacagagacagtcaaaaatttacaaagccattaatgagttatcttgaaagcaagtagt

SEQ ID NO: 313053 - DNA, 403 bp, Unknown
  Bacterial polypeptide expressing nucleotide sequence isolated from the Sargasso Sea
tatgagaagacgaattagaaaaaagaatgaagaaagtgagatcaatatcacgcccatgctggatattgttttcatcatgcttattttcttcatcgtcacaacctcattcgtcaaagagatttcaatcgatgtgaatcgacccaccaaatcacccataaaggaacaaaaaaaatcagatgtcatttcagtgcgaatattagacagcggacaaatattgatacaagagagactgatagcactcgatgcggtcagagcgaatattgaatcaaacctagcattgaaaccacaagcaagtgttgttgtcgtctctgatagagatgcagatgcaggcttgcttgtaaaagtcattgatcaatccagacttgctggtgcgagcaatgtctctttggctgctcaaaaatag

SEQ ID NO: 313054 - DNA, 607 bp, Unknown
  Bacterial polypeptide expressing nucleotide sequence isolated from the Sargasso Sea
tgataaaaaaacaaaaaagatacacaaatttaaaattaaccttcctggaaagcataatgtttttaatgcaacagctgcaatcgctgttgcgttggaagaagggatttcaattagttcaataaagagtggtatctcaaattttactggagttggaaggagatatgaaaagcatgatattaacattaattcaaaatcgataacattaatcgatgattatggacatcatccattagaaatagaatcaaatattaaagcatacaaggaggagtataaaaataaaaaagtgtgtatggtatttcaacctcatagattttcaaggaccgcacagctttttgatgacttcataaaagtattaaaaaaaactgattcattgataatgctcgatatatattcagcaagcgagaaacctatcaaaggcataaactcaaagacaattgtagaaaccttaaaacaaaatggtcacaaagatgtaatctatttaaaaaatcatgatcaaataatagatttgataagcgataaaaaggatacatttgatatattagttactcaaggtgctggaagtgtgtcaaaagtttgtgagattattaaaaatcgatgggaagcataa

SEQ ID NO: 313055 - DNA, 270 bp, Unknown
  Bacterial polypeptide expressing nucleotide sequence isolated from the Sargasso Sea
attgacttttagaaaaataaaaaatgtattctttgttggtattggcggtattgggatgagtggcattgctgaactgttattgaatttaggctttaatgtatcaggatctgatataactgagaatgataatgttcaacgattaaaaaatttgaatattgatgtaaaaattggtcatagccctagcaatctgaatcaagatacggatgttctagtttattcgagcgcagtgccaatagaaaatcctgagattgttcgtgcacgtcaaaaagg

SEQ ID NO: 313056 - DNA, 403 bp, Unknown
  Bacterial polypeptide expressing nucleotide sequence isolated from the Sargasso Sea
ttattatgatgattatgcacatcatccaacagaaatatgcgaactgcttagatctataaaaacagtttataaatcaaaaaaaattatatctgtatttcaaccacaccgaatttctagggttaattatttaaaacatagatttactaaatgttttgaattttctgatagagttttattgtgtccaatttataaagctggggagaatttaaaactaaagttcgattattttagatttgcaaaagaaattataagaaattcaaaagttgagttgattatgataaataatgaaagagagctagcaaagtatgttaagaataatatttatagagataacattgttattggaatgggggcaggaacaatatctaattggatgagaaatttacctaaattaattaaatga

SEQ ID NO: 313057 - DNA, 826 bp, Unknown
  Bacterial polypeptide expressing nucleotide sequence isolated from the Sargasso Sea
ggaaagagtgattggtgtgttttagaatccgatgaatctgatgggagttttttacatctacccgccacatattcgatagtcacaaacattgatcaggaacatatggattattataaaaatttaaaaaatcttaaagataagtttgtttcttttatagaaaatactccttcgtttggtaaatcatttatatgtatcgatgatgtcaatattaaaacaattgttaaaaacttaaatcataaaaatttttatacatatggcgttgataaaaactctaattacagaatatttaatatccgtaaaaaaatagaattctctacatttgatttaaaaatatctttaccaggaaaaaaattaaaaataattaagaatataaaaattccgattattggaattcacaatatcagaaatgcaacagccgcattagctgtttcaagcagcattggtatttcagacgcaacaataaaaaaagcactaaataattacgagggtgtgcaaagaagatttaataaactatttacatttcaagaagcaatattttttgatgactatgctcatcaccctacagaaattagagaagtcctaaaaggtgcgagagaagtctataaaaataaaaaaattatatgtgtatttcagcctcatagaatttctcgtttaaaaaatttgagaaaaaaatttgcaagcgcttttgaaaatgctgatacagttttactatgcccgatttataaagcaggagaaaacattttacttggtttttcatatgaaaaatttgcaaaagaaataatgaacaaatcaaaagttaaattagtgtttgtgaatgatcaatatc

SEQ ID NO: 313058 - DNA, 403 bp, Unknown
  Bacterial polypeptide expressing nucleotide sequence isolated from the Sargasso Sea
atgaaaagacgcatcaaaaagaagaacgaagagagcgagatcaatatcacaccaatgcttgatattgtatttattatgctgatcttctttattgtgactacttcattcgtgaaggagatctccattgacgtcaatcgcccaacaaagtctccgatcaaggaacaaaagaaatcggatgtgatttcagtgcgaatattagacagcggacaaattttaatacaagaaagactgatttctcttgatgcagttagagcgaatattgaatctagcctcgcattgaaacctcaagcaagtgtggtcgtggtttctgatagggatgccgatgctggattgcttgtcagagttatcgatcaatccaggcttgccggtgccagcagtgtatctttggcggctcaaaagtagt

SEQ ID NO: 313059 - DNA, 850 bp, Unknown
  Bacterial polypeptide expressing nucleotide sequence isolated from the Sargasso Sea
atgctcacaggaattaccagacataatagaattcatctaattggagtaggtggatcaggcatgattggcatagctagaattcttttgaaacaaggtttcgatgttagtggttcagatctaaatgactcagatgaactgcaaatacttaagtctcttggtttgagattgcaaaacaatcattccccaaatttaattaaagatgctgagcttattattgtttcatcagctataagtgcaaataatttagaacttatctatgcaaataaaaataaaattattgttatccccagatctgaaatgcttagttcattgatgaagccttttagaagtattgcggtggcaggatctcatggaaagacaaccacaacaagcttgatagcaaacatatttaatgaagctgatttaagtccaacatatgttattggtggaaaaatactcagtgatgatcaaagtgctgaccttggcaaaggggagtatatgattgttgaggcagatgaaagtgatggatcttttttaagcttaaatcccgaaataatagttatcacaaacatcgataatgatcatcttgctttttatgactcaaaacaatcaaaattaaacgagggatttcttaaatttataaataacttaccatttaatggttacgtactcctcaatcaagatgatccaaatgttcgtctgattaaaaataacatcaaaaggaaagttattacttacggaacctcatacccatgtgactaccagataatttttcatgacagtgaaaatttttctcaagaattcaaagttataaataagaaaaaccgcttaagcatagatttaaagacatccttgctaggaaaaacataat

SEQ ID NO: 313060 - DNA, 526 bp, Unknown
  Bacterial polypeptide expressing nucleotide sequence isolated from the Sargasso Sea
atgattggagtagattttttagaaattaagaaaaatataaaatatctgaaactcccaaaaaaaagatttgaattcagaggtcagatagataaaagaactttatatgatgattatgcacatcacccaaacgaaataaaagaaactattaaattaggaagattattaattcagcaaaaacaaaatattgaatgtcaaaaaagtagattaatagccatatttcaacctcatagatactctcgagtaaagcaattcactaaagaattcgctgaagaattatcaaaagcagatgttatttacgtaaccagtatttatggtgcaggagaaagaaacgaagataaaattacttcgaaaattatcactgatctgatttataaaaaaaataaaaatgtttattacataaataattattatgaagttacaaagaatttttacgaaataactcaaaaaggggacttgattttgaatatgggagctggagattgtcataatttttggtcaattttaaataagaaacaattaaaatagg

SEQ ID NO: 313061 - DNA, 187 bp, Unknown
  Bacterial polypeptide expressing nucleotide sequence isolated from the Sargasso Sea
atgaagctgtttaaaaaaattaagaaaatacactttgtaggcattggcggggctggaatgataggcattgccagattattattgaagaaaggatataaaatatccggttctgacataacagactctagtgagctaagaaagcttagaaaagatggcgctagagttttattggacattcaaaagagaa

SEQ ID NO: 313062 - DNA, 445 bp, Unknown
  Bacterial polypeptide expressing nucleotide sequence isolated from the Sargasso Sea
ttcgaaataaagaagaataaaacaaatatttttgttgttgatgattatgcccaccatccttctgaagtagaagctacaatcaacgctgcaaaaagcgggtggaataaaagaatcgtttgtgtttttcagcctcatctttttagcagaacaagagatttctttaaagagtttgcaaaatcacttttcaaatcagatataattattattaccaaaatatatccagcgagagaaaaaccaattgatggtgtaaactctaatttaattctagatgaattaggtcatttaggacatagtagcatatatagtcttgaaaacttaaacgatttaaataatgttttagaaaaaatagtacaacctaatgatatggtaattacaatgggtgcaggagatatatggcgttatagtgataaatataatgaatacctagatggcaaattaatataaa

SEQ ID NO: 313063 - DNA, 1300 bp, Unknown
  Bacterial polypeptide expressing nucleotide sequence isolated from the Sargasso Sea
atgagaatacatatcctaggcatttgtggaacctttatggctgggttggcacaaatactttcagaatctggtcatgaagtctctggttctgatattcaattctatcctccaatgtctgattatttagaaaatacaggcataaaaactattaaagggtatgataaagagttgcttccagaagctgatttatatgtgatcgggaatgctttatctagaggcaatgagagtgtagaagaaattttagaaaaaaaactgtctttcttatcaggtcctgaaatgttaggtcaagaattaaaaggaaggaatgtttttgctatatctggcacacatggcaaaactacaacatcttatatgctcacacatatttttagagatcagggtagagatattggttttttggttggaggaatttcaaagaattttgataattctgcaaaattaggaacagataaaacttttgttatagaagcggatgaatatgattcggcttttttcgataaaagatcaaaatttattcactattcaccaataaatttagttattaataatattgaatttgatcatgctgatatctttgatgatatcgaggatataaaaaaacaattccatcatcttgttaaaattattcctcaatctggcaatattatttattttgatgatgacaataatgtcaatgacgttatatcaaaaggtttatggtgcaataagattccaattaattctcaaaaaataaatataaattttgaatctatggagttagttgtagaagaagaagcattttcactcaaagacttgcctttaattggggagcataattttaaaaattatatttgtgcaattcttgcagccaagcttgatggcgtaacaattcaagaatctataaattctctaaaaagttttaagggagtaaaacgaaggatggattatgtgggtgaaatatcaagtataaaaatttatgatgatttctcacatcatccaactgcaataaagctatccacttcagctataaaaaataaatatccagataaaagaataattgggcttatagagctagcctcgaatacaatgtcatctggacatcatgaagaaaatttaatcgactcttttagctcacttgatgaggttttattacttgatcataaaaaagtttacgattataaaaatgcatatgactcaattgagtctttaataataaagttacaggaaatagtttttgattatgatattattttaataatgactaacaaggacagtcaaaagtttattaacccaataattaatcaccttgaaagcaagtagt

SEQ ID NO: 313064 - DNA, 864 bp, Unknown
  Bacterial polypeptide expressing nucleotide sequence isolated from the Sargasso Sea
gagcccgcctggggctgatcaccaaccttgaactcgatcacaccgatcactacagcggcctcgacgacctgatcggcacgatgcgtcgctttgccgatgggtgcgaccaggtgttggcgaaccgcgactgcgccacccttgaggaccacattcaggcggacgcgtggtggtccgtcacccaggccaacggtgtcgattacgccgctttgccgctccagctcgacggcgatcgctgccatgcccgcttctacgaacaaggcgaacccgtcggggacttcgtgctgcccctgcctggattgcacaacctcagtaacgcggccggcgccctggcggcatgccgcatggaaggtgttcccttcgatcgactggtggatgggctctctgccttgaaaccccccggccgccgttttgattggcggggcacctgggaggggcgccacatcgtcgacgactacgcccaccaccccagtgaagtgaaagccaccctggccatggcgcaactgatggtgagcagtggccgcagccccttgccgaccccaccccaacggttgttagccgtgtttcagccccatcgctacagccgcacccaggaattcctggactccttcgcgaacgcattgcagaactgtgactccctgctcctggctccggtctacggcgccggcgaaacgccgctgtctggggtctgcagccagaccctggccgatcggattcatgagctgaggccggatcttgaggttgccgtggctgacaaccttgaccacctcactgaattggtcagaagccgcagccggcgtgaggacttggtcctggccatgggtgcaggggatgtcaacggcctgtggccacggctggcggcctgat

SEQ ID NO: 313065 - DNA, 547 bp, Unknown
  Bacterial polypeptide expressing nucleotide sequence isolated from the Sargasso Sea
cataatataagaaatgcaacagcagcttttgcggttgcatcaagcattggactttcagaaaagattatcaaaaaaggtttactaaattttactggtgtacaaagaagatttaatgaactgtttaaaataagagaaacaatattttttgacgattatgctcatcacccaacagaaataattgaagttttaaattcggtaaaaaaagtttataaaaataaagaaatcatagttatatttcagccgcatagaatttctagagttaatgacttgaaaaaagagtttgcgagttcttttaaaaattgcgactcattagttctttgtccaatatactctgcgggagaaaaaataaaattgaaatttaactataaaaaattcgctaaggaaattatcaaaaactcaaaagtaaaattatttatggttaaaggagaagatgatttatataaatttattaatcagtcaatctatggaaataaaattgtaattggaatgggtgctgggtcaatatctagctggatgagaaacttaaaaaataaaatcatcaattaaa

SEQ ID NO: 313066 - DNA, 1064 bp, Unknown
  Bacterial polypeptide expressing nucleotide sequence isolated from the Sargasso Sea
tatactctctgatagaaaagtgatttctgtcgctggaacccatggcaagacaaccacctcaagcatcatcgcatcggcattaaaacatatgggcgaagatcctggatatcttatagggggagttccgattaactttgaagcatcggcggcattgggaagctctccatattttgtcattgaagcggatgagtacgacacagctttttttgataagcgatccaaattcatacactacccagctgagacattggtaataaataatcttgaatttgatcacgcagatatttttaaagatttggatcaaatcaaatggcacttccatcaattaattagatcgcttccatcacaaacaaaagttcgaattccctttggcgatgaaaatattaaagacttgcttagcatgggaaattggtcatccaccaaatcattcggctttaacaaggaagctgactatacaatgataattaaagatgatcactttatgatcaaagaatgcgatgcaatagaagggaccatgaagcccaaattatttggcaagcacaacctaatgaatattgtttcagctttttcagcattgagatctttgggttttgatagagaaaggatttttgaagccattaaccaatttgatggagtgaaaagaaggcttcagcatctacaacagtttgaaaatcaccttgtttttgatgattttgctcatcatccaacttcaatcaagtttggcatcgatgcagtaaaggaaagggatccaaataaaaaattatgcgtattggctgaattggcttcaaacacaatgagacaaggcacattaaaggacgaagttgtgaattcactttctggagctgactgcgtttttattctttttaatgacgatttcgaatgggacattgaggatgcattcaaatcctcagagagcgtcaagatagtgaaatccaatgaagagctcattaataacttagaatcgcttgatacggatgaatataatttcttaattatgaccaacaagagttccattcccttcgtagagacattagaaatggggctaaaagaatatgagcgataga

SEQ ID NO: 313067 - DNA, 742 bp, Unknown
  Bacterial polypeptide expressing nucleotide sequence isolated from the Sargasso Sea
atgagaatacatatcctaggtatttgtggaacctttatggcaggcttagcacaaatacttaaagaatctggtcatgacgtttcaggttcagataatcaattttatccaccaatgtcagaatatatttggaagatgggcattgaaacttacaaagactattcaaagcataatcttccaaaagcagagttgtatgtaattggaaatgctctttcaagaggtaatgaacatgttgaagaaataatagaaaatagattgccttttatttctggtccagcaatgcttggaagagtattaaagaatagagatgtctttgctgtatctggaactcatggcaaaacaactacctcatatatgattgctcatattttcagaaatcaaaataaggatattggctatcttattggaggtatatcagaacaatttgaagattcagccaagctgggtactgataaaatatttgttattgaggcagacgaatatgattctgctttttttgataaaagatccaaatttattcattattcaccattaaatttaataattaacaatattgagtttgatcatgccgacattttcaataatattgatgatataaagaaacaatttcaccatctattaaaaattattcctaaatcaggcaacttaatttattttaaagaagatcaaaatacatcagacgttataaaaagtggtttatggtgcaatgaaattgtaatcggcagtaatgaaattgaaattgatt

SEQ ID NO: 313068 - DNA, 424 bp, Unknown
  Bacterial polypeptide expressing nucleotide sequence isolated from the Sargasso Sea
atttttaattttaacaatgtcgatttttatgatgattatgctcatcaccctactgaaattaaagaagtattagaaggtgtaaaaaatgtttataaagattacgaaaaaatatgtatttttcaaccacatagaatatcaagattaaaagatttaaaaaaagaattttcttttgctttcaaaaatgcagatagagttattctttttccaatttatacagctggagaaaaaatcaaactaggatttgactacttgaattttgcaaaagaaataattaaaaattcaggagttaaattacttctagtagacaataaatttcaattagcaaaatatattaaagctaatatttatggaaaaaaaatagttataggtatgggagctggaaccatatcagcctggatgagagaattaccaaaattattatgaa

SEQ ID NO: 313069 - DNA, 976 bp, Unknown
  Bacterial polypeptide expressing nucleotide sequence isolated from the Sargasso Sea
atgaaatcgttaatctttggttatggacaaacaggaaaatctttcgaaaattatttagagaataagaatataagttttgatatttatgatgatgacaagagtaaattatcagaaattcatcaagagaaaaatataagcccttcttttagtgatttaaaagattatcaggacatttatatttcgccaggagtaaaactcgaaaattatttgaccaaagaagagatctctaatttaaatcttaaaagtgatctggatatttttttcttagagcataattctttcaagataggaattactggtacaaatggaaaaagcaccttggtgcatcttttggaacaagctttaaatcattcaagttcagctatagctctaggaaatattggcaacccagtattagagaatcttaatcatcagaataaatatagtgttattgaggtttcaagctatcagttagataagatggaaaataacttatttgatttgtctgttattaccaatatagagcctgatcatattaaatttcatggaactttccagaagtataaggaagcaaaacttaaaatatgcagagatcagacaaaaactatcttctgtgaaggtcatgattatgaaaacatcgctacgagaattgcacaagatctagaacctaattcaagctatgagaatctaagattctctctccttcctcataggcttgaagaattttcaggaagattcatagatgattctaaatcaacaaattcatcttcactaagacatgcattatctaagttgaaattttcaggagtattaatcatgtgtggagaccctgataaagaatgtttaagtgaaataaatattaaaggaccaaatagagtttatatttttggtaagcataggaaaaatcttgtaaaaatagtgaaacatcacaacattaaagattttgctactcttgatgaagttttaggagacttaagaagcttaaagactcctcaaa

SEQ ID NO: 313070 - DNA, 1393 bp, Unknown
  Bacterial polypeptide expressing nucleotide sequence isolated from the Sargasso Sea
tatgaaaatccacattctaggaatctgcggaacatttatgggtgggctagctcgaatcttaatcgagtctggacacaaagtcagtggttcagatcaaaatttttatcctccaatgtctgatcagctcaatgaattaggaattcagctagtaaaaggatatgaagtgtcaaaacttccagaagcagatttatatgtcattggaaatgttctttccagagggaatgaatgcgttgaggaaattttaaacaaaaaacttccatataagtctgggcctgagatgcttggagagataataaaagacagattagttatagctgtttcaggaactcatggaaaaaccacaacatcttttatgattgcaaaaatttttcaatcagttggaaaagacataggctatttaattggaggtctttgtcctaattttgagttctcagcaaaacttggcaatgatgaagtttttgtagtcgaagccgatgaatatgactcagctttttttgataaaaggtctaagtttattcactattgcccagatattttaataataaataatctcgagtttgatcatgctgacatatttagagatattgaagatattaaaagacaatttatgaacttgttaaatactatgccgaatggcgcaaaagtaataaattttccttgtcagcctggcgcaaacaatcctcatgtcgacgatgtgcttcactatcatggaaacagtattaaaaaagttaatattggcataggcagttattatgatggttggtttgacgaggatgataattttattatatttgatgatgagtcatataatctttttataggaagagaaagcagagggagggaagttacattaaatagtctcccaatatacggattgcacaatatgaaaaatgctactgcagcaatagtagcagcagcaacatatgggataaattttacagatgcatatcatggcttgtctgactttggaggtgtgagaagaagacttgaagagaaatatagtaaaaatggtattacgattatcgatgattttgctcatcacccaacagcaatagaatttgccattgactctgttcataaaaaatataaggataaaagaatactaaatgttattgagttgggatcgaatacaatgagtggtggttaccatgaagaggagctaatggatattgatagtaaatacgaatcactatttagagaacaatgtaagatattttggttagaccacaagtattgccttcctgatgatgtgtatcatcttttttggagccatgatgaccttaacaaagcaattgctgaaaactatagagatttcgaggttattttgataatgacaaatagggacagcacaaagataattgaaccattaaaggaattaattgaagccagttaa

SEQ ID NO: 313071 - DNA, 805 bp, Unknown
  Bacterial polypeptide expressing nucleotide sequence isolated from the Sargasso Sea
gatgagccataataagtatttttttattggagttggaggaattggaatgtcttctatagcaaattatcttattgatactaagaatattgtttttggatatgatagatcatcgaataaactagttgataagttaatagataatgggcttaagtttaccgataaattagatatagatctagtacctaaggaattccttgataataatgttattgttgtatatactcctgcgataaaaaatgataatgtgtttcttaattatttttcaaataagaaaagaaataaaatttttaaaagatctgaaatattaggtcaaatatcagcaaattcaaaatgtatagcagttgctggaactcatggcaaaacatcaactactgctatcttaagtcatttattatactctaatcaagttaaatttagatcatttgttggcggaataatgaaaggatttgattctaattacatatctactggtgatgaatatgttattattgaagcagatgagtatgacaggtcttttcttgctctagatccggactactctctaataacttctattgaaaaagaccatcttgatgtttatgatgacttagaatcaattcttacaagctttgggattttctgtgataaaacaaaaaaatctgtaatagcagaaaaaggcattaatgttaaaaaagatttctcgttttcaatagatgaagatgcagattactctgttgatatcataaaaaacaactttaatggaattcattttaattttaaaactccaaataatttaatttcaaacattcatgcaagagtaatagga

SEQ ID NO: 313072 - DNA, 1081 bp, Unknown
  Bacterial polypeptide expressing nucleotide sequence isolated from the Sargasso Sea
atgaaatcattaatctttggttatgggcaaacaggaaaatctttcgagaattatttagagaataagagtataagctttgatatttatgatgatgacaagagtaaattatcagaaattcatcaagagaaaaatataagcccttcttttagtaatttaaaaaattatcaggacatttatatttcaccaggagtaaaactcgaaaattatttgactaaagaagagatctctaatttaaatcttaaaagtgatctggatattttcttcttagagcatgattcttttaagataggaattactggtacaaatggaaaaagcaccttggtacatcttttggaacaagctttaaatcatgcaagttcagctatagctctaggaaatattggcaatccagtattagagaatcttaaccatcagaataaatatagtgttattgaggtttcaagttatcagttagataagatggaaaataacttatttgatttgtctgttattaccaatatagagcctgatcatattaaatttcatggaactttccagaagtataaggaagcaaaacttaaaatatgcagagatcagacaaaaactatcttctgtgaaggtcatgattatgaaaacatcgctacgagaattgcacaagatctagaacctaattcaagctatgagaatctaagattctctctccttcctcataggcttgaagaattttcaggaagattcatagatgattctaaatcaacaaattcatcttcactaagacatgcattatctaagttgaaattttcaggagtattaatcatgtgtggagaccctgataaagaatgtttaagtgaaataaatattaaaggaccaaatagagtttatatttttggtaagcataggaaaaatcttgtaaaaatagtgaaacatcacaacattaaagattttgctactcttgatgaagttttaggagacttaagaagcttaaatgactcctcaaaaattttattttcacctggcaatcctagcggaaaggattttaagaattttagtgagagaggccaacactttaaaaataaagtattagaatattttggtgaataaa

SEQ ID NO: 313073 - DNA, 754 bp, Unknown
  Bacterial polypeptide expressing nucleotide sequence isolated from the Sargasso Sea
ttgtgtattgatgacgtcaataatagaagtttacttaaaaaaaatcttgttaaaaactattttacttatggtgttaataaagattctaattttcgaattacaaatataaagtacaaattaaatagatcaatttttgatttaattataaaaatacccaataaaaaaaagataagtgtcaacaatatagaaatccctttaattggatttcataatataagtaatgcggctgcaacatttgcattaacttctcatataggaatatctacaagcttaataaaaaaaagcctcaaagattttcaaggggttgaaagaaggtttaataaagtttttgattttaatggtgtaactttttttgatgattatgctcatcacccaactgaaattaaagaagttttaaatggtgtaaaaaaaagctttttaaacaaaaaagtcatatctatttttcaaccacacagaatttcaagactaaatgatttaagtaatgattttagcaaatcatttaaaaattcagatcaagtattgttatgccctgtttataaggcaggcgaaaaaattaaattgaaatttaaatatgaaaaatttgctagagatatatcaaaaaattcaaaagcgttagtaattatggttaatcaaaaacaagaccttgtaaatttcttcaaaaacaatttaaaaggaaatgaaattgtaattggaatgggtgctggatcaatatctggatggttaaaagagcttaaaaattttcttaaacaatgaa

SEQ ID NO: 313074 - DNA, 1317 bp, Unknown
  Bacterial polypeptide expressing nucleotide sequence isolated from the Sargasso Sea
tgggtgggcttgctcagattgcaaaacaactcggacataaagtcacaggttctgatcagaacgtataccctccaatgagtgaagagcttgttaagctcaatattgatgttatgagcggatatgactcagagcacctaagctcaaatcctgacatagttcttgtaggcaatactctttcaagaggaaatccagcaattgaatatatgttaaatcaaaaaatgcactatatgtcaggccccgagtggctatacagacaggttttacatgatagacatgttctcgcagtttctggtactcatggaaagacaaccacaacaagcatgctaagttggattttagagtatacggggctcaatccatcatttttaatcggtggagttgcggaaaatttcgatagatcagctcgttataccgattcgaagtatttcgttattgaagccgatgagtatgatacggcgttcttcgacaaacgctccaaattcattcactatcatccagatgtgctaataataaataatatcgagtacgatcatgctgatatctttcacgatcttgctgctatcagagcccaatttcacaatttggtaaggatgctccccgaaaatgcaacaattgttttccctctggaagacaaggaaatagacgaggttatttcgatgggctgctgggctcgattagagacattttcagtgactaacggtgattggtctatatttgatgcaagcaaagattttcgtaatttttctgttaaaagtcctaaaaaagagacaggtttcgtagaatggcagactatcggcgagcataacgccatgaatgctttagcagcaatcgttgcagcaaataatattggtatttctgttgatagtgcatgcgaagcactatcaaaatttaaatcagttaaaaggcggctcgaatgtatttttgaattcgatggtattcgtatttttgatgatttcgcccatcatccaactgcaattcgaaaaagcatacaagctttaagtagcactttagatgagggtcgaattattgctattatggaacctcgttctaacactatgcgtatgggtgttcactctgaagtattatcagacgcttttttggacgcagatttggtgtatttttttcaacctaatgatttaaattggaatattaaagagcatgtaagtcaacttggtgatcgctgtcaaatatttaaagatgtagataagatagcggaacatgtttgtagtaatattcgaactaatgaccagattattataatgagtaatggtgcttttggtggcatacataaaaaaatagcagagagattaaattaaa

SEQ ID NO: 313075 - DNA, 919 bp, Unknown
  Bacterial polypeptide expressing nucleotide sequence isolated from the Sargasso Sea
tatgagaatacatattctaggtatatgcgggacctttatggcagggttggcacaaatactaaaagaatcaggtcatgaggtttcaggttcagataatcaattttacccacccatgtctgattacattaagaagataggtattaaaactgtcgaagggtactcaaaaaaagaccttccaaaagcagacttgtatgtaattggaaatgctctttcaagaggtaacgaaagtgttgaggagatattagaaaagaagttgccttttgtgtctggccctgagatgcttggaagagagctaaagagcagagatgtttttgccgtatctgggactcatgggaaaacaacaacttcatatatgcttgctcacatctttagagatcaagaaaaggatgtaggctatctaattggaggaatatcagaacaattttcagattcagctaagctaggcactgataaaatatttgttattgaagcagatgaatatgattctgcattttttgacaaaagatcaaagtttattcattactcaccgttaaatttaatagttaataatatagagttcgatcatgcagacatttttaataatataaatgatataaagaaacaatttcatcatcttttaaaaattgttcctaaatcaggtaatttaatttatttcgatgatgatcaaaatacctcggatgttatagaaagtggtctgtggtgcaataaagttgtcataggaagcgatcatattgaaatagatatcctgcagaagtccttaattgtagataataagaaatattcacttaaaaacttgcccctatctggtgagcataattttaaaaattatgtttgcgcaattcttgctgcaactaaaggaggtataactattgaacaatctatagattcattaaaaaaattcagaggcgtaaaaagaaga

SEQ ID NO: 313076 - DNA, 205 bp, Unknown
  Bacterial polypeptide expressing nucleotide sequence isolated from the Sargasso Sea
aatgaattgtttagaatatacaaactattattttattggtattggaggaattggaatgtcttcattagcagaatatatgttgcatctaaataaaaaagttgagggttatgatcgtgaaaaatcctttcaatcaaataggttgaataaactgggaataagaataatattttctgaaaatgaacaaataattaactcaaattttaag

SEQ ID NO: 313077 - DNA, 133 bp, Unknown
  Bacterial polypeptide expressing nucleotide sequence isolated from the Sargasso Sea
atgaaaattaatctaggaaaaaaagaaataatccatttcattggcattggaggcattggtatgagtggattggcattaataatgaaacaacttggttttaaaatacaaggaagtgatatttcagtaaataaaa

SEQ ID NO: 313078 - DNA, 387 bp, Unknown
  Bacterial polypeptide expressing nucleotide sequence isolated from the Sargasso Sea
tttggcattacaacaaaaagttcattttattggtattggagggataggcatgagtggtttagctcaagttatgaagactatgggttttaatgttcaaggaagtgatttagttagtagtaaaaatgttgaaagatgcaaaaaaattggaataaaaatattcaaaaatcataacaaaaaaaatattaaagactgtacaataattgttaaatcatcagcggtaaaaaataataatccagaaattaaagctgcgaaggaaaaaaaattaaatattttaaaaagggctgagatgttggctcatatcgtttcattaaaaacaaatatagttatcactggttcccatggcaaaacaaccactacatctttaatctcaaacattttatcttctgc

SEQ ID NO: 313079 - DNA, 847 bp, Unknown
  Bacterial polypeptide expressing nucleotide sequence isolated from the Sargasso Sea
cttggtgataatgttctcttcgatcgtcatgttcttgcaatcgcaggtactcatggcaaaacgaccacaactgcgatgctcacctttattctgaactcagcggggcttcgcccgggatatttgatcggtggagttcccattgcaagcgatagttcagcggaccttggtgatagcggattttttgtggtggaggctgatgaatatgacagcgccttttttgataaacgttcaaaatttctacattatcatagcaatacattggtaattaacaacatagagtatgatcacgccgacatatttgctgatttagagtcaatcaagaagcaattccaccatttgattcgtacactacctgagtcggggaccgtaatttttccggcaggtgatgaggcaattgaatcggtcttagcggcagggtgttggagcaatcaaagtcgctatggccacttggagggagattggcgatatcatgtggctgatcaaagcgcgaaatttgaaattttgcgagacacgcccggtcgacttcagcaaggtaaggttgattggcttttgagtggtcgtcacaatgtatataacggagtagcggccgtaatggctgcatatcaagctggcgtttctgtcaaatacagttgtgagatactaagtcgctttccaggcgtaaaaaggcggatggaaacgctttacaatgaggatgattttgtactttatgacgattttgcgcatcatccaacggctatagagacaacactagcaggtcttagacaaaaggtgggtaaatcgcgtatcgttgcggtaattgaaccgagatcagcgagcatgcgccggggtgtgcacaatgagagactgg

SEQ ID NO: 313080 - DNA, 658 bp, Unknown
  Bacterial polypeptide expressing nucleotide sequence isolated from the Sargasso Sea
atgaaattaaataaaaataaattaatacacattgtaggagttggtggaattgggatgagtggaattgcagaaattctatcagaaatgggatatcaagttcaaggaagtgacataaaaatcaacgcaaacattgttcgattaaataaaaagaaaataaaaactttcaattcacataaaaagtcaaatttaaaaaatgtaagcttagttgtctattcatctgcaataagtaaaaacaatattgagcttgaacattccaaaaaacttaaaattccatctatttcaagagctgaaatattatttcaaattgtaaaactaaaaaaaactatagctatatctgggtctcatggaaaaactactacgacatctctaatttcagcagttttaaatggggcaagaatgaaacccactgtaatcaatggcgggataataaatcagtttggaacaaatacaaaattaggatcaggcgattggttagttgttgaagctgatgaatctgacggtacttttgtgaaacttcccgcctcaatttctgtggtaactaatattgatagagaacatcttgattactattcaaattttcaaaatctaaaaaactatttcaaaagatttatcacacaagttcctttttatggtttcgctagttatatgtatagatgat

SEQ ID NO: 313081 - DNA, 439 bp, Unknown
  Bacterial polypeptide expressing nucleotide sequence isolated from the Sargasso Sea
aatgaaaattaatatagcaagtaatgaggttatacattttattggaataggcggaatagggatgagcgggttggctcaaattatgaaaaatatgggttttataattcagggaagcgatttatctcaaaataaaaatactgaaagattaataaaaagaggaatcaaagtttattttggacacaataaaaaaaatttaaaaagagctaccatgatagtcatttcttcagcaattaaaaaaaataatagagaattaaaagcagcacaatataaaagattgccagtttttaagagaggtgaaatgttagctaatattgtagctctaaaaaagaatgttgttataacgggctcacatggaaaaactacaaccacatctttagttgcaaatattttgttagaagctaggattagatccaactgtaatcaatggaggtgtaattaa

SEQ ID NO: 313082 - DNA, 585 bp, Unknown
  Bacterial polypeptide expressing nucleotide sequence isolated from the Sargasso Sea
tatggaaattgaaattgctaaaaaagagataattcattttattggtattgggggaattggcatgtctggtttagccctaataatgaaaagcaaaggttttaaagttcaaggtagcgatttaaattcaaacaaaaatgttgatagattgaaaaaagaaaaaataggtgtttttattgggcataaaaaaaaaaatataaataacgcaactataattgtaatttcatcagcaattaaacccaacaatccggaaattattcaagcaaaaaaaaagcaccttcccatttataaaagaggagatatgctcgcacatattgtctcattaaatcaaaatattgttatagctggttctcatggaaaaaccacaacaacatctttaattgcaggtattttttctaatgcgaaacttgacccaacaattataaacggtggggttttaaattcccttaagggttctgctagattaggcaaaagtaattggtgtattcttgagtcagatgagtcagatggtagttttgtaaaacttccacctacttactcagtcataacaaatattgatagagaacatatagagtattataaatcatt

SEQ ID NO: 313083 - DNA, 502 bp, Unknown
  Bacterial polypeptide expressing nucleotide sequence isolated from the Sargasso Sea
atgaataaaatcaaaataaatttaaatcaaaaaatacactttataggaataggtgggattggaatgagtggtctcgctcagattatgaaaaatatgggctttaacgttcagggaagtgatatgataaatagcaaaaatgtagaaagatgtagaaaaattgggattaaaatatttagatcacataaaaaagaaaatatagatcacacttcgatagttataaaatcttcagctataaaaaataacaacccagaaataaaagcagcaactgaaaaaaatattactgtattaaaaagagcagaaatgttggcacatgttgtggctttaaaaaccaacatagtgataactggttctcacggcaaaacaacaactacatccttaatttcaaatatactttcacaagcaaaattcgatcctaccataataaatgggggaataattaattctttcaatggaaatgccagacttggaaaaggtaactgggcggtactagaagcggacgagt

SEQ ID NO: 313084 - DNA, 665 bp, Unknown
  Bacterial polypeptide expressing nucleotide sequence isolated from the Sargasso Sea
aatgcagcaatttaagaaaataagaaatattcattttataggcattggtgggtctggaatgataggaattgcaacaattcttcacaagaaaggatataacatttcgggttcagatatctccaaaacaaaagatctggatgagttagcaaagtcaggcgttgaagtaacttactcgcacaaaagcaagaacataaacaataaagacttaattgttttatcctccgcaattgattcttcaaatgtagaggtatcttctgcaaaaaagaaaaatataccaattattcctagggctgaaatgcttagcggtatttccagaggataccaaggaatagcagttgctggcagccatggaaaaacaaccacaacaagcttaattgctcatatctttaatcaagctttattgagtccaacttatgtaattgggggaaaaatacttagttcagacggtaactcacgtcttggtgacgggaattttttcatatttgaggcagatgaaagtgataaatcttttttaagtttttatcctgattccgctgttataacaaatatagatgatgatcatcttgaggcttatgagggcaatattaacaacttgaaagaatcttttttagatttttcagataatattcctttttttggatatgtcattgctaattatgatgata

SEQ ID NO: 313085 - DNA, 792 bp, Unknown
  Bacterial polypeptide expressing nucleotide sequence isolated from the Sargasso Sea
tcggaaacggtgaatggatggtcgtagaggctgatgagagtgatggtagttttgcaaaattaaatccaacagttgcaataattacaaacattgacttagagcaccttgattatcataaatcagaagaaaatttagaaagagcattcttgcattttgtatcatcaataccattttatggatttgtttgtctttgtatagataacccacgaacacaaaaattaatttcaaaactagaaaataaaaaagttattacatatggcttgtctgctaatgctgacattagagcaacaaacatttcttataaagaaaacaaaatgtttttttcattaaatatctcaaacctaaaagagcataattataagaattatgaaatagagttttctatgattggattacacaatattcaaaatgcacttgcaagtatagcagtaggaattgaactggatattccaattacaaaaattaagaaaacattgaaaagttttacgggtattcaaagaagatttcaaaaagttggaaattttaatgaaacatttataatagatgattatggacatcatcccgttgaaataagtgctgcacttgctgcagcaaggcttattacgcccaaacataaaattataagtgtttttcagcctcatcgttatagtagattaagagatttatttaacgatttctgtagttgttttaatgatgctgaccatgttttacttcttgatgtattttctgcgggcgaagagcccataactaattttaaaagtactgatttagaagttggtctatccaactagg

SEQ ID NO: 313086 - DNA, 547 bp, Unknown
  Bacterial polypeptide expressing nucleotide sequence isolated from the Sargasso Sea
aatggaaaaatctaaaattagttttagtgaaagaattcattttattggtattggtggtattggaatgagcgggttagctgaagtaatgaaagatatgggatttaatgttcaagggagtgatattgctaacaacaaaaatattgaaagatgcagaaaaaatggaattaaaatttttttgaaacacaacaaaagaaatattagaaattcctcgattatagttaaatcttcagccattggaaataataatccagaaataatttttgcaaaaaataataaattaaaaattttaaaaagagcagaaatgcttgcgcatgtcgtttcactaaaaaaaaatattgtaataacaggttcacatggaaaaaccactacaacatctcttatttcaagaattttatacgatgccaaattagatccaacaataataaacggaggtgtaataaattctataaaaagttcagctagacttggaaagggtgattgggcagttttagaagcggacgaatctgatggaagttttttaaatttccagtcaattattctgttgtaa

SEQ ID NO: 313087 - DNA, 930 bp, Unknown
  Bacterial polypeptide expressing nucleotide sequence isolated from the Sargasso Sea
ttggagagggtgactatatcattgttgaggctgatgaaagcgacggatcatttcttcatcttcaccctgatatttctgtaattacaaatatagacaacgatcatttagatttttatgagtcaaatcaagaaaaattaaatcaatcttttgtaagttttgcagaaaatttgcctttttatggctatattttactcaatttagatgacttaaacattaaaaaaatttctaaagatattcacagaaggcaaataacatttggctttggtgcaaaaaatagatttcagataaccgatataaagctaagaaatggtgttcaaaaatttaaaattacagaccatagcaataaaaaatattataaatttactacgcatttaagtggcaaacataatctatacaatgttaccgctgctatttgtgtagccattgaagaaaatatttctatcaagaatatttcaaaaggattaaatgattttcaaggtgtaggtagaaggtttgagatttcaaatcttaatttctatgataagcctcgaattttaatagatgattatggtcatcatcctgttgaaattacagcaaccattcaagcaatacgccaaaaatttcctcgtaagaaaatatgcatgatttttgagccacatagatttactagaacccaacaactttttaatgattttgtaaaagtgctctcccaagtagatagcttgctgcttttagacatatatcccgccagtgaaaaaccaatcaaaggaatttcctcaaaaaaattaatttctaagatagccaaaagccacaaaaatgctgaatatattggaaagtctgaccctttagtttggctgcaatcaaattataaaaatttctcgattttaattacacaaggtgcaggaactatatcaaaattgaataaaaagattaaacataagtggcaataga

SEQ ID NO: 313088 - DNA, 614 bp, Unknown
  Bacterial polypeptide expressing nucleotide sequence isolated from the Sargasso Sea
aatgaaaattaaattagcaaaaaaagaaattattcattttataggaataggcggaataggtatgagtggactttcattgataatgaagagtcaagggtttaaagttcaaggaagcgatataagcacaaataaaaatattgaaagattaaaaaaagaaaaaattaaaatttttttaggtcaatcaaaaaaaaatttaaaaaatattacaatcgtagttatttcatctgcaattaaaaaaaacaatcctgaattaattgaagctaaaagaaaaaaaattccaataattagaagaggagaaatgttagctagcattgtatctttaatgaaaaatattgttgttgttggatcacatggaaaaacaacaacaacctcattaattgcttctatttttcaagaaacaaaaattgatcccactattattaatggtggagtcattaattcaataaaaaatactgctagactcggaaaaagtgattggtcaattttggaagcagatgagtccgatggtagttttgtgcatattgcccctacttactcaataattactaacattgatagagaacatatggatttttacaagtcaatgaatgctttgaagaatattttgttgaatt

SEQ ID NO: 313089 - DNA, 709 bp, Unknown
  Bacterial polypeptide expressing nucleotide sequence isolated from the Sargasso Sea
aatgaataaatataaagaagtatacatattaggtatcggaggctcggggatgagttctatagctaaatatttggttcaacaaaatattgatgtggctggctacgatcaacggaaatcatttataactaaccagttgaatcaagatggcataaaagttgattttaaattaagtaatttaaaatattctaagaaaatactttatatctattcatcagctatttcaattaacgaaacaacgttaaaagattatttagatagtgataatgttttatcaagaccagaatttcttaatatattatcaaaagaaaataaaattattggaattactggaactcatggaaagacatcaactactgcactgctagctcacatattccattataacgaaaggaatgtctcatacatatttggaggtattacctcattccatgggatagggggacattatggtgatcaggatcagcctattattttagaaacagatgaggcgtttaatacatttaaagacattaatatcgatgatttattagtaacaaatattgatgttgatcatcttgattattttaaaaattttaaaaacttgctcaatgcattcaagcatgtaatagagaacgttaaaggtaatttagtactaaattttgatgatcagaacttaagagaattgaaaacaagcaataattgcattagttattcttcatcagaagtgcag

SEQ ID NO: 313090 - DNA, 421 bp, Unknown
  Bacterial polypeptide expressing nucleotide sequence isolated from the Sargasso Sea
atgcagcaatttaagaaaataagaaatattcattttataggcattggtgggtctggaatgataggaattgcaacaattcttcacaagaaaggatataacatttcgggttcagatatctccaaaacaaaagatttggatgagttagcaaagtcaggcgttgacgtaacttactcgcacaaaagcaagaacataaacaataaagacttaattgttttatcctccgcgattgattcttcaaatatagaggtatcttctgcaaaaaagaaaaatataccagttattcctagggctgaaatgcttagtggtatttccagaggataccaaggtatagcggttgctggcagtcatggaaaaacaacaacaacaagcttaattgctcatatctttaatcaagctttattaagtcgcgaacttatgtaat

SEQ ID NO: 313091 - DNA, 631 bp, Unknown
  Bacterial polypeptide expressing nucleotide sequence isolated from the Sargasso Sea
atgtctaaaaaaagagttcatattcttggaatttgcggcactttcatgggggggcttgctttattaggcaaagagaagggcatggatatttcaggatgtgataataatgtttatcctcccatgtcagatcatctcaatgacatgggaattgaaataattgagagttatgatccttctcatcttccaaaggcagatgaatatgtaattggaaattcaattatcagaggaaatccagctcttgaacatttactatcttcaaaagctaatataatgtctgggccagaatggttatacagcaatattctaaaaaatagaaaagtgatagctgtttcaggaacgcatggaaaaactactaccacggcaatgattgcctggatattccaagaccagggtatcgagacaggatatttgatagcaggaaaacctaaagatttcgagaaatctgctagaaaaggcaaacaggatatatttgttttagaagcagatgagtatgacacagctttttttgataaaaggtcgaagtttattcactataagcctgacacacttatcatcaataatttagaatttgatcatgcagacatatttccagacctgtcatacatctatagggagttccataatttaatca

SEQ ID NO: 313092 - DNA, 697 bp, Unknown
  Bacterial polypeptide expressing nucleotide sequence isolated from the Sargasso Sea
aaaattattagaactggtttccatagagaaagtgatatcaaatgtattaaactaagacataaagctaatgagacaatatttgatgtttatgtaaaagagaaaaatcaaacaatcaaaaatattaagttaccatttcatggagtatataatgtaaataatgcattagctgctatagcagttggtcttcaattaaatgtaaaaccagaaataattaagaagtctcttaattcttttaaaggtgtccaaagaagacttactgagttatggagtaataataacataagggttgttgatgattatgctcatcacccgactgaaattaataatgtcttaaaaggattggttgatgcagacaaaaaaaatagaataataaccattttccagcctcatagattctcaagggttttagatttgaaaaacaaatttacgacgtgttttaaatatagtgaaagtgtatttgtttcggatgtatatggagcgggagaaaaaaaaccaaaaaatttcgacttaaatagatttatcagtaaaattgcaaaaaattccaaagttaaagcagaatattttgttaaaaatgatcaactatttgaattaacaaaaaagaatagatcaaaaatgatctttttatttttaggagcagggacagttacagattgggctcaaaattttgctaaagagttaaagaaaatttatgaatgaa

SEQ ID NO: 313093 - DNA, 505 bp, Unknown
  Bacterial polypeptide expressing nucleotide sequence isolated from the Sargasso Sea
atgactgggactttagctgaaggaaaaatagatctaggttccagattatccattcatattgttggaataggtggagcggggatgagggctatcgcattagtcctttcttcgatggggcattcggtatcaggaagcgatttaaagagctcatcaggactggaccgcctgacagcctctggcattgaagtaacaattgggcacgatatatctaatgttgggcgaattgatattgttacccgctcaacagcagtcactgacaggaatatcgaaataagagaagcgaggaagcgagacatacctgtggtaagtcgagcagagatcctaagtgctattaccagaatgaaacgaactgtttctgtcgcggggacacatggtaaaacgaccacctcgtcaatgcttgcagtattacttgcgaaggctaatttaaacccttcgttcattattggtggtgaggttaacgaaattggttgtggagcactgtgggaagatgactctaacttgtttg

SEQ ID NO: 313094 - DNA, 760 bp, Unknown
  Bacterial polypeptide expressing nucleotide sequence isolated from the Sargasso Sea
aatgactgggtttttacaaggtaatattttgcatatacatatcctaggaatttgtggaacctttatggcaagtcttgctggaatagctaaagaaaaaggtattaaggtaactggccaggacaaagcttattacccaccgatgagtaatcaacttcaagaccttaatattaaagaaaatctaacagaagatataactgatgacttgaagaattgtgattcagttatcattggtaattcattatcacgtggcgataaatctgtcgaatatgttttaaaaaataatttatcttttttttctggtcctgagtggattagaaataatattctgcaagataaatttgtttttgtagtcgctggtactcacggaaaaacaacaacaacagcaatgttaatagaaattttaaatggctgtgggtttaacccatcgtatttagttggggggatattaaaaaatgaaaataaaggttatagatatactgactctgattattttataatagaaggcgatgaatacgatacaagcttctttgataaaagatcaaagtttattcactataagccaaatgtcctaatcataaataatatagaatatgaccattctgatatttttgaagatattgaacaaatcaaaaaacaatttcattttttgattagatctatgccaagtaatgctaacattatttgcaacccaaaggatatcaacaccaaatcattattagaaatgggttgttggtcaaataaaattaatttttaccctatt

SEQ ID NO: 313095 - DNA, 792 bp, Unknown
  Bacterial polypeptide expressing nucleotide sequence isolated from the Sargasso Sea
catgctctatagtattaaaaaagtacacttaattggaataggtggaattggaatgagtggaatagcagagctactgaaaaataaggaatttgtggtttcaggttctgatattgctgattcaccaaatgttcaaagattaatagatttaggaataaatgtatctattggtcataataaagaaaatatttctgatgctgaactagtaatatattctgatgccatccctaaagaaaattcggagttggtagaagcattagcaaaaaatataattgtttattccagagcaagaatgatatctgaaattgctaagttaaataattctacagttgcaattgctggaacacacggaaaaaccactacaacatcaatggttggtactattttaaaagctatcaatctagaccccacaattattgttggtggggttgttaagtctctagaatccaactcagttttaggaaaaggagatacatttgttgttgaagctgacgagtataataaaagtttactacatttgagtccaacaattgcggtcattaacaatattgattttgaacatattgaatgctttaaagatattgatgatctaaaaaacacatttcttcaatttgcaaattcagttcctttctatggtactgtttgtgcatgtaaagattccaaaaatgttgcatcaatattatcaaaaatagataaacctttaatcacatatggaatcgatagtcaagatattgatattaaggcagaaaatttatatcaggaaaatggtaatatttcttttgatgtaagagttaa

SEQ ID NO: 313096 - DNA, 464 bp, Unknown
  Bacterial polypeptide expressing nucleotide sequence isolated from the Sargasso Sea
tatggaaaaatctaaaataagttatagagagaaaattcatttcattgggataggcggaataggcatgagtggtcttgctgaggtaatgaaagatatgggttttaatgtgcaaggcagtgatgtttcaaatagtaaaaatattgagagatgtagaaaaaacggaattaaagtctttattaaacataataaaaaaaatataaagaattcaagtatcattgtaagatcttcagcaataagtaataagaatcccgaaataaagtttgcaaagaaaagaaaaattaaaattctaaggagagctgaaatgcttgcgcatgtggttgcattaaagaaaaatattgttgtaaccggttcacatggaaaaactactactacatctttaatttcaaggatattgtatgatgcaaaattagaccctacgattataaatggtggagtaatcaattcaataaaaagttctgccagac

SEQ ID NO: 313097 - DNA, 850 bp, Unknown
  Bacterial polypeptide expressing nucleotide sequence isolated from the Sargasso Sea
atgaaaattgatttagcaaagtctgagattatccactttgttggaattggtggaataggcatgagtgggttagcgctaataatgcatggtatgggttttcaaattcaaggttcagatatttccttaaataaaaatattgaaagattaaaaaaaaaaaagattaaaatttctataggacataataagagaaatataaatacagccacagtattagttatatcctcagcaataaaaaaaaataatcctgagtttaaagagggaaaaatgaaaaacttaccaatctataaaagaggtgagatgcttggccatattgcctctttgacaaaaaacataacagtagttggttctcatggtaaaacgacaaccacgtctttaattgcatcaatattttcaaaaacaaaaattgatcccacgatcgttaacggtggagttttaaattcttttaatagttctgccagattgggaaatagtaattggagtattctggaattagatgaatccgatggtagttttatagaggtattaccaacttattcaattattacaaacattgatagggagcatatggattattataagaatatggagaacttaaaaaatcttttcaaaaaatttctagaaaaagtcccatcatttggaaaatctttcatatgtttggatgacaaaattaacaagcaaataataaaaaaacttaaaataaaaaattattatacatatggagtaaacaaaaaatctaattttaatattacgaatatttctcaaaataaaaatttttctaaatttgacttaaaaatatttttgcctggaaaaaaaaaggatataataaaaaatataaaaatacctatttagg

SEQ ID NO: 313098 - DNA, 543 bp, Unknown
  Bacterial polypeptide expressing nucleotide sequence isolated from the Sargasso Sea
catgctaggcgatcataatgtgcagaactgccttgccgccattggggttgcgctggaaatgaatatagatgcagagcggataaggcaagcactcgctgcctttggcggagttggccgccgatttgaggccaagggcattagtaatggagtaacggttattgatgattatggccatcatccagtagaaatcaccgccgcgttaaaagccggccgtatgctttgcggtaataataagctgatagccgttgtccagccacaccgctttagccgccttgcagatttattcaccgatttctgtagctgtttaaatgaagctgatgaggtgttggttgctgatgtctatgcggctggtgaggcgcatattgaaggagctgataaggccgcccttgttgctgggcttcgtgattatgggcacaaatctgctgccagcctcgaggggcctgagtcactggccactgaaattgctacacgaaccagtgccggtgacgtggtgatgtgtcttggcgctggcgatattacccgctgggcagccgcacttccggc

SEQ ID NO: 313099 - DNA, 739 bp, Unknown
  Bacterial polypeptide expressing nucleotide sequence isolated from the Sargasso Sea
ttggaaaaaaaattactgttgaaaagtcattttcattttattgggatcggagggattggaatgtcagcattagcaatgggtttacttaaaaaaggttgttcagtttcaggatctgatttagttaaaaacgatgaaactaaaaaattagaggaattaggtgcattaatctttccttctcaaattcgacaaaatattgaatttgttatttcaaaattttccaacaaattgattaattttgttgtaagctccgcaatcaagcccgaaaatgaagaattttcgtactgcagagaaaaaaatttatcaataaaacatcgttccgagatacttgcaatgctaatgcgcacttatactgcattggcggtagccggcagccacggaaaaacgtcaaccagtacatttctatctacaatacttgagttatgtacgcgtaattcttcttcaataaccggaggaataattcctatttacaactctaattgtcatctagaaaatacaaaatacttagtagctgaagttgatgaatctgatgggtcaattaacaaatataattctgatatcggaataatcaataacattgattttgatcattgtgatcacttttctaatttaagtgaagtcatatcttcttttaaaagtttcgctaaaaactctaaaaaattattatttaattttgattgtgaaacctcaagaaataattgttattctaattttcagtggtcaaacaatacagctaaaaacg

SEQ ID NO: 313100 - DNA, 653 bp, Unknown
  Bacterial polypeptide expressing nucleotide sequence isolated from the Sargasso Sea
aatgaaactctttaaaaaagcaaaaaatattcattttgttggcattggcggagcaggaatgattggtattgcaagagtattattgcaaaaaggatataaaatatctggttcagatatatctgattccaatgagcttgaaaagcttaaaaaggatggagctaaagtttacataggacattctaaagaaaatatattaggagctgatttgttggttgtgtcttcagcaattcataaaaagaatcctgaaattattaaagctaggaaagaatcaataacaattattccaagagcagaaatgttaggcagtattatgattggatatgaaagtattgccgtcgctggaagccatggaaaaacaaccactaccagtatgattgcaaaaatattaagtgttgcaaatttgagtcctacatatgtggttggaggcaaagttttaagtactgatgaaaattctaatttaggcgaaggcaattacatcgttgcagaagcagatgagagtgatggatctttcacccatcttcagccagatgttgctgtaataactaatatagatgatgatcatttgtcatattatgataatatttttgataatttattagattcatttataaagtttttagaaaatattcctttttatggctatatggttatta

SEQ ID NO: 313101 - DNA, 390 bp, Unknown
  Bacterial polypeptide expressing nucleotide sequence isolated from the Sargasso Sea
catgaaaattaatattgctagtaatgaagtaattcactttataggaataggtggaataggaatgagtggcttggcgcaaattatgaataatatgggttttagtattcaaggaagtgatttaaatcgaaataaaaatactgatagattaattaaatcaggaataaaagtttatttgggacatcatagtagaaatttaaaaaaagctacaatggtagttatttcttcagctgttaaaaaaaataataaagaattaaaattttctaaagaaaagaatttgcctatttttaaaagaggtgaaatgcttgctaatattatagctttaaagaaaaatattataattactggttcacacggaaaaacgactacaacatctttggtagctaatatctt

SEQ ID NO: 313102 - DNA, 840 bp, Unknown
  Bacterial polypeptide expressing nucleotide sequence isolated from the Sargasso Sea
attacaagctaaaaaaaaacacctaccaatttacgaaagagctgagatgttagctaatatcgtagctttaaaaaaaaatattatagttactggttctcatgggaaaacaactacgacttcattaattgcaaaaattctatcagaagctgagctagatccaacaataattaatggaggcgttataaactctattaatagtaacgcaaaacttggtaaaggtgatttaactgttttagaggcagacgagtctgatggtagttttttaaaattaccagtgaactactcagttataacaaatttagacctagagcatctggatttttataaaacctatgaaaatttaaaaaaagcttttataaaatttattaataaaacacctccaattgggaagtgttttatttgttctgataatgtagacctgagaaatattcttaaaaacactaaaacaaaaaattatgaaacatatggttttaacaaaaattgcgattatcaaatttgtaatgaaaagttcagtattaataattcaaaatttgatttgacgattaaggataaaaataaaaataaaaaatattttaaaaatataattgtaagtttaatgggaaaacataacatattaaataccactgcagctatttctatttgtctaaatttaggtatcgctccaaaaataattaaaaaagctttatacaatttttcaggtgttcaaagaagaatgacaaaaattttctcaaaaaacaaggttgaattttatgatgattatgcacatcatcctactgaaatcttctctgttctcgagtctgtcaaaaaagtctttcaaaaaagaaaaattatatcaatttt

SEQ ID NO: 313103 - DNA, 875 bp, Unknown
  Bacterial polypeptide expressing nucleotide sequence isolated from the Sargasso Sea
atcgcttccagtttataaaagaggcgatatgttagcccacgtcgtttctttattaaatagaaatattgttgttgcgggatctcatggcaaaacaaccactacatcattagtttcaagtattttttcaaaatctaaattagatcctacaataatcaatggtggagtaataaattcttttaataattctgcaaaactaggaaaaagtgattggtgtattttagaatcagatgaatcggacggaagttttattaaggtttcacccacttactcaataataacgaatatagatcaagagcacatggactactataagaatataactaaacttaaagagttatttataaaatttatagaaaaaacgccttcttttggaaaatcattcatttgcatagatgacaaaaataataaagaaataataaaaaaaataaaaataaaaaattttcatacttatggagttgaaaaaaattcacaattttgtattcaaaatattatacaatcaaaagaatattctagatttagtattgatataaaactaccaggtaagaaaaaaaataaaattcataatattaaaattccacttctcggacttcacaatattcgaaatgcaactgctgcagtagcagtagccactacaattggaatttctgcaaaaatcataaaacaagctttaaaagaatttaaaggagttcaaagaagatttaataaaatatttacatttaggaaagtagatttttttgatgattatgctcatcatccaacagaaattatagagctcttaaagggtgttagaaattcttacaaaaaggaagaaattatttgtgtgtttcaaccacacagaatatctcgaataaataatttaaaaaaaagagtttagc

SEQ ID NO: 313104 - DNA, 749 bp, Unknown
  Bacterial polypeptide expressing nucleotide sequence isolated from the Sargasso Sea
actgggcggaataattccaatatataattctaactgtcatttagaaaatacaaaattcttagtagctgaagtggatgaatctgatgggacaataaataaatataaatctgatatcggaataattaataacattgattttgatcattgtgatcatttttctgatttagatgatgttttatgttcttttaaggattttgcttcaaattctaaaaaattattacttaattatgattgtgaaattacaagaaataattttcattctaataatacttggtcaataactacgaaaaacaacgtatcttatgcaatcatccctactgaaattaataaaagctatacgattggcaaatattatgaaaatggaaatttcattaataatttaaagattccaataccaggattacacaatttatcaaatattactgcttcaatagcagccgccagaatgataggagtagattttatagaaataaaaaagaatattcaatatctaaaactaccaaaaaaaagatttgaatttagagggcaaatagatgcaagatatatatatgatgattatgcacatcacccaaacgagattaaagcaacgattaaattaggaagattatttattaaagaaaatcctaataatgacttaagaagcaatagattaatagctgtatttcaacctcacaggtactcaagggtcaaacaatttgcgcaagaaattgctaaggaactatcaaaagcagatattatttacgtaacta

SEQ ID NO: 313105 - DNA, 831 bp, Unknown
  Bacterial polypeptide expressing nucleotide sequence isolated from the Sargasso Sea
tcacacggtaagactactaccacatctctaatagcttctatttttcaagaaacgaaaatagatccaactataattaatggaggagtaataaactctataaacaattctgcaaaacttggcaaaagcgaatggtcaatattagaagctgacgagtcagatggtagttttgtttatacccctgcgacatatgcaattataacaaatatcgatagagagcatatggattattatcaatctatggataaattaaataaatattttgtaaattttgtaaataaggttccatcttttggaaaatcatttgtttgtttagataacaaaaataataaaagtttgataaaaaaattaaaaaataaaaatttttatacttatgggacagataacaaatctaattttagcattaaaaatataaaacaatttagagaatactcagaatacgatttaaaagttatattacccaataaaaaaattagaataattaaaaaaataaaaattcccttgctgggtttacataatattaaaaattcaacagctgcaactgccttagcgcttagtgttggtttaagtatttcaaatattaaaaaaggacttagaaactttaaaggtgtacaaagaagatttaataaaatttttacctttaacagagttgatttttttgatgactatgcgcatcacccaactgaaattaaagaagttttaaatggagtaaaaaaagtttattcaaattatgaaaaaatatgtatttttcagccacacaggatatcaagactaaaagatttgagagcagaatttgcctctgcatttaaaaatgctgacaaagtaattcttttt

SEQ ID NO: 313106 - DNA, 804 bp, Unknown
  Bacterial polypeptide expressing nucleotide sequence isolated from the Sargasso Sea
aggaaaggtggattgggccatactagaagcagatgaatctgacggtagttttttaaagctaccaataaactattcaatagtaactaatattgattttgaacatatagattattacaaaaattataaaaatttagaaaatgcctttatacaatttataaataaaactcctccaattggtaaatcattaatttgtattgacaataaaaatattatgaaaattttaaaaaaaataaaaaataagaatatattaacatatgggtttaataaaaaagctaattatagaattagtaatccaaggtattatgctactcactccctctttgattttcattataaaaatttagataattcgaaagcaacaattaaaaacattaatttaaaattaataggagaacataatgttctgaatgcgtctgctgctgcagctgtctgtataaatctaggagtaaaaactgatattattaaaaaagctttaaaaaacttttcaggagttcagagaaggatgactaaagtatttacaaaaaataaaaatgaattttttgatgattatgctcaccatccaacagaaatttcttcaatattagaaggagttcataaagtttataataacagaaaaattatttcagtttttgaacctcatcgatactctagagtaatgtcattaaaattaaacttttctaaagcatttataaaatctgatctagttttaatttgtcctatgtatgccgctggtgaaaagaaaaatttaaattttaatctattaaattttgcaaaactaatatctaaaaattctagaactcaggt

SEQ ID NO: 313107 - DNA, 709 bp, Unknown
  Bacterial polypeptide expressing nucleotide sequence isolated from the Sargasso Sea
atgaaaattaaattagcaaaaacggaattaatacattttattggtattggcggtattggcatgagtggtttagctctaataatgaaaggcaaaggttttagggtccagggtagtgatatctctatcaataaaaatatagaaaggcttaaaaaagaaaaaataaaagttttaataggacataaaaaacaaaatataaataaagcaacaatattagttatatcttcagctataaaaaaaaataatcctgaaatgttagaggcaattaataaacagttgcctatttataaaagaggcgaaatgttagcaaatattgtatctttaacgaaaaatatagtcgttgtgggctctcatggcaagactactaccacatctctagttgcttctatttttcaagaaactaaaatagatccaactatcatcaatggaggtgtaataaactctataaataattctgcaaaacttggtaaaagtgaatggtcaatattagaagccgatgaatcagatggtagctttgttcatacccctccaacgtatgcaatcataacaaatatcgatagagaacacatggactattatggttctatggataaattaaataaatattttgtaaattttgttaacaaagttccatcgtttggaaaatcatttatttgtttagataataaaaataataaaaacttattaaataaattaaaaaacaaaaattttt

SEQ ID NO: 313108 - DNA, 898 bp, Unknown
  Bacterial polypeptide expressing nucleotide sequence isolated from the Sargasso Sea
aactattcttgaaaaagctaaatatgatcctaccgtaattaatggtggtgtaataaattcatataatagtaatgctaagttaggaagaagtgattggatggttgtagaggctgatgagtctgatggtagctttttaaaacttcctgctagttttgtaattgttaccaatattgatgctgaacatatagatttttataaaagttttaaagaattaaaaaatgctttcaaaaaatttataaacaacattcctttttatggtgcagcaattatttgtatagatgatcctactatacaaagtattatatcagaaatagaagataaaaaaattatcacttatggtttaagtcctcaagctgactttagagcaactaatattgtatttaaagactcaaaaacattcttttccttagaaataagtccgaagaaggacgcatcggcaaaaaaaattgagaacatggtttctaatattccaggtattcataatgtccaaaatattttatcagtttgttctatggctgtagagcttggtatagatttggagataattaaactagccttattaggttttgaaggagtaaatagaaggttctcattaattaaaaattataaaggaattcaaatttttgatgattatggacatcatcctatagaaattaaagcgactctttctgcttccagagaaatcacaaaagataaagtagtagctatagttcagcctcatagatatacaagattaaaattattatttgaagattttacttctgcatttaatgatgcagatatagtatttataacagaaatatattctgctggagagtcacatagttttgatttaacaaactataccttaattaatgctttaatatcaagaggtcataaggatgttagagccttttaa

SEQ ID NO: 313109 - DNA, 487 bp, Unknown
  Bacterial polypeptide expressing nucleotide sequence isolated from the Sargasso Sea
tataagaattaatgttataaaaagatctcttaaaaaatttacaggtattcaaagaagattaacgaaaatttttactattaaaggaagagaattttttgatgattatgcccaccatccaacagaaataaaatcagttttaaaaagtttaaaagctacctcaacaggaagaaaggtagtttctgtttttcagccgcacagatattcaagactaagatctttaaaaaaggatttcgcatcctcattttctaattcagatttagttattttgtgtccagtttatcccgctggagaaaaaatagataaaaaatatgacccaattaatttttcaaagttaatttcacaacagtctaaagttcaagtaattatggcaaaagatgaaaaatatctaaaaaatttttttaataaaaatttaatacacgatgaaatagtggtttgtatgggagcagggtccatttcaaaatggattcgagaaatggatttaaaataa

SEQ ID NO: 313110 - DNA, 374 bp, Unknown
  Bacterial polypeptide expressing nucleotide sequence isolated from the Sargasso Sea
tatgaaaattgatctaggaaaaaatgaactaattcattttgttggaattggtggaattggtatgagtggtcttgcattgatcatgaatggcttgggctacaaagtacaaggtagtgacattgtcgataatcgaaatattgataaattaaaagaaaaaaaaataaaagtatttttaaatcaaaaaaaggagaatataaaaaaaactaccgtcctagtaatttcttcagcgattaaaaaaaataatccggaattgattgaggcaattaaaaaaaatttaccagtttatacaagaggtgacatgttaggtcatatagtatctttcatgagaaatgtagttgtaactggttcacatggaaaaacaacaacgacatcat

SEQ ID NO: 313111 - DNA, 396 bp, Unknown
  Bacterial polypeptide expressing nucleotide sequence isolated from the Sargasso Sea
atgattacgctcatcatccaacagaaattaaagcagtaataaaaggagcaagagaagtttacaaaaaaagaaagataatttgcgtatttcaaccccatcgttattcaagggtaaaaatgctaaaaaatcaatttgcagagtctttttcgaatgcagataccgtagtgctttgcccagtttattcagcaggagaaaaaataaaatataattttgatcaaaaaatattctttaaattgatttcaaaaaaatctaacatgcaagtaattaatataaataataaaaatgatctaaaaatttatttcaaaaaaaacttattagatgatgaaattataatctgtatgggagctggaagtatttcaaattggataagagaaattggaaatgaattaaaatgaa

SEQ ID NO: 313112 - DNA, 758 bp, Unknown
  Bacterial polypeptide expressing nucleotide sequence isolated from the Sargasso Sea
attgggaataatcaataacattgattttgatcattgcgatcacttttctaatttaagtgaagtcatatcttcttttaaaagtttcgctaaaaactctaaaaaattattacttaattttgattgtgaaacctcaagaaaaaatttttattctaattgtaagtggtcaaactctacggttaaaaacgtagcatatgcaataatcccgactgaaattaattcaaagtatacaattggaaaatattatgaaaatggaaattttatcagtaatttaaatattccaattccaggactacacaatctatccaatatcaccgcagcaatagcagcctccagaatgataggagtagattttatagaaattaagaaaaatttaaaatatttgaaactgccaaaaaaaagatttgaatttagaggccaaatagatgaaaggagtttttatgatgattatgctcatcacccaaacgaaataaaagagacgcttaaattaggaagattatttattaagcaaaaaaataataatgaatttcaaaaaaataggttagttgctttatttcaacctcatagatattctcgagtaaagcaatttaataaagaattcgctgaagaattatcaaaagcagatgttatttatgtgacaagtatttatggagcaggagaagggaacgaagaaaaaattacttcgaaaattattacagatttgatttataaaaaaaataaaaatgttagttacataaataattattatgaagttacaaaga

SEQ ID NO: 313113 - DNA, 737 bp, Unknown
  Bacterial polypeptide expressing nucleotide sequence isolated from the Sargasso Sea
aaacaaagatagaagattattaacttatgggttgtctgcaactgcagatgtcaaggctataaatattaactttttaaatgaatttacatcttttgatttagttttatcgaataaaatttctaatgattcactgatttggaagaatgtaaagcttccaatgcatggacatcacaatgttttaaattgccttgcctcaatagctatttctgttgagatgggaatttctgaaaaaagtatcaggaagtctttagaaaattttaaaggtataaaaagacgctttgaaaaaaaaggctctacaaatactggtgtgaaagttgtggatgactacggtcatcatcctgtagaaataaattatgcactaagttcaggaagaattttagctaaaaaaaataaacttattgctgtttttcaacctcatagattttctagattaagggatttatttcatgatttctgtggttgctttaataatgctgattatgtttttattactgatgtttatgcagcgggtgaagaagagatacaagggtacaataaagaaactttagtatcaggaattttagattatggacacaataatgtatccgccgttaacaatgaaaatgaaatttatcacaaagttaatgaaattgctaaggctgatgatgttgtaatttttttgggtgcaggaaatatcactaatttctcagatactattatttcaaaaattaacaatttaggggttaataatgattaac

SEQ ID NO: 313114 - DNA, 187 bp, Unknown
  Bacterial polypeptide expressing nucleotide sequence isolated from the Sargasso Sea
atgttaagaagtccaaaaaatcttggaattattcactttattggaattggtggaattggcatgagcgggattgcagaaatattattccaatctggatatcaagtgcaaggtagtgatctaaataaaagcaataatacaactaggttagaaaatcttggaattaaaatatatattgacagaaaaaatc

SEQ ID NO: 313115 - DNA, 760 bp, Unknown
  Bacterial polypeptide expressing nucleotide sequence isolated from the Sargasso Sea
aactaaattagatccaacaattattaatggaggggtaattaattcgatcaaaaatactgctaagttaggaaagagtgattggacagttttggaagcagatgagtctgatggaagtttccttcacataccttctacttattcaattattacaaatatagatagagaacatatggatttttacaaatctatgaatgacttagagaaatattttattgattttataaaaaaagtgccttcttttggaaaatcatttatttgtttagatgaccctgtaaataataaaataattaaaaaattaaagaatagaaatttttatacctatggacttcattcaaaatcaaatttttttattaaaaatataaatcaaaataaaaattttacagaatttgacctatttgtaaatgtcccaaataagaaaaaaataaagattaaaaagataagaataccattactaggtattcataatgtaagaaattctgttgcagctactgctattgcaattactattggtatttcaatttctgatataaaaaaaggattaaaaaattttaaaggtgttcaaagaagatttaataaaatatttacttacaacaatattgatttttatgatgattacgctcatcatccaactgaaataaaagtagttttggatggtgttaacaaggtttataaaaattatgaaaaagtttgtatttttcaaccacatagagtgtcaagacttaaagatttgagaaaagaattctcctttgcatttaagaat

SEQ ID NO: 313116 - DNA, 843 bp, Unknown
  Bacterial polypeptide expressing nucleotide sequence isolated from the Sargasso Sea
tgtattctttgttggtattggcggtattgggatgagtggcattgctgaactactattgaacttaggctttaatgtatcaggatctgatataaatgagaatgataatgtaaagcgattaaaaaatttaaatattgacgtaaaaattggtcatagccctagtaatctaaatcgagatacagatgttctagtttattcgagtgcagtgccaatagagaatcctgagattattcgtgcacgtcaaaaagggattcctattatacgtagagctgaaatgttaggagaactgatttccgtaaaagaaactagcatagcagttagtggtacacatggaaaaacaacaacatcatcaatgattggaactatcttagcatatgccaaaaaagacccaacgatggttgttggcggtctagttcataatattgacacaaattcaaaattaggtaatggagatataatcgttgtcgaagcagatgaatttgaccgcagttttctggcactaaaaccaacaattggcattattacaaacatagaattagagcatactgattgttatgatgatttaatagatttacaagatgccttcatccagttctgcaaatcagtccctttttatggagaagtgattttatgcgcagattctccagcggtacaggaaattattccaaaaattgagaggcccatgaccacctatggacggtcaagggatgcggcctatcgagcgaaaaacatacgatttcaagagaataaatccacatactctatttttcgcgcggaggaatgcttgggagaaataaagttaaatgttcctggtgaacataatgtactaaactccctggcagccgt

SEQ ID NO: 313117 - DNA, 784 bp, Unknown
  Bacterial polypeptide expressing nucleotide sequence isolated from the Sargasso Sea
aatgaaaattaaattagcaaaaacagaacttatacattttgtaggaataggtggaataggtatgagtggcttagcacttattatgaaaggtaaaggttttaaagttcaaggcagcgatattgcaaataataaaaatattgaaagattaagaaaagaaaaaataaaagttttcattggacataagaaacaaaatatagaaaaggggactatcctagttgtgtcttctgctattaaaaaaaataatccagagcttcttgcagccaaaaaaaaacaattacctatatataaaagaggagaaatgctagctaacattgtctctttaacaaaaaatattgtagttgttggttcgcacggtaaaactacaacaacatcattgatagcttctatatttcaagagacaaaaattgaccccacaatcattaatggtggagtaataaattcgattaataattccgcaaagcttggaaaaagtgattggtctatattagaagcagacgagtctgatggaagttttgtttacatacctccaacatactcaattatcactaacatagatcgagaacatatggattattatggcactatggataagttaaataaatattttgaaaattttgttaataaggttccttcatttggaaaatcatttgtttgtttagatgacaaaaataacaaaaatttaattaaaaatatcaaaaataaaaactactatacatatggtttggataacaaatcaaatttttgtattaaaaatataaaacaattaaaagagcattctgagttg

SEQ ID NO: 313118 - DNA, 672 bp, Unknown
  Bacterial polypeptide expressing nucleotide sequence isolated from the Sargasso Sea
tatgactagatctcaaaaacattttggtgaacttaaaaggatacatctgattggaattggcggttctgggatgattggtctagcaacggttctccaaaaaaaggggtttaatatttcaggatccgaccttctgatgacggaagaacttagctcgttaaaggccttgggagcaaaagttcaattaggccatgacccaagatatattaaatcctcagatgttgtcgtggcttcaagtgcgatagctaaaaataatgctgagctaaaatacgcaaaaaaaaataacattatcatcattccaagagcggtcatgttagcaagtattttgcatggctatagaacaattgctgtttctggtagtcatggaaaaactacaaccacaagtctgatatcaaatatatttgatgctgcaaaacttagtccaacctatgttgttggcggacaaatattaggcggcagaaatagttctcacttgggagatggtcttcacatgattgttgaggcagatgaatccgatggatcttttttgcatttgcatcccgaggttattgtaattacgaatatagataatgatcacctatctttttacgaaaatgatcaacaaaaacttaataccgcattcttaaattttacaaaaaatctcccgttttacggttatgtacttatgaacataga

SEQ ID NO: 313119 - DNA, 832 bp, Unknown
  Bacterial polypeptide expressing nucleotide sequence isolated from the Sargasso Sea
ataaaaagcaataatgtcgaaataaattacgcaaagaaaaaaaaattaccaatttactctagggcagatgttcttgctgacgttgtttcattaaaaaaaaatattgttatcactggttcacatggaaaaacgactactacttcgctagtttctaaaattttatcagatcaaaaattagaccctacaattataaatggtggggtaattaactcattaagaaataatgctaaattaggaaaaggagaatgggcaattttagaggctgacgagtctgatggtagctttttgaaattgccttttaattattcagtggtgacaaatttagatcatgagcatattgatttttacaaaaattttagaaatttagaaaactcatttatagaatttatcgagaaaaccccaccaactggaaagacaattatttgcgctagtaacagaaatataaaaaaaattttaaagaggattaaaaacaaaaatttattgacttatggagatgaaaaaggagtagattatagaatttcaaatttaagatttaaggtcgattattcaatttttgatttaaactatagagataataataatataaaaaagaaaataaataatatttgtgtaaaattattaggcaaacataatatttttaacgcaacagcggctgtaatagtttgtataaaccttggagttccacaaagtgttataaaaagatctttaaaaagatttactggcgtgcaaaggagaatgactaaattattttcaagaaatagtaatgatttttacgatgattatgctcaccaccccacagagataaaatctagtcttagtagtgtaaaaaata

SEQ ID NO: 313120 - DNA, 805 bp, Unknown
  Bacterial polypeptide expressing nucleotide sequence isolated from the Sargasso Sea
attaatttagatgatttattagtaacaaatatagatgttgatcaccttgatttttataaaaattttaagaacttactaagtgcatttaaacatgtaattaagaaaattgaaggaaatttagtacttaattatgatgatcaaaatttaagaaaaatgaaaataaataataatttctttacatactcttcatcagaagtaagtgatatacagatcatatacccaaataaaattgttaaagaaaaaaaagaatatataattaaaacaaatttaataggcttccattttatatcaaatatagcaggtgctctagctctagcgtatcttaatgggataaagatagaggaatctttagaagctataaaaacatttccaggagtcaatagaaggatagagtatcttggtaaagtagatggtattaagatatatgacgactatggccaccatccaacagaaatagaagctacaattactgctcttaaaaaaatcacggaaggaaaattgtatgttgtatttcaacctcatagatacacaagaacaaaaaataacttagaagactttaagaagtctttattaaaatcagatcagagtattgttgtggatatatatcctgctggagaaaagcctatacctggagtaagtagtaaaaattttgaagacaaaaatattaaatatttaaaatctatgagaatggtaccgagctatttatcatctatagttaaagaaaatgacactattttaactttaggagctggagacattactttattgggtccacagatattaaaatatttagatgaaaaataaa

SEQ ID NO: 313121 - DNA, 763 bp, Unknown
  Bacterial polypeptide expressing nucleotide sequence isolated from the Sargasso Sea
ttttatggaactgtaatattatgctcagattcagattcattaatgagaatactcccaaaaataaaaaaaccaattacaacgtatggcctatctgatggttctgactatagagcaaaaaacattgagtattccaaaaataaatccaaatacaatctcatctacaaaaataaaaacttaggtgagatcaatattaacgttcctgggaaacacaacgttttgaattctttggcttcaatagctttaggaatggagatagatgttcccctaagtaaattaaaaaaaggtataaatagttacataggcgtaagaagaagattcgaaataaaaaaaaataaaacagatatctttgttgttgatgattatgcacatcatcctactgaagtaaaagctacaataaatgctgcaaaaacaggatggggtaaaaggattgtttctgtatttcagcctcatcttttcagcagaacaagagatttctttaaggagtttgcacaatctctattcaaatcagatataattatcattactgagatatacccagctagagaaaaacctattgatggtataagctctaaattaatcctagatgaactaaatcatttagagcataaaaacacacatcatcttgatgacttaaataacttaaataatattttagaaaaaatagtccaacctgaagatatggtaattacaatgggtgcaggtgatatatggcgttatagtgataaatataatgaacacttaaatgacaaaatgggtaaataga

SEQ ID NO: 313122 - DNA, 867 bp, Unknown
  Bacterial polypeptide expressing nucleotide sequence isolated from the Sargasso Sea
tatggctcgtaaaaaaaaaataccaatttattctagagcagatgttttagcagatgttgtttctttaaaaaagaatattatcataacggggtcacatggaaaaacaacgacaacctcactagtggcaaaaattttatcagatcagaaattagatcctacaataataaacggtggagttataaattctttaaatagtaacgccaaacttggaaaaggcgaatgggcaattttagaagccgatgagtcagatggaagttttttaaaattacctataaattattcaatagtaacaaatatagattatgagcatttagatttttataaaaattatagaaatttagaaaactcgtttattaaatttattgaaaaaacaccacctacaggaaaagctattgtttgtatagataacttaaaaattaaaaaaatgttaaaaaaagttaaaaataaaaatttacttacttacggtgaaaataaaaattctcattttcaaatatcgaatataagatttagaaaagatcattcaatttttaacctcaaatataaagataatacaaaaaaatataaaatattaaaaaacgtaaatttacgacttttaggaaaacataatgttttaaatgctgtagctgcaataactgtttgcttaaatcttggcgtaaatcaaaatattattaagaattcattaaaaagtttttcaggggtagaaagaagaatgactaaagtattttcaaaaaaacaaaacgatttttatgatgattatgctcatcacccaactgaaattacatctattttagaaggtgtaaaaaatgcctacaaagatagaaaaataatctctgtttttgaaccacatcggtattcaaggatactatc

SEQ ID NO: 313123 - DNA, 888 bp, Unknown
  Bacterial polypeptide expressing nucleotide sequence isolated from the Sargasso Sea
tatgaaaattaatattgctagcaacgaagttgtgcattttattggaatcggaggaattgggatgagtggattagcacaaattatgaataatatgggatttactatacaaggtagcgatttaaatgaaaacaaaaatacagacaggctgcttagatctggaataaaaattttctttggtcaccatcctaaaaatttacgtaaggccactatggttgttatttcttcagcagttaaaaaaaataataacgaattaatagcaacgaagaaaaaaaaaataccagtttttaaaagaggagaaatgcttgctaatattgttggattaaaaaaaaatatagtaattaccggatcgcacggaaaaactaccacaacatcgctagttgcaaatattcttgtagaatctggattagatccaactgtgattaatggcggtgtaataaattccctaagaagtaatgctcagctaggaaagggcgagtgggcagtaattgaatcagacgaatctgatggaagttttttaaaaattccagttacatattcaattgtaacaaatgtagataaagaacatttagacttttatggaagttttgaaaaactaaagaaaagtttttgtacttttgtagaaaataccccctcgtttggaaaatcaattatttgtatcgataataataatttaaaatctttaatttctaaattcaagactcgcaatttcttgacatatggatttgataagaatgcaaactatcaaattattaatgtaagaaaaaaagaaaaatactcaatttttgatttaaaaataaaatttccctctaacaaatcatctacggtaaaaaatatagttgtaaatttaataggagatcataatattaccaatgcaacggcatctatagc

SEQ ID NO: 313124 - DNA, 946 bp, Unknown
  Bacterial polypeptide expressing nucleotide sequence isolated from the Sargasso Sea
gaaaattgatctaggaaaaaatgaactaattcattttgttggtataggtggaattggtatgagtggtttagccttgattatgaatgaattaggttacaaagttcaaggtagtgatattgctgataatcgaaatattgagagattaaatgaaaaaaaaataaaaatatttctaaatcacaagaaagagaatataaaaaaaacaactgtcctagtaatttcttcagcaataaagaaaaataatccagaattagttgaggctatcaaaaaaaatttaccagtttatacaagaggagatatgctaggtcatatagtgtctttcatgagaaatgttgttgttaccggttctcatggcaaaactacaacgacatcattagtgtcaagtatctttacagcaggaaaattagatccaactataatcaatggtggtgtattaaattcatttggtagtccagcaaagctgggcaaaagtaattggtgtgtaactgagtctgacgagtcagatggtagttttttaaaaattccctttacatattctattgctactaatctagactctgaacacttagatttttacaaaaatatcaataatcttaaaaaaagctttctaaaattttttgaaaaaataccatctgtaggtaagggttttgtatgtaatgatgatcaaaatcttaaaaaagttcttaaaaaattaaaaaataaaaatttttatacttatggaaaaagtaaaaagtcaaatttccaaataataaatataaaacaaaatactaatttttcttgttttgatattaaaattaatattccaagtaaaaaaaaaataattaaaagaattaagattccaatgataggagtccataatattcaaaatgcaactgcagcagtttctttagcattgacaattggactgccagaaaaatatattaaacttggattgtacaatttaaaggag

SEQ ID NO: 313125 - DNA, 601 bp, Unknown
  Bacterial polypeptide expressing nucleotide sequence isolated from the Sargasso Sea
aatgtttcataaagtaaataatattcattttgtaggtattggtggaataggaatgagtggaattgctgaattattaattaatcaagggttcgttataagtggatcagatattgttgagtctgaaataacaaaaaaattggagataaatggagcaaaaatttttattggtcataacaaaaacaatataaatggttcagaattattagtttattcaagtgcggtaactaaaaataatgtagaattagttgaagcagaaaaatcaaaaattccaataattaaaagagctgaaatgttaggagaattagtagccttaaaggaaactagcattggtgtggctggtacacatggaaaaacatctgcttcttcgatgcttggagcactactgacttatggaaaaatggacccaactcttgttgtagggggcctggttcaaaatcttaatactaattcactgttgggtcaaagtgatttgattgtatttgaagctgacgaatatgataaaagttttttacaaatgaaccctactatagcaataattaataatattgaagaagagcatatggattgttataaagatataaatgatttacatgattctttt

SEQ ID NO: 313126 - DNA, 496 bp, Unknown
  Bacterial polypeptide expressing nucleotide sequence isolated from the Sargasso Sea
atgaaaattaaattagcaaaatcagaattaattcattttgtcggaattggtggaattggaatgagtggtttagcccttataatgaaagagttaggtttcaaagttcaaggaagtgatattgcatataataaaaatatagaaagaattaaacaaaaaaaaattaaaatttttataggacataaaaaacaaaacgttaataaatcaactattttagttatttcgtctgcaataaagatgaataatcctgaagtagaatatgcaaaaaaaattaaaatcccaatttataaaagaggagaaatgttagccaatgttgtatctttaatgaaaaatattgttgtagccggctcacatggaaaaactactaccacttcattaatatcaagtatttttacgcaagcaaaaatagatccaacagtaattaatggaggagttttaaattcatttagtggctcagcaaaattaggaaaaagacgactggtgcattctggagtctgat

SEQ ID NO: 313127 - DNA, 739 bp, Unknown
  Bacterial polypeptide expressing nucleotide sequence isolated from the Sargasso Sea
cattttattgggatcggaggtattggaatgtcagcaatagcaacgggtttacttaaaaaaggttcttcagtttcaggatctgatttagttaaaaacaatgaaactgataaattagaacaattaggtgcagtaatctttacttctcaagttcgacaaaatattgaatttgtaatttcaaaatttaccaacaaattgattaattttgttgtaagctcagcgatcaagccagaaaatgaagaattttcatactgcaaagaaaaaaatttatcgataaaacatcgttcagagatacttgcaatgctaatgcgcacttatactgcattggcagtagcaggtagtcacggcaaaacatcaaccagtacatttctttctacaatacttgagttatgtacacataattcttcctcaatcactggaggaataattcctatatataactctaattgtcatttagagaatacaaaatacttagtagctgaagttgacgaatctgatgggacaattactaaatataagtctgatattggtataataaataacattgattttgatcattgcgatcacttttctaatttaagtgaagtcatatcttcttttaaaagtttcgctacaaattctaaaaatttattaattaattttgattgtaaaacgtcaagaaataatttttactctaataataaatggtcaatcactacagcaaaaaacgtagcttatgcaataattcctactgaagttaatt

SEQ ID NO: 313128 - DNA, 832 bp, Unknown
  Bacterial polypeptide expressing nucleotide sequence isolated from the Sargasso Sea
tgttggcattggcggtattggtatgagtgctttagctttgataatgaaaggcaaaggatttaaggttcaaggtagcgatatctctattaataaaaatattgaaaggcttaaaaaagaaaaaataaaagttttaataggacataaaaaacaaaatataaataaggcaacaatactagttatatcttcagctataaaaaaaaataatccagaaatgttagaggcaattaagaaacagttacctatttataaaagaggcgaaatgttagcaaatattgtgtctttaacaaaaaatattgttgttgtgggctctcatggcaagactactaccacatctctaattgcttctatttttcaagaaacaaaaatagatccaactattattaatggaggtgtaatcaactctataaataattctgcaaaacttggtaaaagtgaatggtcgatattagaagccgatgagtcagacggtagctttgttcatacccctccaacgtatgcaattataacaaatattgatagagaacacatggactattatggttctatggataatttaaataaatattttgtaaattttgtcaacaaagttccatcctttggaaaatcatttatttgtttagataataaaaataataaaaacctattaaaaaaattaaaaaataaaaatttttatacttacggtatagacaacaaatctaactatagcgttaaaaatataaaacaatttagagaatactctgagtttgatttaaaaattagattgcctaataagaaaattacaataattaaaaaaataaaaattccattattaggctcacataatattaaaaat

SEQ ID NO: 313129 - DNA, 436 bp, Unknown
  Bacterial polypeptide expressing nucleotide sequence isolated from the Sargasso Sea
aatgaaaattaaattagcaaaatcagaattaatccatttcgttgggattggaggaattgggatgagtggtttagctgttataatgaaagagcttggatttaaaatccaaggaagtgatatttctttcaacaaaaatatcgatagagttaaaaaaaggaaaataaaagtttacataggtcacaaaaagcagaacattaaaaactcaactattttagttatttcatcagcaattaaaaaaaataatccagaactaatgtttgcaaaaaaaagaaagataccaatttataaaagaggagatatgttagctaacgttgtttctttaatgaaaaatgttgtagtggcaggctcacatggcaaaactacaacaacttctctaatatcaagtatatttagtcaggcaaaaatagatccaacagtaatcaatggaggagtttta

SEQ ID NO: 313130 - DNA, 847 bp, Unknown
  Bacterial polypeptide expressing nucleotide sequence isolated from the Sargasso Sea
tattcgagtgcagtgccaatagagaatcctgagattgttcgtgcacgtcaaaaagggattcctattatacgtagagctgaaatgttaggagagcttatttctgtaaaagaaactagcatagcagttagtggtacacatggaaaaacaacaacatcatcaatgattggaactatcctagcatatgccaaaaaagacccaacgatggttgttggcggtctagttcatagtattgacacaaattcaaaattaggtaatggagatataatcgttgtcgaagcagatgaatttgaccgtagttttctagcactcaaaccaacaattggcattataacaaatttagaattagaacataccgactgttatgatgatttaaaagatctacaagatgccttcatccagttctgcagatcaatccctttttatggagaggtgattttatgcgcagattatccagcggtacaggaaattattccaaaaattgagaggcccatgaccacctatggacggtcaagggatgcggcctatcgagcgaaaaacatacgatttcaagagaataaatccacatactctctttttcgcgcggaggaatgcttgggagaaataaagttaaatgttcctggtgaacataatgtactaaactccctggcagccgttgtattaggtatagaaatgggcctctctttcaatgatattcaaaaaggtatatacaattacaaaggtgtacgtaggagatttgatatcaaaggcacatttaatgatgttatggttcttgatgactatgctcaccaccctacagaagtaaaagcaacgatagaggcagcaaaaactggttgggatagaagaattg

SEQ ID NO: 313131 - DNA, 496 bp, Unknown
  Bacterial polypeptide expressing nucleotide sequence isolated from the Sargasso Sea
aatgaaaattaatattggaagcaacgaagtggttcattttattggaataggaggaattggaatgagtggattggcccaaattatgaaaaatactggattcataattcagggaagcgattcaggcagaaataaaaatactgaaagattaattaaactaggaataaaagtttattttggacatcatcaaaaaaatttaaaaaaagccactatgattgttatttcatcagcaattaaaaaaaataataaagagttaaaatttgcaagaagtaaaaaattgccaatatttaaaagaggcgatatgttggccaatattgttgctttaaaaaaaaatattgttgttactggttcacatggaaaaacaacgacaacatcacttgtagctaacattttattagaagctggcttagatccgaccgtgattaacggaggagtaattaattcatttaaaaacactgctcaactcggcaagggtgattgggccgtaattgaatctgac

SEQ ID NO: 313132 - DNA, 670 bp, Unknown
  Bacterial polypeptide expressing nucleotide sequence isolated from the Sargasso Sea
aatgtataaaacagaaataggtttaaacgaaaaagttcattttattggaattggtggaataggaatgagcggtcttgctcaagtgatgaaaaccattggatatgaggttcaaggaagcgatatatcatttggcaaaaatatcgagcgatgtaaaaaaattggcataaaagtatttaataaacacaataaaaaaaatattaaaaattgtgcaattattgttaagtcatcagctataaagagcaataatccagaaatcatagcagcaaagaataaaaaattaacaattttaaaacgttcagaaatgctagctcacgtcgtttctttaaaaaagaatatagtaatcacaggctcacatggaaaaactacaacgacttcactaatagcaaaaatattatccgagtcagatttagacccaactattgttaatgggggtgttgtaaattctttaaaaggtagtgcaaaagttggtaaaggagattgggcagttttggaagccgacgagtcagatggaagctttttaaatttaccaattaattattccgttgttactaatcttgatagagagcacctagatttttataaaacttttaataaactaaaagaatgctttgtaaaatttctcaataaaactccaggtatgggaaaatcatttatttgtattgatgataaa

SEQ ID NO: 313133 - DNA, 732 bp, Unknown
  Bacterial polypeptide expressing nucleotide sequence isolated from the Sargasso Sea
atgataagaatcttaaaaaaataattgcaagaaataatacaaggaaaataatttcttattcaagtaaaaataaaactgcagatgtttttataaaaaaagttatctttaaaaaacaatacagtaaatttgaattaaaatttaacatccctataaataatttttctggtttgcagccttacacagtaaaagcaataggattgcataatatttataattcaacagctagtattattgcaagtttgttagcaggtgtaaaaaataattatattaggtctgcattaactaattatattggggtaaaaagaagatttacgcatttaggaaaagtaaacttatcaaatatttatgatgattatgctcatcatccaactgaaattctagcaaccttaaaaggcgcaaaacagattaataaaaatattgtagtagtttttcaacctcatagatattcaagaaccaaaattttgtttgatgaatttttaaaagttttatcaaaaataaagaaattatatttacttgatacctattctgcaggtgaaaaaaaaattagaggttttgaaactatagatatttacaataaattaatagaaacaaaaaaaaatatattttatataaaggaaaaagatttgaataaaattatttataaagaaacaaataaaaaaaatattattatatttatgggtgcgggttctataagtaaaattgcatgcaattttttgaaaataaatgaatgat

SEQ ID NO: 313134 - DNA, 397 bp, Unknown
  Bacterial polypeptide expressing nucleotide sequence isolated from the Sargasso Sea
aatgaaaattgaactagcaaaaaatgaaaatatacattttgtaggtatcggtggaatcggtatgagcggtttagccttaattatgcaaggtatgggatttaaaatacaaggaagcgatatatcgacaaacaagaatacagaaagattaaaaaaacataaaattaaaattattttaggtcattctaagaaaaatattaataaggccacaattctagttatttcatctgcaatcaaaaaaaataatcctgaagttcaacaagccaaaagtaaaaatttaccaatttataaaagaggggatatgttggcacatattgtttcacttactcaaaatattgtagtagcaggttcgcacgggaaaacaactacaacctctcttatctctggaattttttctaaa

SEQ ID NO: 313135 - DNA, 394 bp, Unknown
  Bacterial polypeptide expressing nucleotide sequence isolated from the Sargasso Sea
atgaaaattaatttaggaaaaacagaactcattcactttgttggaatagggggaatcggcatgagtggtttagctctgataatgaatggtttaggttttaaagttcaaggcagcgacatatcaaaaaataaaaatgttgaaagattgcaagaaaaaaaaattaaaatattttttaagcataaaaaaaaaaatattgataaaactacgattttagtaatttcgtctgcaattaagtctgataatcctgaattgatacaagcaaaaaaattaaaattaccaatttacaaaagaggtgaaatgttgggtcatattgtttctttgatgagaaatgttgtgattactggttcgcatggcaaaacaacaacaacctctttaatttcaagtatttacagaa

SEQ ID NO: 313136 - DNA, 187 bp, Unknown
  Bacterial polypeptide expressing nucleotide sequence isolated from the Sargasso Sea
gatgattagtaatattccacaaaatgtcggtcgttttcatttcgtcggtattggaggaataggcatgagtggtatagctgaaattcttcttcaatcaggttatttagttcaaggaagtgacattaaccaaacgaaaataacgaaaagattaaacagacttggtgcaaaaatattttattggtcataa

SEQ ID NO: 313137 - DNA, 595 bp, Unknown
  Bacterial polypeptide expressing nucleotide sequence isolated from the Sargasso Sea
atgaaaattgatttaagaaaaaatgaacttatccattttgttgggataggaggaataggtatgagtggtctagcgttgattatgaatagtttaggttacaaagttcaaggcagtgatattgccaataatcgaaatatagcaagattaaataaaaaaaaaataagaatatttttaaatcataaaaaagaaaatataaagaaaactactgttatggtgatttcctcagcaattaaaaaaaataatccagagttggttgaggcaataaaaaaaaatttaccagtttatacaagaggagatatgttaggtcatatagtatctttcatgagaaatgtagtcatatccggttcacatggaaaaacaactacaacatcactagtatccagtatatttactgcagctaatttagatccaactataattaacggtggtgtattaaattcttttggcaattctgcaaaactgggcaaaagtaattggagtgttaccgagtctgacgagtccgatggaagttttttaaaaataccctttacatattctatagctactaatttagattctgaacacctagatttctataaaaatattactaattaaa

SEQ ID NO: 313138 - DNA, 820 bp, Unknown
  Bacterial polypeptide expressing nucleotide sequence isolated from the Sargasso Sea
tcgtttgaataaaaagaaaattaaaacttccagttctcataaacagtcaaatttaaaaaatgtaagcttagttgtgtattcatctgcaataagtaaaaataatatcgaacttaaatatgcaaaaaaaataaaaattccgtcaatttcgagagctgaaatattatctcaaattgtaaaattaaaaaaaactattgctatatcagggtctcatggaaaaacaacaacgacatctttaatttcgacagttttaaatggcgcaaagatgaaacctactgttattaatggtggaataattaatcagttcggaacaaatacaaaattaggttcaggcgactggttagtagttgaagcagatgagtctgatggaacatttgttaaactacctgctacaatttcagttgtcactaatattgataaggaacatcttgattattattcaaattttcaaaaccttaaaaaacatttcaaacaatttattacacaagtccccttttatggttttgcagttgtctgcatagaaaatgatgttcttcataagttagtaaataaaataagtacaacaaagattattaaaactggatttcataaagatagtgatattaaaagcatcaatttaaggcataaaaataatgaaatcgtatttgatgtctttgtaaaagaaggtaatcaagtaattagaaatgtgaaattgccacttcatggagcttacaatgttaataatgcattattggccatagcagtaggccttcaattgaatataaacacaggaataataaaaaagtctttaaattctttttcgggtttcaaagaaggcttacgg

SEQ ID NO: 313139 - DNA, 681 bp, Unknown
  Bacterial polypeptide expressing nucleotide sequence isolated from the Sargasso Sea
tgttaagttaggcataagtattagttatgatcataatccaaataacctaagagatattgaaatggtggttatatctagtgctatatcagatgataatcctgaattagcctctgctaaggaacagttaattccagttttagctagggcagaaatgttatcaagtttgatgaacaataaaagaggaatagctatagccggtacgcatggaaaaacaactactacaagtttggtagcatctataatgactaatgctaatcttgatccaacttttattaatggtggaataatcaatagcttcaacactaatgcacagttaggagaaggagattacttaattgctgaagcagatgaaagtgataagtcttttttactcctgcagccttctgtgtccataattacgaatatagagccagaccacttggttaattatgatggtagttttgataatctaaaaaaagctttcttggaatttataaaaaaactgccctttaacggagtagccattgtttgcggtgacgatactgttgttaaagagttgaagatcaattttcaaagacctcatattagctatggttttgaacctacaaatgattatgtgctatcaagctacagaacagacggaaggaaatcttactttaaattaacttcagataccgattcatgtgactttaagctcaatat

SEQ ID NO: 313140 - DNA, 577 bp, Unknown
  Bacterial polypeptide expressing nucleotide sequence isolated from the Sargasso Sea
ctggagctccaggtgcctggtcgctacaacctctctaatgcggcagccgcctactgcgtcggttccctgctgggaattagtcaccaggatctgttgaccgggatcgcatccttcacggggacgttgcgacgcttccaactggtgggtcgggttgctgacgtctcagtctttgacgattacgcccatcacccgaccgaattgcgcgccacccttggcgcggcacgtcgtgtcgtgacggggcaggggagggtcatcgcctgcttccagcctcatctgttttcccgtaccagagatttcgccggggagttcggatcggcgcttacccttgcagaccgggtcatcgtttccgacatatatccggcccgtgaggatccgattcccggtgtgaccggcgagttggtgcacgacgccgttatcgccgcaggcggggattcccggtatgtgcccgataagcaggaccttccggaggccctcgctgaagaggtacgtcctggggacctcgtcatcacccttggcgcaggagatgtcactttagttggcccggttctggtgggcctactggagggcaaggcttgat

SEQ ID NO: 313141 - DNA, 568 bp, Unknown
  Bacterial polypeptide expressing nucleotide sequence isolated from the Sargasso Sea
aggcaaatttaattttaaagctaatttttttggtgaacataatattttgaatgctactgcttcaataatcacctctttattagcaaacatacctcttaaaaaaattagatattctttaaataatttccaaggggtaaaaagaagatttagttatttaggaaatatttctaaagcatctatatatgatgattatgcacatcatcctgctgaaataaaagctagttatgaaattgctaaacatatttctagaaaaaaaataatagtgatttttcagccacatagatattctagaacaaaaatcttattagatgattttatgaaagttttaagtaaaatagatgttttatatttattagatatttatccagcaggtgaaaaaactttaaagaatattaattcaaaaaacatagtaaaaaaattgaaattaaaaaacaaaaatacatattatttagataaaaaagaaaacataaggttagttctccaaccttattttagcgcaaacaacacaatagtttttatgggagctggctcaattactaacattgcccatagtttatttgataaatag

SEQ ID NO: 313142 - DNA, 553 bp, Unknown
  Bacterial polypeptide expressing nucleotide sequence isolated from the Sargasso Sea
atgaaaattgatttaggaaaaaatgagcttatccattttgttggtatcggtggaataggtatgagtggtttagcattgataatgaatggtttaggttacaaagttcaaggcagtgatattgcagataatcgaaatattgaaagattaaatgaaaaaaaaataaaggtatttttaaatcataaaaaagagaatataaaaaaaactactgttcttgtgatttcctcagctattaaaaaaaataacccagaattagttgaggctgtaaaaaaaaaattaccagtttatacaagaggagatatgttgggtcatatagtatctttcatgagaaatgttgtagtaactggttcacatggaaaaacaacaacaacatcgttagtatcaagtatttttacagcaggaaaattagatccaacaataattaatggtggagtattaaattcatttggtaattcagcaaaacttgggaaaagtaattggtgtgttacagagtcagatgaatcagatggaagctttttaaaaattccctttacatattccatagtaacaaatctag

SEQ ID NO: 313143 - DNA, 466 bp, Unknown
  Bacterial polypeptide expressing nucleotide sequence isolated from the Sargasso Sea
atgaataaattaaaaaaaattaaaattcattttgttggtattggaggtattggcatgtcaggtattgctgaattaatgtttgatctaggttatacagttcaaggaagtgatattaatatgaataccaatattaggagattaaaaaaaagaggaataaaaatttacaattctcatcacaaagctaatgttcaaaatatgtcagctatagtattttctagtgctattaaaaaaaataatcctgaattattagaaagtaaaaaattatatatacctctaattactagagcagacatgttagccgaattgatgaaattaaaaaaatcaattgcaattgctggctctcatggcaaaacaactacaaccagtttgataggttcaatattcgataatgcaaaatatgatcccactatagttaatggaggaataataaattcatattcaaaaaataatcgctatggaaaaagta

SEQ ID NO: 313144 - DNA, 316 bp, Unknown
  Bacterial polypeptide expressing nucleotide sequence isolated from the Sargasso Sea
atgaaaattgaactagcaaaaaaagaaataattcattttattggaattggtggaataggaatgagtggactttcattaattatgaagggaaaaggttttaaagttcaaggtagcgatattttaaataataaaaatatagagagacttaaaaaagaaaaaattaaaatttttttaggtcattctaaaaaaaatttaaaaaaagcaacaattgtagttgtttcatctgcaattaaaaaaaataattctgaattaatagaagctaagaaaagaaaaattccagtaattaaaagagggaaaatgttggccagtattgttt

SEQ ID NO: 313145 - DNA, 554 bp, Unknown
  Bacterial polypeptide expressing nucleotide sequence isolated from the Sargasso Sea
taatgtcagaaatgcgcttgctgcaatagctatcgcaaccgatgaaggagtttctgatcaaaccattgtccaggcactagctagcttttctggagtgggtcgtcgtttcgaagtttcctcagaaataatcttagcagggaaaagtttgaccttggttgacgattatggccatcatccgaccgaggtggaagctgtaatcgatacagcaaggaagatgtggcctggaaagagaatagcaatggtttatcaaccgcatcgatttagtagaactcttgacctttttgatgaatttgtgaatgttttgtcaaaggtagacgaactggttcttctagacgtctatgacgcaggagaatcggctatagacggggcctccagcaaagatttgtcggtttctttgaggaacatcaatggaagttgtccgttggtattttcacgttgtgaagaggtgataagcagattgcagcaacatagtcagtctgcggacgttctgatagtgcagggagccggcaatgttagcagtatttcgaaggcgctaagagaatcgaatgcgtagt

SEQ ID NO: 313146 - DNA, 772 bp, Unknown
  Bacterial polypeptide expressing nucleotide sequence isolated from the Sargasso Sea
ttgaataaaaaattaagacataaagatcattttcattttattggcattggtggtattggaatgtctgcaatagctatggcattaataaaaaagggatactcagtctctgggtctgatttaattcaaaacaaagaaacaaaaagtttaaaaacattaggagcaataatttttgattctcaaattaaaaaaaatattgattttgtgatttcaaaatttcataatcatacaatcaattgtgtgattagctctgcgattaaaaatgaaaacgaagagttatgcttttgcaaaaaaaataatttctcaataaaacatcgttcagaaattcttgcgatgataatgaactcttacacatcattatcaatagcaggtagtcatgggaaaacctcaacaagtacttttctttccacgctattagaattatgcacacatgattcttcttcaataactggtgggataatcccaatatatgattccaatgctcatatcgaaaacacaaaatacctagtaacagaaattgacgaatctgatggaacaattgagaattacaattcggatattggaataattaataatattgattttgatcattgtgaccattactcaaatatcgatgaggttctatcatcatttaaaaaatttgcttctaactcccaaaaattattgattaactatgattgtaaatttacaaaaaataattttacttccgaaaatcaatggtatattaaggaaagtaataaaattgcttattcattaattccaaaaaaattataaa

SEQ ID NO: 313147 - DNA, 320 bp, Unknown
  Bacterial polypeptide expressing nucleotide sequence isolated from the Sargasso Sea
tatgatagctcttccaatcgatatagggattgttcattttgttggcataggtggaattggaatgagcgggattgccgaggccctacattcgctcggctataaagttcaaggaagtgatattagtgagaattcaaatgtgaagcgtttgcgtagtcttggggtttcaatctatttggggcacaggaaagaaaatttaggggatgcccgagtattagttgtctcgacagcaattaacgcgagcaaccctgaaattaaggctgctagacacaagtttattcctgtggttcaaagagcagaaatgcttggagagttaatgcggt

SEQ ID NO: 313148 - DNA, 940 bp, Unknown
  Bacterial polypeptide expressing nucleotide sequence isolated from the Sargasso Sea
aatgagcggccttgctcagattatgaaaaatatgggtttaaagttcagggaagtgatatgataaatagtaaaaatgtagaaagatgtagaaaaattgggattaaaatatttagatcacataaaaaagaaaatatagatcacacttccatagttataaaatcttcagctataaaaaatagcaacccagaaataaaagcagcaattgaaaaaaatattactatattgaaaagagcagaaatgttggcacatgttgtggctttaaaaaccaacatagtgataactggttctcacggcaaaacaacaactacatccttaatttcaaatatactttcacaagcaaaatttgatcctaccataataaatgggggaataattaattctttcaatggaaatgccagacttggaaaaggtaactgggcggtactagaagcggacgagtcagacggtagctttttaaatttcccaataaattattcagttgtgacaaatattgatagagagcacatggacttttataaaaattttaaaaacttaaaaaatgctttcttaaaatttttaaacaaaacaccattaatcggaaaatcttttatttgtatagatgataatgaaataaaaaaattaagtaaaaaaataaaaaataaaaatttttatacttacggtttttctaaaaaagctgattttcaaattttaaatcccgaatacaacaaagattactcaatatttgatttaaaaatatctattccaggtgaaaataagagaactatcaaaaaaattaaactaaaccttattggtagtcataatattcttaattctgtaggagcaatttctctctgtatacatatagggattaaaattaaaataataaaaaactcactaaaaaaattttctggaattcaaagaagactaactaaacgttttacatttaaagaggagggaattt

SEQ ID NO: 313149 - DNA, 642 bp, Unknown
  Bacterial polypeptide expressing nucleotide sequence isolated from the Sargasso Sea
aatgaaaattaatttaggtaaaacagaacttattcattttgttggtataggcggcataggtatgagcggtctagctttaattatgaacggtttaggatttaaagttcagggcagtgacatctcaggtaataaaaatactgaaagattgcaggaaaaaaaaatcaaagtatttttaaatcataaaagaaacaatattaacaaaactacaattttagttatttcttctgcaataaaatcagataatccagaattaatagaagcgaaaaaattaaacttaccaatttacaaaagaggagagatgcttggccatattgtatccttaatgagaaatattgttgtaactggatcgcatggaaaaactaccacaacatcacttatatctaatatttttacacaggctaaattagatcctacaattatcaatggtggaatacttaattcttttggaaattctgcaaaattaggaaaaagtaattggtgcataattgagtctgatgaatcggatggtagctttttaaaaattccttttacatatgcaattatcacaaatatagattctgaacatttagattattataaatctttaaataatttaaaaaataaattttctgaatttcttgaaaaaattccttccttgggaaa

SEQ ID NO: 313150 - DNA, 601 bp, Unknown
  Bacterial polypeptide expressing nucleotide sequence isolated from the Sargasso Sea
atgaaattctcaaaattaatatcaagtaaagtgcacataataggaataaatggtattggtatgagtgctttagcaatttatttaaaaaaaaataatatagacgttactggcagtgatattgcctataattcaaatactataaatttagaaaaacataaaattgtagtcttcattggtcacaaaacctcaaatatcaaagatagggatattatattttattcttcggcaataaaaaacaatcctgaaattaacgaggcaaaaaaaaataatattccctgttatagtagatcaaaacttcttcaattaatatgtaaagataaattcacaatagttgtatctggttcacacggaaaaacatcaaccacctcaattttaggacatttgttagtttccgcaggtttaaacccgactattatttctggaggaataatgcagaattttggacaaaatatatatctcacaaatagcaaatatgttgtagtagaagctgatgaaagtgatgggacgatatttaaattaagcccaagatatttattatatctaaatgttgatagagaacacatagacttttataaaacttactctaatttaaaatctaaaa

SEQ ID NO: 313151 - DNA, 741 bp, Unknown
  Bacterial polypeptide expressing nucleotide sequence isolated from the Sargasso Sea
gttaaaaggctagaatcactaggcattgaaatttcaattggtcatgattcaagtaactttagaggcgccaatgcagttgtttattcaagcgctgtaccaatggataaccctgagattttaacagcaattaataaatcaatacctgttataaggcgcgcggaaatgcttggagaattgataaacttaaaacgaacaagtatcgcagtaggtggaactcatggaaaaacaactacatcttcaatgattggtatgatacttgaaaaatctggttatgacccaactttagtcgttggtggattagttagcaatcttaatacaaatgtaaagcttggatcaggcgatttgattatagttgaagctgatgagtttgatagaagttttttggctctaaacccaactattgcaattgttacaaatctggaaatggaacacactgattgttataaagatttaaatgatattgaagatgcatttttacaattttgtaaatcagttccattttatggaactgtaatattatgtactgattcagattctttaatgaggataatgccaaaaataaaaaaacccattacaacatatggcatatctgagggttctgattatagagcgataaatattgaatattctaaaaacagatctaaatataggcttttacacaaaaataaagatttaggcgagatcaatataaatgttcctggaaaacataatgttttgaattctttggcttcaatagcctta

SEQ ID NO: 313152 - DNA, 853 bp, Unknown
  Bacterial polypeptide expressing nucleotide sequence isolated from the Sargasso Sea
agttattaactcattcaatagtaacgctaaattaggaaaaggccactgggctatcttagaagcagacgagtctgacggcagttttttaaaattaccaattaattattcaatagtaaccaatatagatcttgagcacttagactattacaaaagttacaaaaatttagagaatgcatttattcaattcataaataaaacaccacctataggaaaatcattaatttgtattgataataaaaatatcaagaaaattttaaataaaataaaaaataaaaatatattaacatatggatttaataaagaagctaattatcggattagtaatcctagatacaatactactcactcgttgtttgacttgaattacaaaaatttggataataagaaagtagcgattaaaaatattaatctaaaattaataggcgaacataatgttctcaatgcatctgccgccatagcagtttgcattaatcttggaataaaaattgatataataaaaaaggcgcttagagacttttctggagttcaaagaagaatgactaaagtatttataaaaaataaaaatgaattttttgatgattacgcccatcacccgacagaaatttcctcaattctagatggagttaataaagtttataacaacagaaaaattataacggtttttgaaccgcacagatattctagaataaaatcactaaaaaatgctttttctaaatcatttgtaaaatcagatttagttttaatttgtcctatatatgccgcaggagagaagaaaaattcaagttttagtttattgaattttgcaaaattaatatcaaaaaactctaaaacccagacagtgcttgtaaaaaat

SEQ ID NO: 313153 - DNA, 464 bp, Unknown
  Bacterial polypeptide expressing nucleotide sequence isolated from the Sargasso Sea
aatgaaaattgaaatagcaaaagccgaaattattcactttattggtattggtggaatagggatgagtggactttcattaattatgaaaggcaaaggttttaaagttcaaggtagtgatctaagtctaaataaaaacgttgaaagacttaaaaaagaaaaaattaaaatttttattggacataaaaaacaaaatcttaaagatgcaacaatagttgtagtatcttcagctataaaaaaaaataatccagaaattatcgaagcaaaaagaaaaaatttactgataattaaaagggggaaaatgttagcacatattgtatccctaatgaaaaatatagttgtagttggttctcatggaaaaacgactacaacttcattaattacatcaatttttcaaacaacaaaaatagatccaactattattaatggaggtgtaataaattcaattaataatactgcaaaactag

SEQ ID NO: 313154 - DNA, 876 bp, Unknown
  Bacterial polypeptide expressing nucleotide sequence isolated from the Sargasso Sea
ataggacaaaaaaaacaaaatttaaagaaagcaactatattagtcacttcttctgcaataaaaaaaaataatcctgaattaattgaagccaagcgtaaaaaattacctgtaataaaaagaggtaagatgttggcgcatattgtttctttatcgaaaaatatagttgtcgtagggtctcatgggaaaaccaccacgacttcattaatagcttcaattttccaaaaaactaaattagatccaacgataattaatggtggtgtaataaactcaattaaaaattctgctaaattaggtaaaagcgattggtctattttagaggcagacgagtctgatggtagttttgtacatattccaccaacttactctgtgattacaaatattgatcgagaacatatggacttttataaatccatggatgatcttaaaaaatattttctacagtttatgaataaagttccatcatttggtaaatcttttatttgcatagatgacaaagttaattacatgttagtcaaaaaattaaaaaatcgaaattattatacttatggtctaaatccaaaatccaatttttacataaaaaatattaaacaaaataaaaaattttcagaatttgatttaaatataaatcttccaaataaaaaaaaaattaaaattacaagtataaaaatacctttaattggtttacataatattagaaattctgttgcagcgactgctgtttcattgacaattggtatttctatccaagatattaaaaaaggcttatcaaattttggaggcgttcaaagaagatttaataagatttttacatttaacaaaatagacttctatgatgattatgctcaccatccgaccgaaattagaaacgtattggag

SEQ ID NO: 313155 - DNA, 535 bp, Unknown
  Bacterial polypeptide expressing nucleotide sequence isolated from the Sargasso Sea
cttgcgcagaacagataatcggcaagacggctccgaaggaggctgcatgacagcactaccactctctatcggtacaatccatttcaccggcattggcggcatcggcatgagcggcattgccgaaattctgcatgaacttggctacaaggtgcagggaagtgatctgagccagaatgctaatgtgaaacggcttcaagcccgcggaataagagtatcagtgccacaagctgctgaaaatcttaataacgtctctctgattgtaatttctacagctatcactccagataacattgaagtcgttgaagcccaccgaaggtttctgccagttgtacatcgcgctgaaatgctaggcgaattgatgcgactgcgctggacagttgcagttgctggtacacatggcaaaacaacgacaacgtcacttgtggcgacgttgcttgatgctgcagatattgacccgactgtagtaaatggtggcattatttcaagttgggacagcaatgcccgtcttggcgcaggcgactggatggttgtcgaa

SEQ ID NO: 313156 - DNA, 874 bp, Unknown
  Bacterial polypeptide expressing nucleotide sequence isolated from the Sargasso Sea
attgatgtagctggctacgatcaacggaaatcatttataactaaccagttgaatcaagatggcataaaagttgattttaatttaagtaatttaaaatattctaagaaaatactttatatctattcatcagctatttcaattaacgaaacaacgctaaaagattatttagatagtgataatgttttatcaagaccagaatttcttaatatattatcaaaagaaaataaaattattggaattactggtactcacggaaagacatcaactactgcactgctagctcacatattccattacaacgaaaggaatgtctcatacatatttggaggtattacctcattccatgggatagggggacattatggtgatcaggaaaagcctattattttagaaacagatgaggcgtttaatacatttaaagacattaatatcgatgatttattagtaacaaatattgatgttgatcatcttgattattttaaaaattttaaaaacttggtcaatgcattcaagcatgtaatcgagaacgttaaaggtaatttagtactaaattttgatgatcagaacttaagagaattaaaaacaagtaataattgcattagttattcttcatcagaagttgctgatattcaaattaaatacccaaacaaaatcattatagaaaatgaggaatatattgttactacaaaattaatcggcaatcattttatttcaaatatagctggagctatagctttagcatatcttaatggaataaagatagaagactccatagaagctgttgaaactttcccaggagtaaaaagaagaactgaatttcttggctcaataaagggtattaagttatatgatgattatggtcatcaccctacgg

SEQ ID NO: 313157 - DNA, 682 bp, Unknown
  Bacterial polypeptide expressing nucleotide sequence isolated from the Sargasso Sea
ttaatacatattgtaggagtaggtggaattgggatgagtggaattgcagaaattttatcagaaatgggatatcaagttcaaggcagtgacataaaaatcaacgcaaacattgttcgattaaataaaaagaaaataaaaacttttaattcacataaaaagtcaaatttaaaaaatgtaagcttagttgtttattcatctgcgataagtaaaaacaatattgagcttgaacattccaaaaagattaaaattccttcaatttcaagagctgaaatattatctcaaattgtaaaactaaaaaaaactatagctatatctgggtctcatgggaaaactactacgacatctctaatttcaacagttttaaatggggcaagaatgaaaccaactgtaatcaatggcgggataataaatcagtttggaacaaatacaaaattaggatcaggtgattggttagtagttgaagctgatgaatctgacggtacttttgtgaaacttcccgcctcaatttctgtggtaactaatattgataaagaacatcttgattactattcaaattttcaaaatctaaaaaactatttcaaaaggtttataacgcaagttcctttttatggtttcgctgttatatgtatagatgataatgagctacgtaagttagctgctaaaataagtactacaaaaatta

SEQ ID NO: 313158 - DNA, 553 bp, Unknown
  Bacterial polypeptide expressing nucleotide sequence isolated from the Sargasso Sea
aatgaaaattaaattagcaaaaactgagttaatacattttattggaattggtggtataggtatgagtggtttagctctaataatgaaaggtaaaggttttagggtacaaggtagcgatatctctattaataaaaatattgaaaggcttaaaaaagaaaaaataaaagttttaataggacataaaaaacaaaatataaataaggcaacaatattagttatatcttcagctataaaaaaaaataatccagaaatgttagaggctattaataagcagttgcctgtttataaaagaggcgaaatgttagcaaacattgtgtctttaacaaaaaatattgttgttgtgggctctcatggtaaaactactaccacatctctaattgcttctattttccaagaaaccaaaatagatccaactattattaatggaggtgtaatcaactctataaataattctgcgaaacttggtaaaagtgagtggtcaatattagaagccgatgagtcagacggtagttttggtcacacacctccaacgtacgcaatcataacaaatatt

SEQ ID NO: 313159 - DNA, 439 bp, Unknown
  Bacterial polypeptide expressing nucleotide sequence isolated from the Sargasso Sea
aatgaaaattaatttaggaaaaacagagctaatacattttattggaataggaggcataggtatgagtggattggctttaataatgaatggtctgggtttcaaagttcaaggaagcgatatttcaaataataaaaatatagatagattaaaagaaaaaagaatacctatttatttaaatcaccataaaaaaaatttaaaaaaaagcacaataatagttttttcttcagctattaaaaaaaaaaatcctgaactgagtgaagctaaaaaattaaaattacctatttattccagaggagaaatgttaggtcacattgtatctttaatgagaaatgttgtagttacaggatctcatggaaaaacaaccacaacttctttaatttcaaatatattttcccaagctaaattggatccaacaataattaatggtggaattctttaa

SEQ ID NO: 313160 - DNA, 832 bp, Unknown
  Bacterial polypeptide expressing nucleotide sequence isolated from the Sargasso Sea
gatgaaattaagcaaaattaaaaatattcattttattggaataggtggagttggaatggttggaatagcagaaatgcttttaaatcagggattctctgtttctggcagtgatttagttgagaataaaaacactgagagacttaaatatctaggagcaaaaatttttattggtcataatgaaaaaaatgttagagactccgatgttgtggtttattccaccgcagttactgaatctaacccagaaatgcgcagtgcaagatctttgaataaaactattattgctagggcagaaatgttatcaagtctaatgcgtggttttcaaagcatagctgtagctggatcgcatgggaaaacaaccactaccagtcttatcgctaacatttttataaaagctaatcttgatcctacttatataatcggtggaagaatattaggtcaagaagataagagtattcttggctctagcgaatatcttattgttgaagcagatgagagcgatgcatcttttctgcatctaagtccagaaataagcgttataacaaatgttgataatgaccacttagatttctatgaaaacaatatagagaaacttaataaaacttttcatcaatttcttgagaacctgcctttttatggcacagctataatttgtatagatgaagaaaaaggagaaaaacttttcaatgatttatctagaccaaaaatatcctatggctttaataagtcagcagattattatctaaaagatttgaaacaaactagcagttttcaagagtttaccttggtaagaaattcagttggcaaggaagttagattgcaattaaagattgca

SEQ ID NO: 313161 - DNA, 406 bp, Unknown
  Bacterial polypeptide expressing nucleotide sequence isolated from the Sargasso Sea
ttataaatatgaagacaaggtaatcgtagatgactatgctcatcatcctactgaaataaaatcaatttttgatacaatagattctaattatcaagataagcctaaagcagttatttttcaacctcacttatataccagaacaagggatttaatggatgattttgctaaagttttatcttattttaatgaagtatatcttttagatatctatcctgcaagagagaagccaattaatggcataacttcagaagttttactgaataaaatagatgcatcaaaaaaagaaattgttaaaaaggttgaaatcaataatttaataaataatactaattgcaaaataattgcaattcttggtgcaggtgatctaacgataaatctaaataaaaaaatatttactaatgaatag

SEQ ID NO: 313162 - DNA, 908 bp, Unknown
  Bacterial polypeptide expressing nucleotide sequence isolated from the Sargasso Sea
tacgatcggacacgaaaggcataacgttggacaggtagaccttgtcgcccggtccactgctgtagcagatgaaaatattgagataaaggaagctagagatagcggtatccctgtagtaagccgagcagacatcttgagtgctattactaaaattaaacctactgtctctgtagccggaacgcatggcaagacaactacttcatccatgctggcagtgttgcttgctcaagccaatctaaacccttcatttataattggtggagaggttaacgaaatagggtgtggagcgttatgggaagcagaatccaacctatttgtagtagaagcagatgaatcagatggaacgtttcttacacttgactcggactacggaatcattaccaatgttgaacctgatcatctgggacaatacggagatgaggcgaatcttcgagatgcttttaaccaatttctgaaaaatataaaggataaagcattcgtatgtttcgatgacgaaggcttaaaggatttaataggggagcctgacgtcatcacatatggggttgatcccgaagcagactactctattgagggctataagggttcgagattcggatctagtttttcgcttaatgggccttcaggcaatctaggtaatttttctctagcgacgcctggtctatataacgttcgaaatgcggtagctgctttatcattcgccgactacttaggtgcagatatcaacttgttgcgagaagggctcggccagtttggaggagtagctagaaggtttcattatcgaggagaaaaaaatggcatatcgtttatagatgactatgcgcatctaccaactgaggtcagctctgttctcgaagcggcaaaagaaggggattggggtcgcataatttgtgtttttcaccacacaggta

SEQ ID NO: 313163 - DNA, 775 bp, Unknown
  Bacterial polypeptide expressing nucleotide sequence isolated from the Sargasso Sea
ttaagcaatcttccattttatggtgttgctattgtaaatgaagatgacaagaatctaaaaaagataattttaagaaatggtacaagaaaaataatttcttattcaaataaaaataaaactgccgatgtttttataaaaaaagttaaatttaaaaaacaatacagtacttttgaattaaaatttaatatttctataaatcatatttcaggcttacagtcatacacagtaaaagcaataggattgcataatatttataattcaaccgctagcattattgcaggtttggtagcgggtgtaaaaaataattatgttaagtctgcattaactaattatattggagtgaaaagaagatttacctatttaggaaaagtaaacttatcaaatatttatgatgattatgcccatcatccaactgaaattttagcaacccttaaaggagcaaaacaaattaataaaaatattgttgtagtttttcaacctcatagatattcaagaactaaaattttatttaatgaatttttaaaagttttatcaaaaacaaacaaattatatttacttgacacatattctgcaggagaaaaaataattagaggttttgaaactaaagatattttcaatcatttaacaaaatcaaaaaaaaatatattctatgtcaaggaaaaagatttaaataaaagtatctacaaagaaactaataaaaaaaatattattatatttatgggtgctgggtctattagtaaaattgcaagcaactttttgaaaatcaatgaatgat

SEQ ID NO: 313164 - DNA, 546 bp, Unknown
  Bacterial polypeptide expressing nucleotide sequence isolated from the Sargasso Sea
gaagaatgattagttattcaaaaagtcaaaattcagatgtaaaaattatcaaaataactaaaagtaaaaaaggaaataacttttctttatattttaaaaaaggagtaattaaaggcatcaaagggaaatatcattttaagaccaatcttatgggagaccataatatatttaattcaacagcagctataatagcttctttactagcggaaattccaataaaaaaaattaaaaattctctaaaagattttcaaggagttaaaagaagatttagttttattggcaaagttaacaaggcatctatttatgatgattatgctcatcatccttcagaaataaaagcaagttatgacattgctaaacaaatatctgataaaaaaattgtaattgtgtttcaacctcatagatatacaagaactaaaattttacaaaatgaatttgttaaaattttatcaaaagtagatatattatatatccttgatatttattcggcaggagaaaaacctattccaaatataaattcaaaaaatttagtaaaacaaaattaaa

SEQ ID NO: 313165 - DNA, 769 bp, Unknown
  Bacterial polypeptide expressing nucleotide sequence isolated from the Sargasso Sea
ccaatttacaaaagaggagaaatgttggggcatatcgtttcattaatgagaaatgttgttgttaccggttcacatggcaaaacaacaacaacctctttaatttcaaatatttttacagaagccaaattagacccaacaatcatcaatggtggtatactaaattcttttggtaattctgctaagttaggcaaaagtaattggtgcataatagagtcagacgagtcagatggaagttttttaaagattccatttacttattctattgtaacaaatttagatgctgaacatttagatttttacaaatccttaaaaaatttaaaaaaaaacttttctttatttcttgaaaaaatcccatctgttggtaaaggttttttgtgtattgatgacaaaaatataagagaaattttaaacaaaacaaaaaacaaaaattattatacttatggtattaataaaaaatcaaattttcaaatattaaatatttttcaaagtactaatttttcaaattttgacataaagataaatattcctggaaacaaaaaaataattaaaaatttcaaagttcctttgattggaatgcacaatattaaaaatgttacttcagcagttgcagttgctttttcaatagggatatctgtaaaaattattaaaaaaggtttaataaaatttaaaggagtgcaaaggcgatttagttatttatttaaacacaataatgcaatttttattgatgattatgcgcatcatcctactgaaattagttcagttttagagg

SEQ ID NO: 313166 - DNA, 505 bp, Unknown
  Bacterial polypeptide expressing nucleotide sequence isolated from the Sargasso Sea
aatagccggtttattatagctggtgtaaaaaataattatattaaattagccttaattaattatattggagttagaagaagatttactcatttaggaaaagtaaatttatcaaatatatatgatgattatgctcatcacccaacagaaattcacgcaaccctaaaaggagcaaaacaagttaataaaaatattattgtagtttttcagcctcatagatattctagaactaaaattttaattaatgaatttgtaagtgtcctatctaaaataaataaattgtatttacttgaaacatattcagcaggagaaaaaaaaattaaagggtttgaaactaaagatatttataataagttaagaaaaaataaaaaaaatgtagtctacgttagaaaaaaaaatttaaataaaattatcttcaaagaaacttatcaaaaaaatataattatatttatgggtgctggctcaataagtaaaatagcaagtaactttgtgaaaattaatgagtgat

SEQ ID NO: 313167 - DNA, 784 bp, Unknown
  Bacterial polypeptide expressing nucleotide sequence isolated from the Sargasso Sea
ggcaaacgttgtctctctaatgaaaaacgttgtagtagcaggatcacatggcaaaacaactactacctcattaatatcaagtatatttacacacgcaaaaatagacccaacagtaattaacggtggagttttaaattcctttagtggttctgcaaaattaggtaaaagtgattggtgcattttagagtcagatgaatctgatggaagctttacaaaaattccatcaacttattcaatagttacaaacattgataaagaacatttggattattataaatctttagaaattctaaaaaaaaattttattaattttattgaaaaaacaccatcatttggaaaaacctttatatgctttgataatcaaaacaatagagatgtaataaaaaaaattaagaatttaaattataacacatatggtacaaataaattgtcaaattttaaaatatctaatatttcacaaaataaaaattattcaaaatttgatataaaaataaatttacctggaacaaaaattaattttataaaaaatataaaaatacctcttattggtttgcacaatataagaaattcaactgcggctgtggctgttgcattttcagtcggtataccaattgaaattataaaaaaaggtttaaaaaaattttctggagttcaaagaagatttactaaagttttttcatatcaaaatgttcctttttttgatgattatgctcatcatccgacagaaatttctgaagtccttgacggtgtaagagaagtttataaagataaagaaattgaatgt

SEQ ID NO: 313168 - DNA, 133 bp, Unknown
  Bacterial polypeptide expressing nucleotide sequence isolated from the Sargasso Sea
ttgaatttaaaaattagaacaagattaccactagatttaggcaaattacatttcataggaatcggtggaattggtatgtctggaattgcagaattaatctataatttaggttataaagtttctggttcagacc

SEQ ID NO: 313169 - DNA, 585 bp, Unknown
  Bacterial polypeptide expressing nucleotide sequence isolated from the Sargasso Sea
gcctgcacaacctgagcaacgccacggctgccctggccgcctgccgaatggaaggtctgagcctggaccgactgatgggaggcctggctgtgctgcagaccccagggcgtcgcttcgacctgcgcggcacctggcaggggcgccacatcgttgatgactacgcccatcaccccagcgaagtgagggcaactctcgagatggctcggttgatggtggacagcggccgcagccctctgcccagcccgccgcgccggttgctggccgtgttccaaccccaccggtacagccgtacacaggagtttctaggtgaattcgccctcgccctgcagaactgtgacgcgctaatgctggccccggtctatgccgcaggtgagaaaccgatcgcaggggtctgcagccgcaccctggcggaccgtgtgcgggccctgagacctgagcttcccgtccacgtggccgacaacatcgatgagctggtctccctcgtgcgggacgccagccgccctgaggacctggttctggccatgggagccggtgatgtgaacggcctgtggtcacgactgtccaggacaccggtggccgcctgat

SEQ ID NO: 313170 - DNA, 619 bp, Unknown
  Bacterial polypeptide expressing nucleotide sequence isolated from the Sargasso Sea
aatgaaaattgaaatagcaaaaacagaaattatacattttgtagggattggtggcataggaatgagtggactttctttaattatgaagggtaaaggatttaaagttcaagggagtgacttaatttctaataaaaacgttgaaagattaaaaaaggaaagaataaaaatttttataggacaaaagaaacaaaatttaaaaaaagcaacaataattgtaatttcatcagcaataaaaaaaaataatcctgaaataatagaggcaaaaagaaaaaatttaccaatcataactagaggtgagatgttggctcatattgtttctttaactaaaaatattgttgttgctggttcgcatggaaaaactactaccacatctctagtaacctcaatttttcagaaaacaaaattagatcctacaattattaatggaggggttatcaattcaataagaaatacagccaaacttggaaagagtgactggtctattttagaagctgatgagtctgatggtagctttgttcacattccaccaacatactcaattattacaaatatagatagagaacacatggattactataagtctatagatgatttaaaaaatattttcttaagtttatag

SEQ ID NO: 313171 - DNA, 623 bp, Unknown
  Bacterial polypeptide expressing nucleotide sequence isolated from the Sargasso Sea
tagattaggcgaaggtgattggatgatagtagaggctgatgaaagtgatggaacccttgtagaaattccttctactatttcgataataaccaatttagatccagaacatttagatcactatggtacatttactgctttaaaaaaaacatttttggaatttttaaatagtattccgttttatggggtagctatatgttttattgaccatccagaagttaaaaagctaatatcaaaggtaaaagatagaaaagttcttacttatggttacagtagtgtatctgactttcaaatcaagaatttagagtataaaaaaaataaagcgttctttcaaatatacaataaactaaatgaagaaaatttaaaatttgaattaccaatgtatggggatcataatgtagctaatgcggcggcggcaattacagtagcattatatttaaatatacctatagaaagtataaaaaatggtctcaaaaattttaaaggtgtaaagagaagatttactaaggtttgtaattggaatggtatcgagataatcgatgattatgctcatcatcctgttgaaatattggcagttttatctgctgcaagaaagtatacttcaggaagagtaattgcaattcatc

SEQ ID NO: 313172 - DNA, 971 bp, Unknown
  Bacterial polypeptide expressing nucleotide sequence isolated from the Sargasso Sea
aaaaaatgttaagaatgcaacgataattgtaagatcatcagcaattactgaaaataacttagaaattcgagaagcaaaaaagcgaaaaataccaatttattctcgtgccgaagttttagctaatgtcgtttctttaaaaaaaaatattatcattactggttcccatggaaaaactacaacaacatctttagtcgctaaaatcttatctgatagaagacttgatcctacaataataaatggtggtgtcattaattcctttaagagtaatgctaaactaggaaagggagagtgggctattctagaagctgatgagtcagacggaagttttctaaaactacctataaattattcgattgttactaatttagattttgaacacattgattattacaataactttaaaaatttagaaaatgcttttatacaatttataaacaaaacaccgccaatcggaaaatcattaatttgtttagacaataaaaatatacaaaatattctgaaaaaaattaaaaataagaatattttaacctatggatttcataaagatgcaaactataaagttagcaatgctagatattttattgataatacaatttttgacttaaactatactaattttattagtaagcaaaaagttaaaataaaaaatatcaatgttaaacttataggcaagcataacgtgctaaatgcgagcgctgctatatctgtttgtttaaatcttggtattaaaatcaatataataaaaaatgccctcaagaatttttcaggcgttcaaagaagaatgacgaaattatttaaaaaaaataaaaatgaattttttgatgattatgctcatcacccaactgaaattacatctgttttagatggtgtaagtaaagtttataaaaatagaaaaattatttctgtttttgagcctcacagatattcaagaataatgtctctgaaaaaagctttttcgaagtcattcatta

SEQ ID NO: 313173 - DNA, 442 bp, Unknown
  Bacterial polypeptide expressing nucleotide sequence isolated from the Sargasso Sea
atgaaaattaaattagcaaaaacagagttaatacattttgttggaattggtggaataggtatgagtggcttagcactaataatgaaaggtaaaggttttaaagttcaaggaagtgatattgcaaataataaaaatattgaaagattaagaaaagaaaaaataaaagttttcataggacacaagaaacaaaatatagaaaagggaacaatactagttgtatcctcagctattaagaaaaacaacccagagcttgctgcagcaaaaagaaaacaattacctatttataaaagaggcgaaatgctcgctaatattgtttctttaacaaaaaacattgtggtagttggatcacacggcaaaactacaacaacttctttgatagcatcaatatttcaagaaacaaaaattgatcctacaattatcaatggtggagtgataaattcaa

SEQ ID NO: 313174 - DNA, 830 bp, Unknown
  Bacterial polypeptide expressing nucleotide sequence isolated from the Sargasso Sea
cgaaatgagatcatacattttgttggaataggaggaataggtatgagtggactagctcaagttatgaaaaatatgggttttaaaattcaaggaagcgatcaaaataaaaataaaaatactaaaagctgttcaaaagttggtattaaagtttatattggtcactctccaaaaaacataaaaagctcaaccatattagtgaaatcttctgcaataaaaaataataacaatgagattaagtatgcaaaagaaaaaaaaataccaatttattcaagagcagaagtacttgctgacgtagtttcacttaaaaaaaatattattatcaccggttctcacggcaaaactactacaacttcattagtatctaaaattttatctgatcaaaaacttgatcctactataattaacggcggtgtgataaattcactaaatagtaatgccaaactgggaaaaggtgattgggcaattttagaagcagatgagtctgatggaagttttttaaaattaccaattaattattctattgttactaatattgattacgagcacattgatttttataaaaattttaaaaacttagaaaattcctttttaaaatttatagaaaaaacaccaccaacaggcaaatcaattctttgcgcagacaataaaaatataaaaaaattatttactaaaattaaaaataagaatgttttaagttacggtgaaagtagaaatgtaaattatagaatctcaaatataaggtataaaatagattattccatttttgatttgaactataaagatcttaggaaaaaaaataaaaaaataagaaatattaaagttaaattatt

SEQ ID NO: 313175 - DNA, 910 bp, Unknown
  Bacterial polypeptide expressing nucleotide sequence isolated from the Sargasso Sea
gttcaaattggacataaaaaacgacatttatctaatgcgactattttggttatttcatcagcaataaaaaaacaaaatcctgagtatttagaagctaagagaaaaaaaataccaatttataaaaggggtgacatgctagcgaatatagtttccctttttaaaaatgttgtagttgcaggttcacacggaaaaacaacgactacatcaatagtctcgacaattttttcaaaatcaaaattagatccaaccacaattaatggtggtgttattaattcaattggtaactcggccaaacttggcaaaggtgagtggtgcgtattagaatctgatgaatcagatggtagttttttgaagcttccgtttacatattcaattattacaaatattgataatgaacatcttgaacactatggatcaattgaaaatttaaaaaaaagttttgttaaattttctgataaaacaccatcttttggaaagactctaatttgtttagacgacaaaaataatagatcaattataagaaaaattaaaaatcaaaatattgttacttatggattaaacgcaaagtcaaactttaggataaaaaatattgaactacaaaataatttctcaaaatttgatttagaggttaatttacctaaccaagaaaaaaaattattcaaatcctttaaaatacccctaattggaaatcataatataaaaaattgtaccgcgtcaattgcagttgcaatgttaatgggaatatctataagcttaattaaaaaagctatatcagaatttagaggtgtcgaaagaagatttaattttatattcgaattccagaaaagcattttttatgatgattacgctcatcatcctacagaaaaacatgaattacttaagtcttctaaggaagtttataaatcaaaaa

SEQ ID NO: 313176 - DNA, 701 bp, Unknown
  Bacterial polypeptide expressing nucleotide sequence isolated from the Sargasso Sea
aatgaaattaagcaaaattaaaaatattcattttataggtattggtggtgttggcatggttggcattgctgaaatgctaataaaccaaggttacagggtaagtggcagtgaccttgtaagcaataataatgtaaagcgacttaaaagcttaggtgcacatatttctattggtcatcatgcaacaaatattaaaaattgtgatgtggtggttttttcatcagctgtaggttcaaacaactctgaaatgaaggaggcaagaaaacaatcaaaaataattattcctcgagcagagatgctttcaggtttaatgactggctatcaaagtattgctgtagcaggctcacatgggaaaacaactacaacaagtctaatttcctatatttttactgaggctaaattagatccaacatatatcatcggaggaagaattttaggaaaagaggaaaaaagtattctcggaaaaagtaatttcattattgttgaagcagatgaaagtgatggttccttcttacaccttaaccctgaaattagtgttctgacaaatatagataatgatcatttggacttttatgacaacaagccacacaaacttgaaaaaactttttttaattttatggaaaagctgccattttttggaactgcaattatatgcgttgactgcaaaaagtcagatagggtattcaaaaagctatcaagacaaa

SEQ ID NO: 313177 - DNA, 844 bp, Unknown
  Bacterial polypeptide expressing nucleotide sequence isolated from the Sargasso Sea
cttggttcagatagtactactttcttccaacacccaaagacttgagggtatgggtattaaaatttactacgaacataaatcttccaatcttgaaggggtcgagatgctggtgaagtcgactgcagtacctgaagataatgtagagattaaggaggcaagagatagattcatcccagtactagcaagagctgaaatgctttctagcttgatgaacaacaaaaaaggtatagctgttgccggaacacacggcaaaacaaccactaccagtctagttgcttcaataatgagtgacgcaggtcttgacccaacgtttatcaatggaggaataatcaatagttttaactcaaatgcgcaattaggtcagggcgaatatctaattgctgaagcagatgaaagtgatcaatcatttttgttgcttcaaccatctgtttcaataattaccaatattgagccagatcatctaattaattacgaaaatagttttgaaaacttaaaaaatgcctttttagaattcattaagaatcttcccttcaatgggatttctattgtctgcggagatgatgaggtaataaaagtgttaaaaaagaattttcaaagaaaccatatcagttatggttttgagccaaccaatgattatgttatttctaattataaatctgagggaatgaaatctttctttaaattgacctctccccatgagtccatagatttaagcctaaatatgttaggcaagcataatgttttgaatgccgctgctgctgctattttatgcatccaagaaggcatctcattaaatgttataaaaggatcttttaacaatttcatgggtatagataggcgcatg

SEQ ID NO: 313178 - DNA, 888 bp, Unknown
  Bacterial polypeptide expressing nucleotide sequence isolated from the Sargasso Sea
tataaggtatctggttcagatagtacttcttcttccaatacccaaagacttgagggtatgggtattaaaatttactacgaacacaaatcttccaatcttgaaggggtcgagatgctggtgaagtcgactgcaatacctgaagataatgtagagattgaggaggcaagagatagattcatcccagtactagcaagagctgaaatgctttctagcttgatgaacaacaaaaaaggtatagctgttgccggaacacacggcaaaacaaccactaccagtttagttgcttcaataatgagtgacgcaggtcttgatccaacgtttatcaatggaggaataatcaatagttttaattcaaatgcgcaattaggtcagggcgaatatctaattgctgaagcagatgaaagtgatcaatcatttttgttgcttcaaccatctgtttcaataattaccaatattgagcctgatcatctaattaattacgaaaatagttttgaaaacttaaaaaatgcctttttagaattcattaagaatcttcccttcaatgggatttctattgtctgcggagatgatgaggtaataaaagggttaaaaaagaattttcaaagaaaccatatcagttatggttttgagccaaccaatgattatgttatttctaattataaatccgagggaatgaaatctttatttaaattgacctctccccatgagtccatagatttaagcctaaatatgttaggcaagcataatgttttgaatgccgctgctgctgctattttatgcatccaagaaggcatctcattaaatgttataaaaggatctttaaagaatttcatgggtatagataggcgcatgcaaattttagggtctaagaaaatcaaaactcatcac

SEQ ID NO: 313179 - DNA, 714 bp, Unknown
  Bacterial polypeptide expressing nucleotide sequence isolated from the Sargasso Sea
tatgggcggtatagcagagttatgtctgcagatgggctgttgtgttatgggttctgatgccaaggataatttaatgacgcgccgcctgcgagagattggtattaaaattgaaataggccaccatgcaacgttatctggaaaaatagattgtgtagtttactcaagtgcaatagctgaagataatatacaattggtatctgctcgttctcaaggattgaggtgtgttcgtcgaggtgactttttggcagagttaatgacaaatactaatggtattgcagtttgcggaactcatggtaaaactactactactggtctaattactagtatgctggttggttgtggtagggatccagcgttcgcaattggcgggatgcatcagcaattggggtgttattcccgtctaggcaaagataatttgtttgttgttgaggctgatgaaagcgatgtttcatttttagctttgcccgcacaagtagccgtgattacaaacattgattacgaccatatggaagcatattccgatgattttagtatcttgcagcaagctttttctgagtttgtaactaagcttcctgcgacaggatgtgctgttgtatgttgggatgatccagttgtgcgtgaaattatgcaagcatataaaggcaaaatgttaagctatggagaacatgaagactctgatttttgtgttaagaaatataagcaaattggcttgca

SEQ ID NO: 313180 - DNA, 550 bp, Unknown
  Bacterial polypeptide expressing nucleotide sequence isolated from the Sargasso Sea
aatgaataataaaaaaattaaaattcattttattggaatatcaggtatcggtatgtcaggaattgcagaattaatgaaggataaaggatatcttattcaaggtagtgatgttgctttaaacgataatacaaaaagacttaaaaaaaagggtattaaattttttttaggacataaaaataaaaatgtaaaagatgttgatgctgttgtattttcttcagccataagaaagaataatccagaaattaaagaggctattatcaaaaaaattcctcttctttcaagagctgatatgcttagtgaattaatgaaaaataaaaaagcaattgcaatagctggatctcatggaaagactacaacaactagtttaattggtaatatattaagtcaaggtaatttagatccgacaatagtaaatggtggaatcattaattctttatcaaaaaataatcgttttggtaagggagattggatggttgttgaagctgatgaaagcgatggttcttttttaaaattaccacatcaaatttctgtaattacaaatttagatatt

SEQ ID NO: 313181 - DNA, 718 bp, Unknown
  Bacterial polypeptide expressing nucleotide sequence isolated from the Sargasso Sea
gaaaaaaaacataatagtaactggctcccatggaaaaactactacaacatctttaattgctaaaattcttttagagtcaaaactagacccaaccataattaatggaggagtaattaactctttaaaaaacaatgcaaaattgggcaagggcgaatggacagttttagaagctgacgagtctgatggaagtttccttaaacttccaattaattattctatagtaacaaatatagataaagaacacttagattattataaaaattttgataatcttgaaaaaaattttataaaatttattaataggactccaccaataggcaaatgtatcatttgtggagatgataaaaatattaaaaatattattaaaaaaatcgatacaaataatattttaacatatggtttcaataaaaataatcattttcaaattacgaagccgaaatttaatccaaataattgtaaatttgatttagtaattaaaaggctaaatagaaaaaaattaatgttaaaaaatataacacttaatttaatcgggaaacataatattcttaactcagttgcggcgataagtgtttgtcttagtttaggtataaatataaagataattaaaaaggctttgattaagtttacaggagttcaaagaaggatgacaaaaatatttgtaaaaaatgaaaatgaattttatgatgactatgcacatcatccgactgaaatatcatca

SEQ ID NO: 313182 - DNA, 817 bp, Unknown
  Bacterial polypeptide expressing nucleotide sequence isolated from the Sargasso Sea
atgaagaacaaaattagaattcattttataggtatatcaggcattggtatgtcaggcattgcagaacttatgcaggaccaaggttattatattcaaggcagtgatatatctttaaatgataatagcaaaagattaaaaaaaaagggagtaaaattctttttaggtcatgataaaaaaaatataaaatcagttgatgcagttgtattttcttcggcaatcaagagaaataatcctgaagtaaaagcagcattgattaaaaaaattcccctgctttcaagagcagatatgcttggagagttaatgaaaaataaaaaatcaattgctatagccggatctcatggaaagacaacaactacaagtttaattggaaacattttaagccaatctaatttcgatccaactattgtaaatggcggcattataaattcattatctaaaaataatagatatggaaaaggggaatggatggtagtagaggctgatgagagtgatggttcatttttaaaactacctcaccaaatatcaataattaccaatttagatattgagcatttagatttttataaatcaaaagaaaatttaataaattcatttgaaaattttataaatatgctacctttttatggatactcaatagtatgtatagacgatagtaatctttataaattggtaaagaagaataaatcaagaaatataataacttattcaataaaaaataaaaatgctgatgtttacatttatgaaattattaaaaaaacatcaagtacctcatttaaattaaaaataaaaaatatgaatattttgccactacaataat

SEQ ID NO: 313183 - DNA, 712 bp, Unknown
  Bacterial polypeptide expressing nucleotide sequence isolated from the Sargasso Sea
aaaagaagttaaaacaaaaaattatcttacttatggatttaacgataaagcccattaccaaattttgaaaacaaaatacaaatcaaatttcactaattttgaaataaaatataaaaataatatttctaaaaatatagttattaaaaatataaccttaaatttaattggaaagcataatgttttgaatgcaacagcagctatagcaatatgtttaaatcttggtattaaaattaatataattaaaaaagctttaagaaaattttccggcgttcaaagaaggctaactaaaatatttacaaaagacaacaaagacttctatgatgactatgctcatcatcctactgaaataagatcggttttagaaggtataaaacaagtatacaagaaaagaaaaatattatctatttttcaacctcatagatactcaagaataaaaagtttaaagtttgaattttcaaaaagtttctcaaactcagatttagtaatactatgtccgatatatgctgctggagaaaaaaaagacataaaatataatcaaaataatttttcaaaaattatagctaaaaattctaaggttcaagtagtaaacattaaggatgaaatagatcttaaaaaatttttgaagataaatttaataaaagatgaaattattataggcatgggcgcaggctcaatttcaaagtggatgatagatttggaaaataagttatga

SEQ ID NO: 313184 - DNA, 365 bp, Unknown
  Bacterial polypeptide expressing nucleotide sequence isolated from the Sargasso Sea
aatgaaaaataaaaatataagaatccattttattggaattggcggtattggcatgtcaggaattgcagaattaatgcataaaattggttatacagttttggggagtgatataattgaaagtgaaaatatcaaaagattaagagaaaatggtattattgtaaaaataggacatcataaaaaaaatataggaaatgttaatgcagttgtttattcttctgccgtaaaccaaaataaccctgaaataaaagaagcaaaaaaacataaaattccaatagtaagtagagcagatatgcttgcggaacttatgaaaaataaaaaatgtattgcggttgctggttctcatggaaaaacaacaacaacaagtt

SEQ ID NO: 313185 - DNA, 843 bp, Unknown
  Bacterial polypeptide expressing nucleotide sequence isolated from the Sargasso Sea
attaacagtaaaattcattttataggtatttcaggaataggaatgtctggtattgcagaattgatgctagataaaggatattcgatccagggtagtgatatatcagtaaatgacaataccaaaagattaaagaaaaaaggtataaaattttttttaggacataataaaaaaaatattaaaaatgctcatgctattgtttattcatcagctattaaaaaaaataatcctgaaataagagaggcatatattaaaaaaataccagttctctctcgagctgatatgctttctgaattaatgaaaaataaaaaatctattgccatagctggatctcacggaaaaactactaccactagtttggtaggaaatattttcaatgaagcaggtttagatcctactattgtaaatggcggtattataaattctttttctaataataatcgttatggaaaaggtgaatggatgattgttgaagcagacgagagtgatggtacctttttaaagcttccacatcaaatatcaattattactaatttagatattgaacacatggatttttataaatcaaaaaaaaatttaattaatgcatttgaaaaatttataaatctgcttccattttatggaaccacaataatgtgttatgatgataataatcttaaattattaattaacaaaataaaaactagaaatattttaacttattcaataaaaaataaaaaagcagatgtacttatctttgatattaaacaaaacaaactaaaaacttcttttaaattaaaaattaacaataaaattattcattcttctaattataaatttactatcaatgcaattggcaatcataat

SEQ ID NO: 313186 - DNA, 706 bp, Unknown
  Bacterial polypeptide expressing nucleotide sequence isolated from the Sargasso Sea
ttggataaaaaattactgttgaaaagtcattttcattttattgggattggagggattgggatgtcagcattagcaataggtttacttaaaaaaggctgttcagtttcaggatctgatttagttaaaaacgatgaaactcaaaaattggagaaatcaggtgcagtaatctttacttctcaaattcgacaaaatattgattttgttatttcaaaatttaacaacaaattgattaattttgttgtaagctccgcgatcaagccagaaaatgaagaatttttgtactgcagagaaaaaaatttatcaataaaacatcgttcagaaatacttgcaatgctaatgcgcacttatacatcattggcggtagccggcagccacggaaaaacatcaaccagtacatttctatctacaatacttgagttatgtacacgtaattcttcttcaattactggaggaataattcctatttacaactctaattgtcatttagaaaatacaaaattcttagtggctgaagttgatgagtctgatgggacaattaacaaatataagtctgatatcggaataatcaataacattgattttgatcattgcgatcacttttctaatttaagtgaagtcatatcttcttttaaaagttttgctaaaaactctaaaaaattactacttaattttgattgtgaaacctcaagaaataatttttattcta

SEQ ID NO: 313187 - DNA, 385 bp, Unknown
  Bacterial polypeptide expressing nucleotide sequence isolated from the Sargasso Sea
atgaaaattgatttaggaaaaaacgaacttattcattttgttggtattggtggaatagggatgagtggtttagctttaattatgaacggattgggatacaaagttcaaggtagcgatattactaataatcgaaatattgaaagactgagtgaaaaaaaaataaaagtattcatcaaacataaaaaagaaaatataaaaaaaacttctatgttagtaatttcttcagcaattaaaaaaagcaaccctgaagttgtagaggcaattaaaaaagatttaccaatttatacaagaggagatatgttgggtcatattgtttcgtttatgagaaatgttgttgtaactggttcacatggaaaaacaacaacaacatcgttggtatcaagta

SEQ ID NO: 313188 - DNA, 931 bp, Unknown
  Bacterial polypeptide expressing nucleotide sequence isolated from the Sargasso Sea
aaaagtgaatggtcaatattagaggcagatgagtctgatggtagctttgttcataccccacccacatatgcaatagtaacaaatattgacagagagcatatggattattaccaatctatgaataaattaaacaaatattttgtaaattttgtcaaccaagttccatcttttggaaaatcatttgtttgtctagataataaaaataacaaaagcttaataaaaaaattaaagaataaaaatttttatacttatggaacagatgacaaatctaattttagtattaaaaatataagacaatttagagaatattcagaatacgatttaaaaattagattaccaaataaaaaaattaaattaattaaaaaaataaaaattccattattaggtttgcacaatattaaaaattcagctgctgcaactgctctatcactcacagttgggttagatatttctgatattaaaaaaggacttaaaaactttaaaggagttcatagaagatttaataaaatttttacttttaataaagttgatttttttgatgattatgcacatcatccaactgaaattaaagaggttcttaatggagtaaaaaaggtttattcaaattatgaaaagatatgtattttccagccacacaggatatccagattaaaagatttaagagcagaatttgcctctgcatttaaaaatgcagacaaagtaattctttttccgatttatacagctggtgaaaaaattaagctaggatttaattattctgattttgcaaaagaaataattaaaaaatctaaggtgcaacttttcctattaaatgacaaatatcaattagccaaatatattaaacataatatctatggagataaaatagtaataggtatgggagcaggttctatttcatcatggatgagagaaatgccaaaatttttataat

SEQ ID NO: 313189 - DNA, 808 bp, Unknown
  Bacterial polypeptide expressing nucleotide sequence isolated from the Sargasso Sea
aacttaccagtttacactagaggagatatgttaggtcacatagtatcgttcatgaggaatgttgttgttactggttcgcatggaaaaacgacaacaacgtcattagtatctagtatttttactgcaggcaatttagatccaactataattaatggcggtgtactaaactcttttggtaattctgcaaaattaggtaaaagtaattggtgtattactgagtctgatgagtcagacggaagttttttaaaaatcccctttacatattcaatttgcactaatcttgattctgagcatttagatttttacaaaaacataaataatcttaaaaaaagttttttaaaatttattgaaaaaataccatctgttggtaaaggttttgtatgtaatgacgatcaaaatcttaaaaaagttcttaaaaaatcaaaaaataaaaatttttattcttatggtgaagataaaaagtcaaattttcaaatcaaaaatgtaaaacaaacttataacttttctagttttgatataaaaataaatataccaagtaaaaaaaaaataattaaaggtatcagagttccaatgattggaattcataatattaggaatgctactgctgcagttgcattagcatttacaattggactacccgaaaaatatattaaacatgggctaaataattttaaaggagttcaaagaagattttctcacttgtttgattataataatatcagtttttatgatgattacgcacatcatccaacagaaataagctcagttttaaatggtgttaaaaatgtttttaaaaataaggaaattg

SEQ ID NO: 313190 - DNA, 948 bp, Unknown
  Bacterial polypeptide expressing nucleotide sequence isolated from the Sargasso Sea
caaagataaagatttaattataatcggcaatgtaatgtcacgaggtaatcctgtagtcgagtatattttaaaaaacaatatgaattacgtctcagggccacaatggttatatgacaacatcttaaaacataaaaaagttatagctgtaagtggtacgcatgggaaaactacaacaactgcgatgattgttcacatcatgaaaaaaaataaaatgaacccgagttatttaattggtggatcgccaaaaggtaattttaagtcagtttcacttacaagttcaaaatattttgtcattgaagctgatgaatatgatactgcgttctttgataaaagatctaaatttatacattacaacccttttatagctgttataaataatattgaatatgatcatgctgatatttttgaaaatatagatgaaataataaaatcttttagccatatgattagacttataccatctgacggtacaataattgctaataaaaatgatcataatattaaaaaattacttcaaaaaggatgttggtcgaagttaaaaacagttgattccataaaagcgtcaggagattttaatttgataaagaaaaaacattatatgcttaaattcaataataaaaactttttattgccagtgaatatcataggaaagcataactacatgaatgctgtaactgcaattgcagcatgcagagaactcaaggttccaataaatatccaaatcaaggctttatcaaattttaaaggtgtcagtaaacgaacagatctagtttgtgagattgatggaatgaaagtttttgacgattttgcacatcatccaactgccattaaatcttcgattagctcaattaaggacacattcacggggaaaagggttttaactatattcgtacctggctcaaattctatgagacttggggtgcataatgatcagcttataccatctct

SEQ ID NO: 313191 - DNA, 382 bp, Unknown
  Bacterial polypeptide expressing nucleotide sequence isolated from the Sargasso Sea
aatgaataaattaaataaaattaaaattcattttataggcattggaggtattggcatgtcaggtatcgctgaattaatgtttgaattaggttatgcagttcaaggaagtgatattagtatgaatgctaatataagaagattaaaaaaaaggggaataaaaatttataattctcatcacaaaaataatattcgtaacatgtctgctattgtattttctactgctattaaaaaaaataaccctgaaatattagagtctaaaagattatatatacctctaattactcgagcagatatgttggctgaattaatgaaattaaaaaaatcaattgctattgctggctctcatgggaaaactactactactagtttagttggatcaata

SEQ ID NO: 313192 - DNA, 469 bp, Unknown
  Bacterial polypeptide expressing nucleotide sequence isolated from the Sargasso Sea
atgaaaattgaaatagcaaaaactgagataattcattttgttggaattggcggaatagggatgagtggactttctttgattatgaagggtaagggttttaaagttcaaggaagtgacttaagtctaaataaaaatgttgaaagacttaaaaaagaaaaaattaaaatttttatcggacagaaaaaacaaaatcttaaagatgcaactatagttgtagtatcttcagctataaaaaaaaataatccagaaattatcgaagcaaaaagaaaaaatttaccgataattaaaagagggaaaatgcttgcacatattgtatccctaatgaaaaatatagttgtagttggttctcatggaaaaacgaccacaacttcattaattacttcaatttttcaaacaacaaaaatagatccaactattattaatggaggtgtaataaactcaattaataatactgcaaaattgggtaaaa

SEQ ID NO: 313193 - DNA, 433 bp, Unknown
  Bacterial polypeptide expressing nucleotide sequence isolated from the Sargasso Sea
acaaaagtatttactatttcaaaaagagagttttatgatgattatgcacaccaccctactgaaattaaagcagttataaatagcgctagacaagtttataaaaaaagaaaaataatttgtgtttttcaaccgcatagatattcaagggtaaaatatcttaaaaatgaatttgcatcatcatttaaatcaagcgatattgttttgctttgccccgtttattctgctggagaaaagataaagtataattttgatcaaaataacttttcaaaactaatttcaaaaaaatcaaaagttcaagtaataaatctacaaaatcaaaatgaattaaaaaattattttaaaaaaaatttatatcaaaatgaaatggtaatttgtatgggagcaggaagtatatcaaactggataagagatattggtaaagaattagcatgaa

SEQ ID NO: 313194 - DNA, 717 bp, Unknown
  Bacterial polypeptide expressing nucleotide sequence isolated from the Sargasso Sea
tatggataaacaaaaagagtatcattttattggcataaatggcgtaggcatgagtgctttggctaagatattatccaaacaaggatacgttgtaacaggctctgattattcaccaacattaaacatggatgcatttaagaaatatggaataactgtatacaaagagcacaataaaaagcatatttcaaaaaatcaaataataattatttcaagtgctatcagtcaggcgaatgttgagtataaagcggccgtagggtatggatgcaagatagtaaaaagaggcgatttgttagcaactattgcagcagagtgtaaaacttgcattgccattgctggaacccacggtaagacaaccaccgcatcaatgatcgtggctatttttgaacaagccggtaaaaacccgtcatattttattggcggatttttaagaaataaagaaaacattcggtttgaaaataaggatgtttttattacagaagtggatgaaagcgatggttcttttttaaatataagtgcaaatcaagctttaatttcaaatattgagcaagatcatttggattactataaaagcaaagctcacatcaatgattcattttcaatttttatagacaatgtcttaaataaacaaaatggacaatttgcaataaatttagatgatccaaacacaaaaaagatcataaaagaatacaatgccgatcgtttaattacctatgcgat

SEQ ID NO: 313195 - DNA, 405 bp, Unknown
  Bacterial polypeptide expressing nucleotide sequence isolated from the Sargasso Sea
tttgaacgaaaaaattcattttgttggaataggaggaattggtatgagtggattagcgcaagttatgaaaacgatgggttttaaagttcaaggaagtgatattgcaaaaaccaagaacgttgatagatgtaaaaaaataggaataaaaatatttaataatcataataaaaaaaatatcaaaaacgctacaataatagttaaatcttctgctattaaaaaaaataatcctgaaattatcgctgcaaagaaaaaaaaattaattgttttaaaaagagctgaaatgttagctcatgttgtttctttaaaaacaaatatagtgataactggttctcatggaaaaactacaacgacttcattaatttcaaagattttatctgttgcaaaattggatccaactatagtgaa

SEQ ID NO: 313196 - DNA, 910 bp, Unknown
  Bacterial polypeptide expressing nucleotide sequence isolated from the Sargasso Sea
attaatggaggagtaatcaattccatcaaaaatactgctaagctaggaaagagtgactggacagttttggaagcagatgagtctgatgggagtttcctacatatacctcctacttattcaattattacaaatatagatagagagcatatggatttttataaatctatggatgacttagagaaatattttactaattttataaaaaaagttccttcgtttggaaaatcatttatttgtttagatgaccatattaattataagataattaaaaaattaagtaatagaaatttttatacttatggattccacccaaattccaatttttttattaaaaatataaatcaaaataaaaattttacagaatttgatgtattagtaaatgtcccaaataagaaaaaaataaagattaaaaaaataagaataccattactgggtattcataatgtaagaaattctgttgcagctgctgcggttgcgattacaattggtatttcaatttctgatataaaaagaggattaaaaaattttaagggtgttcaaagaagatttaataaaatatttactcacaacaatattgatttttatgatgattacgctcatcatccaactgaaataaaagtagttttggatggtgtaaataaagtttataaagactatgaaaaagtttgtatttttcaaccgcatagagtgtcaagacttaaagatttgagaaaagaattctcttttgcatttaagaatgccgatattgttgttttatgccctgtatattcagcaggagaaaaaattaagttaggatttaattatacaaaatttgctaaggagataataaaaaattcaaaagtaaaattatttttagtaaatgataattttcaactggctaaatttataaaaagaaatatgagggaaaaaa

SEQ ID NO: 313197 - DNA, 685 bp, Unknown
  Bacterial polypeptide expressing nucleotide sequence isolated from the Sargasso Sea
ctgatccattttgtcggaataggtggaataggtatgagtggcctagcattaataatgaaaggaaaaggttttaaagttcaaggaagtgatatttcaaataataaaaatattgaaagattaagaaaagaaaaaataaaagtttttattggacataaaaaacaaaatatagccaagggaaccatcttagttatatcatcagctatcaaaaaaaataatccagagcttactgcagctaaaaataaacaattaccgatttataaaagaggagaaatgcttgccaatattgtttctttaacaaaaaatattgtggtagtaggatcacacggcaaaaccaccacaacatcattaatagcatctatatttcaagaaacaaaaattgatcccactattattaatggaggcgtaataaattcaataaacaattcggcaaagcttgggaaaagtgattggtctatattagaggcagatgaatctgatggaagttttgttttcataccaccgacatattcaatcataacaaacatagatcgagagcatatggattattatggtactatggataaattaaataaatattttgaaaattttgttaataaggttccttcatttggaaaatcatttatttgtttagacgacaaaaataataagaatataattaaaaatataaataataaaaacttctata

SEQ ID NO: 313198 - DNA, 421 bp, Unknown
  Bacterial polypeptide expressing nucleotide sequence isolated from the Sargasso Sea
ctgatacattttgtaggaataggtggcataggtatgagtggcttagcacttattatgaaaggtaaaggttttaaagttcaaggcagcgatattgcaaataataaaagtattgaaagattaagaaaagaaaaaataaaagttttcattggacataagaaacaaaatatagaaaaggggactatcctagttgtgtcttctgctattaaaaaaaataatccagagcttcttgcatccaaaaaaaaacaattacctatatataaaagaggagaaatgttagccaacattgtctctttaacaaaaaatattgtagttgttggttcgcatggtaaaactacaacaacttcattgatagcttctatatttcaagagacaaaaattgatcctacaataataaatggtggagtaataaattcgattaata

SEQ ID NO: 313199 - DNA, 820 bp, Unknown
  Bacterial polypeptide expressing nucleotide sequence isolated from the Sargasso Sea
ttaggtaaaagtgattggtctatattagaagctgatgagtctgatggtagctttatatttattcccccaacttactctatcataactaacattgatagagagcatatggatttttataattcgatgaaaaaattaaataaatattttattgattttgttgagaaggttccatcttttggaaaatcatttatctgtttagatgataagaataataaaaatctaataaaaaatattaaaaagaaaaatttctatacatacggtgaagatcctaaatcaaacttttcaattaaaaatataaatcaatttaaagaattttcaaaatttgatttattaataaaattaccaaataaaagaaatcgatatttaaaaaatataacaatccctctacttggaaatcataatattaaaaatgcagttgctgctcttgcggtatcgttgactgttggaatatcaatatttgacataaaaaaaggacttaaaaattttaaaggtgttcaaagaagatttaataagattttttcttttaataatgttaatttttttgatgactatgcacatcacccaactgagataagagaagtactaaaaggggtaatgaaagtttataaaggttatgagaagatatgtatttttcaaccccatagaatatcaagagtaaaagatttaaaaaaagagtttagtttcgcttttagagatgctgataaagtaattttatttccaatttataatgctggtgaaaaaatgaaactcggatttagttatcttagttttgcaaaacaaattatcaaaaattcgagggttgaattattaatgatcaagg

SEQ ID NO: 313200 - DNA, 514 bp, Unknown
  Bacterial polypeptide expressing nucleotide sequence isolated from the Sargasso Sea
aatgaaaattaaattaggaaaaactgaggtaattcactttattggtataggtgggataggtatgagtggcctttctttaatcatgaaaggcaaaggatttaaagttcaaggaagtgacttatcttcaaataaaaatattgaaagacttaaaaaacaaaagatcaaagtttttattggacaaaaaaaacaaaatcttaagaatgctactatagttgtaatttcttcagcaattaaaaagaataatccagaagtgattgaagcaaaaagaaaaaatttaccaataatttctagaggtaaaatgttagcccatattgtatccttaatgaaaaacgttgttgtagctggttcgcatggcaaaaccactactacatcactggtagcttcaatttttcaaaatactaaattagatccaacaataattaatggaggtgtaataaattcaattagaaatacagctaaattaggaaaaagtgattggtcaatattagaagctgatgagtctgatggaagtttt

SEQ ID NO: 313201 - DNA, 382 bp, Unknown
  Bacterial polypeptide expressing nucleotide sequence isolated from the Sargasso Sea
atgaaaattaaattagcaaaatcagaattaattcactttgtagggattggcggaattggaatgagtggcctggctattataatgaaagagttgggatttaaagttcaaggaagtgatatttcagccaataaaaatatagatagagttaaacaaaaaaatattaaaatatatataggtcataaaaaacaaaatattaataaatcaactattttagttatttcatctgcaatcaaaaaaaataattcagaagtattgcttgcaaaaaaaagaaaaataccaatttacacgaggggtgaaatgctagccaatgttgtttctttaatgaagaatgtggttgttgctggatcacacggaaaaactacaactacttcattaatatcaa

SEQ ID NO: 313202 - DNA, 606 bp, Unknown
  Bacterial polypeptide expressing nucleotide sequence isolated from the Sargasso Sea
aatgcagcaatttaagaaaataagaaatattcattttataggcattggagggtctggaatgataggaattgcaacaattcttcataagaaaggatataacatttcgggctcagatatttccaaaacaaaagatcttgacgagttagcaaagtcaggcgttgacgtaacttactcgcacaaaagcaagaacataatcaataaagacttaattgtcttatcctccgcaattgattcttcaaatgtagaggtgtcctctgcaaaaaagaagaatataccaattattcctagggctgaaatgctaagtggtatttcaagaggataccaaggaatagcagtcgctggtagccatggaaaaacaaccacaacaagcataattgctcatatctttaatcaagctttattaagtccaacttatgttattggaggaaaaatacttagttcagatggcaactcacgccttggtgatgggaattttttcatatttgaagcagatgaaagtgataaatcttttttaagtttttatcctgattccgctgttataacaaatatagatgatgatcaccttgaggcctatgagggcgatattaacaacttgaaaaaatcttt

SEQ ID NO: 313203 - DNA, 843 bp, Unknown
  Bacterial polypeptide expressing nucleotide sequence isolated from the Sargasso Sea
gctaaaaaaagaaaattaccaatttatgaaagagtagaaatgctttcaaatatagtatcactaaaaaaaaatattatagtcacaggtgctcacggcaagactacaactacctcactagttgcaaaaattttatcagagtcaaaattagatccaacaattattaatggcggtgtaattaactccattaataacaatgcaaagttaggtaagggcgaatgggcagttttagaagccgacgagtctgatggaagctttttaaaattaccaattaactattcaatagtaacaaatattgatcatgagcatatggattattacaaaaattataataacttagaaaaaagctttctgaaattcattaatagaacaccaccaattggaaaatgtataatttgtttagacgataaaaatataaagaaaataacaaaaaaaattaaaaccaaaaatatactttcgtatggatttgataaaaattcagattatcaaattataaatacaaaatttaataacaaaaactcaaaatttgacttgttagtaaaaaacttctttggaaagaagaaaataataaaaaatatatatttaaatttaattggtaaatataatattttaaattctacagctgcaatatgtgtttgcataaatttaggtattaaaatcgatattataaaaaaatcattatcgaagttctctggggtacaaagaagaatgacaaaaattcttgagaaaaatagtaatattttttatgatgattacgcgcatcacccaactgagatttcttcagtattagaaggaataagaaaaatttcaaataagaaggagataactgctgtttttcaaccacac

SEQ ID NO: 313204 - DNA, 600 bp, Unknown
  Bacterial polypeptide expressing nucleotide sequence isolated from the Sargasso Sea
agaaattcaagctgcaaaaaatagaaaattaataattttaaaaagggcagaaatgttggctcacgttgtttcgttaaagaaaaatattgtaataacaggatctcatggaaaaactacaaccacatcactaatttcaagaatactttatgaagctaaattagatccaaccattataaatggtggagtaataaattctattaagagtcctgccagattgggaagaggagattgggctgtcctagaagccgatgaatcagacggtagctttttaaatcttccaattaactattctgtagtaacaaatatcgacagagaacatattgatttctacaaaagttttgagaatttaaagaaatcatttttaaaatttctgaataaaacaccaacaataggaaaagcttttttgtgcgtagatgataaggagataaaaaaaataattcccacaattaaaaacaaaaattttttaacttatggtttttccaaaaaagcaaactttaaaatttttaatactgtatataaaaaagactattcaatgtttgatttaaaaatatctattaaaggtttaaaaaagaccattattaaaaagataaaattaaaccc

SEQ ID NO: 313205 - DNA, 589 bp, Unknown
  Bacterial polypeptide expressing nucleotide sequence isolated from the Sargasso Sea
atgctttatagtatcaaaaaagtacatcttattggaataggtggaattggaatgagtggaatagcagagcttctaaaaaataaggaattcgtggtttcaggttctgatattgctgactcaccaaatgttcagagattaatagattttggaataaaagtatctattggtcataataaagaaaatatttctgatgctgagctagtaatatattctgatgctataccaaaagataatgttgagttgatagaagcattagcaaaaaacataatagtttattcaagagcgagaatgatatcggaaatagctaagttaaataattcgacagttgctattgctggaactcatggaaaaaccactacaacatcaatggttggtactattttaaaagctataaatttagatcccacaattattgttggcggagttgtcaagtctttagaatctaattcatttcttgggagaggtgatatatttgttgttgaagctgatgaatataataaaagcttgctacatttgagtccaacaattgcggttattaacaatattgattttgaacatatagaatgctacaatgatatcaatgattaaa

SEQ ID NO: 313206 - DNA, 168 bp, Unknown
  Bacterial polypeptide expressing nucleotide sequence isolated from the Sargasso Sea
tttggataaaaaattactgttgaaaagtcattttcattttattgggattggaggtattgggatgtcagcattagcaataggtttacttaaaaaaggttgttcagtttcaggctctgatttagttaaaaacgatgaaactaaaaaattggagaaattaggtgcagtaat

SEQ ID NO: 313207 - DNA, 676 bp, Unknown
  Bacterial polypeptide expressing nucleotide sequence isolated from the Sargasso Sea
tatgaaaattaataaaaaacagttgatacatattataggtattggcggaatcggtatgagtgggattgctgaaatactaaaaggtttgggttattctgttcagggaagcgatataagtttaaattcaaatattttaaggctaaagggaaaaaaaattagagtgtttattggtcattctaaaaacaatcttaagaatgttgatttagtaatttattcttcagcaattaaaaaaaacaataaagaactcaagtttgccaaggataaattaattccatctattcccagatcaaatattcttgctcaacttgtaagtttaaagaaaacaattgctgtttcagggtctcacggaaaaacgacaactacttcattaattgcctctgttttaagtaaatcaagatataaacctacaataattaatggaggaattattaatgaatatgggactaatactagactaggtaatggaaaatggatggttgttgaggcagatgagtcagattcaacatttttggaattatcatcaacaatttctgttataacaaatatagatgaagaacacctagatcattataaaagttttttaaatttaaaaaaatcttttatgaaatttattactcaagtaccattttatggatgtgctattgtttgtaatgataataaacacgtaagaaatgga

SEQ ID NO: 313208 - DNA, 679 bp, Unknown
  Bacterial polypeptide expressing nucleotide sequence isolated from the Sargasso Sea
atgaaaaaaattaacctaggtcaaaaagatgtaatccatttcgtcggtattggcgggataggaatgagcgggctagctcaaataatgaaaaatatgggctttaaaatacaaggtagtgatcaaaataaaaataaaaatacaattagttgctcaaaatctggaatcaaattatttattggacactcaattcataatattaagggagcaacaatcgtagtaaaatcttcagctattaagaatagtaatgttgaaataaagtatgcaaaaaaaaataaaattccaatttacccaagagcagatgttttagctgatgttgtatctttaaaaaaaaatataataattactggttcacatgggaaaacaacgacgacatctttggtagcaaaaattttatcagatcaaaaacttgacccaacaattatcaatggaggtgtaattaattctttcaatagcaacgcaaaactcggaaaaggcgattggtcaattttggaggctgacgagtcagatggaagttttttaaaattaccaattaattattcaattgttactaatatagaccgtgagcacttagattattataaaaattataaaaatttagaaaaatcttttttagaattcataaacaaaaccccaactactggtaaatctattatttgtattgataatacaaatataagaa

SEQ ID NO: 313209 - DNA, 505 bp, Unknown
  Bacterial polypeptide expressing nucleotide sequence isolated from the Sargasso Sea
atgaaaattaatattggaagtagtgaaatagttcattttattggaataggcggtataggcatgagtgggctcgcacaaattatgaacaacatgggattttttgttcagggcagcgatctaaataaaaataaaaatacagaaagactaaccaagttaggtgtaaaatttttttttggtcataataaaaaaaatttaaaaaaagctactttggttgttatttcctcagcagttaaaaaaaacaatagcgaattaaaatttgcaagatttaaaaaattgccaatttttaaaagaggcgacatgttagctaatatcgttgctttaaaaaaaaatattgttgttacaggatcacatggaaaaacaacaacaacatctttggtagcaaatattcttgtagaagctggtttagatccaacagttataaacggtggagtaatcaattcacttaaaaataatgctcaattaggaaaaggagaatgggcagtaatagagtcagacgaatctgatg

SEQ ID NO: 313210 - DNA, 652 bp, Unknown
  Bacterial polypeptide expressing nucleotide sequence isolated from the Sargasso Sea
attattaaaaaaattaaaaataaaaatattctcacatatggttttagtagtgttgctaattatagaatagataatacacgatattatttaaattattcaatttttgatttaaattataagaatttagataacaaaaaaattaaaatcaaaaatataaatttaaaactaattggggaacataatattttaaatgctacagctgcaatcgcagtttgtctaaatctaggagtaaaaattaatacaataaaaaaagccctaaaaaatttttctggagtacaaagaagaatgactaaaatatttactaaaaataaaaatgaattttttgatgattatgcgcatcatccaacagagatccattcaactttagatggtgtaagcaaagtttacaatcaaagaaaaataatatccgtttttgaaccacatcgttattctagggtaatatctttgaaaaaagctttttcgaaatgttttataaagtctaatatagttttaatttgtcctatctatgcagccggtgaaaagaaaaataaaaattttaattattttaattttgcaagattaatttctaaaaattcaaaaactcaagttattattgtaaaaaacctaaaaagagcttacaaattatttaagaaaaaacctagtcaaaaatgaa

SEQ ID NO: 313211 - DNA, 756 bp, Unknown
  Bacterial polypeptide expressing nucleotide sequence isolated from the Sargasso Sea
ttgctttttgttgcactgatcaccccgaagtacaagctcttgtcggtaaagtaacagataggcgaattataacttatggttttaacgcgcaagcagatgttcgagctttaaacgtaacttttatggatggtttttcttattttgatgtccttttgcagaaagaaaataaaactttagatcggctatctttaccaatgccgggcaatcataatatttctaattctctagcggctatagcaatagctcgtcatctgaatattgatgagaactcaattaaaaaatcactttcactatttaaaggtgtaaataggcgatttactcaagttgcggaactagatgggataaagattatagatgattatggccaccaccctgtggaaatatctgctgtattaagagccgccaggcaaacttcaactggaaaagtttttgctatccatcaaccccatcgctatacaaggttaagttcactatttgaagatttttgctcctgtttcaatgaggctgattttgttggtatattggaggtttattctgctggagaggctcctatagagggagcatcgcggtctgatttggtaagtgggttaattaggcatggtcatagaaatgttgtttcgatagatcatgaaagagatttggaaaaatttattaggcgacatgcaaaaagtggagatattgtagtttgtttgggtgccggtacaataagcgtttgggcaaataatttaccatctagactaattgatatgagataaa

SEQ ID NO: 313212 - DNA, 654 bp, Unknown
  Bacterial polypeptide expressing nucleotide sequence isolated from the Sargasso Sea
aatgaaaattgaacttgcaaaaactgaaataattcattttgtcggcatagggggaattgggatgagtggacttgcaaatattatgagtggtttaggatttaaagttcaaggtagcgatattcaatcaaataaaaatattgagagattaaaaaaaaaaagaattaaagtttgcattggacacgcaaaaaaaaatattagcaactcaacaattttagtaatttcgtctgcaattaaaagctccaatccagaagtgctgtttgctaaaaaaaaaaaaattcctatttataaaagaggagacatgttggctcatgttgtttctttgttgaaaagaaatgttgttgttgccggatctcacggcaaaacaacaactacatcactcatatcttcaatttttagtgaaacaaagcttgacccaactataattaatggaggcgttctaaattcatttaataattctgcaaagctaggaaaaggtgattggtgcattttagagtctgatgagtcagatggaagttttgttaaggttccttcaacatattcaattataacaaatgttgataaagagcatatggattattacaaagatatgaataatttaaaaaaattatttattaaatttattgaaaaaactccttcttttggaaaatcttttat

SEQ ID NO: 313213 - DNA, 673 bp, Unknown
  Bacterial polypeptide expressing nucleotide sequence isolated from the Sargasso Sea
atgaaaattaatattgccagcaacgaaataatacattttattggaataggcggaattggcatgagtggcttggctcaaataatgcacaatatgggcttccaaattcaaggaagcgatttaagtcataataaaaatactgaaagattaattaaaacaggtattagaacttatattggccacaataaaaaaaatattaaacgagctacaatggcagtcatttcttctgctataaaaaaaaataataaagaattgatagcatcaaaaaacaaaaaaattcctataattagcagaggagatatgctggcaaacattgtatctttaaaaaaaaatatagttgtttcaggttctcatggaaaaacaacaaccacttcattgatagcaaatatacttgctgaagctggtcttgaccccacaataataaacggaggcgtaattaattctctaaaaaataccgctcatttgggtgaaggagagtgggcagttatagaatccgacgagtctgatgggagctttttaaagctaccaataacttattctattgtaacaaatctagataaagaacacttagatttttataaaaattttaataaactaaaaaatagttttcgcatatttatagaaaaaacaccttcatttggaaaatcattagtttgtttggataataataatttaa

SEQ ID NO: 313214 - DNA, 694 bp, Unknown
  Bacterial polypeptide expressing nucleotide sequence isolated from the Sargasso Sea
ttgctgttgaaaagtcactttcattttattgggattggagggattgggatgtcagcattagcaataggtttgcttaaaaaaggttgttcagtttcaggatctgatttagttaaaaacgatgaaactaaaaaattggagaaattaggtgcagtaatcttttcttctcaaattcaacagaacattgaatttgttatttcaagatttaccaacaaattgattaattttgttgtaagctccgcgatcaaaccagaaaatgaagagttttcatactgcagagaaaaaaatttatcaataaaacatcgctcagagatacttgcaatgctaatgcgcacttatactgcattggcggtagccggcagccacggaaaaacatcaaccagtacatttctatctacaatacttgagttatgtacacgtgattcttcttcaataactggaggaataattcctatttacaactctaattgtcatttagaaaatacaaaatacttagtagctgaagttgatgaatctgatgggacaattaacaaatataagtccgatatcggaataatcaataacattgattttgatcattgtgatcacttttctaatttaaatgaagtcatatcttcttttaaaagtttcgctaaaaactctaaaaaattactactaaattttgattgtgaaacctcaagaaataaatttttattct

SEQ ID NO: 313215 - DNA, 964 bp, Unknown
  Bacterial polypeptide expressing nucleotide sequence isolated from the Sargasso Sea
agtttttattggtcaaaaaaaacaaaatttaaagattgcaacaatagcagttatttcctcagcaataaaaaaaaataatccagaatacatagaggccagaaggaaaaaactcccaattattactagaggaagaatgttagctcatattgtttctcttatgaaaaatattgttgtggtaggttcacacggtaaaaccacaacaacttctttaattacctcaatactgcaaaaaactaaactagatccaacaattattaatggaggagttatcaattccatcaaaaatactgccaagttaggaaagagcgattggacagttttggaagcagatgaatctgatgggagtttccttcatatacctccaacttattctattattacaaatatagacagagagcatatggatttttataaatctatggatgacttagagaaatattttattaattttataaaaaaagttccttcgtttggaaaatcatttatttgtttagatgaccctattaataataggataattaaaaaattaagtaatagaaatttttatacctatggacttaatccaaaatcaaatttttttattaaaaatataaatcaaaataaaaattttacagaatttgatgtattagtaaatgtcccaaacaagaaaaaaataaagattaaaaaaatcagaataccattactaggtattcataatgtaagaaattctgttgcagctgctgcagttgcgattacaattggtatttcaatttttgatataaaaagaggattaaaaaattttaagggtgttcaaagaagatttaataaaatatttactcacaacaatattgatttttatgatgattacgctcatcatccaactgaaataaaagtagttttggatggtgtaaataaagtttataaagattatgaaaaagtttgtattttttcaccacatagagtgtcaagacttaaagatttgaga

SEQ ID NO: 313216 - DNA, 859 bp, Unknown
  Bacterial polypeptide expressing nucleotide sequence isolated from the Sargasso Sea
atcataggtcataataaaaataatattcaggcgccagatgtagtagtttattcttccgcaatcaataaaacaaaccctgaaatacaaaatgcaataaaattaaatattcctgttattagaagagctgaaatgcttgcagaacttattaaacttaaaaaaataagtattgctattgcaggcacacatggaaaaactacaactgcatcaatgctaggatcaattcttacagcatcatcttttgagcctacaatggttattggaggtattgtaaataaatttcaaagtaattcaatttctggaaaaggtaatataatagtagtagaagcggatgaatttgatcgtagctttttaaccctacagccaacaattggtgttataactaacttagatttagagcatttagattgttataaaaatttagaagacctaaaaggtgcctttacacaatttgcaaacgctgtccctttttatgggaaaatagcactaggaactgacaataaaaatgcagcaaatattgtaaaaaatattaatagacctgttattagttttggcttaaataaaaatgcatatattagagccactaaattatttttttctaaaaacaaatcttcatttactcttattgagaacaataaaaaattaggtgttttaaatattaatgtacctggagaacacaatataaaaaatgccttagcagctattacaatagcactacaacttgatatttcatttcaaaacataaaagatggcttaaaacaatatagcggagttagaagaaggtttgatattaaatataatacctcaaatcaaataatgattgtagatgattacgcacatcatcctgcggaagttttagcta

SEQ ID NO: 313217 - DNA, 595 bp, Unknown
  Bacterial polypeptide expressing nucleotide sequence isolated from the Sargasso Sea
agaaaatattactttatatagcctttccttgcctatgccagggaatcacaatgtattgaattcgctagcggcgatagcaatagctcggcatctggatatcgacgagaaatcaattaaaaaatcgctttcacaatttaaaggtgtaaataggcgatttactcaagttgcagaattaaatgggataaagattatagatgattatggacaccaccccgtggaaatatctgctgtgttaaaggctgcaaggcagactgcaacaggaaaagttttcgctatccatcaaccgcaccgttatacaagattaaattctttattcgaagatttctgctcgtgttttaatgaggcagattttgttggtataatggaggtctattctgccggagaggctccaatagatggagcatcacgctccaatttggtaagtggtttagtgaggcatggccatagaaatgttttctcggtagataatgaggatgatttggaaacattaattagaagtcaggcaaaaagtggagatatcatagtttttttaggggctggtacagtaagcgcatgggcaaacagtttatcccttagactaagtgatttgggataa

SEQ ID NO: 313218 - DNA, 787 bp, Unknown
  Bacterial polypeptide expressing nucleotide sequence isolated from the Sargasso Sea
tcaaaatgtaaatagattagaatctagaggagtgaaaatatctattgggcatagcgcaaagaacattgacaatgtcgatgttgtggtttattctagtgcagtaaaacaggaaaatattgaaatcataacagcaaaaaaaagaaatattcctgtaatacgtagagctgaaatgctcgctcaactgataaatctaaaagaaactagcattgctgttggaggaactcatggaaaaaccacaacaagctcaatggttggtactgtactagagggatcaagctttgacccaactttagtagttggaggtttagtgagcaacttaaatagtaatgtaaaacttggtcatggtgatatcattgtggttgaagcagatgaatatgaccgcagctttttggctttaaacccgacaatagcaattattacaaacttagaaatggaacacactgactgttatgctaatcttgaagaacttgaatcagcttttttgcaattttgtaattcaataccattctatggagaaatcatattatgtgcagattctgagcctttaatgaaactatcaaatagtattaaaaaacctgtagtaacatacggtaccgtcttagatgcggattttagagctgataatatcatttttaatcaaaattgtagcgaatatgatttatatcacaaagaaaaaaaactaggtaaaataaaaataaatgttcctggaaaacataatgttttaaactcattagcagcaatctcacttggaatagagctcggagtatcaattgatattctaaaaaat

SEQ ID NO: 313219 - DNA, 538 bp, Unknown
  Bacterial polypeptide expressing nucleotide sequence isolated from the Sargasso Sea
atgaaaattgatttaggaaaaaatgaacttattcactttgttggcattggtggaataggaatgagtggtctagctatgattatgaatggtttaggttataaagttcaaggcagtgacattaacaaaaacagaaatatcgaaagattaaacgaaaaaaaaatcaaagtattcataaatcataaaaaagaaaatataaaaaaaacaacagttcttgtaacttcctctgcaataaaaaaaaataatcccgaagtatcagaagcaattaaaagaaatttaccaatttacacaagaggtgatatgctgggtcatatagtatccttcatgagaaatgttgttgtgactggttcacatggcaaaacaactacaacatcattagtatctaatatttttacctcaggaaatttggatcctactataattaatggcggtatactaaattcaattggtaattctgctaaattgggaaaaagtaattggtgtattacagagtctgatgagtcagatggaagttttttgaaaataccttttacttattcta

SEQ ID NO: 313220 - DNA, 883 bp, Unknown
  Bacterial polypeptide expressing nucleotide sequence isolated from the Sargasso Sea
agatcagatacggaagaaaaaaaaaaaataccaatttacaacagagcagatgttctagcagatgtggtttcacttaaaaaaaatataattgtgacgggatctcacggtaaaactactacaacatcattaatttccaaaattttatctgatcaaaaacttgatccaacaattataaatggtggagttatcaactcattaaaaagtaacgcaaagtttggaaagggagaatgggcgattttagaggctgacgaatctgacggtagttttttaaaacttcctataaattattctattgtaacgaatttagattacgagcacatcgattattatagaaactttaaaaatttagaaaaatcttttattagatttatcgaaaaaactcccccaacaggtaaatcaataatttgtatagacgataaaaaaattcaaaagatatttaaaaaaattatgaataaaaatattttgacctatggagaaagtaaatttgcaaattacaaaatatcaaatataagatataaagtagattatactttttttgatataagctataagaatatagagaggaaaaataaaaaaattaaaaatattcaactaaagcttttaggaaaacataatgttttcaatgctactgcagctatcgctatttgtttaaacctgggagtaaatcaaaatataataaaaaaatccttaagaaaattttcaggcgttcaaagaagaatgacaaaaatttttttcaaaggtaaaaatgatttttatgatgattatgctcatcacccaactgaaattagatcaatacttgatggtgtgaaaaatgttaatgcaaatagaaatataatttcagtatttgaacctcatcgatattcaagagtgttattctccaaaa

SEQ ID NO: 313221 - DNA, 751 bp, Unknown
  Bacterial polypeptide expressing nucleotide sequence isolated from the Sargasso Sea
tataaaagaggagaaatgttagctagtatagtatctttgtacaagaatgtagtagtagcaggatcacatggcaaaactactacaacatctattgtttcaacaattttttctaagtctagccttgatccaactataattaatggtggagtaattaactctataggaaattccgctaaacttggaaaaggtgagtggtgtattttggagtcagacgaatctgatggaagttttttacaactccctttcacatattcaattataacaaatattgatgaagaacatctcgaacactatggatcaatcgataatttaaaaaaaagttttattaaatttgcggaaaaaaccccatcgtttggaaaaactttaatatgtatagatgacaagcataataggtctatattaagaaagattaataatcaaaatataataacttatggaataaatgaaaagtctaattttagaattaaaaatattcagctaaaatctaaaatttcaaaatttgatttagatgttaaattaccaaatcaggagaaaaaaatatttaaatcatttgaaattccattaattggtattcataatataaaaaattgttgtgcctcaatagctgtcgcaataatgatgggaatttcgattaaaacaattaaaaaagcaatttttgaatttaaaggtgtgcagagaagatttaattttatttttgaacatagaaaaagtatttattttgatgattatgcccatcatccaaccgaaataa

SEQ ID NO: 313222 - DNA, 757 bp, Unknown
  Bacterial polypeptide expressing nucleotide sequence isolated from the Sargasso Sea
atgaaaattgacttaggaaaaaatgaacttattcattttgttggtatcggaggaataggcatgagtggtttagctttgattatgaatggtttaggttacaaagttcaaggtagtgatattgctgacaatcgaaatattgaaagattaaataaaaagaaaatcaagatatttttaaatcataaaaaagaaaatattaaaaaaacgactgttcttgtgatttccactgcaattaaaaaaaataacccagaattagttgaggctattaaaaaaaatttaccggtctatacaagaggagatatgttaggtcatatagtatcttttatgagaaatgttgtcataaccggttcacatggaaaaacaactacaacctctttagtatctagtatctttacagcaggcaaacttgatccaactataattaatggcggcgtactaaattcatttggtaattctgcaaaattgggtaaaagcaactggtgtgttaccgagtctgatgagtctgatggaagttttttaaaaattccttttacatattctatagctacaaatttagactctgagcatttagatttttataaaaatattaataacctaaaaaaaagctttcataaatttatagataagataccgtctgtaggtaaaggttttctgtgtaatgatgatctaaatcttaaaaatgtttttaaaaaatcaacaaacaaaaatttttatacctatggtaaaagtaaaaattcaaattttcaaataataaattaaa

SEQ ID NO: 313223 - DNA, 829 bp, Unknown
  Bacterial polypeptide expressing nucleotide sequence isolated from the Sargasso Sea
aattaagttagctaaaacagaattaatccactttgttggcataggtggaattggaatgagtggattggctataataatgaatggtctaggttttaaaatccaaggaagtgatataagcaataataaaaatatagaaagattaaaaaaaaataaaataaaagtctttataggtcataataagaaaaatataaaaaaatcaacaattttagttgtttcttcagctattaagaaaaataataaagagtacatatacgcaaaaaagaaaaaacttccgatttatacaagaggggaggtcttaggacacatagtctctcttatgaaaaatatagttgtcgcaggatctcatggaaaaaccactactacatcattaatatctagtattttttctcaagcaaatttagacccaacaataattaatggtggagttttgaattcatttgggaattcagccaagcttggaaaaagtaactggtgcatactcgaatccgatgagtctgacggaagttttctcaaagtgccttccacatattcaattgttacaaatatagatcaagaacatatggattattatggaagtatgtcaaatttaaagaaaagttttataaattttattgaaaaaaccccttcttttggaaaggcaatattgtgtatagacgataataatatcaaaaatattttaaaaaaaataaaaaacaaaagttacttaacatttggaacaaacatatattcaaattttaatattttaaatattgagcaaaaaattatatattctaaatgtgatataaaaattaacctaccaaataaaaaaataacaataattaaaaattta

SEQ ID NO: 313224 - DNA, 192 bp, Unknown
  Bacterial polypeptide expressing nucleotide sequence isolated from the Sargasso Sea
gatgataagcaaaaataaaaaaattaagatacattttataggtataggtggaattggaatgtctggcattgctgaattaatgcataagattggatatactgttttaggtagtgataataatgaaagtgaaaatgttaaaagattaaaaagtattgggataaatgttaaaattggtcatagtaaaaaaaattt

SEQ ID NO: 313225 - DNA, 400 bp, Unknown
  Bacterial polypeptide expressing nucleotide sequence isolated from the Sargasso Sea
tttgatgattatgcacatcatccaactgaaataagagccgtattagatggtgctcggttagttttcaataacaaaaaaatcatttgtgtatttcagccccacagatattcgagagtaaaaaatcttaaacaggaatttgcttcatcatttaaattatgcgatgaaattattctttgtccagtttattcagctggagaaaaggaaaaatataattttaagcaagaaaatttttcaaaattaattagtaaaaaatcaaatgttcaagtaataaatataaaagataaatctgatttaaaaaattatattaaaaaaaatttatttaataatgagataataatttgcatgggggcagggagtatttcaagctggataagagaaattggaaacgaactaaaatgag

SEQ ID NO: 313226 - DNA, 847 bp, Unknown
  Bacterial polypeptide expressing nucleotide sequence isolated from the Sargasso Sea
gatgaaaattagaataggacaaaaagaaattattcatttcataggaataggaggtatcggcatgagtggattagctcaagtcatgaaaactatgggttttaagattcaaggaagcgatcaaagtaaaaataaaagcacatctgactgcgcaaaagcaggaatcaaaatttttataggtcatgctaagaaaaatataaaaaattcaactcttgtggttaagtcttctgcaataaaggataataatgtagaaattaaacaagccaaaaaaaataaaataccaatttattcaagagcagaagttttggcaaatgtggtttcgttaaaaaagaatataataataactggatctcatggtaaaactaccacaacatctttagtggcaaaaattttgtctgatcaaaaattagacccaactattattaatggaggagtaattaattcatttaaaagtaatgctaaactaggaaaaggtgattgggccattctagaagctgatgagtccgatggtagttttttaaagttaccaataaactattcaatagtaactaatatcgattttgaacatatagactattataaaaattataaaaatttagaaaatgcatttattcaatttataaataaaactcctccaataggtaaatccttaatttgtattgataacaaaaatatcaagagaattttaaaaaagataaaaaataaaaatatattaacatacggttttaataaaaaagctaattatagaattagcaatccaagatattatactacccactctctgtttaatttacattataagaatctagataatactaaagcaaaaattaaaaacattaatttaaattaa

SEQ ID NO: 313227 - DNA, 947 bp, Unknown
  Bacterial polypeptide expressing nucleotide sequence isolated from the Sargasso Sea
aaagttcagggaagtgaccatgcaaaagggcaaaaatgtagaaggatgtaaaaaaattggtattaaaattttttataatcataaaagtaaaaatgttaaaaattgtaaaataattgttaaatcttctgcaataaattcagataatcctgaaatcatagaggcgaaaaagaaaaaattattaattttaaaaagagcagagatgttggcgcatgtagtttcattaaaaaaaaatattatcattaccggatcgcatggaaagacaaccaccacttctctgatttctaaaattttaactgaagctaaattagatcctacaattataaatggtggtgtaataaattctttcaaaagcaatgcgagattaggtaaaagtgattgggctgttttggaggcagacgagtcagatggaagcttcttaaacttgcctataaattattcagttgtcactaatcttgataaggagcatttagatttttataaaagttttagcaatttaaagaatagctttgttaagtttttaaacaaaaccccctcaattggtaaatcttttgtttgtattgatgattttgaaattaaaaaaatactaccaaaaataaacagaagagttttttttacttatggtttttctaaaaaatctaattttcaagcttttgatattaagtataaaaaaaattattcggtttttagtttaagggtatcagtgcccggtataaaaaaagctatatttaaaaaaattaagttaaacttgattggagcacacaatgttcaaaattctttagcagctatatctttatgtttacatatcggtgttaaaataaatgttatcaagcaatctttaaaaagattcagtggcattcaaagaagattaactaaagtttttcaaattaataaaaaggaattctatgatgattatgcacatcatccaaccgaaataaaatctgtttaag

SEQ ID NO: 313228 - DNA, 571 bp, Unknown
  Bacterial polypeptide expressing nucleotide sequence isolated from the Sargasso Sea
aatgaaaattaatttaggtaaagcagagcttattcattttgttggtattggtggaataggaatgagcggactagctttgattatgaatggacttggttttaagatccaaggaagtgatatttcaaataataaaaatatagatcgtttgaaagcaaaaaaaataccaatttttctaaatcatcgtaaaaaaaatataataaaaagtactatcctagttgtttcatcagcaataaaaaaaaataatcccgaggttgtatctgcaaaaaaattaaatttacctatttattcaaggggagaaatgttgggacatatagtttctttgatgagaaatatagcagtaacaggttcgcatggaaaaacaacaaccacatcattaatttctagtatttttactaaagcaagattagatccaacaataataaatggcggtgttcttaattcttttggtaattctgctaggctaggaaaaagtaattggtgtttaatagagtctgatgaatcagatggtagttttcttaaaataccattcacatactcaattgttacaaatatagactctgaacatttagat

SEQ ID NO: 313229 - DNA, 883 bp, Unknown
  Bacterial polypeptide expressing nucleotide sequence isolated from the Sargasso Sea
tttaaagcttccaattaattactcagtagtcacaaacttagataatgaacatttagacttctacaagaattttaataatcttaaaaatgcttttgtaaaatttataaataagacccctccgattggtaaaacaattatatgtttagatgatctgaatttaaaaaatattttaaaaaagattaaaactaaaaattacttaacttatggttttaataaaaatgccgatttccaaattcttaacgctaaatacgaaaaaaaatactctaaatttgatttaaaatttaaggatcataaatcaaaaaaaataataattaaaaatatagttttaaatttaattggaaaacataatgtactgaattcaaccgctgctataattatttgtttgaatttaggtattcaaattaaaactattaaaaaatctttaacaatgttttctggagtccaaaggagattaactaaaatttttgatataaacggtaaggagttttatgatgattatgctcaccatcctacagaaattctctcggtactgatgggattaagacaagtttataaaaatagaaaaattatatccatttttcaacctcatagatactcaagattgaaaagtttaaaaaaagaatttgcttcatccttctcaatgtctgatttagttttattatgcccaatttatgcagcgggcgaaaaaaaagatctgtcttacaatcaagatagtttagcaaaactaatttctcaaaactcaaaaactcaagttgtaattattaaagatcagctagatgtaaaaaaatatctaaataaatgtttagttggaaatgaaattgtcattggcatgggagcaggatcgatttcaaaatggatgagagagcttaaaggtcaaatatga

SEQ ID NO: 313230 - DNA, 451 bp, Unknown
  Bacterial polypeptide expressing nucleotide sequence isolated from the Sargasso Sea
ttgcatattggcatagatataaaaattattagaaatgcactaagaaagtttacaggaattcaaagaagacttacaaaagtttttgaaaacaatggcagagaattttttgatgattatgcacaccatcccactgagattaaatctgttttacatagtttgagaattacatataaaggaaggaagattatttctgtatttcagccacatagatattctagaataaaacttcttaaaggagattttgcattctcatttaaggattccaatctagttattttatgcccagtttatcctgctggtgaaaaagttgataaacattatgataaaaaaaattttgcaaagttaattgcgaaaaaatcaaaagttcaggtaataacagttgaagatgaaaaagatctaagaaaattttttaaaaagaatttaataagcaacgaactcatactatgtatgg

SEQ ID NO: 313231 - DNA, 711 bp, Unknown
  Bacterial polypeptide expressing nucleotide sequence isolated from the Sargasso Sea
aatgcagcaatttaagaagataagaaatatacattttataggcattggtgggtccggaatgattggaattgcaacgattcttcataagaaaggatataacatttcgggttcagatatttccaaaacaaaagaacttgatgagttagcaaattcaggcgttgatgtaacttactcgcacaaaagcaagaacataagcaataaagatttaattgttttatcttccgcaattgattcttcaaatgtagaggtttcttctgcaaaaaagaaaaatataccaattattcctagggctgaaatgcttagtggtatttctagaggataccaaggaatagcagttgctggtagccatggaaaaacaactacaacaagcttaattgctcatatctttaatcaagctttattaagtccaacttatgttattggaggaaaaatactgagttcagatggcaactcacgtcttggtgacgggaattttttcatatttgaagcggatgaaagtgataaatcttttttaagtttttatcctgattctgctgttataacaaatatagatgatgatcatcttgagtcctatcagggcgatattaacaacttgaaaaaatcttttttagatttttcagataatatccctttttttggatatgtcattgctaattatgacgataaaaatactagggatatattaaaaaaaataaaaagacggataatcac

SEQ ID NO: 313232 - DNA, 590 bp, Unknown
  Bacterial polypeptide expressing nucleotide sequence isolated from the Sargasso Sea
tatgaaaattaatctaggaaaaaaagaaataatccatttcattggcataggaggcattggtatgagtggattggcattaataatgaaacagcttggttttaaaatacaaggaagtgatatttcagtaaacaaaaacattgaaagactaaaaaaaggtaatattaaaatttttacaaaacacaaaatttccaatctaaacaaggctaatattattgtcatatcctcagcaattaaaaataataatgttgagttaaacgcagctaagaaaaaagatttaccaatttataaaagaggagacatgcttgcacacatgacctcattaaaaaaaaatattgttgtagcaggttcacatggaaaaactactacaacatcattgattgctaatattttttcaaaggcaaaattggatcccacaataattaatggaggtgtaataaattcaatcaataattcagctaagttggggaagagcgaatggtgtgtactagagtctgatgagtccgatggtagttttattaaagttccattcacttattcaattattactaatatcgatagagagcatatggatttttataaatctgaggata

SEQ ID NO: 313233 - DNA, 679 bp, Unknown
  Bacterial polypeptide expressing nucleotide sequence isolated from the Sargasso Sea
gattagttattcaaaaagtcaaaattcagatgtaaaaattatcaaaataactaaagataaaaaaggaaataacttttctttatattttaaaaaaggagtaattaaaggcatcaaagggaaatatcattttaagaccaatcttatgggagaccataatatatttaattcaacagcagctataattgctgctttactagcagaaattccgataaaaaagattaaaaattcgctaaaagattttcaaggagttaaaagaagatttagttttattggtaaaattaacaaagcatctatttatgatgattatgctcatcatccttcagaaataaaagcaagttatgacattgctaaacaaatatctgataaaaaaattgtaattgtgtttcaacctcatagatatacaagaacaaaaattttacaaaatgaatttgtaaaaattttaacaaaagtagatatattatatatccttgatatttattcggcaggagaaaaatctattccaaatatcaattcaaaaaatttagtaaaaaaaatcaaaattaaaaataaaaatactttttatataaagaatcctaacaatttaagattttttctttcagaatattttaatgataaaaatattattgtatttatgggagctggctcaataactaatttagcaaatgagttaattgcttaa

SEQ ID NO: 313234 - DNA, 754 bp, Unknown
  Bacterial polypeptide expressing nucleotide sequence isolated from the Sargasso Sea
aatgaaaaatattagaataggacaaaaagaaattatccatttcgttggcattggaggaataggcatgagtggccttgctcaagttatgaaaaccatgggtttcaaaattcaaggcagcgatcaaaacaaaaataaaagtactttaaattgttcaaaagcaggaataaaagtttttatagggcactcaaaaaaaaacattaaaaatgcaactataattgttaaatcatcagctattaaagatagtaatgttgaaattaaagaagcaaaaaaaagtaaaatttcaatctattcgagagctgaaatcttagctaatgttgtttcattaaaaaaaaatattataattactggttcccacggtaaaactactactacatctttagtagctaaaattttatcagaccaaaaacttgatccaacaattataaacgggggagtaataaattcgtttaaaagtaacgctaaattaggaaaaggtgactgggctatacttgaagcagatgagtccgatggaagttttttaaaattaccaattaattattctatagtaacaaatattgatcttgaacatctggattattataaaagttataataatttagaaaacgcttttgttgaatttataaataaaactccaccgataggaaaatctattatttgtattgataatacaaacattaaaaaaatcttaaaaaaaattaaaaatagaaatacattaacttatggatttagtaaaaatgcaaattatagaattagt

SEQ ID NO: 313235 - DNA, 412 bp, Unknown
  Bacterial polypeptide expressing nucleotide sequence isolated from the Sargasso Sea
atgaaaaaaattaatttaggacaaaaagaaattattcactttgttggaattggcggtatcggaatgagtggattagcccaaattatgaaaaatatgggttttaaaattcaagggagtgatcaaagtaaaaataaaaacactgttagttgtttaaaagcaggtattaaaatttttattggacactcaaaaaaaaatgttaaaagttcaaccatcatcgttcgttcatctgcaataaaaaataataattgcgaaataaagtatgctaaagaaaaaaaaatacctgtttattcaagagctgatgtattagcagatgcagtatctttaaaaaaaaatataataatcacaggatcacacggcaaaaccacaaccacttccctggtttcaaaaatattatcagatcaaaagttagatc

SEQ ID NO: 313236 - DNA, 217 bp, Unknown
  Bacterial polypeptide expressing nucleotide sequence isolated from the Sargasso Sea
atgttcaggcatgtgaaaaaattgcattttgtaggtattggtggtattggtatgagtgggatagctgaattacttttgaaccaaggatttaaaattacaggttcagatataaataattcaaaagtcattcaaaacctaaaagataaaggtgctgaaatttttattggtcatgatactaaaaacttaactgatgcagatgtattagtttattctagtg

SEQ ID NO: 313237 - DNA, 616 bp, Unknown
  Bacterial polypeptide expressing nucleotide sequence isolated from the Sargasso Sea
aatgaaaattgatttaagaaaaaatgaacttattcattttgtcggtattggaggaattggcatgagtggtttagcgctaattatgaatgagttaggctacaaggttcaaggcagcgatattgctaataatcgtaatattgagagattaaatgaaaaaaaaataagagtttttttgaatcacaaaaaagaaaatataaaaaaaataactgttctagtagtttcctcagctataaaaaataataacccagaattagttgaatctataaaaaaaaatttaccagtttatacaagaggagatatgttgggtcatatagtatctttcatgagaaatattgttgtaactggttctcatggcaaaacaacaacaacatcattagtttcaagtatatttacagcgtgtaagttagacccaactataattaacggcggtgtattaaactcatttggtaattctgcaaaactaggtaaaagcaactggtgtatcaccgagtcagacgagtctgacgggagttttttaaaaattccttttacatattctatagtaaccaatttagattatgaacacttagacttttataaaaatataaaaaatcttaaaaaaagtttttttaaattt

SEQ ID NO: 313238 - DNA, 574 bp, Unknown
  Bacterial polypeptide expressing nucleotide sequence isolated from the Sargasso Sea
atgtttagaaaggttaataaagttcactttgttggtatagggggtattggaatgagcggtattgcagaactattattaaatctaggttttgagattagtggctcagatgtaagtgattctgaaataatagatagactgagatccaatggagcaaaggttaatattggtcacaaaacagataatttatttgaaactgaagtagttgtctattctagcgcaattccagaagacaatgtagagcttatttttgcgagagagatgaatattcccacaataaaaagagcagaaatgttaggagaactaattgctttaaaaaatactagtatagcagttggtggtacacatggcaaaacttctacttcatccataattgggactttgctttctcattcaaaattagatccaaccttgattgttggagggcttgttaaaaatcttgattcaagctcaaaacttggctcaggagaaatagtagttgttgaagctgatgagtatgataagagtttcttacaattaaaacctactgttgcagtaattacaaacatgaaaaggagcatatggatgctatcaaaat

SEQ ID NO: 313239 - DNA, 416 bp, Unknown
  Bacterial polypeptide expressing nucleotide sequence isolated from the Sargasso Sea
catgactttcaggaagataaatagaatacactttgttggaattggcggtataggtatgagtggcatagcagaattattgaaaaatttagggttcaaaataactggttcggatataaaacaatctaaaaatgtaaaaagattaattgatcttggagttaatataaagattggtcataaatctgaaaatttaggatcagctgatgtattagtttattctagtgccgtctcaattgaaaatcctgaaataattaaagcaagacaaatggatattccgataataaagagagcggaaatgcttggagaattaatcacatttaaaaaaacaagtattgctgttgctggtactcatggaaaaactagtacttcatcaatgataggatctgttctttatgaaggtaaaattgatcctactatgg

SEQ ID NO: 313240 - DNA, 695 bp, Unknown
  Bacterial polypeptide expressing nucleotide sequence isolated from the Sargasso Sea
aatgactaataataagtatttttttataggaattggtggtattggaatgtcttcaattgctcaatacttatatgaaaaagaaaatactattcttggctatgatgcatcagaaaataaatcagttaaaattcttgaaaaaaaaggtatagaggtaactaataaattgagtcttaagagtattccagattatatgaaaaacgatgatgtaattgttgtatatactccagctatcccagatgataatatatttttaaaatattttagggctaatggaaataaaaaaatacagaaaagatctgagatacttggtgaaatatcaaaacaatctaaatgtattgctatagctggaacccatggtaaaactaccactactgcaataattagtcacctattccattcttcaggaatacactttaaagctttcattggaggaattatgaaatgttttgactcaaattatatcaatacgggaaatgactttatacttgtagaggccgatgaatatgatagatcatttttaaatcttaaccctaattatgctgtaattacctcaattgaaagtgatcatcttgatatttatggagactataaatccttatctgaaagttttcaattatttagaaataatgtaaaagatgtattaattacagatgctgaaatagatattgataaagatttttctttttcaatcaaaa

SEQ ID NO: 313241 - DNA, 664 bp, Unknown
  Bacterial polypeptide expressing nucleotide sequence isolated from the Sargasso Sea
attgatacattttgttgggataggtggaataggtatgagtggcttagcacttataatgaaaggtaaaggttttaaagttcaaggcagtgatattgcaaataataaaaatattgaaagaataaaaaaagaaaaaataaaagttttcattggacataagaaacaaaatatagaaaaggggactatcctagttgtgtcttctgctattaaaaaaaataatccagagcttcttgcagccaaaaaaaaacaattacctatatataaaagaggagaaatgttagccaacattgtctctttaacgaaaaatattgtagttgttggttcgcacggtaaaactacaacaacatcattgatagcttctatatttcaagagacaaaaattgatcccacaatcatcaatggtggagtaataaattcgattaataattccgcaaagcttggaaaaagtgattggtctatattagaagctgacgagtctgatggaagttttgtttacataccaccaacatactcaatcattactaacatagatcgagagcatatggattattatagcactatggataaattaaataaatattttgtaaattttgttaataaagtcccatcatttggaaaatcatttatttgtttagatgataaaaataacaaaaatttaattaaaaat

SEQ ID NO: 313242 - DNA, 805 bp, Unknown
  Bacterial polypeptide expressing nucleotide sequence isolated from the Sargasso Sea
aaaaaataatcctgaactttctgcagcaaaaataaaacaattacctatttataaaagaggtgaaatgcttgctaatattgtttctttaacaaaaaatattgtggtggttggatcacacggcaaaaccacaacaacatctttgatagcatctatatttcaagaaacaaaaattgatccaacaataatcaacggtggggttataaattcaattaataattctgctaagcttggaaaaagtgattggtctatattagaggcagacgagtctgatggaagttttgtttatatacccccaacttattcaataatcacaaatatagatcgagagcatatggattattatggcactatgaataaattaaataaatattttgaaaattttgtaaataaagttccctcatttggaaaatcatttatttgtttagatgacaaaaataataaaaatttaattaaaaatatcaaaaataaaaacttttatacatacggcctcgacgtcaaatcaaattttcgtattaaaaatataaaacaattaaaggaatactctgagtttgatttaaatataaaattacccaataaaaaaaatcaattgattaaaaaatttaaaattcctttattaggaactcataatattaagaattctgtagctgccgcagcattagcattaacagtgggcctaccaatacataatattaaaaaaggacttaaaaattttaaaggagttcaaagaagatttaataaaattttcagttttaataatgttgatttttatgatgattatgcacaccaccctacagaaatcaaagaa

SEQ ID NO: 313243 - DNA, 796 bp, Unknown
  Bacterial polypeptide expressing nucleotide sequence isolated from the Sargasso Sea
ttttatggttttaaagttctatgtatagatcatccagcagttcaaaatttaaatcctttaaacaaggatagaagattattaacatacggccaatcaactagcgcagatgttagagctgtatccataaagtttactgaggggcattcatactttgacttaattttatcggacaggatgatttgtcgaagaaaggtttggcataatgtaaaattaccaatgcttggcattcataatgtcctcaactgtcttgcaggaattgccgtagctatagaaatgggtatatctgaaaatttaataagaaactctttggttgaatttaagggtataaaaagacgttttgaaatcaaaggtaaaagtaattgtggaataacagttatagatgattacggccatcatcctattgaaataaaatatgctttaagtgcggcaagagagctagctaaaaataaaaaagttatcgcaattgttcaacctcatagatacaccagattaaaagaactttttgaagatttttgtagttgctttaacgatgctgacatagtttatgtttcagatattttttctgcaggtgaaaagccaattccagattttaacaaagataaacttgcctcaggaataattgatcatggccaccaaaatgttttgaaattaaatgatcctaagtttttagcaaaaagtatttgtgaagtctctgattctgatgacatcgttattcttcttggagcaggatctataactaattggtctaataaattagttgatgaattaaatgaatgcagagaatcaaaatgttaga

SEQ ID NO: 313244 - DNA, 871 bp, Unknown
  Bacterial polypeptide expressing nucleotide sequence isolated from the Sargasso Sea
acttgatcccacaataatcaatggtggtgtaataaattcgataaataattctgcaaaacttggtaaaagtgattggtctatattagaggcagacgagtcagatggaagttttgttttcatacctccgacatattcaatcatcacaaacatcgatagagagcatatggattattatggtactatggataaattaaacaaatattttgaaaattttgttaataaagttccatcatttggaaaatcttttatttgtttagatgataaaaataataagcatttgattaaaaatattaaaaacaaaaacttttatacatatggtttagataaaaaatcaaatttttgtattaaaaatataaaacaattaaaagatttctctgagtttgacttaaatataaaattacccaacaaaaaaattaaattaattaaaaaatttaaaattcctttaataggtactcataatataaaaaattcagtagccgcagcggcattagcattaacagtaggtttaccaatcaataatataaaaaaaggacttaaaaattttaaaggtgttcaaagaagatttaataaaatattcaattttaataatgtagatttttatgatgattatgctcaccatcccacagaaatcaaagaagtattagatggtgtaaaaaatgtttataaagattatgaaaaaatatgtattttccaaccacatagaatttcaagattaaaagatttaaaaaaagaatttacttttgcatttaaaaatgcagataaagttatattgtttccaatttatactgctggagaaaaattaaagcttggatttagttatgcaaattttgcaaaagatataattaaaaactcaaaagtcgagcttttttta

SEQ ID NO: 313245 - DNA, 646 bp, Unknown
  Bacterial polypeptide expressing nucleotide sequence isolated from the Sargasso Sea
aatgaaaattaacagtaacattcattttataggtatttcaggcataggaatgtctggtatcgcagaattgatgttagataaaggatattcgatacagggtagtgatatatcagtaaatgacaacactaaaagattaaagaaaaaaggtataaaattttttttaggacataataaaaaaaatattaaatattctcatgcagtcgtttattcatcagctataaaaaaaaataatcctgaaataaaagaggcatatattaaaaaaatccctgttctctctcgagctgatatgctttcagaattaatgaaaaataaaaaatctattgccatagctggatctcatgggaaaactactactactagtttggtaggaaacatttttaatgaagcaggattagatcctactattgttaatggtggtattataaattctttttctaaaaataatcgctacggaaaaggggagtggatgattgttgaagcagacgaaagtgatggtacctttttaaaactaccacatcaaatatcaatcattactaatttagatattgaacacttggatttttataaatcaaagaaaaatttaattaatgcatttgaaaaattcgtaaatctacttccgttttatggaaccacaataatgtgttac

SEQ ID NO: 313246 - DNA, 894 bp, Unknown
  Bacterial polypeptide expressing nucleotide sequence isolated from the Sargasso Sea
agtgaaaatgaaaatgtcaaaagactaaaggaattgggtgtcgatgttcgaattggtcataacgtaaataatgtaactaatgatattgatgtcttagtctattcaagcgcagtttctcttgaaaatccagaaataatgcgagcaaagcaaaagggcataccagttattcgcagggcagaaatgttgggtgaattgatatccgttaaagagacaagtattgcaattggtgggacacatggcaaaactacaacatcctcaatggtaggagctattttatcttatgccaaaatggacccaactttagtagttggtggtcttgttcataatctagacaccaattcaaagttagggtcgggtgacattatcgtggtggaggctgatgaatttgatagaagttttttagcgctaaaaccaaccatttcaattattacaaatattgaattagagcatatggactgctacaaagatctggatgaccttcagaatgcatttattagtttctgtaaatctgttcctttctacggcgcaataattgcatgcatagattcacctgcagttcaagagattattacaaaaattgagaggcccatgatcacctatggacggtcaagggatgcggcctatcgagcgaaaaacctacgattttatgaaaacaaatccacatacactgtttttcgcgcggaggaatgcctaggagaaatcgagttgaatgttcctggagaacataacatactaaactccttagcagccgtcactttaggtttagaaatgggcctctcctttacaaatatttcaaaaggaattcaagcatataaaggagtaaggagaagatttgatataaaaaggattcacaatgaaattttcgttgtagatgattatgcacaccatccaaca

SEQ ID NO: 313247 - DNA, 501 bp, Unknown
  Bacterial polypeptide expressing nucleotide sequence isolated from the Sargasso Sea
tatgaatcactcaacaaataaacctgacaaaatccatttcgtgggcataggaggctcaggcatgagtggattagcagaagttctactaaacttaggatattcagtaagcggttctgatttagaagagagttttataacccaaagactctcatccttaggagcaaaggtttatatcggccataaaaagtccaatgtaactgataaagatatgcttatcatttcttcggcaatctcaaaagaaaatgaagaaatattagaagctaataaaaataacttacctatattagctagagcagagttactagcgagtttaatgaatcttaaaaaaggaatagcaattgcaggtactcatggaaagactactacaacaagtatattggcctccattatgactgatgccaatctagaccctaccttcatcaatggagggataattaacagttttgctactaatgctaagttggggagtggagattatcttatagcagaggcagatgagag

SEQ ID NO: 313248 - DNA, 157 bp, Unknown
  Bacterial polypeptide expressing nucleotide sequence isolated from the Sargasso Sea
aatgtccagcataaaaaatattcatctaattggtatcggtggagcaggtatgagcggaattgcagaaattcttcataatcaagactattctgtctcaggaagtgatctggaggatacaaatgtgacaaaaagactaaaaaatctaggggtaaaaatt

SEQ ID NO: 313249 - DNA, 973 bp, Unknown
  Bacterial polypeptide expressing nucleotide sequence isolated from the Sargasso Sea
aataatccagaagttattatttgcaaaaaaaagaaaaattccaatttataaaagaggagatatgctagcaaatgtcgtttcattaatgaaaaatgtagtagttgctggttctcatggcaaaactacaactacttcattgatttcaaatatattcctgcatgcaaaaattgatccaactgtaattaatggtggagttttaaattcttttagtggatcagcaaagttaggaaaaagtgattggtgtatattagagtcagatgagtcagacggaagttttataaaaataccttctacttattcaattgtaactaatattgataaagaacatatggatttttacaaatctttagatgaactgaaaaaaaattttgttaaatttatagaaaaaacaccatcatttggaaagtcatttatttgtttagatgacgacaacaataaagatgtaatcaaaaaacttaaaaatcttaactataacacttacggagtcaataattcatcaaactttaaaattttgaacgttatacaaaaagaaaacttttcaagctttgatataaaaataaatttacctggagtaaaaaataattatattaaaaatataaaaattccacttattggtcttcataacataagaaattcaactgtagcagcagctattgcattttcagttggaataccaattaagattattaaaaaaggtttagaaaaattctctggagttcaaagaagatttactaaagttttctcttttcaaaatgtcccattttttgatgactatgctcatcatccaactgaaattaaagaagttataaatggagtaagagaggtttataaaaaaaaagaaattgtatgtatttttcaacctcacaggatttcaaggttaaagaaattaaatgatgagttttcaaaatcttttaaaaacgcagatactgttattttatgtccaatatataaagcaggagaaatattaaattag

SEQ ID NO: 313250 - DNA, 511 bp, Unknown
  Bacterial polypeptide expressing nucleotide sequence isolated from the Sargasso Sea
aatgaaaattgaaatcgctaaatctgaagttatccatttcattggtattggaggtattggtatgagtggacttgctttagtaatgagtaggatgggattcaaaattcaaggaagtgatatcaactcaaataaaaatattgagagattaaaacataatggtatcaaaatttttataggtcatggaaaaaaaaatatatctcgtgcaacaatcattgttatttcttctgcagtaaaaaaaaacaatacagaaattattgctgccaaagagagaaatttacctatttataaaagaggagatatgcttggacatataacttcattaactaaaaatatagtagtagttggatcccatggaaaaacaactacaacatctcttgtagcgagtattttatcctcgagcaatctagaccccacaattataaacggtggtgttcttaagtcgtcaaataattctgcgagacttggaaaaagtaactggactatcgtagaacttgatgaatcagatggtagt

SEQ ID NO: 313251 - DNA, 391 bp, Unknown
  Bacterial polypeptide expressing nucleotide sequence isolated from the Sargasso Sea
aatgaaaattaatttaggaaaaaatgaactaattcattttgttggtatcggaggaataggtatgagtggtctagctttgattatgaatggtttaggatataaagttcaaggtagtgatattgctgataatcgaaatattgaaagattaaataaaaaaaaaataagaatatttttaaatcataaaaaagagaatataaaaaaaacaactgttatggtgatttcttcagcaattaaaaaaaataacccagaactagttgaggccatcaaaaaaaaattaccagtttatacaaggggagatatgttaggtcatattgtatctttcatgagaaatgttgtcataactggttcacatggaaaaacaactacaacatcattagtatctagtattttt

SEQ ID NO: 313252 - DNA, 579 bp, Unknown
  Bacterial polypeptide expressing nucleotide sequence isolated from the Sargasso Sea
taaaaatcttcaccaaaaattcgaaaaatttattaataccacgactttacttggaaaagctatagtttgttcagatgataaaaaattaaaaaaaatagcggaaaaaaatttaaataagaatatattgacttacggttataacagtaaagcggactttagaattcttaattctcaaaatacgaatatgggaatgaagtttgatcttaaattacaacaaaagaaaaaaaaaattactttaaacaatttttacataaacttaataggtaaacacaatgttttaaacgcaactgcgagtattgcattggcattatctatcggaattaatcaaaaagttattaagcattccttaaaagaatttaaaggcgtacaaagaagaatgacccaattaatgaattttaataataaattgttttatgatgattatgctcaccatcctacagaaataactgctgtattaaaagcatgtagagccaactttagcaaaagaaaaattatatcagtttttcaacctcatagatattcaagattgaaatacttatatgataaatttacaaaaagtttttataattcagatgttgt

SEQ ID NO: 313253 - DNA, 652 bp, Unknown
  Bacterial polypeptide expressing nucleotide sequence isolated from the Sargasso Sea
aatgttcaggcatgtgaaaaaattgcattttgtaggtattggcggtatagggatgagtggcatagctgaattacttttgaaccaagggtttaaaatagcaggttcagatataaacgattcaaaagtcattcagaacctaaaagataaaggtgctgaaatttttattggacatgattctaaaaacttaactgatgcagatgtattagtttattccagtgcagtaaacagggataatccagagatttcttctgcaataaaaaagcatatacctattattcgtagagcagaaatgcttggagagttaatagcattaaaagaaacaagtattggggttgctggtactcatggtaaaactagtacttcttcaatggttggttcgatgttaagtaaagcaaatttagatcctactttagtagtcggaggtctagttcggaatattaatactaattcattacttggagaaggtgaaataatagtagtagaagcagatgagtttgatagaagctttttatcgttacagcctacaattggaattataacaaatattgaacttgagcatacagactgctatgaggacatatatgatttacaaaatgcgtttacacaatttgcaaatgcatctcctttttatggtgcggtaattatttggtaa

SEQ ID NO: 313254 - DNA, 806 bp, Unknown
  Bacterial polypeptide expressing nucleotide sequence isolated from the Sargasso Sea
tatgagaaaatttgaaataggacttaaagaaaaaattcattttattggtatcggagggataggtatgagcggcttagcccaggttatgaaaactatgggctttaatgttcaaggaagtgatttgactttaagtaaaaatgttgaaaggtgtaaaaaaattgggattaaagttttcaaaacacatagtagaaaaaatataaatgactcaagtatagttgtcaggtctacggcaataaaaaataataatccagaaattaaagccgcgaaagaaagaaaaataaatattcttaagcgagcagaaatgttagctcaggtagtatctttaaaaacaaatatagtaattaccggttcacatgggaagacgacaactacatctttaatatctaaagtattaacttcttcaggtttagatccaacaataattaatggaggagtaataaattcatttaaaagtagtgctagattaggaaaaggacaatgggcagttttagaagcagatgaatcagatggaagttttttaaattttccagttaattattctgtgataaccaatcttgataaagaacatttagattattataaaagttttaacaatttaaaaaaatcttttattaaatttttacataaaactccgccaattggaaaatcttttatatgtatagatgattatgaattaagaaaattaatcaaaaaaatcaataaaaagaatattttaacttatggtttttctaaaggagctaattttcaaattttaaaacctatttataaaaaagactactctttatttaatttaaaaatttcagttc

SEQ ID NO: 313255 - DNA, 703 bp, Unknown
  Bacterial polypeptide expressing nucleotide sequence isolated from the Sargasso Sea
aatgaaaaatattagaataggccaaaaagaaattattcactttattggaattggtggtattggcatgagtggtttagctcaagttatgaaaactatgggttttaacattcaaggtagtgatcaaagcaaaaataaatctactattaattgtaaacgagcaaatataaaagttttcataggacattctagaaaaaatattaaaaatgcaacaattattgtaaaatcttcagcaattcaaaacaataatttagaaattcaagaggctaaaaaaaaaagaattccaatttattctagagcagatgttatggcagatgtagtctcattaaaaaaaaatattatagtcactgggtcacacggaaaaactacaacaacctctttaatcgcgaaaattttatctgaccagaaattagatccaactataattaatggaggagtaattaattcttttaaaagcaatgctaagttgggtaagggtgattgggcaatactagaagctgacgagtctgatggaagttttttaaaattaccaattaattattcaatagtaactaacattgattatgaacacatagatttctataaaaattacaagaatttagaaaatgcgtttatacaatttataaacaaaacaccaccgataggaaaatcattaatttgcctagacagtaaaaatattaaaaaaattttaagtaaaattaaaaat

SEQ ID NO: 313256 - DNA, 478 bp, Unknown
  Bacterial polypeptide expressing nucleotide sequence isolated from the Sargasso Sea
aatgaaaattaaattagcaaaagcagaacttatacattttgtaggaataggtggaataggtatgagtggcttagcacttattatgaaaggtaaaggttttaaagttcaaggcagcgatattgcaaataataaaaatattgaaagactaagaaaagaaaaaataaaagttttcattggacacaagaaacaaaatatagaaaaggggactatcttagttgtatcttctgctataaaaaaaaataatccagagcttcttgtggccaaaaaaaaacaattacctatatataaaagaggagaaatgttagccaacattgtatctttaacaaaaaatatcgtagttgttggttcgcacggtaaaactacaacaacatcattgatagcttctatatttcaagagacaaaaattgatcctacaattatcaatggtggagtaataaattcgattaaaaattcggcaaagctggaaaaagtgattgtc

SEQ ID NO: 313257 - DNA, 532 bp, Unknown
  Bacterial polypeptide expressing nucleotide sequence isolated from the Sargasso Sea
atgagaattagtttaggcaaaaaagaagtaattcactttattggtattggtggaataggtatgagtggcctagcccttataatgaaagaattaggctttaatgtaaaaggatcagatcagcaaataagtaaaaatattgacagattaaaaaaaaatagaattaaaatacaattaggacataaaaaaaaaaatatatcaaatgcaactataattgtagtttcctctgcaattaaaaaaaataatccagaatttattgaggcaaaaaataggaaaatacctatctataaaagaggagaaatgttggcaagcatcgtatctctttacaaaaatgttgtagttgcaggttctcatggaaaaacaactaccacatcaatagtttcaactattttttcaaaatctaatttagatcctaccacaattaatggaggtgttattaattcaattggtaattctgccaaacttggaaaaggagaatggtgtgtactagagtctgatgagtcagatggaagttttctagaattgccctttactt

SEQ ID NO: 313258 - DNA, 568 bp, Unknown
  Bacterial polypeptide expressing nucleotide sequence isolated from the Sargasso Sea
aatgaaaattaatttaggaaagacagaacttattcattttgttggcataggtggaataggtatgagtggtttagctttaataatgaatggtttgggttttaaagttcagggtagtgatattttaaaaaataaaaatattgaaagattagaagaaaaaaaaataaaggtatttttaaaacataaaaaaaaaaatattgataaaactactattttagtaatttcatcagcaatcaagtcagataatccagaattgactcatgcaaaaaaattaaatttacccatatatactagaggggaaatgttgggtcatatagtttctctaatgagaaatatagttgtaactggttcacatggaaaaactactacaacttctttaatttcaagtatttttacagaagctaaattggaccctacaattattaatggtggtgtattaaattcttttggaaattccgcaaaactaggaaaaagtaattggtgcatcattgagtcagatgaatctgatggaagttttttaagatcccattcacatattctattgttacaaatattgatgctgaacatttag

SEQ ID NO: 313259 - DNA, 397 bp, Unknown
  Bacterial polypeptide expressing nucleotide sequence isolated from the Sargasso Sea
cctagtatatgatgactatgcacatcacccaactgaaatcaaagcaacattagctgcagcaaaaaaaattagaaaaaaaattattgtaatttttcagccacatcgttattcaagaactcaagttttaattaatgaatttgtagaggtattatctaaaatcaaagaactttatttacttaaaacatatagtgctggagaaaaagtaattcaaacagctacttctaaagcattaattgaaaagatttcaaaatatcaaaaaaatgttaattatattaaaaatgaagatcgtttatataatttattaacaaggcattcagcacaacactctatcatactttttatgggagcaggatcaataacaagaattgcacatgaatttatgaataaaaatgattga

SEQ ID NO: 313260 - DNA, 826 bp, Unknown
  Bacterial polypeptide expressing nucleotide sequence isolated from the Sargasso Sea
catttggattattataagaattatagaaatctagaaaaatcttttttagaatttataaataaaactcctcccactggtagatcaattatttgtattgacaatgtaaatattagaaaaatcttaaacaaaattaaaaataaaaatattttgacctatggagaaaataaaaaagctcattacacgataaataaaattagatataactttgaaagcactatttttgaccttagttttaaggataaaaataagaaaaaaaagaaaatcaaaaatattaacgtaaagttattaggaaagcacaatgtattaaatgcagctgcagcttttatagtctgcttaaatcttggtgctgacgtaaaaataataaaaaagtcattaagaaacttttctggtgttcaaagaaggatgacgaaagttttttcaaaaaatagtaatgatttttatgatgattatgctcatcatccaactgaaataaaatcaattttagaaggtgtacaaaaagtaaatccaagtagaaagattataagtatttttgaaccccacagatacacaagagtcatgacattaaaagatgaattttcaaaatgtttctctaaatcgaatttagtgattatatgccctatatatgctgcaggtgaaaaaaggaatccaaaatttgacttaatacaatttgcaaatttaattgctaaaaattccaaaacccaagtaacatgtgtaaaaaacgaacttgatttgtgcaattattttagaaaaaaccttgtaagtaatgagattataattggtatgggagccggagtaatttcaaaatggatggcaaatattaaatatt

SEQ ID NO: 313261 - DNA, 512 bp, Unknown
  Bacterial polypeptide expressing nucleotide sequence isolated from the Sargasso Sea
tcgtcatctaaatattgatgagaactcaataaaaaattcgctttcactatttaaaggagtaaataggcgatttactcaagttgccgaactaaatggcataaagattatagatgattatggccaccatccagtggaaatatctgctgtattaaaagccgccagacaaactgctactggaaaagtttttgctatccatcaaccccatcgctacacaaggttaaattcactatttgaagatttttgctcgtgtttcaatgaggctgattttgttggtataacggagatttattctgctggcgaggctcctttagagggagcatcacggtccgatttgataaatggtttagttaggcatggtcatagaaatgttatttcgatagatgatgaaggtgatttggagaatttgattaggcgacatgcaaaaagtggagatattatagtttgtttgggcgctggcacaataagcgtgtgggctaataatttaccatccagactaagtgatttgggataaa

SEQ ID NO: 313262 - DNA, 481 bp, Unknown
  Bacterial polypeptide expressing nucleotide sequence isolated from the Sargasso Sea
tgatatcaaagttattaaaaatgcacttgaaaaatttagtggtatacagagaagactgaccaaagttttttcgcatgaaaaaagagaattttttgatgattacgcccatcatccaactgaaataaaatctgtacttaaaagtatgagaaaaatcagcagtggaagaaaaatcatatctgtttttcagccacatagatattcaagattaaaattattaaaaagtgagtttgcatcttcttttcaagattctaatacagttattttatgccctgttttttctgcaggagaaaaagttgataaaaattatgatacctttaaatttgctagtcttatttcaaaaaaatcaaatgtccaggtaattactgttgaaaatcaaaaagatcttaaaaactttttcaaaaaaaatttaattagtaatgaactagtgctatgtatgggtgctggatctatatcaaaatggataagagaaatggaactttaa

SEQ ID NO: 313263 - DNA, 565 bp, Unknown
  Bacterial polypeptide expressing nucleotide sequence isolated from the Sargasso Sea
atgaacttattaagtagtttcaaaaaagtcttcattatgggtattggtggctcaggaatgagttcaattgcaaaatacctcaaacaaaagggtcacgatgttaagggttacgatcaaagaatctcttatatcaccaacctcttagaaaatgatggtgtaaaaacttatcaaaagtttgatgggttcagatatgaaaaagatgtgctgtatattatctcatcagctattgatcttgaaggtacttttcttgaacattttaaggaaaatgaaaatgtaatttcaagaccaaaatttttagatcttttatctgaagaggtaaaaattattggaattacaggcactcatggaaaaacttcaacaacagctttggtttctcatatatttcactttaataataaaaatgtttcatttatttatggtggcgtcagtagctttggtaatttaggcggccattgtggtgacgatgctctacctttaatacttgaaactgatgaagcattcaatacatttaaaaatataaatatagaagatttaattgttacaaatatagataatgatcatatag

SEQ ID NO: 313264 - DNA, 886 bp, Unknown
  Bacterial polypeptide expressing nucleotide sequence isolated from the Sargasso Sea
aaagaagcattcgatgaataaatatacagaagtatacatattaggtatcggaggctcagggatgagttctatagctaaatatttggttcaacaaaatattgatgtagctggctacgatcaacggaaatcatatataactaaccagttgaatcaagatggcataagagttgattttaatttaagaaatttaaaatattctaagaacatactttatatttattcatcagctatttcaattaacgaaacaacgctaaaagattatttagatagtgataatgttttatcaagaccagaatttcttaatatattatcaaaagaaaataaaattattggaattactggaactcatggaaaaacatcaactactgcactgctagctcacatatttcattataacgaaaggaatgcttcgtatatatttggaggaatcacctcattccatgggatagggggccattatggtgatcaggatcagcctattattttagaaacagatgaggcgtttaatacatttaaagacattaatatcgatgatttattagtaacaaatattgatgttgatcatcttgattattttaaaaattttaaaaacttgctaaatgcattcaagcatgtaatcgataacgttaaaggtaatttagtactaaattttgatgatcagaacttaagagaattgaaaacaagcaataattgcattagttattcttcatcagaagttgctgatattcaaattcaatacccaaacaaaattattatagaaaatgaggaatatgttgttactacaaaattaatcggtaatcattttatttcaaatatagctggagctatagctttagcctatctcaatggaataaagatagaagactcaatagaagctgttgaaact

SEQ ID NO: 313265 - DNA, 415 bp, Unknown
  Bacterial polypeptide expressing nucleotide sequence isolated from the Sargasso Sea
tttttcaattggtgagagagaattttttgatgactatgcccatcaccccactgaaattaaatcagttttaaaaagtttgaaaacaacttctaataacagaagaatagtttctgtttttcagccccatagatattcaagattaagattattaaaaaaagatttttcatatgcttttaaggactcagatttagttcttctatgcccggtatatcccgcaggagaaaagattgataaaaaatataaagaagttgattttgcaagattaattttcagaaattctaaagcccaggtagttatagttagaaatcaacatgatctaaaaaaattttttattaaaaatttattagaaaatgaaataatagtatgtatgggagctggatctatctcaaaatggataagggaaatggatttatag

SEQ ID NO: 313266 - DNA, 970 bp, Unknown
  Bacterial polypeptide expressing nucleotide sequence isolated from the Sargasso Sea
aacaactacaactcaaatggttgctgcagtaatggaaacaggtaatttagatccaacagtagtaaatggtggaattatccaagattatggttctaatgccagattaggagaaggtgactggatggtagtagaagctgacgaaagtgatggaacgcttgtaaaaattccttctactatttcaataatcacaaatttagacccagaacatcttgatcactatggttcattcgctgctttgaaaaaaacttttataaaatttataaataatattcctttttatggggtggctatttgttttattgaccatcctgaagtaaagaaattaatctcaaaaataaaagatagaagagtcattacttatggttatagtagtgaggcagacattcaaataacaaatttggagtataaaaaaaataaagcacacttccaaatatataaaaaacagaatgaagaacatttcaaatttaaattgccaatgtatggtgatcataatgtagcaaatgcaactgcagcaataactgttgcttttcatttaaaaatacctctagaagatataaaaaatggattggaaaattttaagggagttaagagaagatttacaaaagtttatacttggaatggtattgatataattgatgactatgcacatcatcctgttgaaatatcggcagtcctatcagctgctcgaaagtatgcatcaggaagagtaattgcaattcatcaaccacatagatattcaagattagccaatttgatgaaggatttttccaaatgtttcgacgaggccgatatagttggaataacacccgtatatgaagctggagaaaatcccataaaaggggtcaactctgaaaaactaattaaattattaaatgataggtcaattaatgcaaatttagtttacaatgaaaatgatttacttaaatttttgaaattttacggcaaacccggcgatatatttattgttaga

SEQ ID NO: 313267 - DNA, 700 bp, Unknown
  Bacterial polypeptide expressing nucleotide sequence isolated from the Sargasso Sea
aatgaaaattgatttaggaaaaaacgaacttattcattttgttggaattggtggaataggaatgagtagtctagctcttataatgaatggattgggttataaagttcagggtagtgatatagcagaaaataagaatattgggagattaatagagaaaaaagtaagagtatttcttaatcataaaaaagaaaatataaaaaaaacttccatcttagtaatttcttcagcaatcaaaaaaaataaccctgaagtaaaagaggcaattaaaaaaaatttaccagtttatacaagagctgatatgttaggtcatatagtatctttcatgcgaaatgttgttgtgactggttcacatggaaaaacaacaacaacatcgctggtatcaaacattttcacagttggaaacttagacccaacaataattaatggtggtgtattgaattcaattggtaattctgcaaaacttggtaaaagcaattggtgtgtaacagagtctgatgagtcagatggaagttttttaaaaataccttttatatattcgattgttaccaacctagactctgagcatttagatttttataaaaatatgaacaatttaaaaaaaagttttttaaagtttattgaaaaaataccatctgttggtaaaggttttctgtgtagtgatgatcaaaatcttaaaaaaataattaaaaaaactaaaaaa

SEQ ID NO: 313268 - DNA, 160 bp, Unknown
  Bacterial polypeptide expressing nucleotide sequence isolated from the Sargasso Sea
atgaagaatataaataaaaaagttaataacatagttcattttattggcattggtggaataggaatgtctggaatagcagaattaatgctagatcaaggattcatcattcaaggtagtgatttacatatcaacgaaaacatcaaaagacttaaaaaaaagg

SEQ ID NO: 313269 - DNA, 613 bp, Unknown
  Bacterial polypeptide expressing nucleotide sequence isolated from the Sargasso Sea
aatgaaaattaatttaggaaaaaatgaacttattcactttgttggtatcggaggaataggaatgagtggtttagctctaattatgaatggtttaggttataaagttcaaggaagtgatattgctgctaatcgaaatattgaaagattaaaagaaaaaaagataagagtattttttaatcataaaaaagagaatattaaaaaaacaactgtccttgtgatttcctcggctattaaaaaaaataacccagaattaattgaggctgtaaaaaaaaatttaccagtttacacaagaggagacatgttaggtcatatagtatctttcatgaggaatgttgtgattactggctcacatggaaaaacaacaacaacatcgttagtatctagtatttttacagctgctaatttagacccaactataattaatggtggtgtgttaaattcatttggtaattccgcaaaattgggtaaaagtaattggtgtgtaacagagtctgatgagtcagacggaagttttttaaaaattcctttcacatattctatagttaccaatttagactctgagcacttagatttttataaaaatataaataatcttaaaaaaagtttcattaaa

SEQ ID NO: 313270 - DNA, 897 bp, Unknown
  Bacterial polypeptide expressing nucleotide sequence isolated from the Sargasso Sea
ataattaatggaggtgtcatcaactcgttaaaaagtaatgcaaaacttggtaaaggtgagtgggctatattagaggctgatgagtctgatggaagttttcttaagttaccaattaattactcagttgtaacaaatctagacaacgagcatctcgattattataaaaattacaaaaatttagagaaaagttttatagaatttataaataaaactccaccgacaggaaaatcaataatttgtatagataataacaatattagaaaaattttaaataaaattaagaataagaatatattaacttatggcgaaagtaaaaaagctgattatcaattaaaaaatattaagtataaatttgatagcacttcttttgatttgttatttaaaaataaaaaagagaaaaagaatataaaaaatattaatgtaaaattaataggaaaacataatgcattaaatgcagcagcagcatttacagtttgtttgaatcttggagcaaatttaaatacaattaaaaaatcacttaaaaatttttctggagttcaaagaagaatgactaaaatttttacaaaaaatagcaatgatttttatgatgattatgcacatcaccctacagaaatacgctcaattttagaaggcgtgcataatgtaagtccaaaaagaaaaattatcagcgtttttgaaccgcatagattttccagagttatatctttaaagaaagaattttctaagtgtttttcaaaatcaaatttagtgattatgtgtccattatatgcagcaggagaaacaaaggactataaattcaatttgattaaatttgcaagtctaattgctaaaaattcaaaaactcaggttattatcgtaaaaaatgaaattgaacttagtaattatttaaaaagaatt

SEQ ID NO: 313271 - DNA, 715 bp, Unknown
  Bacterial polypeptide expressing nucleotide sequence isolated from the Sargasso Sea
aatgaagaacaaaaaatctattgctatagcgggctcacatggcaaaactacaacaactagtcttgttggtaatattttaaatcaagcaagtttggacccaacaattgttaatggtgggattataaattcattatcaaaaaataatagatatggaaaaggtaagtggatgattgttgaagctgatgaaagtgatggttcatttttaaaacttccccatcaaatatctataattactaatttagatattgagcatttagatttttataaatcaaaagataatttaattaaatcttttgaaaacttcataaatatgcttcccttttacgggacttcaataatttgtcttgatgataaaaatcttaaatcactagttagtaaaattaaaacaagaaatattataacttattcaattaaaagtaaaaatgctgacgtatatatttatgatattattaaaaaaacaacaaaaacctcttttaaattaaagataaaaagaaacaaaattttacattcaaataattataaatttgtattaaatgctgttggcaaccataatattttaaatgcaacagcaagtattattgcctctaaacttgttggagtagaaaatttatttattaataaagctctcaaaaattatattggagttaaaagaagattttcatttttaggaaaaaaaaataaagcattaatatatgacgattatgctcatcatcca

SEQ ID NO: 313272 - DNA, 760 bp, Unknown
  Bacterial polypeptide expressing nucleotide sequence isolated from the Sargasso Sea
agatcatttagaaaatcataaaaatagttttgatgttttaaagaagaattttttaaaatttataagtaatttaccattttacggtttatgtcttttaaatcttaatgatataaatacaaaatctataattaataaaatttctagaccttttaaaacttacggacttgatatattggcagattataatggtaaaactttaaatattaattcaattccttcgacgttcatatatactgaaaatgatacggagtatgaaataaaatctaatatgccggggcgatataatgctatgaactctttagcagcattatctttagcgagagagctaggtattcccattaaaactatccaaaaagcaatcgaaagttttcctggtataagcaggagatttgaaatacatggagaatttgaagtaaataataagaagtttacttgggttgatgattatgggcaccacccgactgaaattaaagaagttcttgagactataaataatgtttggaaagaacaaagagttgtaatggtgtttcagccgcacagatattcaagaacagcagagtattttagtcagtttgtagatactttaaaaaatgttcaagatttaattttaatggaaatttatgctgcaaatgaacgcgagattgaaaatataagttcaagtgcgctggttgaagagataagaaaatatggagttaatgttgttttgattaacaatcataaaaagcttaaaaattttataagtcaaacaataaaaaataac

SEQ ID NO: 313273 - DNA, 802 bp, Unknown
  Bacterial polypeptide expressing nucleotide sequence isolated from the Sargasso Sea
taaatatgcccatgctgttgtttattcatcagctataaaaaaaaataatcctgaaataagagaggcatatattaaaaaaataccagttctttctagagctgatatgctttcagaattaatgaaaaataaaaaatctattgccatagctggatctcatgggaaaactactactactagtttggtaggaaatattttcaatgtagcaggtttagatcctactattgtaaatggcggtattataaattctttttctaataataatcgctatggaaaaggtgaatggatgattgttgaagcagacgaaagtgatggtacctttttaaagctcccacatcaaatgtcaattattactaatttagatattgaacacatggatttttataaatcaaaaaaaaatttaattaatacatttgaaaaatttataaacttgcttccattctatggaaccacaataatgtgttatgatgataagaaccttaaattactaattaacaaaataaaaactagaaatattttaacttattcaataaaaaataaaaaagcagatgtattaatctttgacattatacaaaacaaactaaaaacttcttttaaattaaaaattaacaataaaattattcattcttctaattataaatttactatcaatgcaattggcaatcataatattttaaatgcaactgcaagtattattgcagccaaactaaatggaattaaaaataaagatattaataacgcgttgactaattatgtaggtgtaaaaagaagattctcttttattggaaaaaaaaataaatccttt

SEQ ID NO: 313274 - DNA, 409 bp, Unknown
  Bacterial polypeptide expressing nucleotide sequence isolated from the Sargasso Sea
atgaaaattgaattagcaaaaaaagaaacagtccattttgttggaataggaggcataggaatgagtggacttgcattaataatgaaacgaaaaggctttaaagtccaaggaagtgatatttcaaataataaaaatgtagaaagattaaaaaaagaaaaaataaaaatttttttaggacattctaaacaaaatttaaaaaatgcaacaatagtagttgtttcatctgcaataaagaaaaataatccagaacttatagaagctaagaaaaaaaaaattccaataattaaaagaggcaaaatgttagcaagtatagtttctttgttgaaaaatattgtagtagttggttcacatggaaaaactactacgacttcgttaattacctctatttttcaagaaactaaattagacc

SEQ ID NO: 313275 - DNA, 820 bp, Unknown
  Bacterial polypeptide expressing nucleotide sequence isolated from the Sargasso Sea
tataaaaatataaataaccttaaaaaatgttttctcaaatttattgaaaaaatcccatctgtaggtaaaggctttatatgttatgacgatcaaaatcttaaaaaagttctaaaaaaatcagcaaataaaaatttttatacatatggtaaaaataagaagtcaaatttccaaataataaatattaagcaaacatctaatttttctagtttcgatattaaagtaaatataccgagcaagaaaaaaataattaagggaattaaacttccaatgattggactccataatattctcaatgcagctgctgcagtttctttagcatttacaattggactacctgaaaaaaatatcaaagttggattatacaatttcaaaggagttcaaagaagattttctcatttatttaatcataataatataggtttttatgatgactatgctcatcatccaacagaaataaggtcagttctaaatggtgtaagaaaagtatacaaaaacaaagaaattgtgtgcatttttcaaccacatagaatctcaagagtcataaatctaaaaaaagaattttcgaaatgttttaaaatggcagatacagtcttattgtgtcctatctacacagctaatgaaaaactaagacttaattttacatatgtttcatttgcaaaattaataataaaaaattctaatgttaagttagtgcaagttgatgatgaattacaattacaaagatttataaaacagaatgcatttggtgaaaaaatttatataggaatgggcgctggatctatatcaaattggatgaaaaatttggaaaatattttttaat

SEQ ID NO: 313276 - DNA, 637 bp, Unknown
  Bacterial polypeptide expressing nucleotide sequence isolated from the Sargasso Sea
aatgaaaattaatttaggaaaaagagaattaatccattttgttggcataggtgggataggaatgagtggtttggccttgattatgaatggtcttggattaaaagttcaaggtagcgatatatctaataataaaaacatcgaaagtttaaaagaaaaaaaaattcctatttttttaaatcactacaaaaaaaatataaataaaattacaattttggtaatttcgtcagcaattaaatcgaataatcccgaacttcaagaggcaaaaaagttaaaattaccaatttatacaagaggtgagatgctagcccaaattgtatcattgatgaaaaatgttgttgttacaggttctcatggtaaaactacaactacttctttaatttcaagcatcttcacgcaagctaaattagacccaactattataaatggaggtgtacttaattcttttggaaactctgcaaaacttggaaaaagtaattggtgcctaatagaatcagatgaatctgatggaacttttttaaaaatcccatttacttattcaattataacaaacatagacgcagaacatttggattattataaatccataaaaaatttaaaaaaaaaattttctgaatttattgaaaaaacaccatcattg

SEQ ID NO: 313277 - DNA, 543 bp, Unknown
  Bacterial polypeptide expressing nucleotide sequence isolated from the Sargasso Sea
attgaataaaaaattaataagtaaaaatcattttcattttattggcattggtggtattggaatgtctgcaatcgctatggcattaataaaaaaagggtactcagtctctggctctgatttagttcaaaataaagaaacaaaaagtttaaaaagattaggggcaataatttttgattctcaaattaaaaaaaatattgattttgtgatttcaaaatttcaggatcagacaatcaattttgtaattagctctgcgattaaagatgaaaacgaagagttatacttttgcaaaaaaaataatttattaataaagcatcgttcagaaattcttgcaatgataatgaactcttacacatcattatcaatagcaggaagtcatgggaaaacctcaacaagtactttcctttccacgctgttagaattgtgcacacatgattcttcttcaataactggtgggataatcccaatctatgattccaatgctcatatcgaaaatacaaaatacttagtaacagaaattgacgaatctgatggaacaattaaaaa

SEQ ID NO: 313278 - DNA, 231 bp, Unknown
  Bacterial polypeptide expressing nucleotide sequence isolated from the Sargasso Sea
attggataaaaaattactgttgaaaagtcattttcattttattgggattggagggattgggatgtcagcattggcaataggtttacttaaaaaaggctgttcagtttcaggatctgatttagttaaaaacgatgaaactcaaaaattggagaaatcaggtgcagtaatctttacttctcaaattcgacaaaatattgattttgttatttcaaaatttaacaacaaattgat

SEQ ID NO: 313279 - DNA, 819 bp, Unknown
  Bacterial polypeptide expressing nucleotide sequence isolated from the Sargasso Sea
atgagaacaatttctccttgttaaaggaagcttttgttagttttgcaaaaaaaatccctttcgatggattaattgtagcttgcggagatgatttacaagtcaaagaacttttacctcaattctcaagaagggtaattaattatggttttaatgaagataattactatcaaatcaaaaactttagtgcaaaagggcttacatcttcttttgatttatgtgaagacggaaataaagtattagatgtagagctaaatatcctaggcagacataatgcacttaatgctgttgcggctataatcgtagctatagaagaaggagttcctctaaatacaattcaatcttcacttaaagatttttctggcataaatcgaagaatggatattaaaggtaaaataaaattaaataacaaaacttgcactttaatagatgactacggacaccatccgacagagataaggagcacatatcagtctatacaggaatcatttcctgattcgcatattcatatggtatttcaaccacatagattcaccagaacaaaagacttatttgatgattttgtagaggttctttcgaatgtagggaaggttcttttacttgatatctattcagcgggcgaagagaaaatagaaggaatttctagtcaggctttgttggatgtattaaataagaattctagcaataatctattaatacaaaagaaagacctagctctaactttaacaaaagaagtagaagataactctataatcctaatgcaaggagcaggaaatatttcagaattgacagatattcttttatctaaatataaagcatgaa

SEQ ID NO: 313280 - DNA, 823 bp, Unknown
  Bacterial polypeptide expressing nucleotide sequence isolated from the Sargasso Sea
aattattgttggcaaaaaaaaagaaaaattccaatttataaaagaggtgaaatgttagctaatgttgtctcattaatgaaaaatatagttgttgctggatctcatggcaaaacaacaactacatctttaatatcaagtatttttacacatgcaaaaatagatccaacagttataaatggtggagttcttaattcatttagcggatctgcaaaattaggaaaaagtaactggtgcatacttgaatcagatgaatctgatggaagttttacacaaatacctcaaacttactctatagtaacaaatattgataaagaacatctagatttttataaatctttagaaaatttaaaaaaaaattttattaattttatagaaaaaacaccttcatttggaaaagcttttatttgtttggataataatattaataaagaagtaataaaaaaaattaaaaattttaattataatacatatggattaagcaaattatccaattttaatattttaaatatttcacaaaaggaaaattattcatcatttgatataaaaattaatttaccatcagcaaaaataaattatataagaaatataaaattaccacttattgggttgcacaatattagaaattctacagccgctgccgctgtagcattttcggttggtataccaaataaaattataaaaaagggtttagaaaatttctctggagtacaaagaaggtttacaaaaattttttcttataaaaatgtttctttttacgatgattatgctcaccatccaacagaaatagctgaagtattaaatggtgttagagaaagtacataaa

SEQ ID NO: 313281 - DNA, 508 bp, Unknown
  Bacterial polypeptide expressing nucleotide sequence isolated from the Sargasso Sea
aatggattataaaaatatttatattttaggaattggtggttcaggaatgagctctattggtaaatatctcaaacaaaaaggacttaatgtaataggttacgatcagagaaaatcatatgttacaaatttactcaaacaagacggaattgaggttgtattttctgaatctaatattccatacgataaaaataatttatatatattttcaagtgcaatacctatagaatcagaaaaattcttagaattgcacgacaaggaaaatgtaatttcacgtccagaatttttaaaaaatttatcacgtgaaaataaaatagttggaattactggtactcatggcaaaacatctacgactgcattactttcacatatttttcatttcaataatgtcaatgtctcatatatttacgggggtgtgacaaattttagtggtattggagggcattatggggattcaaatcttccaattattttagagactgatgaagcatttaatacatttgaaaatatt

SEQ ID NO: 313282 - DNA, 928 bp, Unknown
  Bacterial polypeptide expressing nucleotide sequence isolated from the Sargasso Sea
aatgtaaagcgattaaaaaatttgaatattgatgtaaaaattggccatagccccagtaacataaatcaagatacggatgttttagtttattcgagtgcagtaccgatagagaatcctgagattgttcgcgcacgccaaaaagggattcctatcatacgtagagccgaaatgttaggagagcttatttctgtaaaagaaactagcatagcagttagtggcactcatggaaaaacaacaacatcatcgatgattggaacaatcctagcatatgccaaaaaagatccaacaatggttgtaggcgggcttgtgcataatattgacaccaattcaaaattaggtaatggagatataatcgttgttgaagcagatgaatttgaccgtagttttctagcactcaaaccaacaattggcattataacgaatatagaattagaacataccgactgttatgatgatttaaaagatctacaagatgctttcatccagttctgtaaatcagtccctttttatggagaagtgattttatgcgcagattctccagcggtacaggaaatcattccaaaaattgagaggcccatgaccacctatggacggtcaagggatgcggcctatcgagcgaaaaacatacgatttcagaagaataaatccacatactctatttttcgcgcggaggaatgcttgggagaaataaagttaaatgttcctggcgaacataacgtactaaactctctggcagccgttgtattaggcatagaaatgggcctctcctttaacgatattcaaaaaggtatatataattacaaaggtgtacgtaggagatttgatattaaagggacctttaatgatattatgcttcttgatgactatgcccaccaccccacagaagtaaaagcaacaatagaggcagcaaaagctggctgggatagaa

SEQ ID NO: 313283 - DNA, 646 bp, Unknown
  Bacterial polypeptide expressing nucleotide sequence isolated from the Sargasso Sea
ttttgttgataaaatttattttgataatcaatatagttatttcacattaaattttaattttttagataataaattttcaaaatcttactcatataaattaaaagcaagaggtttacataacatctataatggaactgctagcattattgctggacatttaattggtgtaaaaaatatttttataaaggatgctctcaaaaattatataggtgttaaaagaagatttactcatttaggaaggataaactcagcagatatttacgatgattatgctcatcatccaaccgagattgctgcaactttgttaggagcaaaacaaatacataaaaatatcatagtagtatttcagccacacagatattctagaacaaaattgttgtttaatgattttataaaaactctctccaaaataaataaattgtatttattggatacttattcagcaggggagaagattttaaaaggttatgagacaaaaaatatttttataaagttaaaaaagaaaaacagaaaagtagagtacacgtcaattaaaaaattaaataatataatttataatgaaactaaaacaaataatattataatatttatgggagctggatcaataagtaaaatcgcacataattttataaaaattaatgcatag

SEQ ID NO: 313284 - DNA, 646 bp, Unknown
  Bacterial polypeptide expressing nucleotide sequence isolated from the Sargasso Sea
atgaaaattaatttaggaaaaaatgaactaattcattttgttggtatcggaggaataggtatgagtggtctagctttgattatgaatggtttaggatataaagttcaaggtagtgatattgctgataatcgaaatattgaaagattaaataaaaaaaaaataagaatatttttaaatcataaaaaagagaatataaaaaaaacaactgttatggtgatttcttcagcaattaaaaaaaataacccagaactagttgaggccatcaaaaaaaaattaccagtttatacaaggggagatatgttaggtcatattgtatctttcatgagaaatgttgtcataactggttcacatggaaaaacaactacaacatcattagtatctagtatttttacagctggtaacttagatccaactataattaatggtggtgtactaaattcatttggtaattctgctaaattgggaaaaagcaactggtgcgttaccgagtctgatgagtctgatggaagttttttaaaaattccttttacatattctatagctacaaatttagactctgagcatttagatttttataaaaatataaataacttaaaaaaaagttttcataaatttatagaaaaaataccatctgttggtaaaggct

SEQ ID NO: 313285 - DNA, 687 bp, Unknown
  Bacterial polypeptide expressing nucleotide sequence isolated from the Sargasso Sea
ggaattcattttcctttggaaaagataaaagtaacgactatcaaatcaaagacataaaacaaaacatctcagggacaagttttaagttgaaagataatttcttcaaaaaagattatagcttctccatgtcaatgcatggcgaacataatgttatgaatgcaacatcagcgattattgccgctattcaagaaaatattgatgtgtctattattaaaaaatcgctcaaaacttgctcctcaatcgaaagacgttttgaaattatttctcatgatatcttttcaaaaaaaattactcttgtagatgattacggtcatcaccccaaagagatcaaatattctcacgacacagcatcagaaatatggaaaaacaaaaaaaagattgttgtttttcaaccgcatagatacacgcgaactaaggatctttttgatgaattcataaaaactcttttaaatatagaaaaccttctattgcttgatatttatcccgcaagcgagaagataattaaaggctatgaaggcaaagatctatttcatgctcttaaaaaaaatggctcaaacgtagtattttgtcaaaatcatactgaggtaattgaaaaacttgaaaatatgactgctggaaatgaggtcatcataactcagggagcaggaacgacctcagagcttgcaagaaagatatcaaatctatgat

SEQ ID NO: 313286 - DNA, 643 bp, Unknown
  Bacterial polypeptide expressing nucleotide sequence isolated from the Sargasso Sea
tgtgtcaaacaaaatactatcttcagctgatacatggaaaaagattactttacctatgcttggaaagcataatgtcttaaactgtcttgcatctatatgtattgctattgagatgggcatttcagaaaatagtatcaggaatactctaaataatttcaaaggtataaaaagacgctttgaaagcaaaggagtaaccaataatggaataaaaattatagatgattatgggcaccatcctgttgagatcacatttgcccttagttcaggaagaattttagcgagtaaaaataaattgatagcaatttttcaaccgcataggtattcaagattgaaagatctctttgatgagttttgtcaatgttttaacaatgcagattatgtattcataacaaatgtttatgcagctggagagagtgaaatagaaaattttaataaagaaactcttgctgctggaatttcagattttgggcataacaatgtttcaactatcaataatgaaaatgaaatttgtgataaaatacattctgtagcaaaacctaatgatgttgtaatctttttaggcgcaggaagtatcaccaaatggtctgagacaattgtccatcaactaaataattcaggattaaagaatgaaacaattttctga

SEQ ID NO: 313287 - DNA, 397 bp, Unknown
  Bacterial polypeptide expressing nucleotide sequence isolated from the Sargasso Sea
aatgaaaattgacttaggaaaaaatgaacttattcattttgtgggtatcggaggaataggtatgagtggtctagccttgattatgaatggtttaggttacaaagttcaaggtagtgatattgccaataatcgaaatattgaaagactaaacaaaaaaaaaataagaatatttttaaatcataaaaaagagaatattaaaaaaacaactgttatggtgatttcctcggcaattaaaaaaaataatcccgaattagttgaggctattaaaaaaaatttaccagtctatacaagaggagatatgttaggtcatattgtatcttttatgagaaatgttgtcataaccggttcacatggaaaaacaactacaacatcattagtatctagtattttacagcag

SEQ ID NO: 313288 - DNA, 598 bp, Unknown
  Bacterial polypeptide expressing nucleotide sequence isolated from the Sargasso Sea
aatgcaccaatttaagaaaataagaaatattcattttataggcattggtgggtctggaatgatcggaattgcaacaattcttcacaagaaaggatataacatttcgggttcggatatctccaaaacaaaagatctggatgagttagcaaagtcaggcgttgacgtaacttactcgcataaaagcaagaacataaacaataaagacttaattgttttatcctctgcaattgactcttcaaatgtagaggtatcctctgcaaaaaagaaaaatataccaattattcctagggctgaaatgcttagtggtatttccagaggataccaaggaatagcagttgctggcagccatggaaaaacaaccacaacaagcttaattgctcatatctttaatcaagctttattaagtccaacttatgtaattgggggaaaaatactcagttcagatggtaactcacgtcttggtgacgggaattttttcatatttgaggcagatgaaagtgataaatcttttttaagtttttatcctgattccgctgttataacaaatatagatgatgatcatcttgaggcttatgatggcaatattaacaacttgaaa

SEQ ID NO: 313289 - DNA, 704 bp, Unknown
  Bacterial polypeptide expressing nucleotide sequence isolated from the Sargasso Sea
gatgacaattagtttaggaaaaaaagagataattcattttgtaggaataggtgggattggtatgagcggtcttgcattaattatgaaggagcttggttttagtgtaaaaggttcagatcaacaaattggaaaaaatattgatagattaaaaaaaaataaaattaacattcaaattggacacaaaaaaaaaaatttatcaaatgcaactatacttgttatttcttcagctataaaaaaaaataatccagaatatttagaggcaagaaagaaaaaaatacccatctataaaagaggtgacatgcttgcaaacatagtttctttatataaaaatgttgttgttgctggatcacatggaaaaactacgactacatcaatagtatcaacaatcttttcaaagtctaatttagaacctactacaattaatggaggtattattaattcaataggtaactctgctaaactaggaaaaggtgaatggtgtgttcttgagtccgatgaatctgatggtagttttcttaaattaccatttacttattcaattattacgaatattgatgatgaacacctcgaacattatggatcaattgaaagtttaaaaaaaagctttattaaatttgctgaaaaaacaccttcatttggtaagacgctaatttgtgtagatgataaaaataacagatcaattcttagtaaaataaaaaatcaaa

SEQ ID NO: 313290 - DNA, 736 bp, Unknown
  Bacterial polypeptide expressing nucleotide sequence isolated from the Sargasso Sea
attggatcgcgaattaatgctgaaacatcattttcattttattggagttggaggtattggaatgtcagcattagcaatgggtttactcaagaaaggttattcagtttcaggatctgatttagtcaaaaacgatgaaactaataaattagaacatttaggtgcgcttatttttacttctcaaattcaacaaaatattaaatttgtaatttcaaaacataacaacaaattgattaattttgttgtaagctcagccatcaaacaagaaaatgaagaattatcgtattgcagaaaaaataatttagccataaaacatcgttcagatatcctcgcaatgttaatgcagtcttacacctcattagccatagcaggaagccatggaaagacatcaactagtacatttctctctacacttcttgagttatgtacgcataattcttcttcaatcactggcggaataattcctatctacaactcgaattgtcatttagaaaatacaaaatttttagtagctgaagttgatgaatctgatgggacaataagtaaatataaatctgatattggaataataaataatattgattttgatcattgcgatcattttgcaaatttaggtcaagttttatcttcttttaaagatttcgcttcaaaatctcgaaaattattacttaattatgattgtgaagtcacaagaaataatttgtattcagatagtcaatggtcaaacacaacaacaagc

SEQ ID NO: 313291 - DNA, 599 bp, Unknown
  Bacterial polypeptide expressing nucleotide sequence isolated from the Sargasso Sea
actgatacatttcgttggaataggcggaataggtatgagcggcttagcattaataatgaagggcaaaggatttaaagttcaaggaagtgatattttaaataataaaaatattgaaagattgagaaaagaaaaaataaaagtttttattggacataagaaacaaaatattaataaaggaactatcttagttatatcttcagctattaaaaaaaataatcctgagctagttgcagcaaaaaaaaaacaattaccaatatataaaagaggagagatgctcgctaatattgtttctttaacaaaaaatattgttgtagttggttcacatggtaaaactactactacatcattaatagcttcaatatttcaagaaactaaaatagatcctacaataatcaatggtggagtaataaattcaattaataattctgcaaagctagggaaaagtgactggtctatattagaggcagacgagtcagatggaagttttatttttatacccccaacttactcaatcataacaaacatagatcgagagcacatggattattatggcaatatggacaaattaaacaaatattttgaaaattttgtaaataagg

SEQ ID NO: 313292 - DNA, 908 bp, Unknown
  Bacterial polypeptide expressing nucleotide sequence isolated from the Sargasso Sea
cttcattggtattgggggtgtgggaatggttggcattgcagagatgcttataaatcaaggcttttacgttagtgggagtgacctagttaaaaataaaaatactatcaggttgaattccttgggtgcaaaaatttttatcgggcataacgagaaaaacgtaagaaattcagatgttgttgtttattcttctgcagttaatatttctaatcctgagatgaaggctgctaagtctttaaatataactttaataccaagagctgaaatgttatcaagtttaatgaggggatttcaaagtattgcagttgcaggctctcacggaaaaactaccactacgagtttaattgctgatatttttgtcagagcaaaacttgatcccacatttattattggtgggaaaattttaggtcaggaaaacaagagtattttaggaacgggcgattatttaatagttgaggctgatgaaagtgatgcatcttttttgcatttgaatccagaaattagtgtcgttacaaatattgataatgatcatcttgattattatgagaataatcttgaaaaattggattctacttttctacagtttcttgaaaatttacctttttttggaagtgcaataatttgtacagattctgaaagatcgaaaaaagtattcgaaaacttatcaagaccaaaaatatcctatgggtttgataaaaaagcagattattttattaaggatttgaaacaacaggcaaagtttcagaaatttaaaataattcgaaattctacaggcaaggaaatatccttagaattaaccttatctggaaagcataatgcgcttaacgcggcagcagctttcatagttgctcagaaggcaggaataaatacaaaagttattaaagattctttcaaaaattttggtggagtat

SEQ ID NO: 313293 - DNA, 388 bp, Unknown
  Bacterial polypeptide expressing nucleotide sequence isolated from the Sargasso Sea
aatgtccagcataaaaaatattcatctaattggaatcggtggagcaggtatgagcggaattgcagaaattcttcataatcaagactattctgtctcaggaagtgatctcgaggatacaaacgtgacaaaaagactaaaaaatctaggggtaaagatttttaaaggtcacaaagtaaataatgtcttaaaaaaagatcttgtagtgatttcatcagcaatatcaaaaacaaatattgagcttaaaaaagcaatttctctgggcataccagttattcctagagctgaaatgttagccaatcttatgatgcttaaaaatagcattgcggttgcaggcagtcatggaaaaacgaccgtgacttgcataatggcacatattttcaccgaggca

SEQ ID NO: 313294 - DNA, 583 bp, Unknown
  Bacterial polypeptide expressing nucleotide sequence isolated from the Sargasso Sea
attgacttttagaaaaataaaaaatgtattctttgttggtattggcggtattgggatgagtggcattgctgaactgttattgaatttaggctttaatgtatcaggatctgatataactgagaatgataatgttcaacgattaaaaaatttgaatattgatgtaaaaattggtcatagccctagcaatctgaatcaagatacggatgttctagtttattcgagcgcagtgccaatagaaaatcctgagattgttcgtgcacgtcaaaaagggattcctattatacgtagagctgaaatgttaggagagcttatttctgtaaaagaaactagcatagcagttagtggtacacatggaaaaacaacaacatcatcaatgattggaactattctagcatatgccaaaaaagacccaacgatggttgtcggaggtctagttcataatattgacacaaattcaaaattaggtaatggagatatgattgttgtcgaagcagatgaatttgaccgcagttttctggcactcaaaccaacaattggcattattacaaacatagaattagagcatactgattgttatgatgat

SEQ ID NO: 313295 - DNA, 325 bp, Unknown
  Bacterial polypeptide expressing nucleotide sequence isolated from the Sargasso Sea
aagattatagacgattatggccaccatcccgtggagatatctgctgtattaagagcagccaggcaaacggtaactggaaaagtttttgccatccaccaaccgcatcgttatacaaggttaaattcgctatttgaagatttttgttcgtgtttcaacgaggctgattttgttggtataatggatgtttattctgctggagaggctcctatagaaggagcatcacggtccgacttggtgaatgggctagttaggcatggtcatagaaacgttgtctcaatagatcatgaagaggatttggaaaagttgattaggcagcatgcaaaaa

SEQ ID NO: 313296 - DNA, 725 bp, Unknown
  Bacterial polypeptide expressing nucleotide sequence isolated from the Sargasso Sea
aatgaaaattaatagtaacattcattttataggtatttcaggaataggaatgtctggtattgcagaattgatgttagataaaggatattcagttcagggtagtgatatatcagtaaacgacaatactgaaagattaaagaaaaaaggtataaaattttttttaggacacaataaaaaaaatataaaatatgcccatgccatcgtttattcatcagctataaaaaaaaataatcctgaaataagagaggcatatattaaaaaaataccagttctttctcgagctgacatgctttcagaattaatgaaaaataaaaaatctattgccatagctggatctcatgggaaaactactactactagtttggtaggaaatattttcaatgaagcaggtttagatcctactattgtaaatggtggtattataaattctttttctaataataatcgctatggaaaaggtgaatggatgattgttgaagcagacgaaagtgatggtacctttttaaaactcccacatcaaatgtcaattattactaatttggatattgaacacatggatttttataaatcaaaaaaaagtttaattaatgcttttgaaaaatttataaacttgcttccattttatggaaccacaataatgtgttatgatgataagaaccttaaattactaattaataaaataaagactagaaatattttaacttattcaataaaaaataaaaaaa

SEQ ID NO: 313297 - DNA, 934 bp, Unknown
  Bacterial polypeptide expressing nucleotide sequence isolated from the Sargasso Sea
aatgaaaatcgaactagctaaaaaagaaacaattcattttatcggaattggaggtattggaatgagcggcctctctttgataatgaaaagaaaaggatttaaagtccaaggaagtgacattacgtctaataaaaatatagaaagattaaaaaaaaatagaattaaaatttatttaagtcaaaaaaaaaataacttaaaaaatgcaacaattatagttatttcctcagcaataaaaaaaaataatgctgagttaatagaagcaaaaaaaaaaaatttgccaataattaatagagggaaaatgttagcacatattgtttctttgatgaaaaatattgttattgttggatctcatggcaaaacaactaccacatctctagttgcgtcaatttttcaaaaaacaaaattagatcctacaatcattaacggtggagttataaattcaattaacagttcagctaaattgggtcaaagtgactggtcaatattagaagctgatgagtcagatggaagttttattcatatacctcctacttattctattattactaatatagatagagagcatatggatttttataattctattgaagatctcaaaaattattttattgagtttattaaaaaaaccccatcttttggaaagtcatttatttgtttagatgatgatattaattctcagataataaaaaaacttaaaaataaaaatttttatacttacggagtaaatccaaaatcaaattttttaataaggaatgtaaaacaaactgtaaaatatagtgaatttgatttattaattaatctcccaaataaaaaaaaatctattataaaaaaattaagaatacctttattgggaattcataatataagaaattcagtagcagcaactgctgttgctcttacagttggtatttcccaagcagacataaaaagggat

SEQ ID NO: 313298 - DNA, 757 bp, Unknown
  Bacterial polypeptide expressing nucleotide sequence isolated from the Sargasso Sea
atgataattaatttaggaaaaaaagaaacaatccattttgtaggcattggtgggataggaatgagcggtcttgctttaataatgaaagatttgggttttaatataaagggctcagatcaacaaagtagtaaaaatattgaaagattaaaaaaaaataaaataaatattcttattggacataaaaaaaaaaatttatcaaatgcaactatgcttgttatatcttcggcaattaaaaaaaataatccagaatacttagaggctaagaaaaagaaaatacctatttataaaagaggagaaatgcttgcaaatattgtttcgctctataaaaatgttgtagtagctggatcacacggaaaaacaacaacaacatctattgtttcaacaattttttctaagtccaaattagatcctacaacaattaatggtggagtaattaattcaataggaaattcagctaaactcggaaagggtgaatggtgcgtattagagtcagacgagtctgatggtagttttctacagctaccatatacttattcgatcattacaaatattgatgatgaacatcttgaacattatggttctgttaataacttaaaaaaaagctttatagaatttgcagaaaaaacaccctcattcggaaaaactcttatttgtttagatgatgcaaataataaatcaataataaataaaattaaaaatcaaaatataattacttatggattaaatgaaaaatcaaattttagaattaaaaatgtta

SEQ ID NO: 313299 - DNA, 820 bp, Unknown
  Bacterial polypeptide expressing nucleotide sequence isolated from the Sargasso Sea
tttcatctaattcctttttatggttttaaagttttatgcatcgatcatccaatagtccaaaaattaatcccattaaataaagatagaagattattaacgtatggattgtcaactactgcagatgtcaaagctgcaaacatagaatattttgataatcacacaagttttgacgttgttgtgtctaataaaatactatcttcggctgaaacatggaaaaagattactttacctatgcttggaaagcataatgtcttaaattgtcttgcttctatatgtattgctattgaaatgggcatttcagaaaatagtatcaggaatactctaaataattttaaaggtataaaaagacgctttgaaagcaaaggagtaactaatgatggaataaaaattatagatgattatgggcaccatcctgttgagataacttatgctcttagttcaggaagaattttagcaagtaaaaataaattgatagcaatttttcaacctcataggtattcaagattgaaagatctctttgatgagttttgtcaatgttttaacaatgcagattatgtatttataacagatgtttatgcagctggggagagtgaaatagagaattttaataaagaaactcttgctgctggaatttcagattttgggcataacaatgtttcaattatcaataatgaaaatgaaatttgtgataaaatacattctatagcaaaacctaatgatgttgttatctttttaggtgcaggaagtatcaccaaatggtctgagacaattgttcatcaacttaataattcaggattaaagaatgaaaaaattttctgaa

SEQ ID NO: 313300 - DNA, 1057 bp, Unknown
  Bacterial polypeptide expressing nucleotide sequence isolated from the Sargasso Sea
atggcaaaagagaaaattcatatattaggaatatgtggaacttttatggggggattggctatcttaggaaaagaagcaggacttgagataagcggttgtgattcaaatatttatcctcctatgtcagaccatttatcagaaatgggcattgatattatttctggttatgatccttctgatatccctgaagcagatttttatgtcattggaaacactatctcaagaggaaacgctgctttagaagaattacttaatagaaaagctaatcttatttcaggaccacaatggttatataacttcatacttaaagagaagaaggttatagctgtttcaggcactcacggaaaaacaaccaccacagctatgatcgcttggatttttgagtttttaaataaagatgtaggttatttaattgccggaaaaccaaaagatttcaaaaaatctgcacgaaaaggttcggaagatatttttattcttgaagctgatgagtacgacacggcctttttcgataaaagatcaaaattcatccactacaagcctgacactctgattgttaataacattgaatttgatcacgctgatatttttaaagatatttctgctattcatagagagtttcataatttaattagatcaatgcccgagaaggcagaaataatctttcctactgatgacttaaacatagctaaagttttaaatatgggctgttggagtaaacaagaaagctatggatttggagatagagctcaaaatacatacaaagctattgcatctgattattcaaaattaaaatttaaagttggaagtgaggaaggtaaattagaatggcaaatgttaggagagcataatgctagaaatgctatgagcgcgatcttggcaacaaataaatacggaatatccttaaatcaatctttagaagctttatcaaatttcaaaggtgtttcaaaaagacaagatattcttttagaaagtgagaatcttatagtgatggaagattttgctcaccatacaactgctattgagatgactttgtcaggtttaaggcagaaagtataag

SEQ ID NO: 313301 - DNA, 901 bp, Unknown
  Bacterial polypeptide expressing nucleotide sequence isolated from the Sargasso Sea
aatgaaaattgaattagcaagaactgaagttattcactttgtaggaattggtggcataggaatgagtggactttctttaatcatgaaaggtaagggatttaaagttcagggaagtgatattgtatcaaataaaaatattgagagactaaaaaaagaaaaaataaaaatttttataggacaaaaaaaacaaaatctcaaaaatgcaactatagttgtattatcttcagcaataaaaaaaaataatccagaaatgattgaggcaaaaagaaaaaatatacctatcattacaagaggtaaaatgttagctcatatagtttccttaatgaagaatattgttgtagttggttctcatggaaaaactaccacaacatctttagtggcttcaattttaagaaaaactaaattagacccaacaattattaatggtggtgttattaattcaattaaaaacactgcaagactaggaaagagtgaatggtctgttttagaggcagacgagtccgatggtagttttgtccatatacctccaacttattcaattattacaaatatagatagagagcatatggatttttataaaactatggataaattaagaaattattttattcaatttattgaaaaagttccttcatttggaaaatcatttatttgcatagatgataagataagcaacgaacttgtaagaaaattaaatagtcaaaatttttatacttatggaataaataccaagtctaattttttaattaaaaatattaagcaaaataaaaaatttacagaatttgatttaatggtaaatgttcccaataaaaaaaaattattcataaaaaaaataaaaactcctttactcggcgttcataatgttagaaattctgttgctgctgcagcaagtagcttaaca

SEQ ID NO: 313302 - DNA, 1008 bp, Unknown
  Bacterial polypeptide expressing nucleotide sequence isolated from the Sargasso Sea
aatgaaaattgaattagctaaatcagaagttattcattttgttggtataggtgggatagggatgagtggcctttcaatgattatgaagagaaaaggttttaaagttcaaggaagtgatatctcaaataataaaaatattaataggattagaaaagaaaaaatcaaagtttacgttggacataaaaaacagaatataagtaaggctacaattttggttgtttcttcagcaattaaacaaaataacccggaattaattgaagcaaaatcaaaaggtctaccaatatacaaaagaggcgaaatgctagcaaacattgtgtctctttctaaaaatattgtagttgtcggatctcacggcaaaacaacaaccacttctttaattgcatcaatttttcaaaatacaaaaatagacccgacgattattaatggaggagttataaattcaatcaataatacagcaaaattaggtaaaagtgattggtctattttggaggcagatgagtctgatggtagctttatatttattccgccaacttactctatcataactaacattgatagagagcacatggatttttataattcgatgaaaaaattaaataaatattttattgattttgttgagaaggttccatcttttggaaaatcatttatctgttttgatgataagaataataaaaatttaattaaaaatattaaaaagaaaaatttttatacatatggtgaagatcctaaatcaaacttttctataaaaaatataaatcaatataaagaattttcaaaatttgatttattaataaaattaccaaataaaaaaaatcgtttcttaaaaaatataatagttcccctcttaggaaatcataatattaaaaatgcagttgcggctcttgcagtatcgttgtctgttggaatatcaatatttgacataaaaaaaggacttaaaaattttaaaggtgttcaaagaagatttaataagattttttcttttaataatgttgatttttttgatga

SEQ ID NO: 313303 - DNA, 838 bp, Unknown
  Bacterial polypeptide expressing nucleotide sequence isolated from the Sargasso Sea
aatgaaaattgatttaggaaaaaacgaacttattcactttgtaggtattggcggtataggtatgagtggtttagcattaattatgaatggtttaggttataaagttcaaggcagcgatattgcttataataaaaatattgagagactaaatgataaaaaaattaaaatatttttaaatcataaaagagaaaatataaaaaaaactactgttctggttatttcatctgcaatcaaaaaaagtaatcctgaaatccaggaagcaataaaaaaaaatttaccaatttatacaagaggagatatgttgggtcatatagtttctttcatgagaaatatcgttgttactggctcacatggaaaaactacaacaacatctttagtatcaaatatattttcgactagtaaattagatccaactattattaatggcggtgttttaaattcttttggtaattctgctaaattaggaaagagtaattggtgcgtgacagagtctgatgagtcagacggtagttttttaaaaataccttttgtttattctattgtaacaaacttagattatgagcatttagactattataaaaacatatcaaatctaaaaaaaagttttttagaatttatagaaaaaataccttctgttggtaaaggttttatttgtaatgacgataaaaatctaaaagatgttcttaataaatcaaaaaataaaaatttttatacttatggcgaagataaaacatcaaattttcaaataataaatattaaacaaaactttaaactatctagctttgatgtgaaaataaatattccaagtaaaaaaaaaattattaaaaacattaaactt

SEQ ID NO: 313304 - DNA, 1321 bp, Unknown
  Bacterial polypeptide expressing nucleotide sequence isolated from the Sargasso Sea
atgaaagtccatattctaggcatttccggaacctttatgtcaggtatagcaattcttgccaagaaaaaggggcatgaagtaacgggctcggatacttcttgctacgatccgattaagtctattttagagaaagaaaatatatctgtgattaaaggacataaaatcaaagatatcaaagataaagatttaattataataggtaatgtaatgtcacgaggtaacccgatagtcgagtatattttgaaaaacaatataaattacatctcagggccacaatggttatatgacaatattttaaaacataaaaaagtaatagctgtaagtggaacgcatggaaaaactacaactactgccatgattgttcatattatgaaaaaaaataaaatgaacccaagttatttaattggcggatcaccaaaaggtaatttcaaatcagttgctcttacaaattcaagatattttgtcattgaagcagatgaatatgatactgcattttttgataaaagatctaaatttatccattacaatccctttctagctgttattaacaatattgaatacgatcatgctgatatcttcaaaaatatagatgaaataataaaatcttttagtcatatgattagactcataccgtctaacggcacaataatcattaataaaaatgaccataatattaaaaaattactccaaagaggatattggtcgaagttaataactgtagattcaaaaaaaccgtcaggagattttaatttaataaagaaaaaacaatatatgcttaaatacaataataaaaactttttattaccagtgaatatcataggaaagcataactacataaatgctataactgcaattgcagcatgcagagaacttaaggttccaataaatacacaaattaaggctctatcaagttttaaaggcgtcagtaaaagaacagatctagtttgtgagattgatggaattaaagtttttgatgattttgctcatcatccaactgccattaaatcttcgattaactcaattaaggacacatttatagggaaaagggttttaactatattcgtacctggctcaaattctatgagacttggggtgcataatgatcaacttgtaccatccctgaaaaaatcagatagagttctagttttaaccagattcaagccattaaagagattaattggaaataacattaaaataaatgttattgaaactgaagctcaaataagagaatatctcgacaaggaaaataatttcgacattgttctggtgctttcaaacagaaatacagagaacatattacgatacattaagaatggataga

SEQ ID NO: 313305 - DNA, 1117 bp, Unknown
  Bacterial polypeptide expressing nucleotide sequence isolated from the Sargasso Sea
aatttatcaataaaacatcgttcagagatacttgcaatgctaatgggcacttatactacattggcagtagcaggcagccacggaaaaacatcaaccagtacatttctatctacaatacttgagttatgtacacgtaattcttcttcaataattggaggaataattcctatttataactctaattgtcatttagagaatacaaaatatttagtagctgaagttgatgaatctgatgggacaattagcaaatataagtctgatatcggaataatcagtaacattgattttgatcattgcgatcacttttctgatttaagtgaagtcatatcttcttttaaaagttttgctaaaaactctaaaaaattactacttaattttgattgtgaaacatcaagaaataatttttattctaattataagtggtcaaacactacggctaaaaacgtagcttatgcaataattccgactgaaattaattcaaactatacaattggaaaatattatgaaaatggaaattttattagtagtttaaatattccaattccaggattacacaatctatctaatatcactgcagcaatagcagcttcaagaatgataggagtagattttatagaaattaagaaaaatataaaatatctgaaactaccaaaaaaaagatttgaattcagaggccaaatagatgaaagaagtttatatgatgattatgcacatcacccaaacgaaataaaagagacgattaaattaggaagattattgattcagcaaaaacataataatgaatgtcaaaaaagtagattaatagctatatttcaacctcatagatactctcgagtaaagcaatttactaaagaattcgctgaagaattatcaaaagcagatgttatttatgtaaccagtatttatgaagcaggagaagtaaacgaagatcaaattacttcgaaaattatcactgatctgatttataaaaaaaataaaaatgttagttacataaataattattatgaaattacaaagaattttttcgaattgactcaaaaaggggatttaattttgaatatgggagctggtgattgtcataatttctggtcaattttaaatgaaaaaaataattaaa

SEQ ID NO: 313306 - DNA, 501 bp, Unknown
  Bacterial polypeptide expressing nucleotide sequence isolated from the Sargasso Sea
aatgaaaaaaattaatttaggtcaaaaggaattagtacacttcgttggaattggaggtataggaatgagtggtttagcacaaattatgagcaacatgggtttcaaaattcaaggtagtgatatcaataaaaataaaaataccaatagttgtttgaaagcaggaattaaaatttttataggtcattcaaaaaaaaatataaaaaattgcacaattttagtaaaatcatcagcaattaagaataataactgtgaaattgtttatgcaaagaaaaagaagataccagtctactcaagagctgaagttttagccgatgtagtctccttaaaaaaaaatataattattactggatcacatggaaagacaaccacaacatctttagtatctaaaatattatctgaccaaaaactagatccaacaataattaatggtggtgttattaattcatttaacagcaatgctaaactaggaaaaggcgattggtcgatactcgaagccgacga

SEQ ID NO: 313307 - DNA, 901 bp, Unknown
  Bacterial polypeptide expressing nucleotide sequence isolated from the Sargasso Sea
atgaaaattaataaaaaacagttaatccacattataggaataggtggaattggaatgagtggaatcgctgaaattttaaatgggctaggttattccgttcaaggaagtgatttaagtttaaactcaaatattttaagattgagagcaaaaaaaattaaagtatttatagctcattctaagaaaaatcttaaaaatgttaatcttgtcatctattcctctgcaattaagaaaaataatgtagaattaaaatttgctaaatcaaattcaattccttcaatacctagatccaacattctggctcagttagtaagtctaaagaaaaccattgcagtttctgggtctcatggaaaaacaacaacaacctctttaattgcttctgtgttaagtaaatcaaattataggcctactattatcaatggaggtataattaatgaatatggaacaaatactaggttagggtcgggaaaatggatggttgttgaagcagatgaatctgattcgactttcttaaaattatcttcaactatctctattataacgaatatagatgaagaacatttagattattataaaagcttttcaaatttgaaaaaatcattcagtaaatttattacacaagttccattttatggatgtgcaattgtttgcggtgataatgagcacattagaatgattataagcaatatttcaacaacaaagattattaaatatggatttagtagtaaaaatgatgttagagcaacaaatatcagaaccaaggataataaaacaatttttgatatttttatcaaagacgataataagaaaatcaaaaagtataagaatttctccatacctttagttggaaaatataatgttctaaactcattagctacgattgcagttacatcacatataggat

SEQ ID NO: 313308 - DNA, 1354 bp, Unknown
  Bacterial polypeptide expressing nucleotide sequence isolated from the Sargasso Sea
catgtctaaacaaagagttcacatactaggtatttgtggaacttttatgggcggtcttgccttgatggggaaagagaagggtatagagatttctggatgtgatgaaaatatatatcctcctatgtcagatcatctgcaggacatgggcatagaaataattgaaggctatgactccactgaactccctgtcgctgattactacgtaattgggaattcaatctctagaggtaatccagcattggaatatttactctctaaaaagtctaatcttatttcgggtcccgaatggctttatgattcggttataaaaaataagaaggttatcgcagtatcgggaactcatggtaaaacaaccaccacagcaatgatcgcttggatatttgaagataataatgttgatgttggctacttgatagcaggaaaaccgaaagactttgaaaagtctgcaagactcggaagtgaagatatatttgtcatagaggcggatgaatatgacacagcattctttgacaaaaggtcaaaattcattcactacaaaccagatactttggtcttaaataacttagaatttgatcatgcagatatatttcctgatataacttatatctttagagaatttcataacttactaaggactttaaataaggaagctcagattatttttccaaatgatgattcaaatatctcaaaagttctcgggatgggtacctggagtaaattaataagttatgacgttaataataataataataaaaattcagtaatgtttaatgatgactctaagcaaactacctataagattgatcaagaagagggacgaatagattgggaaatgtttggtgaacacaatgcaagaaatgctatggcagcagctttagctgtaaaacaatacgggatttcgctgaaagattcactgtcttcactagaaaagtttcaaggtgtttcaaagagacaagatattcttttggatacagaagaccttatgattatagaggactttgctcaccacccaacagctatcaaaacaaccctagatggtctaaggaagaaatttcccaaaaaacgtttactcgcagcaattgaattgagatcaaatacaatgaaatcaggttttcatgatgagcaattacttcattcagtttccgaagctgacctaatcttctggaaaggagatgattctaaacaagtcaaagggcttattgataagaatccatctaaattttctgacatttgtaatatagataattttgtagatgatatcgattcgttatcttttgctggtgatgttttacttattatgtctaatggaaattttgataacctctctaaaaaacttttgaaaaaatatatttaa

SEQ ID NO: 313309 - DNA, 997 bp, Unknown
  Bacterial polypeptide expressing nucleotide sequence isolated from the Sargasso Sea
aatgaaaattgaattagcaaaaactgaggttattcactttattggtatcggtggtattggcatgagtggactttctttaattatgaaagggaaaggatttaaagtgcaaggtagtgacgtatcatcgaataaaaatatagatagattgaaaaaagaaaaaataaaagtttttattggtcaaaaaaaacaaaatttaaagaatgcaacaatagcagttatttcctcagcaataaaaaaaaataattcagaatacattgaagctagaagaaaaaaacttccaattattactagaggaaaaatgttagctcacattgtttctcttatgaaaaatattgttgtggttggttcacatggcaagaccacaacaacttctttaattacctcaatactgcaaaaaaccaaattagatccaacaattattaatggaggggtaattaattctttcaaaaatactgctaagttaggaaagagtgattggacagttttggaagcagatgagtctgatggaagttttcttcacatacctcctacttattcaattattacaaatatagatagagaacatatggatttttacaaatccatggatgacttagagaaatattttataaattttataaaaaaagttccttcttttggaaaatcatttatttgtttagatgaccctataaataataaaataattaaaaaattagagaatagaaatttttatacctatggacttcattcaaaatcaaactttttaattaagaatataaatcaaaacaaaacctttacagaatttgacatattagtaaatgtcccaaataagaaaagaataaagattaaaaaaataagaattccattactaggtgttcataatgtaagaaattctgttgcagctactgctgttgcaattactattggtatttcaatttctgatataaaaaaaggattaaaaaattttaaaggtgttcaaagaagatttaataaaatatttacttacaaccaatattga

SEQ ID NO: 313310 - DNA, 1324 bp, Unknown
  Bacterial polypeptide expressing nucleotide sequence isolated from the Sargasso Sea
tatgagtggcttagcattaataatggatagtttaggctttaaaatacaaggaagtgacaaatcagataataaaaatcttaatttactaagaaaaagaaaaattccaatttatttaaatcataataagcaaaatataaaaaattgtactgtattagtagtttcatcagctataaaaaaatcaaatccagaatataggcatgctaaaaaattaaacttaccgatatataaaagaggagaattgttaggtcatatagtttctttaatgaaaaatattgttgtgacaggatcacacggcaaaacaacaacaacatcaattttgtcaaacattatgaactacgcaaaattagatccgacaataattaatggaggtgttttgaattcaataggaagttcggcaaaattaggaaaaagcgactggagtttagttgaatcagatgagtcggatggaagttttcttcaaataccttttaattattcaataataactaacattgacaatgaacacttggattattacagaactatgaaaaatttaaaaaataaattcatagaatttattgataaaacaccttctttcggaaaggcttttctgtgtttagatgacaaaaatgtaaaaaatattttaccaaaaattaaaaataacaattactatacatttggtttaaataagaaatcaaattttcatattttcaatataattcagaataaaaattattcaaaatttaatattaaaataaaaataccgggcaaaacaaaaattataaaaaatatttcaatacctttgttaggtttgcataatataaaaaatgcaacatctgcattggcagtagctttttcaattggtgtatcagataaaataattaaattaggtctcaaaaactttaatggagtccagagaagatttaatttcttatttgaaattaataaagtgccatttttcgacgactacgctcatcatccaactgaaatttcatcagtgttagatggtgtcagtaaagtatataataaagaagaaatagtttgtatttttcaaccgcatagaatttcaagagtaaaaaatttaaaaattgaattttctaaatgttttaaaaatgcaaacacagttttactttgtccaatttataaagctagtgaaactataaaattaggattctcatacacttcatttgcaaaattaattgcaaaaaattctaaagttaatctgataatgcttaaaaatgaaatagatttaaaaaaaattactaaaaacattgcattcggaaataaaatttttattgctatgggtgcaggatctataacaaattgggtaagaaatcttaattga

SEQ ID NO: 313311 - DNA, 956 bp, Unknown
  Bacterial polypeptide expressing nucleotide sequence isolated from the Sargasso Sea
aatgaggccttttaaaaaagtaaagaatattcattttgttggtattggtggtgcaggaatgattggtattgcaaaagttctgttacaaaaaggatataagatctccggttcagatatttcagattcaaatgatctacaaagactgcgtaaggatggagcacaagtttacattggtcattctacaaaaaatatcaaaggtgcaaatttattagttgtttcttctgcaataaacaaaaataatccggaacttatccaagctaaaaaagattcaataaccacgataccaagagcagaaatgcttggaagtttaatgattggctatgaaagcatagccgttgctggaagtcatgggaaaactactacaacaagcataatagcaaaaataatgagtgtggctaatttaagtccgacttatgttgttggaggaaaaatattaagcacagatgagaattcagctttaggtgagggtaagtatattgttgcggaggctgatgaaagcgatggatcatttattcatctgcagccagatgtagcagttttaacaaatatagatgatgatcatttaactcactttaacaatatttttgaaaaccttttagattcttttgttcttttttcagagaatgtacctttttatggatatatggttataaatggcgatgataaaaatataaaaaagatttctaaaagaatatccagaacacaaattacttttggagaatcaaaaaaatgtgactatcgaatcacgtctataaaagcttacaaaggtaaacaaaaattcgaaatcgtagataaaaaaattaataaaacacataaatttaaaataaatttacccggtaagcacaatgtttttaatgcagcggcttcaattgctgttgccttagaagaaggaattccgataacctcaattaaacaaggtatatatgaatttactggtgtgggagaaggtagagaag

SEQ ID NO: 313312 - DNA, 853 bp, Unknown
  Bacterial polypeptide expressing nucleotide sequence isolated from the Sargasso Sea
aatcaataacattgattttgatcattgcgatcacttttctaatataagtgaagtcatatcttcttttaaaagtttcgctaaaaactctaaaaaattactaattaattttgattgtgaaacctcaagaaataatttttattctaattataggtggtcaaacaatacgcctaaaagcgtaacttttgcaatagttccgactgaaattaattcaaactatacaattggaaaatattatgaaaatggaacttttattagtagtttaaatattccaattccaggattacacaatctatctaatatcaccgcagcaatagcagcctcaagaatgataggaatagattttataaaaattaagaaaaatataaaatatctgaaactcccaaaaaaaagatttgaattcagaggccaaatagatgaaagaagtttatatgatgattatgcacatcacccaaacgaaataaaagagacgattaaattagggagattattgattcagcaaaaacataataattgtcaaaaaagtagattaatagctatatttcaacctcatagatactctcgagtaaagcaatttactaaagaattcgctgaagaattatcaaaagcagatattatttatgtgaccagtatttatggagcaggagaagaaaacgaagataaaattacttcggaaattatcacagatctgatttacaaaaaaaataaaaatgttagttgcataagtaattattatgaagttacaaagaattttcacgaattaactcaaaaaggagatttaattttgaatatgggagctggtgattgtcataatttctggtcaattttaaataaaaaaaacaatcaaaaaagataa

SEQ ID NO: 313313 - DNA, 898 bp, Unknown
  Bacterial polypeptide expressing nucleotide sequence isolated from the Sargasso Sea
atgaaaattgatttaggaaaaaatgaactcattcattttgtgggtatcggaggaatagggatgagtggtctagctttaattatgaatggattgggctacaaagttcaaggtagcgatattatggataatcgaaatattgaaagattgaaaaaaaaaaaaataaaagtattcataaatcataaaaaagaaaatttaaaaaaaacttctattttagttatttcttcagcaataaaaaaaaataaccctgaggttatcgaggctatgaaaaaaaatttaccaatttacacaagaggagatatgttaggacatattgtatcgtttatgagaaatgtagttgttactggttctcatggcaaaacaacaacaacgtcgttggtttcaagtatttttacatctggcaatttagatccgacaattattaatggtggtgtattaaattcatttggtaattcagcaaaattaggcaaaagtaactggtgtattaccgaatctgatgagtcagatggaagctttttaaaaattccgtttacgtattctattgcaactaatttagattcagagcatttagacttttataaaaatataaataacttaaaaaaatgttttacaaaatttatagaaaaaataccatctctaggtaagggttttgtatgcaatgatgatcataatcttaaaaatattataaggaagacaaaaaataaaaatttttatacttatgggaaagacaaaaaatcaaatttccaaatagtaaatataaaacaaacttctactttttctagttttgatattaaaataaatataccaagtaaaaaaaaaataattaaaaaaattaagctaccaatgattggaattcacaatattcaaaatgcaacagctgcaatttctttggcatttacaa

SEQ ID NO: 313314 - DNA, 407 bp, Unknown
  Bacterial polypeptide expressing nucleotide sequence isolated from the Sargasso Sea
aatgaaaattgaattagctaaaaaagagattatccattttataggtattggtggaataggtatgagtggtctcgcattgattatgattgcaaaaggttttcaaattcaaggtagcgatattaataagaacaaaaatatcgaaaaattaaaaaaacagggtgttaaaatttttattggtcaaaaaaaacaaaatattaaagatgttacaattgtagtgacttcctctgcgataaaaaaaagtaatccagaattactagaggctaaaagaaaaaaattaccaataattaaaagagggaagatgttagcaaatcttgtttcttatatgaaaaatattgttgtagttggatctcacggcaaaacaacaacaaaatctttagtaagttctatttttgaaaatacaaagctaa

SEQ ID NO: 313315 - DNA, 1396 bp, Unknown
  Bacterial polypeptide expressing nucleotide sequence isolated from the Sargasso Sea
aatgaaaattgaattagctaaatctgaaattatccattttataggaatcggtggcattggcatgagtggccttgctttaattatgaaaggcatgggatttaaaattcaaggtagtgatatttctttaaataaaaatattgaaagattaaaaaaaaataatgttaaagttgttattggacatagtataaaaaatattaataagtcaactataatagtaatttcttcagctattaaaaataataatccagaagtcttattcgctaaaaaaaaacagttaccaatttataaaagaggtgacatgctagggcacattacatctttaacaaaaaatataacagttgtaggctcgcatgggaaaactacaactacgtcacttatttcagggattttttctaagacaaagttggatcccacaataataaatggaggggttattaattctttggataactcagcaaagctcggtaaaagcaagtggagtatattagaactagatgaatcagatggaagttttataaaagttttacctacgtattccattattacaaatatagatagagaacatatggattattacaaatcaatggataatttatttagattgttccaacaatttattggcaaggtcccatcatttggtaaatcatttatttgtttagatgataaaaataacaaaaaacttatagataaaattaaatttaaaaacttttacacttacggcataaataaaaaatctcaatttcaaattaaaaatatttatcaatcaaaaaattattccaaatttgatttaaatatacaattacagactaaaaaaaatattttaattaaaaatataaaaattcctcttataggattacataatataagaaatgctacagctgctgttgcagtttcatggattattggaatttcaaaagacattataaaaaaaggtttaaatgaatttaaaggtgtacatagaagatttaatcaaatatttgaatttaggggtgtaaaattttttgatgattacgcacatcatcctagtgaaattaaagaagtattaagtggtgtcaaagatgtttataaacaagaaaatataatttgtatatttcaaccacacagaatttctagattaaaagatcttaaaaaagaatttacactttcatttaaaaaagcagaccaagtgattttatgtcctatatatgcagcaggagaaaaaatgaagttaggatttaattattataattttgccaaaaatattgctaaaaactcaaaagttaaaatttttttagttaaagatcagttaagtttagcaaaatttattaaacagaatatttatggaaaaaaaattgtaataggaatgggagcaggatcaatttctaattggataaaagatttaccaaatttgatataa

SEQ ID NO: 313316 - DNA, 857 bp, Unknown
  Bacterial polypeptide expressing nucleotide sequence isolated from the Sargasso Sea
catgtctaagctaggatttcaaaagtttaaaaaaattcacatgattggtattggtggttcaggaatgattggtattgctactatcctccaaaaaacgggttttaaaatcacgggctccgatctagttatttctgatgaattaaaggaattaaaaaaaattggcgtcaaggttcaaattggacatgaacctgaacttgttaaaaatgctgatttagttgttgcctcatctgcaatatcaaagaaaaatactgaacttttatattctaaaaaatgtggattaacaattattccgagagcagaaatgcttggaactctgatgagaccatatcgcagtattgcaatcgctggaagtcatggaaagacgtctacaacaagcattattgcaagtatttttaatgcagcaaatttaagccccacttatgttgttggaggtcaagtgttgagcgttggtagaagttcaaaccttggagatggaaattatattattgtagaggctgacgaaagtgatggatcatttatgcatttacaacctgatgtcgctgtaataactaatattgataatgatcatctatatttttatgaaaataatcaggacaaactaaaccagtcttttgttagttttgcagaaaatttacctttttatggtcatatcattctcaacatagatgataaaaatatatataaaatttcaagaaatattcatagaaagcagatcacctttggttttagtggaaaaggtagatttcaaattagtgatgcaagctttcaaaatgggtctcaaaagtttaaattaactgacaatctaaataaaaaatgccataacttctctacaaatttaaatggcaaacataaccttt

SEQ ID NO: 313317 - DNA, 979 bp, Unknown
  Bacterial polypeptide expressing nucleotide sequence isolated from the Sargasso Sea
tattcttcttcattctggaggaaaattcctatttacaactctaattgtcatttagaaaatacaaaattcttagtggctgaagttgatgagtctgatgggacaattaacaaatataagtctgatatcggaataatcaataacattgattttgatcattgcgatcacttttctaatttaagtgaagtcatatcttcttttaaaagttttgctaaaaactctaaaaaattactacttaattttgattgtgaaacctcaagaaataatttttattctaattgtaattggtcaaacactacggttaaaaacgtagcttatgcaataattccgactgaaattaattcaaagtatacaattggaaattattatgaaaatgaaaatttaattagtagtttaaatattccaattccaggattacacaatctatccaatatcaccgcagcaatagcagcctcaagaatgataggagtagattttgtagaaattaagaaaaatataaaatatctgaaactcccaaaaaaaagatttgaatttagaggccaaatacatgaaagaagtttatatgatgattatgcacatcacccaaacgaaataaaagaaacgattaaattaggaagattattgattcagcaaaataattataatgaatttcaaaaaaatagattaatagttatatttcaacctcatagatactctcgagtaaagcaatttactgaagaattcgctgaagaattatcaaaagcagatgtaatttatgtaaccagtatttatggagcaggagaaggaaacgaagataaaattacttcgaaaattatcactgatttaatttataaaaaaaataaaaatgttagttacataaataattattatgaagttacgaagaatttttacgaattaactcaaaaaggggatttaattttgaatatgggagctggtgattgtcataatttatggtcaattttgaataaaaaaaattattaaa

SEQ ID NO: 313318 - DNA, 791 bp, Unknown
  Bacterial polypeptide expressing nucleotide sequence isolated from the Sargasso Sea
ttttgaaaatttcatcaatttgctacctttttatggagtatcaataatttgtttagatgataaaaatttacaatatttagttaatagaaataaaactagaaatattattacctactcaattaaaaataaaaaggcagatatattaatctgcaatattgaaagaaaaaaaacaaatacatcatttaaattaagagtaaggacaaataaaatatcccactctaaaaattataaatttacaattaataccataggtaagcataatgttttaaatggagctgcaagtataatagctagtaaaattgttggtgtaagaaattcggtgataaataaatctctttcaagctatattggagtaaaaagacgatttacttttttaggtaaaatcaataaatccataatttatgacgattatgcccatcatcctactgaaattgaagctactttagaatcagcaaaatatttaaaaattaatttagttgtagttttccagccccacagatactcaagaacaaaaatgttaatgagttcatttgtaaaagctctctcaaaagtagatgatttaattattttagatacctattcggcgggagaaaaaaaaatttcaggtgcaacttctaaagatatgtatttgaagttagttaaagttaataaaaatacaatttatttaaaaaacattaaaaacttaaatattatattatcaaagtatactctaaaaaaaaatataataatttttatgggtgcgggatctatatcaactatagctaaagaatattttgcatttaatgagtaaa

SEQ ID NO: 313319 - DNA, 367 bp, Unknown
  Bacterial polypeptide expressing nucleotide sequence isolated from the Sargasso Sea
aatgaaaattgatttaggaaaaaatgaacttattcattttgttggtattggtggaataggtatgagtggtttggcactaattatgaatgggttaggttacaaagttcaaggtagcgatattgcagataatcgaaatattgaaagattaaataaaaaaaaaattagggtttttttaaatcataaaaaagagaatataaaaaaaacaactgttctggtaatttcctcagccattaaaaaaaataacccagaattagttgaggctatcaaaaaaaatttaccagtttatacaagaggagatatgttaggtcatattgtatctttcatgaggaatgttgtgataactggttcacatggaaaaacaacaaca

SEQ ID NO: 313320 - DNA, 441 bp, Unknown
  Bacterial polypeptide expressing nucleotide sequence isolated from the Sargasso Sea
aatgacaaacattagcattggaaaaaaagagttaattcattttgttgggataggtggaattggaatgagcggacttgctcaaataatgaaaactatgggttttaacgttcaaggtagcgacttaggaaaaaataaaaatattgataattgtaaaaaagttggaattaaaatatttattggtcattcaaaaagaaatatttctaaagctactatgcttgttaagtccacagcaattaaaaaaaataatgttgaattagcagaagggagaaaaaaaaaattacctatttatgaaagagcagagatgctcgctaatattgtaacattaaaaaaaaatatcattgttacaggttcccacggaaaaactactactacttcactagtagctaaaatattatctgcttcaagattagatcctactataattaatggaggcgttattaa

SEQ ID NO: 313321 - DNA, 882 bp, Unknown
  Bacterial polypeptide expressing nucleotide sequence isolated from the Sargasso Sea
aatgaaaattgaacttgcaaaaaaagaaaatatacattttgtcggtataggcggtattggcatgagtggtcttgcattaattatgaaaggtatgggatttaaagtgcagggaagtgacatctcaaaaaataaaaatatagatagactaaaaaaaaataaaattaaaatttttacaggtcatagtaaaaaaaatattgatagagcaacaatacttgttatttcttctgcaataaaaaaaaataattcagaagttcagcaagcaaaaattaaaaatcttcctatttataaaagaggagacatgttagcgcacattgtttctttaacacaaaatgttgttgtcgctggatcgcacggcaaaacgactacaacctcacttatttcagggatcttttctaaagcaaaattagacccaactataattaatggcggtgtgataaattctatacaaaattcagcgaggttaggaaaaagtaagtggtgtgttttagagtcagacgagtctgacggaagcttcataaaggttcctccaacatattctgttgtaacaaatatagatagagaacacatggattattacaaatctatggaaaagttaaaaaatcattttttagaatttattaataaagtcccatcttttggaaaatcttttatttgtaaagatgataaaattaatagccaaataataaaaaaaattaaaacaaaaaatttttatacgtatggaacaaagaaagattcaaatttcgtaattaaaaatatcagacgttttagagatatgtcaattttcgatgtaattatatctttaccaggtaaaaaaaaaattacactaaaaaatataaatattcctttgttaggtttgcataatataagaaatgctacagctgc

SEQ ID NO: 313322 - DNA, 1192 bp, Unknown
  Bacterial polypeptide expressing nucleotide sequence isolated from the Sargasso Sea
gtttcctctgccattaataaaaataatcctgaattagttcaagctaaaaagaaatcaattacaacgattcctagggccgaaatgcttgcaagtataatgataggttatgaaagcattgctgtagcaggtagtcatggcaaaaccaccacaacaagcatgatcgcaaaaataataagcaaagcagaactcagtcctacttatgtagtcggaggaaaagttttaagcaccgatgagaattctgatctaggagagggcaaatatattgttgttgaggcagatgaaagtgatggaacatttacacatttacaaccagatgtagccgtattaaccaatattgatgatgatcatttagttcattacaacaatatttttgataacttattagattcatttgtgatgtttgcagaaaatgttccattttacggatatttagtaattaatggagatgatataaatattaaaaaaatatcaaaaaaaatatctagatctcaagtaaaatttggacaatcaaaaggctgtgattatcagataactaaaatatcatcaagcaaaggcaagcaaagttttgaaattttcgatagaaaaaacagtaaagcgcataaatttaaaattaatttacctggtaaacataatgtctttaatgctacagcagcaattgcagtttcaatggaggaaggaattccattaagagcaattaaaaatggaattcaagagttttcaggagttggaagacgttatgaaaaacacgatctagttattaatgaaagaaacattactttaatagatgattatggccatcatcctcttgaaattgagtcaaatattaatgcttacaaagaagaatatccaaataagaaagtttgcatgatttttcaacctcatagatttacaagaactgcacaattatttgatgattttgtaagggttctcagtaaaacagatttattaatattgcttgatatatattctgcaagtgaaaaacctataagaggaatccattcaagagcaatttcggaaatgttagaacaagaaggccataaaaatgtgacgtatctacaaagtcatgatgatgtaaatgatttaattatggataagatagaagattttgatattttagtaactcaaggcgcaggcagtgtctcaaaggtatgtgaatcaataaaaaacaaatggacaaaatcaaaaaaatagc

SEQ ID NO: 313323 - DNA, 487 bp, Unknown
  Bacterial polypeptide expressing nucleotide sequence isolated from the Sargasso Sea
atgaaagttcatattctaggtatttccggaaccttcatgtcaggcatagctattcttgccaaaaaaaaaggatatgaagtaacaggctcggatacctcttgctacgatccaattaagtccattttagagaaagaaaatatatctgtgattaaagggcataaaatcaaagatatcaaagataaagatttaattattatcggtaatgtaatgtcacgaggaaacccgataatcgagtatatcttaaaaaacaacataaattacatctcagggccacaatggttatatgacaatatcttaaaacataaaaaagtaatagctgtaagtggcacgcatggaaaaactacgactactgcgatgattgttcatattttgaaaaaaaataaaatgaacccaagttatttaattggcggatcaccaaaaggtaatttcaaatcagttgctcttacaggttcaagatattttgttattgaagcagatggaatatgat

SEQ ID NO: 313324 - DNA, 1166 bp, Unknown
  Bacterial polypeptide expressing nucleotide sequence isolated from the Sargasso Sea
attcttcaatgtagaggtttcttctgcaaaaaagaaaaatataccaattattcctagggctgaaatgcttagtggtatttctagaggataccaaggaatagcagttgctggtagccatggaaaaacaactacaacaagcttaattgctcatatctttaatcaagctttattaagtccaacttatgttattggaggaaaaatactgagttcagatggcaactcacgtcttggtgacgggaattttttcatatttgaagcggatgaaagtgataaatcttttttaagtttttatcctgattctgctgttataacaaatatagatgatgatcatcttgagtcctatcagggcgatattaacaacttgaaaaaatcttttttagatttttcagataatatccctttttttggatatgtcattgctaattatgacgataaaaatactagggatatattaaaaaaaataaaaagacggataatcacatttggtttaaataaaaagagtgacattataattagtgaaatcaattacttcttcgattatgttgattttaaaattaatataaaagacacaaataaaaaacataaattcaggttatcacttcaggggaaatacaatatttataatgctgttgctgctatagcagttgctatagaggagggaattagtattcagacaatcagggctgcattgaaatctttttctggtgtcgaaaggagactggagagatttaagctaataattaaaaataagcaagttacgcatattgatgattatgggcatcatcctaaagaaatagagcaagtaatagtttctttaagaaggcattttaagaaaaaaaaagttctcatgatttttcaacctcatagattttcaagaacaaaaatgctttttaaggattttatttcaacattaagcaaagttgataaggtatttttattgccaatttactctgcaagtgaaaaagaaattaggggagtttcttcaaaaaatatggcacaaaaattaaatacaataaatggagaagacttttgcagtctcgtaaaacatgaaaatgtaaatgatatggttgagcaatgtatagataaatatgatgttttaataactcaaggagcaggaaatgtttctatggtttcaaagggtttaatcaagaaatggaagatatgaa

SEQ ID NO: 313325 - DNA, 1255 bp, Unknown
  Bacterial polypeptide expressing nucleotide sequence isolated from the Sargasso Sea
tttgcacattcatttcctaggaatttgcggaacctttatggcaagtttagccggaattgcattgcaaatggggtataaagttactggtcaagataaacagtactacgacccaatgaaatcattattaaacgaacttgggataaacgaagaaataagtgttgaggcatctaaaaacttaatacaaagcgatcttgtaattattggaaatgcaatttctcgggggaatcctgcagcagaatatattttaaataatcgtttaaaatactcatctggccctgcatggctttccaaaaatgtattgaaagataaaaaagttatagtaatagcaggaacacatggtaaaacaacaactagttttatggttcagcaaattcttcaagataatggccatgatccaggttatttaattggaggaatatctaacaatacaaataaaagttttaggtattcccactcagagtattttattattgagggtgacgaatatgatacagctttctttgacaaaagatcaaaattcatacattacaaacctcatattcttggaataacaaatattgaatatgatcattccgatatattccaaaatttagacgatatctataagcaatttcagaacctttttagagtaatgccaacaagctcaatcgtcctttcccaccatataaatactaatataaaaaaattgactaagtcacagttctggtctaagactaaatttcttgaaaaagaggaccttcaaatttcaaatttactaggtaagcataacaatgaaaatgcgacacttgctataaatattgcatcacagctaaatatagataaaaaagaatctacaaaatctttacaaaagtttttaggagtaaagagaaggttagaaataatatataataaagactttattgtttatgatgatttcgcacatcacccaactgaaattaaggcaagtgttgaaactataaataaattatataataaaaataaaatacattacattttacaaattggttcaaatactatgatctctggagagcataaggatgcattaataaatatattttctgaaacagaaaatttatatttgtatacgcctgatcagacagactggttgcctaataattacttaagtatttcttactcatctttgaaagatttaactcgagatctttttgaagaagtcaacaaagaagatgttgtggtatttatgtcaaataaaaattctgaagaatttataaatttggtttacgactatggataa

SEQ ID NO: 313326 - DNA, 607 bp, Unknown
  Bacterial polypeptide expressing nucleotide sequence isolated from the Sargasso Sea
atgaaattttttaaaaaagtaaaacatatccattttgtaggaattggtggagcgggaatgataggtattgccaaagtattgctgaaaaagggatacaaaatatcaggttctgacatatcagattcacttgaattaaggaaattagaaaaacatggtgcaagggtatttattggtcattcatctaaaaatattaatggagcagatttattggttacatcatcagctataagcaatagaaatcctgaattagttcaggcaaaaaaagagtcaataacatcaattcctagagctgaaatgcttggaagcttgatgataggatatgaaagtattgctgtagctggaagtcatgggaaaacaactaccacaagcataattgcaaaaatattaagtgttgcaaatttaagtccaacttatgttgttggaggaaaagttttaagtactgatgagaattcagatttaggtcaaggaaaatatattgttgctgaggcagatgagagtgatggctcgtttgtgcatctccaaccagatgttgcagttttaacaaacatagatgacgatcatcttgttcattttaataatatatttgagaatcttttagattcatttg

SEQ ID NO: 313327 - DNA, 1074 bp, Unknown
  Bacterial polypeptide expressing nucleotide sequence isolated from the Sargasso Sea
tatgcatattcatatcttgggcatatgcggaacattcatgactggaatagccaccttagctcaatcattgggtcatgaagtcacaggaagtgatacaaatttctatccaccaatgagcaatcatcttgaaaatatgaagattgaagtaactaaaaattatgggtcatctcaattaaaaaataagcctgatcaggttattgtcggtaatgttatgacacgtggtcatgaggttattgagagtttgctcgatagtcatatcccatttacatccggacctcaatggctatatgaaaatatactaagggaaaaatatgttatagctgttactggaacacatggtaaaacaacaactacatctatgttgtcttggattctcgaggataataattatcaccctagttttcttataggtggtgctccaagagattttgactcttcagccaggctaacagcctctaaattctttgtaattgaaggtgatgaatatgacagtgcattttttgataaaaggccaaagtttattcattaccacccaaagattagcataataaataatatagaatttgatcatgccgatatttacaaagacctcaaagaaattattttccagtttcatcaattaattaggcttgtgccaagcaatggaaaaatcatttataacggtgatgacaaaaatacagctgatctgattgattttggacattggtgcaatacagaatcttatggttcacactcagattctgaatggaaagctgatttcggaagtagagataatattgagatttgccataataattttgatcactatagttcagattggttattaaaaggttcatacaataaggagaatgcgctcagtgccatcatagcagcaaacacaataggtatatctccggataaatcattagattcacttaaacggttttctggtgttaagagaagattcgagttgcttggaaactttaatgggttagttatatatgatgattttgctcaccatcctacctcaataaagagaacacttgatgatattgctgagctctacccagataaaatcatatctgtatcaataga

SEQ ID NO: 313328 - DNA, 814 bp, Unknown
  Bacterial polypeptide expressing nucleotide sequence isolated from the Sargasso Sea
aatgaaaattaaattagcaaaaactgaattaatacattttattggcattggtggcattggtatgagcggtttagctttaataatgaaaggcaaaggatttaaggttcaaggtagcgatatctctattaataaaaatattgaaaggcttaaaaaagaaaaaataaaagttttgataggacataaaaaaaaaaatataaataatgcaacaatattagttgtatcttcagctataaaaaaaaataatccggaaatgttaggggcaattaagaaacagctgcctatttataaaagaggcgaaatgttagcaaatattgtgtctttaacaaaaaatattgttgttgtgggctctcatggcaagactactaccacatctctaattgcttctatttttcaagaaactaaaatagatccaactatcattaatggaggtgtaattaactctataaatagttctgcaaaacttggtaaaagtgaatggtcaatattagaagctgatgagtcagatggtagttttgttcatacccctccaacatatgcaatcataacaaatattgatagagaacacatggactattatggttctatggataaattaaataaatattttgtaaattttgttaacaaagttccatcctttggaaaatcatttatttgtttagataataaaaataataaaaacttattaaaaaaattaaaaaataaaaatttttatacttacggtatagacaacaattctaactatagtattaaaaatataaaacaatttagagaatattcggagtatgatttaaaaattagattgcctaataagaaa

SEQ ID NO: 313329 - DNA, 888 bp, Unknown
  Bacterial polypeptide expressing nucleotide sequence isolated from the Sargasso Sea
aatgttcaggcatgtgaaaaaattgcattttgtaggtattggcggtattgggatgagtgggatagctgaattacttttgaaccaaggatttaaaattacaggttcagatataaatgattcaaaggtcattcggaacctaaaagataaaggtgctgaaatttttattggacatgatactaaaaacttaactgatgcagatgtattagtttattccagtgcagtaaatacagacaatccagaaattatttctgcaatgaataagcatatacctattattcgtagagcagaaatgcttggcgaattaatagcattaaaagaaacaagcattggggttgctggtactcacggtaaaaccagtacttcttcaatggtgggtgcaatgttaagcaaagcaaacttaaatcctactttggtagttggaggtctagttcggaatattaataccaattcattactaggtgaaggtgaaataatagtagtagaagcagatgagtttgatagaagctttttatcgttgcaacctacaattggaattataacaaatattgaacttgagcatactgactgctatgaggatatatatgatttacaaaatgcttttacacaatttgcaaatgcatctcctttttatggtgcggttattattggtaatcaaagtccagcagcggcagatattattcataatattaaaagaccattaatcacttttggattaacgaaaaaaagcgatttctatgctagtgatatagcacataataaatccgaaacaacatttgcagttttttataaacaaaaaagacttggggtgattcatttacaagttccaggtgaacataatgttgtaaatgctcttgcatctgttgctctgggtgtggagatgaatatccc

SEQ ID NO: 313330 - DNA, 182 bp, Unknown
  Bacterial polypeptide expressing nucleotide sequence isolated from the Sargasso Sea
tatgaccaaggttgaactggcaaaactgcgtaccgttatccctgaaatgcgccgcgtgcgtcgcatccacttcatcggcatcggtggtgccgggatgggcggtatcgccgaagtgcttgccaacgaagggtatcaggtaaccggctcggatctggcccgcaatgcggtgaccgagcgactcg

SEQ ID NO: 313331 - DNA, 802 bp, Unknown
  Bacterial polypeptide expressing nucleotide sequence isolated from the Sargasso Sea
ttggataaaaaattacttttgaaaagtcattttcattttattgggatcggaggtattgggatgtcagcattagcaatgggtttacttaaaaaaggttgttcagtttcaggatctgatttagtaaaaaacgatgaaactaataaattggagaaactaggtgcattaatctttacttctcaagttcgacaaaatattgaatttgttacttcaaaatttaccaacagattgattaattttgttgtaagctccgcgatcaagccagaaaatgaagaattttcgtattgcaaagaaaaaaatttatcaataaaacatcgttcagagatacttgcgatgctaatgcgcacttatacggcattagcgatagcaggcagccacggaaaaacatcaactagtacatttctttctacgatacttgagttatgcacgcgtaattcttcttcaataactggaggaataattcctatttacaactctaattgtcatctagaaaatacaaaatacttagtagctgaagttgatgaatctgatggaactattgacaaatataaatctgatattggaataatcaataacattgattttgatcattgcgatcacttttctaatttaagtgaagtcatatcttcttttaaaagtttcgctaaaaactctaaaaaattattacttaattttgattgtgaaacctcaagaaaaaatttttattctaattgtaagtggtcaaactctacggctaaaaacgtagcatatgcaataatcccgactgaaattaattcaaagtatacaattgggaaaatattatgaa

SEQ ID NO: 313332 - DNA, 739 bp, Unknown
  Bacterial polypeptide expressing nucleotide sequence isolated from the Sargasso Sea
taataataatttaaaatctttacttaataaatgtgaaaagaaaaattttttaacttatggttttaacaaaagatctaattatcaaattataaatgtaaaaaaatatataaactattctatttttgatttaaaaataaaatttgtcggagataaaacctatacaataaaaaatataaaggtaaatttattgggcaatcacaatattagcaacgcaaccgcttcggtagctattgccttaaatcttggaattaaattagataaaataaaaaaagcattaaaaaaatttttaggtattcaaagaagatttacaaaaatattttcacttggaaaaatagaattttttgatgattatgctcatcatccaaccgaaataagagcagttataaatagttcaagagaagtttataaggataggaaaataattagtgtttttcaacctcatcgatattcaagagttaaagctcttaaaaatgaatttgcatcatcatttaaatctgcagattcagttgtactttgtccagtttattctgctggtgaaaaaataaaatataattttaatcagaaaagatttgctaaactaatttcaaaaaaatctaaaattcaagttattaatattaagaatcaaaatgaactaaaaaattattttagaaaaaatttattaaaagatgaaatagtcatatgcatgggagccggaagtatttcaaattggataagagaaatagcaagtgaacttaaatga

SEQ ID NO: 313333 - DNA, 253 bp, Unknown
  Bacterial polypeptide expressing nucleotide sequence isolated from the Sargasso Sea
tatgggacgagttaagcatatacactttattggtattggtggtgctggtatgggagggatagcagaagttttaaaaactttgggttatgaagttagcggttcggatattaaaaaaacttctataacaaaaaggttagaatcattaggcataaaagtatcaattggacataatattaggaacataataaatactgatgttgttgtacgtacaagtgcaatcaacgatgataacgaagaattagtggctgcaaaa

SEQ ID NO: 313334 - DNA, 1180 bp, Unknown
  Bacterial polypeptide expressing nucleotide sequence isolated from the Sargasso Sea
gagcttggcttcaaggttcaaggcagtgatcttttatacaataaaaatattgaaagactaaaagaaaagaagataaatatttttctaaatcataaatcaagtaatattaaaaaatgtacaattctagttatttcatctgctataaaaaagagtaatcctgaactaaagcaagctataaaattaaagttgccaatttataccagaggcgaaatgcttggtaatatagtttctttaatgagaaatgttgtggttacaggatctcatggaaaaaccacaacaacttcattgatatcaagtatttttacacatgcaaaattagatccgacaataattaatggtggtgttcttaattcatttggtaactctgctagattaggtaaaagcaattggtgtattattgagtccgatgaatcagacggtagttttctaaaaattccttttacatattctattattacgaatattgattcagaacatttagatttttataaatctttgaaaaatttaaaaaaaaatttttctaaattattaaataaaacaccttcattaggaaaatcatttatatgttttgacgatttaaataatagagatattttaaaaaaaataaataataaaaatttttacacatatggaacttcagcaaattgtaattttcaaataacaaaaatattgctaagaaccaaatattctaaatttaatttaaaaataaatataccaggcaccaaaaaaataataaagaatataaaattaccattactaggttttcataatatcagaaatgccgcctctgctgttgcggttagctattcaataggtgtttcagaaaaactaattaaaaaaggtttatcaaaatttaaaggtgtacaaagaagatttaattatttatttgcatataatgacacaattttctttgatgactatgcacatcatcctacagaaattaagtcggttctagaaggagtgaaaaaggtttataaaaaaaaagaaatagtttgtatttttcaaccacatagaatttcaagggtaaaaaatcttaaagctgaattttctaattgttttaaaaaagctaacacagttttattatgtccaatttataaagccggagaaaatctgaagttaaacttttcatataattcatttgcaaaattaataattaaaaattcaaaagtaaatttgataa

SEQ ID NO: 313335 - DNA, 1000 bp, Unknown
  Bacterial polypeptide expressing nucleotide sequence isolated from the Sargasso Sea
attgaaatcaaactatagccaaggaatttatgagcatacaattagtaccttaaatcatgtacataatggtattggtggttctggcatgagctctattgcaaaatatttatttcaaaagggtatagaagtttcaggatatgatcaaagaagttcatatataactaatcttcttaataatgacggtataaaagtagattacgatatctctaactctaagtacaacagtgaaacattatatattgtttcatcagcaataaatatggaaactactttcttaggtgattttgtgaataaaccaaatgttttaaaaaggccagattttctgaaattactatcagaatctgttgacgtaatcggagtaactggaacacatggtaaaacatctacaactgccttacttgctcatatatttaaatttaatgatattgacatatcatatatatatggtggtgttacctcatttaatggcattggaggccattatggtgatgaaaatcttcccttaatactagaaactgatgaagcattcaatacttttaaagatattcaaattaaaaacttacttgtaacaaatatagaccatgatcatattgattattttcaatcttttgaaaatttagttaaagcttttaaacatgttatttcaaatgttgaaggtcagtgcgtaattaatgttgatgatgatcaattgtcaaaactaataagaccagaggacatttcatactcattcactaaagattccaattacaaattaaaatcatatacgaattttgaatatgagggaaaaaagttcaaaattaaaacaaaactaataggggatcactttatttcaaatattattggagcaattgctttagcaaatttgaatggtttatcaatagagcaaagcttgaatgcaattgaacatttcacaggagtgaaaagaaggactgagtttattggggaatttaatggcgtacatttttacgatgattatggacatcatcaaactgaaaattaa

SEQ ID NO: 313336 - DNA, 1051 bp, Unknown
  Bacterial polypeptide expressing nucleotide sequence isolated from the Sargasso Sea
catggtaaaacaactacaacaagcatgattgcgaagattttgagtgttgcaaatttaagtcccacttacgttgttggtggaaaaatattaagtacagatgagaactctgatcttggagagggcaaatatatagttgcagaggctgatgaaagtgatggaacatttgtgcatatccagccagatgtagcagtattaacaaatatcgatgatgatcatctagtccattacaaaaatatttttgaaaaccttttagagtcatttgttatgttttcagaaaatgttcccttttacggttatttgatgataaatggagatgataagaatattaaaaaaatctcaaaaagaatatatagaacaaaaatcactttcggtgaatcaaaaagctgcaattatcaaattaataatattgtgcctaatgctggaaaacaaagctttgaaatatatgataaaaaaaataacaagaattataaatttaaaatcaatcttcctggaaaacataatgtttttaatgcagctgcttcgataggagttgcaatggaggaaggcattccaatcggatcaataaaaaaaggtatatcatccttttctggtgttgggagaagatatgaaaaacataagattaaaattgattctaaattaattactttaatcgatgattatggacaccatcctcttgaaatagaatcaaacataaaagcctataaagaagaatatcctaagaaaaaagtttgtatgatttttcaacctcataggttttcaaggactgcacaactttttgatgattttgtcaaagttcttaatagaacggactctttaatattattggatatttattctgcaagcgaaaaacctatcagaggaattcattcaaggactattttagaatcaataaaacaattaggccacaaagatgttacatacctaaaaaaccataaagatgtgattaatttacttaatcaaaaaaaagattctttcgatgtattagtcactcagggcgctggcagcgtatctaaagtatgtgaaagcataaaagataaatggaaagcataaa

SEQ ID NO: 313337 - DNA, 227 bp, Unknown
  Bacterial polypeptide expressing nucleotide sequence isolated from the Sargasso Sea
attgaataaaaaattaataagtaaaaatcattttcattttattggcattggtggtattggaatgtctgcaatcgctatggcattaataaaaaaagggtactcagtctctggctctgatttagttcaaaataaagaaacaaaaagtttaaaaagattaggggcaataatttttgattctcaaattaaaaaaaatattgattttgtgatttcaaaatttcaggatcaga

SEQ ID NO: 313338 - DNA, 1198 bp, Unknown
  Bacterial polypeptide expressing nucleotide sequence isolated from the Sargasso Sea
cagggctacgatgcttccctgatacccgatgcagatagatatgtcatcggcatttctatttctcgagggaatccagcacttgaatatctcttatccacgaaggctgatttaatttccggacctgattggttatataaaactattctaaaagataaaaaggtaattgctgtctcaggaacccacggaaagacaacaacaactgcaatgattgcatggatatttgaagatcaaggcatcgatgtaggatatttaatagcaggaagaccaaaagattttcataaatcagctagaagaggtaaggatgatgtattcgttatagaagcagatgaatatgacacagcttttttcgataagagatcaaaatttattcactataaaccagatactttaatcattaataatctagagtttgatcatgctgatatatttccagacatatcgtatatatacagagaatttcaccatttaattagaactcttaaagaggaggccaaaataatatttcctaccgatgatttaaatatttccgaggttctcaacatgggctgttggagtaaattgataagctatggaataaatgggcaacatgaaaattccatctctttttcagaagataacacaccaatactgcttaggattgctggagacgaaggacaattagattggacaatgctaggagaacataatgctagaaacgcaataactgcagtcttagcagctaaacaatatggcattgagatcaaagatgctttgaattctttgaaaaaatttaagggagttgctaagcgtcaagacttactttttgaagatcatagactggtattgattgaagattttgcccatcatcctacagctataaagagcacgcttgagggcataaaaaagaaatttcctaataagagattaattgctgcaattgagttgaggtccaatacgatgaagtctggatttcatgataataacctcgtagaggccattgctgctgcagataaggtattctggaagagtgaagactttactcaaacggaaaaattagtaggtgcagtaccttccaaatcctcgcaaattattaacattagtgaattcgtgaaagagtttaaaaagcttaatcaagcggatgatctcttggttgttatgtctaacggtaattttgataacctcactaaattacttttaaaggaatataaaaatgactgaa

SEQ ID NO: 313339 - DNA, 464 bp, Unknown
  Bacterial polypeptide expressing nucleotide sequence isolated from the Sargasso Sea
agattctttgaatgcaattgaatcatttgcaggtgtaaaaagaagaatagaacttattggtatatctaaaggtgtattaatttacgatgattatggtcatcatcctacagaaatggaagcaactataactgcattaaagcagcaaactaagagtaaactttacgttgtatttcaacctcataggtatacaagaacaatggagtactttagttcatttaaagattcactaaaattagcagattttgcaattgtaactgatatatatccggctggagagtctccaataccaggaatatctagtaaaaacttcgaagaagaaagtataaagtatttaaagtcgataaggtatgtacctgaatatttatccaaaaaagtacaaaatggagatatagtattaacactaggagctggtgatattaccttacttggtccaaaaatattaaaatatttaaatgaatattaat

SEQ ID NO: 313340 - DNA, 238 bp, Unknown
  Bacterial polypeptide expressing nucleotide sequence isolated from the Sargasso Sea
attggataaaaaattactgttgaaaagtcattttcattttattgggattggagggattgggatgtcagcattggcaataggtttacttaaaaaaggctgttcagtttcaggatctgatttagttaaaaacgatgaaactcaaaaattggagaaatcaggtgcagtaatctttacttctcaaattcgacaaaatattgattttgttatttcaaaatttaacaacaaattgatttatttt

SEQ ID NO: 313341 - DNA, 223 bp, Unknown
  Bacterial polypeptide expressing nucleotide sequence isolated from the Sargasso Sea
atgaatacctcacaatataaacttaacaatatccatttcgtaggtattggtggcagcggcatgagtgggatagcagaagtgctaaataatcttggttacaaggtatcaggttcagacagtgtcccttcatcaaatactgataggcttgagaagttaggcataactattagctatgatcataatcaaaacaacctaacagatgttgaaatggtggttatatcaa

SEQ ID NO: 313342 - DNA, 876 bp, Unknown
  Bacterial polypeptide expressing nucleotide sequence isolated from the Sargasso Sea
gtgagattttcattgttgaagctgatgagtatgataaaacatttttaaaaatgaagccaaatattgcatcaatattaaatgttgatggagatcattatgatatatatgatgacattgatgatatcaacaattctttcaaaaagtttgcgaatagtttaaagaaaaatggaatattatttcataattcaactttaaattttaatggaattacatttggtgaggattctttcgcagacgctaaaataatcaataagaaaaattataatgatagattgatttttgatattcaatatcaaaataatgtttataaaaatattgttttaaatatgttaggtgatcataatgcctttaatgcaatggcagctttcataatcgcaatttcattagacattgaatctgaagttataataaaagcattaaaatctttcccaggtattaagagacgattctctgttgagttaaaaaatcccaagatttttattgatgactatgctcatcatccaagtgaaatagagtcaatatataattcagtaaaatctttataccctaacaaaaagaaactagtaattttccaaccacatcttttttcaaggactagggattttttaagagaatttgctgaagcacttgaaaagtttgacaaaatagctttattagatatttatcctgctagagaggagcctataaatggggtatcatctaaatcaatttttgataaaataaataataaaaataaagtgcttattaaaaaaagtgaaattccagaattattatttgaagatgaacatgaattggttatatcaatgggtgcaggtgatattggagatttagttgaaacaataaaaaaaacaataattgatcaaaatgaaaattaaa

SEQ ID NO: 313343 - DNA, 1160 bp, Unknown
  Bacterial polypeptide expressing nucleotide sequence isolated from the Sargasso Sea
aaaaaataaccctgaactaatagaggcaatgaaaaaaaatttaccaatttatacaagaggagatatgttgggtcatattgtatcgtttatgagaaatgttgttgtaactggttcacatggaaaaacaacaacaacatcgttggtcgcaagtatttttacatcaagtaatttagatccaactattattaatggtggtgtattaaattcatttggtaattctgcaaaattaggcaaaagtaactggtgtgtaactgaatctgatgaatcagatggaagctttttaaaaattccctttacatattctatcgcaaccaatttagactctgaacatttagatttttataaaaatataaataatctaaaaaaatgttttacaaaatttatagaaaaaataccatctgtaggtaaaggttttgtatgtaatgacgatcaaaatcttaaaaatattataagaaagacgaaaaataagaatttttatacatacggtaaagataaaaagtcaaatttccaaatagtaaatgtaaaacaaacttctaatctttctagttttgatattaaaataaatataccaagcaaaaaaaaaattattaaaagaattaagcttccaatgattggaatgcataacattcggaatgcaacagcggcaatttctttagcatttacaataggattgcctgaaaagtgtatcaaagctggaatatataactttaaaggtgttcagagaagattttctcatttatttgattacaataatataagtttttatgatgattatgctcatcatccaacagaaataagttcagttttaagtggtgttgaaaaagtttataaaaataaggaaattgtttgtgtttttcaacctcacagaatttcgagagtaataagtttgaaaaaagaattttcaaaatgttttaaaaaagcggatacagttttattgtgtcccatttacgcagctaacgaaaaacttaggcttaattttacatatcattcctttgcaaaattaataataaaaaactctaatgtcaggttaatacaagttgaaaatgaattacaattacaaaagtttattaaacagaacgtatttggtaaaaaaatttatataggaatgggtgcaggatctatatcaaattggatgaagaatttgaaaaacatcttttaat

SEQ ID NO: 313344 - DNA, 457 bp, Unknown
  Bacterial polypeptide expressing nucleotide sequence isolated from the Sargasso Sea
atgaaaattaatctaggaaaaaaagaaataatccatttcattggcataggaggcattggtatgagtggattggcattaataatgaaacaacttggttttaaaatacaaggaagtgatatttcagtaaataaaaacattgaaagacttaaaaaaagtaatatcaaaatttttacaaaacacaaaatttccaatctaaacaaggctaatattattgtcatatcctcagcaattaaaaataataatattgagctaaacgcagctaagaaaaaagatttaccaatttacaaaagaggagacatgcttgcacacatgacctcattaaaaaagaatattgttgttgcaggttcacatggaaaaactactacaacctcattgattgcaaatgttttttcaaaagccaagttagatcctacaataataaatggaggtgtgataaattcaattaacaactcggcta

SEQ ID NO: 313345 - DNA, 266 bp, Unknown
  Bacterial polypeptide expressing nucleotide sequence isolated from the Sargasso Sea
catgaactcactaaccaagcttccaataaacataggagcaatacattttgttggtattggtggtattggcatgtcgggtattgctgaagttttattaaacttgaattataaagttcagggttctgatatcaaaaaaagcccgatcacagaacgattagaaaaattaggcattagaattttctatgaacatgacgcctcgaacctcaaaaaagcttctgttgtagtggtttcatcggcagtcgcagaatctaactcagaactgatgg

SEQ ID NO: 313346 - DNA, 804 bp, Unknown
  Bacterial polypeptide expressing nucleotide sequence isolated from the Sargasso Sea
atttatgaaagagttgaaatgctttctaatgttgtagcacttaaaaaaaatatagtaatcactggatcacacggtaaaactacgacaacttctttggtcgcaaaaatattatctatgacaaaacttgatcctactattatcaacggcggagttataaactcaattaaaaataatgctaaacttggtaaaggtgattgggcagttttagaagcagatgagtctgatggcagctttttaaaactaccaattaattattctatcgtcaccaatcttgatgaagaacatattgatttttataaaaattataaaaatttagaacaaagttttttaaaatttattcacaaaactcctccaataggaaaatgtattatttgtttagatgatcctaatataagaaaattaaaaaaatcgattaaaattaaaaattttattacatacggctttcaaagagatgttgattgtagaattgttaacccaaagtatgcattagacaaatgtaaatttgatttaatattaaaagaatctaataaagataaaaagtcaattaaaaatattactttgaatttattgggagaacataatattcttaatgccactgccgcaatatgtgtttgtttaaatcttggagtttcaatccaaattataaaaagagctttaatgacgttttcaggagttcaaagaaggatgactaaaattttttcattaagaaataatactttctacgatgattatgctcaccatccaactgagatatcatcagtattagaaggaataaaaaaagtttcaaaaaataaaaaaattact

SEQ ID NO: 313347 - DNA, 967 bp, Unknown
  Bacterial polypeptide expressing nucleotide sequence isolated from the Sargasso Sea
gatgccacggccaaggtggcaggctgctgcctggagttggtccatgcgtgagttcgtacgacatgtccattttgtcggtatcggcggtgccggtatgagcggcatcgccgcggtgttgatcgatcagggttacgaggtgagcggatcggatcaggcggactcggcagagacccgccatctttccaaaaagggcgcccaggtgtggctcgggcacgatgcggctaacgtaaagggtgccgatgtcgtggtggtctccaatgccatcgacagccataaccctgaagtgattgctgcggctgatcagggaatacccgttgtgcctcgggctcagatgctgggagaactgatgcgctttcgaaacggcattgccgttgccggcacccacggaaagacgaccgcaacgagtctgattgcaaccgtctttgctgaagcgcaactcgaccccactttcctggtcggcggtcttgtcaaaagcgaggcaggcaatgcccgtttgggtaacggacgatggctgattgccgaagccgacgaaagcgacgcgtcatttttgcatctgcagccgcatattgcggtagtgaccaatattgataccgaccacatggcgacttatggcggtgactttggtcagttgacggacaccttcttgaagtttttgcacaatctgccgttctacggtttggcggtattgtgttcggatgactccgtaattcgcgatcttcggccgcatatccgaagacctgtagtcacttatggggtagaaccgcaggcggactatcaggcaaccgatatccgccaacacggtacccgcatgcagttcgccgtttcgctgacggacggtagtgctatagcagtggatctggctttgccgggactgcacaacgtccgtaacgccctcgctgccatcgcggtcgcggacaaggtcggtatttcaccggattcaattgtaaaagggttgcgcaatttgcgg

SEQ ID NO: 313348 - DNA, 646 bp, Unknown
  Bacterial polypeptide expressing nucleotide sequence isolated from the Sargasso Sea
gatgtattaatctttgacattatacaaaacaaactaaaaacttcttttaaattaaaaattaacaacaaaattattcattcttctaattataaatttaatatcaatgcaattggcaatcataatattttaaatgcaactgcaagtattattgcagccaaactaaatggaataaaagataaagatattaataacgcgttgactaattatgtaggtgtaaaaagaagattctcctttattggaaaaaaaaataaatcctttgtgtacgatgattatgcacatcatccaacagaaattgcagctacattaagtgcagctaaaagtctaaaaaataaagtggtagttgttttccaaccgcacagatacactagaactaaaatactaattagagaatttgtaaaagttttatctaaagtcgatcatttaattttattagaaacctattcagctggagaaaagactatcaagggtgcaacttcaaaagacatatatttaaaaatactaaaaaaaaataaaaatactacatatttaaagaatataggtgatttaaataaattaatgaaaccgcatacaatgtatcaaaataccattatttttatgggcgcaggttcaatatcaagtattgcaaaaaaatatttgagtaactaat

SEQ ID NO: 313349 - DNA, 571 bp, Unknown
  Bacterial polypeptide expressing nucleotide sequence isolated from the Sargasso Sea
atgttaagaagtccagaaaatttaggaattatacactttatcggcattggcggcattggaatgagtggaattgcagaaatattaattcaatcaggatatattgttcaaggaagtgatattaacgaaagtaaaaatactgccagattaaaaaaactaggaataaaaatttttataggccaccaaaaatcaaacataaaaaatgcaaaaataattgttgtttcaactgcaatttcacaaagaaatgaagaacttgtaaaaggtaaaaaaatgtttcttcctatagttcatcgagcagaaatgttgggtgaattaatgcgtttaaagcaatcaattgcaatagctggtacacatggaaaaactaccactacatcattaattgctaaaatgattgaagagaatggaatggatccaaccataataaatggaggaataatttcttctttgggtagcaatgcaaaacttggaaaaggaaaatggatggttgtagaggcagatgaaagtgatggtagttttgcaaaattaaatcctacagctgcaatagttactaatatagatttagaacatttagatt

SEQ ID NO: 313350 - DNA, 893 bp, Unknown
  Bacterial polypeptide expressing nucleotide sequence isolated from the Sargasso Sea
aatgcaaattaacagcaaaattcattttataggtatttcaggaataggaatgtctggtattgcagaattgatgcttgataaaggatattccattcagggtagtgatatattagtaaacgacaacacaaaaagattaaagacaaaaggtgtaaaattttttttaggacataataaaaaaaatattaaaaatgcccatgctgttgtttattcatcagctataaaaaaaaataatcctgaaattaaagaagcatatattaaaaaaattcctgtcctttctagagctgatatgcttgcagaattaatgaaaaataaaaaatctattgccattgctggatctcacggaaaaactactactactagtttggtaggaaatatctttaatgaagcaggtttagatcctactattgttaatgggggaattataaattctttttcaaacaataatcgttatggaaaaggagagtggatgattgttgaagcagatgaaagtgatggaacctttttaaaactcccacatcaaatatcaattattactaatttagatatagaacacatggatttttataaatcaaagaaaaatttaattaatgcatttgaaaaatttataaaccttcttccgttttatgggacttcaataatgtgttatgatgataagaatctaaaattattaattaaaaaaataaaaactagaaatattttaacttattcaataaaaaataaaaaagcagacgtattaatctttgatattatgcaaaataaactaaaaacttcttttaaattaaaaattaataataaaattatccattcttctaattataaatttactatcaatgcaatcggcaatcacaatattttgaatgcagcagcaagtattgttgtagccaaactaaatg

SEQ ID NO: 313351 - DNA, 850 bp, Unknown
  Bacterial polypeptide expressing nucleotide sequence isolated from the Sargasso Sea
catttttcaggaattggtggtatagggatgagtggtatcgccgaaatattgcataatcttggttgtaaggttcagggctctgatctctctaataatgctaatgtacagcgtttatctgatcttggtattaaagtttttgttggtcaaaaagaagagaatataggggatatatcggttgtagtaagaagcacagcagtgcaagatgataatccggaagtggtagcggcccgtaaaaaaaatattccggttattgcacgtgctgatatgttgaaagaaattatgtatcttaaagattgtgtcactatagctggtacacatggtaagactactactacctcaatggtagcgcagctatttgagactgcaggtctagctccaactgtagttaatggagggatccttaattcctgcaatactaatgcttatttaggtagtggtgattggttggtagcagaggcggatgaatcagatggtagctttaataaacttcctgcccaagttgctgtagtaactaacatagatcctgagcatatggagttttatggtagctttgccaatttacgccaggccttcaaagactttgttgaaaaagttcctttttacggttttgcagttttatgtattgatcatcctgaggtaaaaaatttaagtgcagaaataaatgatcgtaaaatttatacttacggttttgcagaggatgctcaagttaggggaaaaaatttgagcattagagaaaatggctttttatttgatgtagaagttaaaatccctggtaaagaaaagctggtaagcgatgtctttttgccgaatgtttggtcagcaataatgtttctaatgccttggctgcaat

SEQ ID NO: 313352 - DNA, 612 bp, Unknown
  Bacterial polypeptide expressing nucleotide sequence isolated from the Sargasso Sea
aatgaatacctcacaatataaacttaataatatccatttcataggtattggcggcagcgggatgagcggcatagcggaagtgctaaacaatcttggttacaaggtatcaggctcagacaatgtctcttcatcaaatactgataggcttgagaagttaggcataagtattaattatgatcataatccaaacaacctagcagatgttgaaatggtggtaatatcgagcgctatatctgatgataatcctgaattagtctttgccaaggaacagttaattccagttttagcaagggcggaaatgttatcaagtttgatgaataataaaagaggagtagctatagcaggtacgcatggcaaaacaactactacaagtttggttgcatcaataatgactaatgctaatcttgatccaacttttattaatggtggaataatcaatagcttcaactccaatgcacaattaggagaaggagattatttaattgctgaagcagatgaaagtgataagtcttttttgcttctgcagccttctgtgtccatagtcacgaatatagagccagaccacttggttaattatgatggtagttttgataatctaaaaaaagctttctt

SEQ ID NO: 313353 - DNA, 934 bp, Unknown
  Bacterial polypeptide expressing nucleotide sequence isolated from the Sargasso Sea
acatcttataggtataggaggaattggaatgagtggaatagctgagctattaaagaacaaggagtttatagtttcaggttccgatatagctgattctccgaatgttaaaagattaaaggatttaggagtaaatatttctattggccataataaaaataatatatcaaatgctgaactcgtaatatattctgatgctattcccaaaaataatgtagagttaatcgaagctttatcaaaaaaaatattagtttattcacgagcaagaatgatttctgaaatagctaaattaaacaattctactattgcaatttctggaacacatggtaaaacaaccacaacatcaatgattggaactgttttaaaagctgtcaatttagatcccacaattattgttggcggtgttgttaaatctcttgagtctaattcagttttgggtagcggtgatacttttgttgttgaagctgatgagtataataaaagcctacttcatttaagccctacaattgcagttattaataatattgattttgaacacatagaatgttacaaagaccttgacgatcttaaacatacatttattcaatttgcaaattcaattccgttttatggaaatgtttgtgtatgtaaagattcaagtaatgttgcatctatattatcaaaaatagataaacctataatgacttacggaatagaaagtgaaaatattgatattaaagctgaaaatttacagcaggcaaatggttgtatttcatttgatgtagttgtaaaagatcaaaaattttctgtgaatctatctataccgggcaaatataatgtgtataatgctcttgcagcaatttcagtttgtgaaacaatgggaatagatatagaaagtgcatgtaaagcacttagcgcttttagtggcgttaagcgaagatttgatattaaaacaaat

SEQ ID NO: 313354 - DNA, 294 bp, Unknown
  Bacterial polypeptide expressing nucleotide sequence isolated from the Sargasso Sea
attgagtaatctcccattatctattggtattattcattttataggaattggtggtattggaatgtctggtattgctgaagtattaaataagttaggatatgaagtttcaggaagtgacataaatgagaatagtaatactataagactaaaaaaactaggtgtaaaagttaatattggtcacagtacttcaaatgttaacaaagcaaaaattgtagttatttcaaccgcaatttcatctaacaatgtagaatttctggaagctagaagtaatagaataccaattgtacacagagc

SEQ ID NO: 313355 - DNA, 748 bp, Unknown
  Bacterial polypeptide expressing nucleotide sequence isolated from the Sargasso Sea
aaatatcataatcacaggatcccatggaaaaactactacaacatctttagtcgcaaaaattttgtctgaccaaaaactagatcctactattattaatggaggtgtaataaattcacttaatagcaatgctaaacttggtaaaggagagtggtcaattttagaagcagacgaatccgacggtagttttcttaagttacctattaattattcagttgttacaaatattgattatgaacatattgacttttataaaaattacaaaaatttagaaaattcttttgtaaaatttattgagaaaacgccgccaacaggcaaatcaataatttgcaaagataattcaaatattagaaaaatattaaaaaaaattaaaaacaaaaatataattacgtatggtgaaaataaaaaatctgattatcttatttccaatataagatataaaattgattactctgcttttgatttaaaatataaagatattaaaaagaaaaaaagaaaaataaaaaatattcaacttaagttactaggaaagcataatgtattgaacgcagcagcagccatagcagtttgtttgaatttaggtgtaagtcaaaatacaataaaaaaatcgttaataaaattttctggagtacagagacggatgacaaaaatctttagcaaaaataataactactttttcgatgattatgctcatcatccgactgaaattcaatctattttggcaggagttaaaaatgttcataaggataaa

SEQ ID NO: 313356 - DNA, 796 bp, Unknown
  Bacterial polypeptide expressing nucleotide sequence isolated from the Sargasso Sea
tcacgtatggtggcttggttgaatgagttgccacccaatggctttgctgttttgtgctccgacgatcctggtgtgtgcgctattttgccgaaactacgctgccgctatttcacctatggtttcaacgaatcagcggactaccgcttgattgcttgccagcaaataggcttgcgaacatctctctgttgggaaagccccgatgggattcgtcatgaggatcagatacacttgccgggtcgccacaatgcgctcaatggattggcggcttggattgcaaccacgcactttgtggaggggggcaatcctgatttgacacccagttgggcgagttatccaggggtcaatcgccggatgatgttgcatggcgaattggccctagatgaaggaagcgctttgctgatagaagattatgggcatcaccccactgaaatgaaagcaaccttcaatgccattcaagcggcttggccagagaaacgattggtggtgctctttcagccgcatcgctatacccggacgcgagatttgctatccgattttgtcgaggtgttgaggcttgtacctaatttatatcttttgccaatttatgccgcgggagagcaggctatccagggggtttccagtgagcaccttgccaaaattatcgaagagcagtccaatcaactgcctatagtttataccgatttgaatcaggcaagaaatgccttgcagtcaatgctgagggaaaatgatattctgttgttgcagggggcgggagatgttggtagtttggttcagcgcttgggcgtgctagaataaa

SEQ ID NO: 313357 - DNA, 847 bp, Unknown
  Bacterial polypeptide expressing nucleotide sequence isolated from the Sargasso Sea
tgcatcgttcctgcatttgcagccgatggtcgccattgtgaccaatatcgaagccgatcacatggatacctatcatggcgactttgagaatctgaagcagacctttattaactttctgcacaacctgccgttctatggccgcgcggtgatgtgcgtcgatgatccggtgattcgtgaactgctgccgcgcgttggccgtcagataaccacctacggttttagcgaagatgccgacgtgcgcgtagaggattaccgtcaggttggcgcccagggccacttccgcctggttcgtcaggataaagaggtgctgcaggtgaccctgaatgcgcccggtcgtcataacgcgctgaacgcggcggcggcggttgcggtcgcgacggaagagggcattgatgacagcgcgatcctgcgggcgctggaaagtttccagggaaccggccgtcgctttgattttctcggtgaatatccgcttgcagaggttaatggcaaaagcggcagcgcgatgctgatcgatgactatggtcatcacccgacagaagtggatgccacgatcaaagcggcgcgcgccggctggccggataaaaatctggtgatgctattccagccacaccgcttcacccgtacgcgcgatctgtatgacgatttcgctaacgtgctgacgcaggttgatgcgctgctgatgctggacgtttattccgccggtgaagcgccgattcctggcgccgacagccgttcgctgtgccgtacgattcgcggtcgcggcaaggtagatccgattctgctttccgatccggcacaggcagcgcagatgctggcatcggtgctgaccggcaatgacctgatcctg

SEQ ID NO: 313358 - DNA, 664 bp, Unknown
  Bacterial polypeptide expressing nucleotide sequence isolated from the Sargasso Sea
aatgtttaaaaaggtaaaatctatccattttattggcattggtggtattggaatgagtggcatcgctgaactacttaataaccttggatttaaaattacgggttctgatattaaattttcagaaaatgttaaaagattaggactgctaggtattgaaatttcaattggacatagtccaaataaccttaaagagaccgatgtagttgtttattcaagcgctgtacccttagataactcagagattttatcagcaattagtaaatcaatacctgttataaggcgtgctgagatgctaggagaattgataaacttaaaacaaacaagtatagcagtaggtggaactcatggaaaaacaactacatcctcaatgattggtatgatactagaaaaatctggatatgacccaactttagttgttggtggattagtcagcaaccttaatacaaatgtaaagcttggatcaggcgaattgatagtagttgaagctgatgagtttgacagaagttttttggctctaaaccctacaattgcaattgttacaaatctagaaatggaacacactgattgttataaagatttaaatgatattgaaaatgcatttttacaattttgtaaatcagttccattttacggatctgtgatattatgcgctgattcatattct

SEQ ID NO: 313359 - DNA, 724 bp, Unknown
  Bacterial polypeptide expressing nucleotide sequence isolated from the Sargasso Sea
aatgattccttcagctagcaaagcattattcttaaatgttggaaagatccattttgtagggattggcggtattggtatgagcggtattgctgagatattgcataatttaggttatcaggttaaaggatcagatctttctcaaagtgctaatgtagtgcgtttgcaaaatatggggattgagataaatattggtcagagcgagtctaatatagaaggttgcggcgttgttgttaggtcttcagccgttaagaatgataatcctgaaattattgcggcgcgcaataacagaatcccagtaatacagcgtgctgagatgttggctgaattgatgcggcttaaaaatgctgtagcaattgctggaactcacggaaaaacaacaactacatctatagtctctgctttatttgatgccgaatctttagatccaacggtagttaatggtggaattattaataaatataatactaatgctaaattaggtaagggcaattggctaattgccgaagcagatgagtcagatggaacattcttaaagttacctgctacaattggagtagttacaaatattgatccagaacatatggagcattatggaacttttgataatttaaaaaaatctttcaagagttttatcaataatttaccattttatggttttgcggtattatgtaatgaccatcctgaggttaaaaaactctcgatggaaattgtagatcgtaaagta

SEQ ID NO: 313360 - DNA, 556 bp, Unknown
  Bacterial polypeptide expressing nucleotide sequence isolated from the Sargasso Sea
aatgaatcactcaaaatataaattaaataatatccatttcgttggaataggagggagtggaatgagtggtatagctgaagtcctaaataaccttggttataaggtatctggttcagatagcacttcttcttccaacacccaaagacttgagggtaagggtattaaaatttattacgaacacaagtcttccaatcttgaaggggtcgagatgctggtgaagtcgactgcaatacctgaagataatgcagagattgaggaggcaagagatagattcatcccagtactagcaagagctgaaatgctttctagcttgatgaacaacaaaagaggtatagctgtcgccggaacacacggtaaaacaaccactactagtctagttgcttcaataatgagtgacgcaggtctcgatccaacgtttatcaatggaggaataatcaatagttttaactcaaatgcgcaattaggtcagggcgaatatctaattgctgaagcagatgaaagtgatcagtcattttttgttgctttcaccatctgttttcataattaccaatattga

SEQ ID NO: 313361 - DNA, 622 bp, Unknown
  Bacterial polypeptide expressing nucleotide sequence isolated from the Sargasso Sea
tatgaagcacatcgtcaagaacatccattttgtaggcatcggtggcgccggcatgagcggcatcgcggaggtgctgctgaatctgggctaccgcgtgacgggctcggatctgggcagcagcgcgaccacgcagcgtctggcaacgctgggcgcgacgatcatgcagggccacgcgccggaacatgtgatcggcgccaatgccgtggtggtctccaccgccgtgcgcggtgacaacccggaagtgctggccgcgcgcgccaagcgcattcccatcgtgccgcgtgcggtgatgctggctgagctgatgcgcctgaagcagggcattgccatcgccggtacgcacggcaagacgacgaccaccagtctggtcgcctccgtgctggccgagggcggcctggacccgacgttcgtgatcggggggcgcctcaattccgcgggcgccaacgcgcgcctgggcacgggtgatttcatcgtcgccgaggccgacgaatccgatgcgtcgttcctcaacctgttccccgtgatcgaagtcatcaccaatatcgatgccgatcacatggacacctacgggcacgacttcgcgcgcctgaagcaggcgttcatcgagttcacgcagcggctg

SEQ ID NO: 313362 - DNA, 895 bp, Unknown
  Bacterial polypeptide expressing nucleotide sequence isolated from the Sargasso Sea
gatattggtattattcattttatcggaattggcggcattggaatgagcggcatagccgaaatccttcacaatttagggtacaaagttcagggcagcgatatttcagagaatcaaaatgtaaagcgattagaggaaatgggggtaaaggtttttgtgggacaagcctctaaaaatctgagcgccgtatctatcgcagtggtttcaactgctattaaagcaggcaatgttgaactgagttttgcgcgggaaaaacaaattcctatagttcatcgttcagagatgttggctgaacttatgagattgaagtggtcaatagcgtgtgcaggaactcatggaaagacgaccaccacttcactggttgcttccgttctggatagtgcaggtctagatccaactataataaatggaggaatattaaactcctatggaacaaatgcgcgtcttggtgatggcgattggatggtagtggaggctgacgagtcggatggcagttttaataatttaccggccactattgcggtcgtaactaatatagatccagagcatctagattttcacggtagttttgaaaatttgaagaatgcatttcgttcttttgttaagaatatcccattttacggctttgcggtcgtttgtatagatcatcccgtagtccaggaattagtgcaacaagttcccgaccggcgcataataacttatggctttgataagacatcagatgtccaagcttccaagatcatcccgacggaaactggttcgtgctttgatgtgattgtgcgtgataaaggcaaaacgaacggcggaagtattgagcggatcgaacttccaatgtacggcgaacataatgttttgaattcgttggctgcaatagctatttcattggaaatggggtatg

SEQ ID NO: 313363 - DNA, 931 bp, Unknown
  Bacterial polypeptide expressing nucleotide sequence isolated from the Sargasso Sea
gagggcccaatgacaaaacgccttagcgagttaggtgctgacgttaaaattggacaccgagcggaaaatgtcgatggcatggatgtgatcgtcgtctctagcgcgattaacgaggaaaaccctgaaatcatcaccgcaagagaaaaccgtatccccattattcgccgagctgaaatgcttgctgagctaatgcgttttcgccacggaatagccgttgctggtacgcatggtaaaacgaccacgaccagcttaatttcgaccatttttgctgaggcccactacgacccaaccttcgtgattggtgggttgctaaatagtgctggcaccaatgcccgcttagggaaaagtcgttaccttattgctgaggctgatgaaagcgatgcatcatttttgcacctacagcctatggtctctgtagtgaccaatattgaagctgaccacatggatacctatggcggcgacttctcaaaggttaaagatacctttgtggattttctgtctaacctgccgttttacggtcaggccattgtgtgtggcgatgatactaatattcaagaaatacgcccgcgtataggcagaagcatagttacttatggctttgaggagcataacgactatcgcgccaagaacattacgctgtcctttggtaaagcaaatttcactgtacaccgacctgatgctgagccccttgagataatgctcaacttaaccggtaatcacaatgtgcttaatgcgctcgccgccatagcggtagcttgtgatgaatgtattgatgatgaatcaatagtaagcgcactggcaagctttggcggcatagggcgtcgattcgaacagttaggcacgtttaataccagtaaaggtgaagtgtgtttagtcgatgactacggccatcaccctaccgaagtaaaggcgacaattgcggcagcaagag

SEQ ID NO: 313364 - DNA, 511 bp, Unknown
  Bacterial polypeptide expressing nucleotide sequence isolated from the Sargasso Sea
aatgcaaaataaaaataaaaaaatcaaagttcattttgttggaattggcggtattggcatgtcaggtattgctgaactaatgaaaaaaattggttattcagtatctgggagtgacattaatgaaagtgaaaatataaaaaggttaaaagaaattggcattattgtaaatataggacatgataaaaaaaatatatcaaaagtgcatgcagttgtttattcttctgctataaaacaaaataatcctgaaataaaagaagctaagaaaaataaaatcccaattgtaagcagagccgacatgcttgctgaacttatgaaaaataaaaaatgtattgctgttgcaggatctcatggaaaaacaactacaacaagtttagttgggaatattttagaaacaggaaagcttgatccaacgattgttaatgggggcataataaattccatttctaaaaacaacaaatttggcaaaggtgattggatggttgtggaagctgatgagagcgatggctcattt

SEQ ID NO: 313365 - DNA, 805 bp, Unknown
  Bacterial polypeptide expressing nucleotide sequence isolated from the Sargasso Sea
tttgttggtattggaggcattggaatgtcaggtatagctgaattaatgtttgatctaggttatacagttcaaggaagtgatattagcacaaatgccaatattaaaagattaaaaaaaagaggaattaaaatttttaattctcatcacaaaaataatattcataatatgtctgccacagtattttcttctgcgattaaaaaaaataatcctgaattattagaatctaaaagattgtacatacccctaatctctagagcagatatgttagctgaattaatgaaattaaaaaaatcaattgctattgcaggctctcacggcaaaacaactacaacaagtttagttggttcaatatttgataatgcaaattatgacccaactattgttaatggaggaattattaattcatattctaaaaataatcgttacggtagaagcaattggatgattgttgaagcagatgaaagtgatggttcttttttaaaactacctcacgaaattaatataattacaaatgttgatatagaacatttagattattataaatctaaacaaaatcttcttttagcttttgaaaaatttataaccaacctccctttttatggttgctcgataatatgtacggaaaatgttaattcaagaaagatttatagaaaaattaatactagaagaatgattagttattctaaaagtcaaaattcagatgttaaaattgttaaaataaataaggataaaaagggaaataatttttctttatattttaaaaaaggagtaattaaaaacatcaaaggaagatatgattttagca

SEQ ID NO: 313366 - DNA, 851 bp, Unknown
  Bacterial polypeptide expressing nucleotide sequence isolated from the Sargasso Sea
aatgaataaaatcaaaataaatttaaatcaaaaaatacactttataggaataggtgggattggaatgagcggtcttgctcagattatgaaaaatatgggttttaaaattcagggaagtgatatgataaatagcaaaaatgtagaaagatgtagaaaaattgggattaaaatatttagatcacataaaaaagaaaatatagatcacacttccatagttataaaatcttcagctataaaaaatagcaacccagaaataaaagcagcaattgaaaaaaatattactatactgaaaagagcagaaatgttggcacatgttgtggctttaaaaaccaacatagtgataactggttctcacggcaaaacaacaactacatccttaatttcaaatatactttcacaagcaaaatttgatcctaccataataaatggaggaataattaattctttcaatggaaatgccagacttggaaaaggtaactgggcggtactagaagcggacgagtcagacggtagctttttaaattttccaataaattattcagttgtgacaaatattgatagagagcacatggacttttataaaaattttaaaaacttaaaaaatgctttcttaaaatttttaaacaaaacaccattaattggaaaatcttttatttgtatagatgacaatgaaattaaaaaattaagtaaaaaaataaaaaataaaaatttttatacttacggtttttctaaaaaagctgattttcaaattttaaatcccgtatacaacaaagattattcaatatttgatttaaaaatatctattccaggtgaaaacaagagaactatcaaaaaaattagatttaaacctt

SEQ ID NO: 313367 - DNA, 964 bp, Unknown
  Bacterial polypeptide expressing nucleotide sequence isolated from the Sargasso Sea
gcacagattatgaataatattggatttgtgatccagggtagtgatattaataaaaataaaaataccgaaaggttaattaagtctggaataaaagtttatttcaatcatcatcacaaaaatttaaaaaaagctacaatggtagtagtttcttcagctatcaaaaaaaacaataacgaattgaaagcagcaaaaaaaagaaaattgccaatatttagaagaggtgagatgttagcaaatattgttgctttaaaaagaaatatcgtggtttcaggatctcatggaaaaactacaacaacgtcattaattgccaacattctattagaagctggattagatcctactgtaattaatggaggaataataaattcacttaaaaatactgcacaactgggaaaaggtgaatgggcagtaatcgaatctgacgagtcagatggaagttttttaaaattacctattacatactcagtaataacaaacattgacaaagaacatcttgatttttatggtaattttgaaaatcttaaaaaaagttttcttagttttattgaaaaaactccatcatttggaaaatcagtattatgtattgatgatgataacgttagaattttagtgaaaaaatgcaaaacaagcaactatttaacttacggattctcaaaagactctaattaccaaattgtaaacataaaaaaaaattttaattattctacttttgatttaagcattaagcttccaggacataaaatttataaattaaaagatattaaaataaatttattgggtgatcataatataaaaaatgctacagcagcaatagcaattgcattaaatttaggtataaaaataaataaaattaaaaaaacatttaaaaagtttttaggaattcaaagaagatttaccaaggttttttctatcgataaaaaagatttctatgatgattatgcccatcatccaacagagataaagc

SEQ ID NO: 313368 - DNA, 668 bp, Unknown
  Bacterial polypeptide expressing nucleotide sequence isolated from the Sargasso Sea
tatgctttatagcataaaaaaagtgcatttcattggtattggtggaattggaatgagtgggatagcagagcttttaaaaaataaaggttttttagtaactgggtctgatatttctgattctccaaatgttcaaaggcttatagacctgggaatacatgttacaattggccataatgcagaaaatatttctgattctgaattagttatttattcagacgcaatccccaaaaataatgttgagctaaagaatgctttatctaaaaatttgttagtttattcaagagctagaatgatttctgaaatagctaaattaaataattctactgttgcaatttcaggaactcatggaaaaactactacaacatcaatggttggaagtattttaaaagctttagaattagatccaactattattgttggtggtgtagttaagtcattagagtctaattcagctcttggtagtggagatacttttgttgttgaagctgatgagtataataagagccttcttcatttaagtcctacaattgctgtaatcaacaatatagatttcgagcacattgaatgttatgaagatcttgaagatttaaaggaaacatttattcaatttgctaattctgttccattttacggttctgtgtgtgcttgccttgattcaagtaatgttg

SEQ ID NO: 313369 - DNA, 538 bp, Unknown
  Bacterial polypeptide expressing nucleotide sequence isolated from the Sargasso Sea
aatgaaaattgaattagcaaaaaatgagataatccattttgttggaattggaggaatcggaatgagcgggctttctttaataatgaaagctaaagggtttaaagttcaaggaagtgatatatctcataataaaaacattgaaagacttaaaaaagaaaaaataaaagttttcattgatcacaaaaaacaaaatttaaaaaatgtaacaatagtcgtagtttcttctgcaataaaaaaaaataatccagaattaattgaggctaaaagaaaaaaattattaattattaaaagaggaaaaatgcttgcgcacatagtttcattaatgaaaaatattgtgattgttggttcacacggtaaaactacaacaacatcccttgtaacttcaatttttcaaacaacaaatttagatccgacaattattaatggtggtgtaataaattcacttaaaaattctgcaaaattaggtaaaagtgattggtcaattctagaagcagatgagtcagatggtagttttgttcaaattccaaccacttattcg

SEQ ID NO: 313370 - DNA, 448 bp, Unknown
  Bacterial polypeptide expressing nucleotide sequence isolated from the Sargasso Sea
agattcgaaatagtaggagaattcgaagtaaataagaaaaaatttacatgggttgatgattatggtcatcatcctactgaaataaaagaagtcttagaaaccataaataatgtttggaaaaacaaaagaataataatgatatttcagccgcacagatattcaagaacagcagaacattttaaccagtttgtagacacattaaaaaatgtccaaaatttaattttgatggaaatatacgctgcaaatgaacataagattgagaatatatgttcaaaagcacttgcagacgagataaataaatatagtgtgaatgttgtactaataaatgatcatgcaaaacttgcaaaattcatagagaaaactattcaaaatgatgatgttttattaactatgggtgctggcgatatatcaaaatttaacaattacttcagagaatctctaaaataaa

SEQ ID NO: 313371 - DNA, 839 bp, Unknown
  Bacterial polypeptide expressing nucleotide sequence isolated from the Sargasso Sea
cacatatattatcggcggttgtttaaagagttctaattctcatgcaaaactgggattaggagaatacttggtggcagaagcagatgagagcgatgcatctttcacgcatctcaagccaatgatctccatattaacgaatatagattttgaccatatgtcaacatatgaacatgataagaataaattatattcaggttttttaagttttctgcataatctgccattttatggtttagcaatagtttgtcttgatgatctgggcgttaaggaggttatgcctaaaatctcacgttcgatgataacttatggtacaacagataaggcagatatttatgctaaagacatacatttcagtgaatcaaagacctcttttgaggtttacagaaaaaacaagaataaaaaaattagcattgaattaaatctaccaggaattcacaacattcaaaatgcacttgctgcaattgcagttgcaaccgaacttgatattgatgataaatcaataattgaagccttcaaaaatttctcaggaattaatagaagatttcaggtaacaaaaaatgtaactgttaaagatggaaagattacattaatagatgattatgggcatcatccaactgaaattttagctactataaatgcaataaaatcaggctggggatccaagagaattaccctgctatttcaacctcatcgttatacgagaacgagagaattattctctgaatttgtagaagttttgtcaaaggttgatcagttaatattaactgaggtttatgcagctggtgaggaaaaaattgataacatcagcggacagtcaattatagaagatataaaaaata

SEQ ID NO: 313372 - DNA, 931 bp, Unknown
  Bacterial polypeptide expressing nucleotide sequence isolated from the Sargasso Sea
aatttatcaaatgaaaataaaataattgggattaccggtacgcatggaaaaacatcaacgactgcattgctttcacatatttttcatttcaataatgtaaatgtctcatacatttacggaggagtaacaaattttagtggcattggtgggcattatggggatgcagatcagccaattattttagagactgatgaagcatttaatacatttgaaaaaattttaatttcagatcttttggtacttaatattgacagtgatcatttagatttttttgaaaactttaataactataaaaatgcatttcttaaagttatggataatgtaaaagataatttagtcattaattatgatgactcagttttgcaagatcttgaaggctttaataatttagttaaatatggtaaaaataaagattctgatttcttaattttaactccagacaaatttttatatgaaaacaaagaatatattattaattcacaaatattaggagatcattttagatcgaatatggttggtgcgattgtattagcaatgaaaaacggaattagtatcaaggaatctttagatgcaattttctcttttccgggagttaaaagaagaactgagcttataggaattgcaaaaggaatttccatatatgatgattacgggcaccatccaacagagatgaatgcaacaataagttcattaaaaaagattactaaaaataaattgtatgtagttttccaacctcacagatattcaaggacaaaagaatacttcaatttatttaaagattctcttgttcaatcagattttgcaattgtaactgatatttatcctgctggtgaagatcctattcctggaatttcaagtaaaaattttgaaggtgaaaatataaaatacttacaatcaacaaggtttgttccggaatatctatcacaagaag

SEQ ID NO: 313373 - DNA, 787 bp, Unknown
  Bacterial polypeptide expressing nucleotide sequence isolated from the Sargasso Sea
tgaatgggctgttttagaggcagacgagtcggatgggagttttttaaattttccaataaattattctgttgtaacaaatctagataaagaacatcttgattattataaaaatttcaaaaatttaaaaaaatcttttttaaaattcttgagcaagaccccaacaattggtaaatccttcatttgtttagatgataatgaaataaaaaaactaattcctaagatgaaaaataaaaacttttttacctatggattttctaaaaattcaaattttcaaattctaaatccgacttataaaaaagaatactctttatttgatcttaagatttctgtgccaggttcaaaaaaagaaactataaaaaaaataaaacttaatctaataggtaaatataatattttaaactcggtggcggcaattgccttatcccttcatattggcgttaaaataagcattataaaaaattctttaaaaaaatttactggaattcagaggagattaactaaagtttttaaggttgatgaaaaagaattttacgatgactacgctcatcacccaacggaaattaaatctgttttaaatagtcttaaagtaacttcctcaggaagaaagattatttcagtttttcaaccacacagatactcaagactaaagttattaaagagggagtttgcttcatcatttgtagactcagatactgtaatattatgtccagtttaccctgcaggtgaaaaaatagacaaaagatacgacaaactaaattttgcagaattaatctcaaaaaaatcaaat

SEQ ID NO: 313374 - DNA, 716 bp, Unknown
  Bacterial polypeptide expressing nucleotide sequence isolated from the Sargasso Sea
aatgaataaattagataagattaaaattcactttgttggtatcggaggtatcggcatgtcaggtatcgctgaattaatgtttgatctaggttatacagttcagggaagtgatatcagtacaaatgaaaatattagaagattgaaaaaaagaggaataaaaatttataattttcatcaaaaaaccaatattcataatatgtctgcgattgtattttctactgctattaaaaaaaataatcctgaattattagaatgtaagagattatgtataccattaataaatagagcagatatgttagccgaattaatgaaattaaaaaaatcaattgctattgctggctctcatggcaaaacaactacaacaagtttagttggttcaattttcgataatgcgcaatatgatcccactattgttaatggagggataatcaattcatattcaaaaaataatcgttatggaaaaagtaactggatgattgtagaggcagatgaaagtgatggttcttttttaaaactaccacatgaaataaatataattactaatatagatatagaacatttagattattataaatctaaaaaaaatcttcttttagcttttgaaaaatttgtaactaatcttcctttttacggttgttcaataatatgtactgaagaccttaattctcgaaagatttataagaatattaaaacaagaaaaatgattagtttttcaa

SEQ ID NO: 313375 - DNA, 789 bp, Unknown
  Bacterial polypeptide expressing nucleotide sequence isolated from the Sargasso Sea
aatgcccaactgtggtgaaagccgttatctggttgccgaagccgacgagagcgatgcctcctttttgcacctgcagccgatggtcgccatcgtcaccaatatcgacgccgaccacatggcgacctacgagggcgacttcaacaaactgaagcgcaccttcgtcgagtttctgcacaacctgccgttctacgggctggcagtgctgtgcatcgatgatccggtggtgcgcgagattctgccgcagatcaaccgtcaggtgatcacctacggtcagtccgaggatgccgacatccgcgcggtagatatccatcagaagggtatgcagacctacttcaccgtgctgcgtgagggccgcgaaccactcaaggtctcggtcaacatgccgggtgtacacaacgtgctgaactcgctggcgaccattgcggtggcgaccgacgaaggcgtttccgatcgcgccatcatcgaaggtctgaccgggttccagggcgtcggtcgtcgcttccaggtgcagggcaacttccagtggggcaacggcgaagtaatgctggtcgacgactacggtcaccacccgcgtgaggtggctgcggttatcaaggcggtccgtgccggctggcccgagcgtcgcctggtcatgctctaccagccgcaccgctacagccgtacccgtgatctctacgaagacttcgttcaggtgctgggcgatgccaatgcgctgttgctgatggaggtctacccggccggagaagaaccggttccgggggcagacagcaagcatctgtgccgcagcat

SEQ ID NO: 313376 - DNA, 950 bp, Unknown
  Bacterial polypeptide expressing nucleotide sequence isolated from the Sargasso Sea
cgttaccgcttcggcatcgcggttgcgggaacccacggcaagaccaccactactagcctgatcgccgccattcttggtgaggcgggggaggatccgacttttgtaatcggggggttgctcaatcaggcgggcgccaacgcggcgctgggtgaagggcagtatctggtggtggaagcggacgagagcgacgcttctttcctgcatctgcaacccatgatggcgctggttaccaatattgaagcggaccacatggagcattacgagggagaccttagccgctacatccaggcgtttaatggtttcctgcacaacctgcccttctacgggccggccgtcatgtgtctggacgacaaaggggtgcgggatttaatccctgaactctcacggcaggtggtgacctatgggcgccacgctgatgcggattatcgattggataactatcgcagcgcggggctgtgcagtcactttgagctgatccgcccccacgatgctgcgccattggcgctgaccgtcaacatgcccgggctccacaatgcccagaatgcagcgggtgccgcggcgctttgtgcggaactcggtatttcagaggacgccattgtcagagggctggctgaattcggtggcgtcggcagacgcttctcggatttgggtgatgtgcgttggtcagccggtagcgcaagactgatcgacgattacgggcatcaccccactgaagttgctgtcaccctgcaggccgcccgcgacgcatttcacgaccagcgggtggtgatggtgtatcagccccatcgattcacccgcacgcgagatcattttgatgagtttgtctcggtgctgggtgaggcccagtttctgatcctgctggatgtttatcccgccggcgaaccagcgattgagggagccgacgcgcagtcactggccagagcaattcgcgccaggggcgtgctggagcc

SEQ ID NO: 313377 - DNA, 734 bp, Unknown
  Bacterial polypeptide expressing nucleotide sequence isolated from the Sargasso Sea
aatgaaaattgaaatagcaaaaaccgaaattattcactttgttggcattggtggaatagggatgagtggtctttctttgattatgaaaggcaagggttttaaagttcaaggaagtgacttaagtttaaataaaaatattgaaagacttaaaaaagaaaaaattaaaatttttatagggcagaaaaaacaaaatcttaaagatgcaactatagttgtagtatcctcagctataaaaaaaaataatccagagattattgaagcaaaaagaaaaaatttaccaataattaaaaggggtaaaatgttggcacatattgtatccttaatgaaaaacatagttgtagttggttcacatggaaaaacgactactacgtcattaattacatcaatttttcaaacaacaaaaatagatcccactattattaacggaggtgtaataaattcaattaataatactgcaaaactgggtaaaagtgattggtcaattctagaagcagatgagtctgatggaagtttcatacatattccacccacttattcaatcattacaaatatagatagggaacatatggatttttataaatctatggaagacttaaaaaaatattttatagaatttattgaaaaggtaccttcatttggaaaatcgtttatttgccttgatgataaaattaacaatgaacttgttaaaagattaaaaggtaaaaatttttatacttatggtgtgaattcaaaat

SEQ ID NO: 313378 - DNA, 905 bp, Unknown
  Bacterial polypeptide expressing nucleotide sequence isolated from the Sargasso Sea
agaggctgacgagtcagatggaagttttttaaattttccagttaatttttcagtggtaacgaatattgataaggaacatattgatttttacaaaaattttgaaaatttaaaaaattcttttttatattttttaaataaaacaccagcaattggaaaagcctttatatgtgtagatgatcaagaaataaaaaaaattattccaaaaatcaaaaacaaaaatttcttaacatacggtttttcaaaagatgctaattttcaaatattaaatccagtgtataaaaaacacttttcatcattcgatttaaaaatttcaacacctaatttaaaaaaaactgttataaaaaatatcaaactaaatcttatgggggcgtataatatacttaattcagttagtgcgatagctctttgcctttacataggtattagttctaaaataattagaaattcactttataaatttagtggcattcagagaagattaaataaagttttagtaaaaggtaaaatagagttttttgatgactacgctcaccaccctactgaaattaaatctgttcttaaaagtgtaagaaatacaaatctgaaaagaaaaataatatctgtttttcaaccacatagatattcacgattaaaattattaaaaaatgaatttgcatcttcatttcatgactctaatgttgttattttgtgtccggtgttttcagctggtgaaaaaattgataataaatatgatacttttaattttgctaaattaattgcaaaaaattcaaatgttcaagtaatcacggttcaaaatgaaaaagatttaaaaagattttttcaaaaaaatttatttaacgatgaattagtattatgtatgggcgcaggatcgatatcgaaatggattagagaaatggaactttaaa

SEQ ID NO: 313379 - DNA, 484 bp, Unknown
  Bacterial polypeptide expressing nucleotide sequence isolated from the Sargasso Sea
cgtcgcttccaggtgtacggcgagctgccggtcgaaggcggcagtgtgatgctggtcgacgactatggccatcacccgaccgaagtggcggcggtaatcaaggctgtgcgcggtggctggccaagccgccgcctggtgatcgtctaccagccgcaccgctacagccgcacccgcgacctgtacgacgatttcgtccaggtgctgggtgatgccaacgtgctgctgctgatggaggtctacccggccggcgaagagccgatccccggtgccgacagccgtcagctgtgccacagcatccgccagcgcggcaagctggacccgatctacatcgagcgcggcgccgagctggcaccgctggtcaagccactgctgcgcgctggcgacatcctgatctgccagggtgccggtgatgtcggcggcctggccccgcagttgatgaaaagcccgctgttcgcaggcgccaagcaggagaagtcgaaatgac

SEQ ID NO: 313380 - DNA, 793 bp, Unknown
  Bacterial polypeptide expressing nucleotide sequence isolated from the Sargasso Sea
tttcctcagtatgcgaatgctactccattttatggagctgtatttgcctgtgtggatgagcccatggttaagcggatcctcccggacatcagccgacccgtgattacctatggtttctcaggggatgcggagttccaagctgattgtcgcgaatatcgggagatccgctctacttttgttgctaagcatgggaaaaaagagttggggaaagttgagcttaatgtccccggagcacataatataaaaaattctcttgcagcaatatcattaggaatagaaatggatattgatttcgaaacgattcaaagaggtttgagagagtttagtggcgttaaacgtcgatttgagattaaaggtatttatgatgatattttagttgtagatgattatgcacatcaccctacggaagtgtcagcaacactaagagcaataaaaaatgggtgggaacggagattagtaacagttttccaacctcatctttatagtagaaccagagatttttatgaagattttgctcgttcatttcttattagtgacgtacttattgtaacagatatttttccagctagagaagaaaaaataaagggtatttccggagaactaattactaatgtggccaaatcaatggggcatcaaaatgtccattgggtaaaagataaattaatgttggtgaatgcaatgagcgcattaatagaaccaggagatattgtaataacaatgggtgctggagatatatggcgtatttgtgatgagtatgtgtcgaaaattaaaaaagaggcacaaaaagtttgag

SEQ ID NO: 313381 - DNA, 808 bp, Unknown
  Bacterial polypeptide expressing nucleotide sequence isolated from the Sargasso Sea
agcgcgggtaggtcggtcgattatgacgcgtcccgaacgcttaatgttcccgtaggtcgccgagacgtgaccttcggtatgtatgaaacgagcgctctggcggccacacagcttgagataaacgagttcgagacattgttcaccgtcaagtacgatggggatacgctcggcacggtattgatccgaataccgggcaaacacaacgttttgaatgccttgggcgcgatcggtgccgctctgtcaatcgatgtgaattgggattcgattcagaccgggctgaacgacttcagaggtgttcgccgtcggttcgagattgttggcgaagtgaacgacgtgacagtggtaaacgattacgcgcaccatccgaccgagatcgacaagacgatccaggcggcaagagatgtacgtgatggacgcgtggtggcgatcttccagccacatctctattcgcgaacgagagattttgcgccagagttttcgaaggcccttacaaatgctgatgtgtgctggttgacggatatctacccggcacgcgagttgccgatcgaaggaatttcgggtcgtacgatcgctgagggaatcgatgactgtcactatgaagccgatctggatcggctcgcagacgctgttgtcggcactatcgaagagggcgatacggtgcttgtgatgggtgcggggtcgatcgatcgagttgcgagtgaggttttggaacggctgccgaggggcaggtgcacggatgggcaagcggcctccccgataagggccgaaggccctgctcggcgtgagcggtcgtcaagtaaacactagt

SEQ ID NO: 313382 - DNA, 862 bp, Unknown
  Bacterial polypeptide expressing nucleotide sequence isolated from the Sargasso Sea
gcgacaatagcagttgtgaccaatatagaccctgagcatctagattattatgggacctttgataagttgcgtgacgcatttttagcttttgcagaaaatataccattttatggatttgctgcattgtgcagcgatcatattgaagttcaatcgatgatatcgcgtctatcagaccgcagagttattacctatggttttaatcctcaagcggacttccgggccgtgaacctgagaactgagcctgacggtgggacatttgattgtatcatctcagagcgtaaggctggaatcaaacttgaggtcaatgatttattcctacctatgtttggcaaacataatattcaaaattgtttggctgctattctgatagcaatggaaatgggtgtaaatgctgacattataagaagtgctctccgaagcttcaaaggcgttaaaagaaggtttactaaaataggagaaataaatggcgtgactattattgatgattatggacatcatccaatagaaattgcagctgttcttggagctgcccggcaggcgaccgaaggcagagtaatagctgtagtgcaacctcacagatattctcgattaagagatttgtttgaagagttttgtacctgctttaacgaggctgaaattgttttggtatcagatgtatacgcagctggagaaaagcccgtagagggatttagtaaagagactttagtagagggtctcaaatatcacggtcaccgacaagtcgaggcgataaatgggccagatgaaattgctaagcgcatttttcttatttctagaccaggtgacctggttatttttttgggggctggggatataactcagtgggcgaatgcactcccaaaat

SEQ ID NO: 313383 - DNA, 844 bp, Unknown
  Bacterial polypeptide expressing nucleotide sequence isolated from the Sargasso Sea
atcattactaatatagaaccagatcatttagtgaattatgagaatagctttgagaacctcaagatagcctttttaaattttgtaaaaaaactccctttcaatgggatggccatagtttgcggagatgatccgatagtcagagaattaatacctaaattttctagaccttacataacttatgggtttgatgaaggtaatgactatgtactttctaattattcctcaagcaactttcaatcatcatttaatttaagatctgaatcagatagcttagaccttagtttcaacatgctgggaagacataatgctttaaatgcttcagctgcagtagttctctgtattcaagaaggaatttcgaccaaagtaattaataattctttaaaacacttcatgggcataaatagaagaatgcaagttcttggagaactatctataaatggatcaagttgtatcttagttgacgactatggacatcatccttcagaaattgaatctactattgattccattagagagtctttccctaataaagaattaaacatggtctttcaaccgcacaggtacacacgaacgaaagatttatttgatgagttcgtaaatgtattaaccaaagtagataaactgatcttattagatatttattcagctggagaaattcctataaaagggattggtagtaaagaattaatgaaaaaaatctcagatcaaggttttgataaggttaagttattaaattccagaaatgaaataataagatctcttgaagaccaagtggacgatgattcagttcttattatgcaaggagcagggaatatctcagatgtaagttcagaaataaagaaaa

SEQ ID NO: 313384 - DNA, 747 bp, Unknown
  Bacterial polypeptide expressing nucleotide sequence isolated from the Sargasso Sea
attgagtttaaaaattaaaacaaaactaccgcttgatttaggtaaaatgcattttataggtattggaggaattggtatgtctggcattgctgaaataatttacaatcttggttataaagtttcaggttcagacttaaaatattctcctattgttaatagattaattaaattgggtattgacgtgaggattggtcatgatcctaacaatatcaatacagcagagataattgtgatttcttccgcagttggttcagacaatatagaattaaaagaagcaagaagaaaaaaaattccagttatacgtaggtcagaaatcttagctgaattgatgcgcctaaaatcaaatattgcagtggctggaacgcatggaaaaactactaccacttccatggttgcagcagtattagaatctggaatgtttgatcctactgttgttaatggaggaattattcaagattatggttctaatgctagattaggtgaaggtgattggatgatagtagaggcagacgaaagtgatggaacacttattgaaattccttcaacaatttctatagtaaccaatctggacccagaacatttagatcactatggtacatttactgccttaaaaaatacctttttggaatttttaaatagtattcctttttacggggtagctatttgttttattgaccatccagaagtcaaaaagttaatatcaaaagtaaaagatagaaatgttcttacctatggttacagtagtca

SEQ ID NO: 313385 - DNA, 797 bp, Unknown
  Bacterial polypeptide expressing nucleotide sequence isolated from the Sargasso Sea
ttcattaaagaaaaatatagttatttctggttctcatggcaaaacaactaccacatcattaattgctcaaattttattaaaatctaaacttgatccaactattataaacggaggagtgattaagtatcttaattcaaacgctaaatttgggaaaggggaattgacagtattagaggcagatgagtccgatggaagttttctgaagcttccaataaattactctgtcgttacaaatattgataaagaacatctagatttttataaaaatttatcaaatttaaaaaaagcatttttatcatttataaacaagacaccaccaactggaaaatcttttgtttgttttgatgataaaaatattagagaaattcttaaaaaggtaaataaaaagaattattttacttatggttttaataaatattccgattgtaaaatttataatgttaaatatttgattgataaatgtatctttgacttaaagattaaatattcatctaaaaaatttaaaatattaaaaagaatatctttaaatttaattggtaatcacaatattttaaatgcaactgcagctatctcggtgtgcttaaatttaggtattaaaagcaaggttataaaaaatgctcttaaaaattttaaaggtgttgaacgaagaatgacaaaaattttcaaaaaaggaaataacgtattttatgacgattacgcccatcatccaactgagataaaagctattttggagggagtaaaaaatgcctcaagtaaaaaaatcgtagctgtttttcagccacacagatattctagat

SEQ ID NO: 313386 - DNA, 841 bp, Unknown
  Bacterial polypeptide expressing nucleotide sequence isolated from the Sargasso Sea
acaaatattgatttagagcatttagatttttataaaacaaaaaataaaattattacagcttttaaaaaatttattttaaatttacctttttatggttgttcggttgtatgtattgataatactaatttaagaaatttaataaaaaaaattaaaactcggaaaattatcacttattccaaaaatgaaaattccgacattataataaaatctattaaaaaaaatattaacaatactgagttttctttatattttaaaaaaggaataataaaaaatattaaaggaaaaaaaagatttacaactaccttgttgggtgatcacaacatcttaaatgcaacagcagcaattatagtttctctaattactggcatttctttaacaaaaataaattcctctttaaattcttttcaaggagttaaaagaagatttagttttttaggtaaagttaataaagctaaaatctatgatgattatgcgcatcatccaacagagataaaagctagttatgaaattgcaaaacaaatatcaagaaaaaaaattattgtattgtttcaacctcatagattttctagaactaaaattttatatgctgacttcataaaaatattaaaaaaaatacaaatattatatgttttagatatttatccagcaggagaaaaacctataaagtctataaattctaaaggattggtaaatagattgaaaaaaacaaacaaaaaagtttattatttaaataacaaaacaaatctaagattagttctaaaaccatattttgaacaagagaacacgatagtttttatgggagctggctccattacatatatggcacaggaactattctaat

SEQ ID NO: 313387 - DNA, 828 bp, Unknown
  Bacterial polypeptide expressing nucleotide sequence isolated from the Sargasso Sea
aggcggcaaagtcattgggcggacgcaacgccgccgaagcggttgcggaccaagtcgagcggctgagcggcacgcgtccaaatggcggtgccggaccagccagcgaccgggcaagggagatcgcggcatgaagtcgcttcctctgagcatcggtaccattcatttcgtcggcatcggcggcatcgggatgagcggcatcgcggaaatcctgcgcaatctgaattacgcagttcagggcagcgacatcgccgacggcgcaaacgtcaaacggcttcgcggtctgggcatcgatatctctatcgggcatcgcggcgaaaacttgggcaacgccgaagtcgtagtaatctcatccgcagtcaaaccagataacccggaggtcgtcgaggcgcggttgcgactgatccccgtggtgcctcgggccgagatgctggcggaaatcatgcggctcaaatggggcattgcggttgccggcacccatggcaagacgacgacaacatccattgttgcctcggtcctcgatgccggacaatttgatccaacggtcatcaatggcggcatcatcaacgcgtacggcaccaacgccaggcttggtagcggcgaatggatcgtggtcgaggccgacgaatccgacggtacgttcgtgaaactgcctgcgaccatcgctgtagtcacaaatatcgatccggaacacctcgatcactacggcgatttcgacacgctgaaggctgccttcgtcaaattcgtccaaaacatcccgttctacggatttgcgacaatgtgtatcgacgacgcggaggtgcaggcgcttatcccgcaggtgtcggaccg

SEQ ID NO: 313388 - DNA, 886 bp, Unknown
  Bacterial polypeptide expressing nucleotide sequence isolated from the Sargasso Sea
cactagcatcattgcaagtatttttaacgcagcaaatttaagtccgacttatgttgttggaggtcaagtgttaagcgttggaagaagctccaatcttggagatggtgattatataatagtggaggcagatgagagtgatggatcttttcttcatcttcaacccgatattgctgtatttaccaatatagacaatgaccatttagatttttatgaatcaaatcaagagaaattaaatcagtcttttgtaagttttgctgaaaatttacctttttatggttatattttacttaatttagatgatctaaatattcgtaaaatttctaaagatgttcacagaaggcaaataacatatggtttcagtgcaaaaaatagatttcaaattactgatgtaaaactaaaaaacggcattcaaaaatttcaaataacagatcatagcaataaaaaacgctataaattttctacaaatttgagtggcaaacacaacttgtataatgttactgctgctatttgtgtagccattgaagaaaatatttcaattacgaatatttccaaaggattaaacaattttcaaggtgttagcagaagatttgaaatttcaaatctttatatatatgaccagcctagaattttaatagatgattatggccatcatcctgttgaaatttcggcgaccattcaagcaatacgtcaaaaatttccgcgtaagaaaatttgtatgatttttgagccacatagatatactagaactcaacaacttttcaatgattttgttcaagttctttctcaagtagactgtttattacttttagatatatatcctgcaagtgaaaaaccaattaaaggaatctcttcaaaaaaattaatatctgagataactaaaaaacat

SEQ ID NO: 313389 - DNA, 913 bp, Unknown
  Bacterial polypeptide expressing nucleotide sequence isolated from the Sargasso Sea
tttagaagccgacgagtctgatggaagttttttaaaactacctattaattattctgtaataacaaatcttgataaagagcatatagatttttataaaaattatcaaaatttgaaaaatgcatttattaaatttattaagaaaaccccagcattaggcaaagcaattatttgttcagacaattcagatctaaaaaatattttaaaagaaattaatagaaaaaattatttaacttatggttttgaaaaaaagtcagactatcaagtattaaatccgatatataatttgaccaattctaaatttgatttaaaaatttatagtcaagaatctaaaaaaatagttgtaagggatatagtgttaaatttaatcggcaaacataatatcttgaatgctactggagctattgctgtctgtttaaatttaggaatttcaattaatgtaataaaaaaagctttaagaaatttttctggcgtacagagaagattgactaaagtttttataaaaaataaaaatgaattttatgatgattatgcacatcatccgactgagatttgttcagttcttgaaggtttaagaagagtgcacaaaggaagaaaaataatatcaatttttcaacctcacagatattcaagagtaagtagtttaaaaaaagaatttgcatctagtttttcaatttctgatttagtattactttgtccaatttatccagctggtgaaaaaagagacaaaaattataaacaagatagatttgcaaaattaatagcaaaatcatcaaaagttcaagttatcaatgttgaaaatgaaaaagatttacaaaaatatcttcaaaaaaatttaataaatgatgagatagtaattggcttgggtgcgggatctatttcaaaatggatgtataatttaaaaggtgcggtatga

SEQ ID NO: 313390 - DNA, 549 bp, Unknown
  Bacterial polypeptide expressing nucleotide sequence isolated from the Sargasso Sea
cacttagatttttatgaaaacaatatagagaaacttaatgaaacttttcatcaatttcttgagaacttacctttttatggcacagctataatttgtacagatgaagaaaaaggagaaaaactttttaatgatttatctagaccaaaaatatcctatgggtttaacaaatcagcagattattatctaaaagatttgaaacaaactagcagttttcaagagttcaccttagtaagaaattcagttggcaaggaagttagattgcaattaaagattgcaggacgccataatgcattaaatgctacagctgcttatatagttgcaaaagaagcaggtatagcaacaaaaataataaaaaattctcttaaatcatttggaggagtatcaagaagacttgaatttaagggagatctaaaaattaataataaaaaaataaagttgctcgatgattatggacatcacccaacagaaattagcgctacagtagaagcaattaagtcatcttataaaaataaaaaaattaatatgatttttcagcctcacagatattca

SEQ ID NO: 313391 - DNA, 393 bp, Unknown
  Bacterial polypeptide expressing nucleotide sequence isolated from the Sargasso Sea
gttgtcgatttatcaggatggcatcattcacttcgtaggaatcggaggcataggaatgagcggtatcgctgaggtattgcataatctaggctatacggttcaaggtagtgacgtaacagacagctctaatgttagaagattaagtaaaatgggtataagaattatgattggtcatgtccaagagaatgtagaggacgcagcagttgtcgtagtatcttcggccataaaacctgacaactctgaactagaagaagcacgcaatcgtcggatccctgtagtgcggcgtgcagaaatgctcggagagttgatgcgatttaaatcgtcaatagctgttgggggtactcatggcaagacaactacgacatcgttggtagcctcacttctagaaagtgc

SEQ ID NO: 313392 - DNA, 796 bp, Unknown
  Bacterial polypeptide expressing nucleotide sequence isolated from the Sargasso Sea
ctgtgggagccaacgtcaacgtcttgagggcttaggtataccggttgctattggccacgcaaccgagaatgtagctaccgcggatgtggttgtcatctcgtctgcagtcacatctgataatcccgaagtcattgccgcccggtcgaaccttgttccggtggtccggcgggcggagatgttggctgaacttatgcgcctaaaatgggcagttgccgtcggcggcactcatgggaaaactacgacaacttcgctaatttcgaccattctcgacaatgctggtcacgatcctactgtcatcaatggtggcataataaatgcctatggcacaaatgcccggttgggtagtagcgactggatggtggttgaagccgacgaatccgatggctcatttgtcaagttgccagcgaccattgcagtggttacgaatattgatccggagcaccttgatttctatggtgacttcgatgctttgaaacaggcttttcaggcgtttatcgaaaacattccattttatggctttgcggcgctttgtatagaccatcccgaggttcaggcgatgatcggtcagataactgaccgccgcatcgtctcctatggcatgagtccacaggcagaaattcgcggtgaaaatttacggcaaggatccggcgggaccgtttttgatgtatatttgtcacgccggtctggcagtgatgcatgtatcgaaggtatccgactcccgatgtttggcgaacacaatgtcttaaatgcgcttgccagcatcgcagttacaaccgagatgggtatcccaaatgaa

SEQ ID NO: 313393 - DNA, 370 bp, Unknown
  Bacterial polypeptide expressing nucleotide sequence isolated from the Sargasso Sea
atgaagcgtatcgaaactattcatttcgttggtatcggtggagcgggaatgtgcggtatcgctgaagttttgcttaatcaaggatataaaattacagggtcagatattagtgtatctgctaataccaagagattgtctgaattaggcgttgaaatatttttaagtcacagcaaagaaaatgttagatatgcagatgcagttgttttttctagtgctgtagattctaaaaaccctgaattgattgcagctgttgaaagagagaagcctatactagcaagggctgaaatgcttgccgagctaatgcgatacaggcactccattgctattgctgggacacatggcaagacaactaccacgagtatagtcgcgt

SEQ ID NO: 313394 - DNA, 621 bp, Unknown
  Bacterial polypeptide expressing nucleotide sequence isolated from the Sargasso Sea
actttgggagtaaagatatttttaggacacaagaatgaaaatgtcgaacatgcagatgcggttattttctctagtgcagtagattcggaaaatccagagattgtttcggctgctgaaaaaggaaaacccatattggcgagagctgaaatgcttgccgaattaatgcgatttaggcactcaattgctattgcaggaactcatggtaaaacgactacgactagtatggttgcttcaatcttagcagagggagggtgtgatccaacttttgtgattggaggtgttttaaagagcgttggcacaagtgctaaattgggaggaagtaaatattttgttgccgaggcagatgaaagcgatgcttcttttctgcatttacaaccaatgatagcggttgtcacaaatatagaatcagatcatatggaaacttatcaaggggattttgaaaatcttaaaaagcattttgtagaatttttgcataacctccctttttatggtctagcagtcctttgtattgatgagaaagtaatcaaagaagttctgcctaaaatatctcgacccaaaataacatatggtttttcaaaacaagctgattttagaattataaattacagacaaacagagact

SEQ ID NO: 313395 - DNA, 242 bp, Unknown
  Bacterial polypeptide expressing nucleotide sequence isolated from the Sargasso Sea
gatgaactcacttacaaaacttccaataaatataggcgcaatacattttgtaggtattggtggtatagggatgtctggtatcgctgaagttttattaaacttgaattatacagttcagggatctgatattaaaaaaagtcccatcacagaacgattagaaaaattaggtattaatattttttacgagcatgatgcttcaaatttaaaaaaagctactgttgttgttattttcacagcagtct

SEQ ID NO: 313396 - DNA, 861 bp, Unknown
  Bacterial polypeptide expressing nucleotide sequence isolated from the Sargasso Sea
cacatcaaatatcaataattactaatttagatattgaacatatggatttttataaatcaaagaaaaatttaattaatgcatttgaaaaatttataaatcttcttccgttttatggaaccacaataatgtgttatgatgataataaccttaaattactaattaataaaataaaaactagaaatattttaacttattcaataaaaaataaaaaagcagatgtattaatctttgacattatacaaaacaaactaaaaacttcttttaaattaaaaattaacaataaaattattcattcctctaattataaatttactatcaatgcagttggtaatcacaacattctaaatgctactgcaagtattgttgcggctaaattaaatggaataaaaaataaagatattaataacgcgttgactaattatgtaggtgtaaagagaagattctcatttattggaaaaaaaaataaatcttttgtttatgatgattatgcacatcatccaacagaaattgcagctacattaagtgcagctaaaagtctaaaaaacaaagtaatagttgtttttcaaccacacagatacactagaactaaattactaatgagagaatttataaatgttttatctaaagtcgattatttatttttattagaaacctatccagctggagaaaagattatcaatggcgccacttcaaaagatatattttctaaactattaaaaaaaaataaaaatactacatatttaaagaatataggtgatttaaataaattaatgcaacctcatacaatgaatcaaaatacgattgtttttatgggcgctggatcaatatcaagtattgcaaaaaaatatttgaataactaat

SEQ ID NO: 313397 - DNA, 859 bp, Unknown
  Bacterial polypeptide expressing nucleotide sequence isolated from the Sargasso Sea
aggatccagggaaagaattcattttgttggtattggaggcataggaatgagcggattagcacaagttatgaaagatatgggttttagcgtacagggaagtgatgtggttaacagcaaaaatgtagaaaggtgcaaaaaaaatggaattaaagtttttataagacataataaaagaaacattaaaaattcgacaattattgtaagatcatcagcggtaaaaaataacaatccagaaattcaagccgcaaaaaatagaaaattaaaaattttaaaaagggcagaaatgttggctcacgttgtttctttaaagaaaaatatcgtaataacaggatctcatggaaaaactacaaccacatcactaatttcaagaatactttatgaagctaaattagatcctactattataaatggtggagtaataaattctattaagagccctgccagattgggaagaggagattgggctgtcctagaagccgatgaatcagacggtagctttttaaatctaccaattaactattctgtagtaacaaatatcgacagagaacatgttgatttttacaaaaattttaagaatttaaaaaaatcatttttaaaatttctaaataaaacaccaacaataggaaaagcttttgtgtgtgtagatgataaggagataaaaaaaataattcctacaattaaaaacaaaaattttttaacttatggcttttctaaaaaagcaaactttaagatttttaatactgtatataaaaaagattattcaatgtttgatctaaaagtatctattaaaggtttaaaaaagactattattaaaaagataaaactaaacctcattggccccccatatgtctttaatttc

SEQ ID NO: 313398 - DNA, 295 bp, Unknown
  Bacterial polypeptide expressing nucleotide sequence isolated from the Sargasso Sea
aatgagtaatctgccactatcaattggtttaatacattttatagggattggtggcattggaatgtcaggcattgctgaagttttaaacgaacttggatataaagtttctggaagtgatatagcagaaaatagtaatactaaaagattaaaagatttaggcattgaagtcattatagggcacaaaaaaacaaacataagtaatgctcagataattgttgtgtctacagcaatatcaaaagataattccgaacttattgaagctaaaagcaagaaaataccaatagtcacagagcag

SEQ ID NO: 313399 - DNA, 985 bp, Unknown
  Bacterial polypeptide expressing nucleotide sequence isolated from the Sargasso Sea
aacgaatattgagggtgccgaggttatcgtagtctcttgtgctatagaccgcacaaaccccgaaatctcgagtgcaatagaggcacgtatcccagtaattccgcgagcacaaatgctcgccgaattgatgcgattcaaattcggcattgccgtctcaggtactcacgggaaaacaacaacaacgtctctcgcggcttctgtgcttgccgagggagggctagatccaacctatattattggaggcaagctaaatcaggtcggtaccaacgctagccttggtcagagtgaatacatggtggcggaagcagatgagagcgatgcatcttttctggtgttgaaaccaatggtcgctgttgtcaccaatatcgatatcgaccatatgtcgacttatggtggcgattttgagcgcttgaaacagacctttgttcagtttttacaaaatctaccattttatgggctggttattgctaataccgatgaccctgtattgactggattgttgtctaatgtaggacggacctttctcacctacggcattgagtccgattctgatttccgcgcgatggatattaccagctatggactgcaaacccactttaatgtgcgccgtccaaatgctgggagtctagagattacccttccgatgcccgggcggcacaacgtgttgaatgctctggcagtaatagcgcttgctgatcatttgggtgtcaacgatgactcgctggtagctgctttgagcaattttcagggcgttgaccgtcgattccagttagccggatttgtccacaagaaaggacgaaaaatcccagtgattgatgattacggacaccatccaaaagaacttcaggttacctttgatgctgtccgtgccgcatacccctatcaccgtcttgtgagtgtctttcagcctcatcgcttcactcgtactcaagaattatttgatgaatttgttactgtattgaatcgtgctgatgagctggttctg

SEQ ID NO: 313400 - DNA, 862 bp, Unknown
  Bacterial polypeptide expressing nucleotide sequence isolated from the Sargasso Sea
aactttcgttatcggtggcttgctgaacagcgcaggcactaatgcccgtttaggcacgagtcgttatcttatcgccgaagccgacgagagtgatgcgagtttcctgcatctgcaacctatggtcagcgtggtgacgaatattgaagctgaccacatggacacctacggtggtgactttgaaaagctcaaatcgaccttcgtggactttctacataacctgccgttctatggtgtggcggtagtgtgtattgacgatgcagtggtgcgcgagattatgccgcgtattggtcgtcacatgatcacctatggcttcagtgatgatgccgatgtgcaggcgctgaacttccatcagcagggtcaccaatgccgctttaccgtcagacgtaaaggcaaggaagatttagatctgctgcttaacctgccgggtcagcacaatgtattaaatgcgcttgcggcgattgccgtggcgacagaagatgaaatcgatgatagcgccatcattcaagccttggctgaattccagggtattggccgtcgtttccaacacttaggtaaattcgcgacgccaaagggcgaagtgatgttagtggacgactatggtcatcaccccagcgaagtggctgcgaccattaaagcggcgcgcgcacgctggccggataaacgcttagtcatggcctatcagccacacagatacactcgtacccgtgacttgtacgaagactttattgaagtgttatctcaagtggattgcttgttattactcgaagtgtatagcgcgggtgaagcgccgatccccggtgccgatggccgtgcactgtgccgctcgattcgtttgcgcggacagttagatcccatctttatc

SEQ ID NO: 313401 - DNA, 689 bp, Unknown
  Bacterial polypeptide expressing nucleotide sequence isolated from the Sargasso Sea
gtagtaatatcgtctgcaatagggccgaaaaattcagaattgcttgccgctcgggaaaaaaagatccccatagttcgccgtgcagagatgttagccgaactaatgcgccttaaatggtccgtagcagtcggtggcacacacggaaaaacgactacaacttcactaattgctgccatcctagataccgccaaggctgaccccaccgtaatcaacggcggaattataaatgcgtatggtaccaatgctagattgggcaaaggggagtggattgtagtggaggcagatgaatcagatggtacatttataaaattgccagcaactattgccgtggtaaataatattgaccctgaacatatggatttttaccgaaccttcgaagaggttaaggaggccttcagggcttttgtctcaaatataccattttatggtctcgccgttttgtgtgtcgaccatccggaggtgcaagcattaataccacaaatttttgatcgtaggattgtaacctttggatttgattctcaagcagatatcagggctgtcaattttactaccaaagggggtaagtcggaatttgatattgttttctcaggtcgctcctctttggcggggaaaacactaaaaaatgtgcgattaccgatggtagggcaacataatgtccaaaattcacttgctgcagcagctgtagcaca

SEQ ID NO: 313402 - DNA, 856 bp, Unknown
  Bacterial polypeptide expressing nucleotide sequence isolated from the Sargasso Sea
tcaaatatcaattattactaatttagatattgaacacatggatttttataaatcaaagaaaaatttaattaatgcatttgaaaaatttataaacattcttccgttttatggaactacaataatgtgttatgatgataagaatctaaaattattaattaacaaaataaaaactagaaatattttaacttattcaataaaaaataaaaaagcagatgtattaatctttgacattatacaagacaaactaaaaacttcctttaaattaaaaattaaaaataaaattattcattcttctgattataaatttactatcaattcaataggcaaacacaatattttaaatgcggctgcaagtattgttgcagccaaactaaatggaataaaaaacaaagatattaataacgcgttgactaattatgtaggtgtaaaaagaagattctcatttattggaaaaaaaaataagtcctttgtgtacgatgattatgcacatcatccaacagaaattgcagctacattaagcgcagctaaaagtttaaaaaataaagtaatagttgtttttcaaccacatagatacactagaactaaaacacttattaaagagtttacaaaagttttatctaaagttgactatttatttttattagaaacctattcagctggagaaaagattatcaaaggagcaacttcaaaagatttattttctaaaatattaaaaaaaaataaaaatactatatatttaaaaaatataagtgatttaaataaattaatgaatcctcatacaattaatcaaaatactattgtctttatgggcgctggttcaatatcaaatattgcaaaaaaatatttgaataactaa

SEQ ID NO: 313403 - DNA, 915 bp, Unknown
  Bacterial polypeptide expressing nucleotide sequence isolated from the Sargasso Sea
aaaatataaaagacattaatgcagttgtatattcttctgctataaatcaaaataatccagagattgcagaagctaaaaaaaataaaattccaattgtaagtagagccgatatgcttggggaacttatgaaaaataaaaaatgtattgctgttgctggatctcatgggaaaacaacaacaacaagtttagttggaaatattttagaatctggcaagcttgacccaaccattgttaatggaggaataataaattcaatttctaaaaataataaatttggaaaaggtgaatggatggtagtagaagctgatgagagtgatggctcatttttgaaattacctcatcaaatatctataataacaaacttagatattgagcatcttgattattataaatcttcaagaaatttaaatacagcctttgaacaatttataaagaatctccctttctatggaacatctattataaatgaagatgataaaaatcttaaaaaattaattcttaaaaatgatacaagaaagataatttgttactctaataaaaacaaaaatgccaatgtttatatcgaagaagttatttttttgaagcattacagtgaatttaaattgaaattcaacaatccaattaataaattgtcaggctctcactcatataaaataaaaacaataggtttgcataatatttataatgcaaccgctagtatcatagctggtttattagcaggggtaaaaaataattatattaaattagccttaattaattatattggagtaaaaagaaggtttacacacataggaaaaataaatttatcaaatatatatgatgattacgctcatcatccaacagaaattcttgcaactctaaaaggtgcaaaacaagttaataaaaacattattgtagtttttcaacctccataga

SEQ ID NO: 313404 - DNA, 763 bp, Unknown
  Bacterial polypeptide expressing nucleotide sequence isolated from the Sargasso Sea
taatgaagcaggtttagatcctactattgtaaatggcggtattataaattctttttctaataataatcgctatggaaaaggggaatggatgattgttgaagcagacgaaagtgatggtacctttttaaagctcccacatcaaatatcaattattactaatttagacattgaacacatggatttttataaatcaaagaaaaatttaattaatgcatttgaaaaatttataaatctgcttccattttatggaaccacaataatgtgttatgatgataagaaccttaaattactatctaacaaaataaaaactagaaatattttaacttattcaataaaaaataaaaaagcagatgtattaatctttgatattatacaaaataaactaaaaacttcttttaaattaaaaattaacaacaaaattattcattcttctaattataaatttaatatcaatgcaatcggcaatcataatattttaaatgcaactgcaagtattattgcagccaaactaaatggaataaaaaataaagatattaataatgcgttgactaactacgtgggtgtaaaaagaagattctcatttattggaaaaaaaaataagtcttttgtgtacgatgattatgcacatcatccaacagaaattgcagctacattaagtgcagctaaaagtctaaaaaataaagtaatagttgtttttcaaccacacagatacaccagaactaaaatactaattagagaatttataaaagttttatctaaagct

SEQ ID NO: 313405 - DNA, 586 bp, Unknown
  Bacterial polypeptide expressing nucleotide sequence isolated from the Sargasso Sea
gatgattgctactagattacccttaaatttggggccaatacattttattgggattggtggcataggaatgtcaggaattgctgaggttctcgtaaatctaggttactttgtacaaggttctgatataaagaaaaccaacataacagttaggctcgcatctttgggagtaaagactttctatgagcatgacaaagaaaacgtcagcaattgttctgttgttgttatttcttctgctataggacaggacaatattgagttagcctctgcgaaacaacttgggattcctatagtttctagggcagagatgctagcagaattaatgagaatgaagttaaatattgtggtcgcggggtctcatggaaagacaacaaccacctcacttgttgcctcaattgcagaagtgggaaatttagatcctacagtcatcaatggcggagtaataaaagcatatggttctaacgcaaggttaggagaaggagaatggatggtagtagaagcagatgaaagtgacgggtcatttaataaactacctgcaactgttgcgatagtaacgaacattgatagggagcatatagattactatagc

SEQ ID NO: 313406 - DNA, 881 bp, Unknown
  Bacterial polypeptide expressing nucleotide sequence isolated from the Sargasso Sea
gcaggttgctgcctggagttggcccatgcgtgaattcgtgcggcatgtccattttgtgggtatcggcggtgccggtatgagcggtatcgccgcggtgttgatcgatcaggggtacgaggtcagtgggtctgatcaggcggactcggcagagacgcgtcatctttccaaaaagggcgcccaggtgtggctggggcatgatgcagcaaacgtaacgggtgctgatgtggtagtcgcctccaatgccatcggcagcgacaaccctgaagtggttgctgcggccgatcagggaatacccgttgtgcctcgggctcagatgcttggagagctgatgcgctttcggagcggtattgccgtcgcgggtacccacggaaagaccaccgcaaccagtctgattgcaaccgtcttcgctgaagcgcaacttgaccccacgtttctggttggcggtcttgttaaaagtgaggcaggcaatgcccgtttgggtaacggacgatggctgattgccgaagcagacgaaagcgacgcgtcatttttacatctgcagccgcatattgcggtggtgaccaatattgataccgatcacatggcgacttatggcggtgactttgatcagctgacggacacctttctgaagtttttgcacaatctgccgttctacggtttggcggtattgtgttcggatgacgccgtgattcgcgatcttcggtcgcacatccgacgacctgtcgttacttatggggtagagccggaggcggactatcaggcaatcgatatccgccaacatggcacccgcatgcagtttgccgtctcactgatggatcgcagtgttatcgaggtggatctggctctgccgggactgcacaacgtccgtaacgcccttgccg

SEQ ID NO: 313407 - DNA, 736 bp, Unknown
  Bacterial polypeptide expressing nucleotide sequence isolated from the Sargasso Sea
atgaaaaacattagaattggacaaaaggaaatcattcattttattggtattggaggaataggtatgagcggacttgctcaggttatgaaaactatgagttttaatattcaagggagtgatcaaaataaaaataaaagtacatctgactgtttaaaagcaggcattaaaattttcaaaggccacgctagaaaaaatataaaaaatgctacaataattgtaaaatcctccgctattaaagataaaaatatagaaatacaagaagctaaaaaaaaaaaaattccaatttattcaagagcagaagttttagctaatgtagtatctttaaaaaaaaatataataattacaggttctcacggaaaaactacaacaacatctttagtagcgaaaattttatcagatcaaaagttagacccgactattataaatggaggggtaattaattcatttaatagcaatgccaaactaggtaagggagagtgggccattttagaagcagatgaatctgacggaagttttttaaaactaccaataaattattccgtggtgacaaatattgattttgaacatatagattactataaaagttataaaaatttagaaaatgcttttattgagttcataaataaaactcctccaattggcaaatctttaatttgtattgataacaaaaatataaaaaaaatactaaaaagaattaaaaataaaaatatattaacatatggttttaataataaag

SEQ ID NO: 313408 - DNA, 1018 bp, Unknown
  Bacterial polypeptide expressing nucleotide sequence isolated from the Sargasso Sea
gagtatcgttacgcagtgaataccattccttgcttgtctcgcggtgaattattagcaaagtgtgtgaatcaaaagcacttggtgcgggtggcgggtacgcacggtaaaaccacgacaagcagtttagctgcatttgtggcggagtgttgtcaagggagtgtgtcttcaattgttggtgggacattgaccgggcgcgatagtcccgtttgttataccgatgatgcgttgtgtattgtggagtcagatgaaagtgatcgttcttttttactgctgaagcctcaggctgcaatagtaactaacattgatcatgaccatttgtcgagttatggcggtgagtatacgaacttgctggatgcgtttgtgtgctttcttaatggcatggggcccgagggtgtggcgatagtgaatatcgacgacccgggggttcaggctatcttgccgcgactgacatgtaaaacgctgacttacggcttgtcagcggcagcggatacgcgcgccactgcgcttgagtcgattgcgttatcgagtcgctttcagttggcgggtaacgggcgtgctgaggaggtcgtgttgaatttggtgggccggcataatgtgttgaatgcactgggtgtctgtgcgctggggcgtcacctgggttgggctggtgatgtggtcgcttcggcgttggcccgttttcccggggtgaatcggcgtttatgttgccacggtgaggtgtcgtatggcaccggcagcgtcatggtgatagaggattacggtcatcacccaaccgagctgatggctagtttttctgctgtgcaagccgcgtggccaaaccgtcggctattcgtggtatttcagccgcatcgttattcgcgcacgaaagccctattgttgcctttcgccgaggcgctgtcagttgtgtcggcggtgatgctgttaccgatttacgcggcgggagaggcgcacgatccggatgtgacgagtgccgatttaggtcggatgatgcagcagcacggtgcagcaggctcagtaacag

SEQ ID NO: 313409 - DNA, 682 bp, Unknown
  Bacterial polypeptide expressing nucleotide sequence isolated from the Sargasso Sea
atgaattcaatattaaaaaattctaaaattactattcattttataggaattggaggaataggtatgtctggaatagcagaattaatgctagaccaaggctttaatattaaaggtagcgatattgttttaaatgaaaatataaaaagattaagaaaaaaaggtgcaaaaatttttttaaaacatcataaaaataatgtaaaaaatatttcagcggcagttttttcttcagctataaaaaaaacaaatacagaaatagtagaatgcaataaattgtctatacctcttgtaagtagagctagtatgctagctgagttaatgagaaataagaattccatagcaatagcaggatctcatggaaaaactacaaccacaagtttagtaggaacaatgctggaatcatcaaagttagatcctaccatcattaatggtggcgtaataaatgcctattctaaaaataataaacttggattgggaaattggatggttgttgaagcggatgaaagtgatggttcttttttaaaattacctcatgaaataaatatcgtaactaacattgattctgagcacctagattattatcaaacaaataaaaatttaattaattcttttgaaaaattcataaataatataccattttatggatactcgattatttgtacagataatatttcagcactataaa

SEQ ID NO: 313410 - DNA, 613 bp, Unknown
  Bacterial polypeptide expressing nucleotide sequence isolated from the Sargasso Sea
atgctttatagcgtcacgaaggttcatttcattggaattggtggtattggtatgagtggcatagctgaacttctattaaataaagattttatagtaactggatctgatatttctgattctccaaatgtacaaaggttgaaaaaacttggaattgaaatcacaattggacatgataaaaaaaatatttctgattctgagcttataatttattctgatgcaatccctaaagataatgttgaactcaaagaagctttttccaaaaatttattaatctattcaagagctaaaatgatatcagaaatagctaaattgaataattcaactgttgctattgctggaactcacggtaaaacaactacaacgtctatggttggcagtatactgaaaaatttaaatttagatccaactattattgttgggggcgttgttaagtcgctcgattcaaattcagtattaggaagtggagatacttttgttgttgaggcggatgagtataacaaaagcttacttcatttgaatcctacaattgcagttattaataatattgattttgaacatattgaatgttatcaagatttagatgatttaaaagatacgtttataaaatttgcaa

SEQ ID NO: 313411 - DNA, 451 bp, Unknown
  Bacterial polypeptide expressing nucleotide sequence isolated from the Sargasso Sea
atgtccagcataaaaaatattcatctaatcggtatcggtggagctggcatgagcggaattgcagaaattcttcataatcaagactattctgtctcaggaagtgatctagaggatacaaatgtgacaaaaagactaaaaaatcttggggtaaaaatttttaaaggccataaagaaaataatgtcttaaaaaaagatcttgtagtgatttcatcagcaatatcaaaaacaaatattgagcttaaaaaggcaatttctatgggcataccagttattcctagagctgaaatgttggctaatctcatgatgcttaaaaatagtattgctgttgcaggcagtcacggaaaaacgacggtgacttgcataatggctcatattttcaccgaggcaggtcttgatcctacttacatcattggaggcaaagtaaagtcttttgaatcaaatgccaaattag

SEQ ID NO: 313412 - DNA, 790 bp, Unknown
  Bacterial polypeptide expressing nucleotide sequence isolated from the Sargasso Sea
aaataatcccaaccatgaatttccagaaatgagacgcatcagaagcatccattttgttggtattggtggtgctggtatgtgtggtatcgctgaggttttatgtaatcaaggctataagattacaggatcagatatcagtgaatccgcgaataccaaaagattatctaatttgggagtaaagatatcttttggacacaagaaggaaaatatagagcatgcagatgcggttattttttcaagcgcagtaaattcgaaaaatccagaaattgtttcggcaattgaaaaaggaaaacccatattgacaagagctgagatgctcgccgaattgatgcgatacaggcactcaattgctattgcaggaacacatggtaaaacaactacgactagtatagttgcgtcaatcttagcagagggagggtgtgatcctacttttgtgataggaggtgttttaaagagcgttggcgcaagtgcgcagctaggagaaagtaaatattttgttgccgaggcagatgaaagtgatgcctcttttttacacttacagccaatggtagctgttgtcacaaatatagaatccgatcatatggaaacttatgaaggagattttgaaaatcttaaaaagcattttatagaatttttgcataaccttcctttttatggtctcacagtcctttgtgttgatgacgaggcggtcaaagaaattcttcccaaaatatcccgacctaaaataacatatggtttttcaaaagaagctgattttagaattatgaattacaggcaaacaaacactaga

SEQ ID NO: 313413 - DNA, 688 bp, Unknown
  Bacterial polypeptide expressing nucleotide sequence isolated from the Sargasso Sea
aatgaagggtttgccgcttgatatcggtactattcactttgtcgggataggtggaataggtatgagcggtattgccgaagttttatacagtttgggatatactattcagggtagtgatttaaatcacagtcaaaatgtaaagcgtcttgaagaaataggtattacagtttttatcgggcataaaagtgaaaatataaaagatgctgaggttgttgttgtgtcgtcagccgtagggaaggaaaacccagaggtagaatttgcgcgtcaaaatttgataccggttgtacgtagagcagaaatgttggctgagttaatgcgcttgaagtggtctgtagccgttgggggaactcatggtaaaacaaccacaacttctttaattgcctcattgtttgatagggctaaattagatcctacagtgattaatgggggtatacttaacgcgtggggttctaatgctaggttgggcggaggtgaatggatggttgtagaggccgatgagtctgatggaacctttgtaaagttgccagccactatagcagttgtaacaaatattaatgctgaacacatggaccattatggttcattttctgccctacaaactgcctttgaaaaatttgttaaaagggtacctttttatggcttcgcggtcttgtgcatagatgaccccgcagtcaagctatatacctag

SEQ ID NO: 313414 - DNA, 310 bp, Unknown
  Bacterial polypeptide expressing nucleotide sequence isolated from the Sargasso Sea
atgaatccttctaaattttctttaaataatatccattttgttgggattggtggcagtggtatgagtggaattgcagaagttttatttaatttaggttacacggttactggatcagataaaaaggagtctgatgtaactaatcgcttgactgataagggtatagaaattgcgtatgatcattctgcatctaatttaaaaaaggtagaaatggttgttgtatccagtgcaatttctgaaagtaatccagaaattatagaagcgaaaaagagatctattcctattcttgcaagggctgagatgctctcaagtt

SEQ ID NO: 313415 - DNA, 766 bp, Unknown
  Bacterial polypeptide expressing nucleotide sequence isolated from the Sargasso Sea
aatgggtggtataatcaattctttatcaaaaaataataaatttggtaaaggtaaatggatggttgttgaagctgatgaaagtgacggttcttttcttaagcttccacatgaaatttctattataacaaatttagatgttgagcatcttgactattataaaactgtaaaaaatttatattcagcttttgataaatttatcatgaatttacccttctatggaatttcaatagtaaatgaagatgataaaaacttaaaaaaaataatccaaaaaaatgatacaaggaaaatcattacttattcaattaaaaatagaaaaagtaatgtttttattgaaaaaatatattttgataatcgatttagttatttcacattaaattttaatattccaataaataatttatatggacattattcatataaaataaaagctattggattgcataatgtttataatggaacagccagtattattgctggacatttagcaggtgtaaaaaattctttcataaagaatgctttgaaaaattataaaggcgttaaaagaagatttacacacttaggaaaggtaaatttagcaaatatttatgaagattatgctcatcatccaactgaaattgcagcaacattatctggagcaaaacaattaaatcaaaatatagtagttgtgtttcaaccacacagatattcaagaactaaatttttatttaatgattttgtgaatgttctgtctaaaataaaaaaattgtatctattggatacttattcg

SEQ ID NO: 313416 - DNA, 630 bp, Unknown
  Bacterial polypeptide expressing nucleotide sequence isolated from the Sargasso Sea
aatgcgcagggttaaaaatatattctttattggtatcggcggtgccggtatgggtggtattgccgaagtattactgaacgaaggttatgctattgctggctctgacattcaagaagggccaatgacacagcgcttaagtgaattaggtgctgatgtgaaaataggccaccgtgcggaaaatgtcgaaggcatggacgttattgtggtgtctagcgctatcaatgagcaaaatccagagattatcgttgctcgtgaaaagcgcattccgattattcgccgtgcagaaatgctggcagaattgatgcgattccgccacggtattgcggtggcgggtacccacggcaaaactaccacaaccagtttaatttcaacgattttcgcagaagcggagtatgaccctacgtttgttatcggcggtttgcttaacagtgctggtacgaatgcgcgtttgggtaaaagccgttatctaatcgcagaggctgacgagagcgacgcgtccttccttcacttgcagccgatggtttctgtggtgaccaatattgaagccgaccatatggatacttatggtggcgacttctcaaaggtgaaagatacctttgttgatttcttgtcaaacctaccgttttacgg

SEQ ID NO: 313417 - DNA, 602 bp, Unknown
  Bacterial polypeptide expressing nucleotide sequence isolated from the Sargasso Sea
ttggttaaatatagaattaaatcttcccggaaaacataacgtcttaaatgctctagcatcaattgcagttgctcatgaactaggagtatccgatgaaaatattattagcgcgttgcgtaatttccaaggtatatcccgtcgttttcatgtgagaggtgagattaagataagtagtttcaatttaacactgattgacgattatgcgcatcaccctacggaaataagttcgacttttgaggctataagatctggctggcccgcacgacgtttgatcgttatatatcaaccacaccgttatacacgtatgcgtgacttattcgaggacttcagcgagattctttcgtgtacagatagattaatagttttagatgtatatccagcaggagaagattttattcctggcgctgatggtcgatcattatgccgagcaattagatcaagaggaaaagttgatcctatatttttggaaaataaggaatcaatttttgaggtccttcctgatgttgttgaagacaatgatttgcttttgacacttggcgcaggcgatattggttctttgtcatcacagttatataaaaattattctactgttgttcactaaa

SEQ ID NO: 313418 - DNA, 823 bp, Unknown
  Bacterial polypeptide expressing nucleotide sequence isolated from the Sargasso Sea
aatgggaggcataattaatagttttaatacaaatgctcagctgggcgaaggcagatatttaattgctgaagcagacgaaagtgatcagtcattccttttgttacagcctagcatgtcaatcattactaacatagaaccagatcatttggtgaattatgagaacagctttgagaacctcaagatagcctttttagatttcgtaaaaaaacttcctttcaatgggatggctatagtttgtggagatgatccgatagtcagagaattaatacctaaattttctagaccttacataacttatggttttgatgaaggtaatgactacatcctttctaattattcctcaagcgactttcaatcatcatttaacttaagatctgaatcagaaagtatagaccttagttttaacatgctgggaaggcacaatgctttaaatgcagcagctgccacaattctttgtattcaagaaggaatttcgaccaaggtaatcaataattctctaaaaaacttcatgggcataaatagaagaatgcaagttctcggaaaactatctataaatggatcaagttgtatcttagttgacgactacggacatcatccttcagaaatcaaatctactattgattccattagagaatctttccctaataaagaattaaatatggtctttcagccccacaggtacactcgtacaaatgatttattttctgagttcgtagatgtattaaccaaaatagataatctgatcttgttagatatttattcagctggagaaagtcctataaatggagtaagtagtgaagagttaatgaaaaaactcatagat

SEQ ID NO: 313419 - DNA, 743 bp, Unknown
  Bacterial polypeptide expressing nucleotide sequence isolated from the Sargasso Sea
tcggcttcgctggtcggtcgctgtcgccggaacgcacggcaagacgacgaccacctcgctcgtggcgacgcttctcgacgccgccgacatcgaccccacggtggtcaatggcggcatcatcaccggttggggaagcaatgcccgcctcgggcacggccagtggatggtcgtcgaggccgacgaaagcgacggctccttcgccaagctgaacccgaccgtcgccgtcgtcacaaacatcgaccccgagcatctcgaccatcacggcagctacgaggcgctggagcaggcgttcgtcaatttcgtcgcatcgatccccttctacggcttcgccacgctgtgcatcgaccatccggcggtgcagcggctgatggccggtatcaaggaccggcgcgtgatcacctacggccttgccgccaatgccgatgtccgcgcggtcaatctgcgccatgacgcggcctcgatggtcttcgacgtggtgctgtcggaccgcaccgccggcggctacggcaggatgccggagatgcggtttccgatgctcggcgagcacaatgtccagaactgccttgccgccgtcgccgtggcgatggagatgggcgtgacgctggaccgcatcgccgccgccatggccggcttcggcggcgtcggccgcaggttcgagacgaagggcgtcagcggcggcgtcacggtaattgacgattacgggcaccacccggtcgaaatccgcgccgcgcttcaggccgggc

SEQ ID NO: 313420 - DNA, 803 bp, Unknown
  Bacterial polypeptide expressing nucleotide sequence isolated from the Sargasso Sea
aagaaaaaatttaattaatgcttttgaaaaatttataaatttgcttcctttttatggaaccacaataatgtgttatgatgataaaaatcttaaattattaattaataaaataaaaactaggaatattttaacttattcaataaaaaataaaaaagcagatgtattaatctttgacattatacaaaacaaactaagaacttcctttaaattaaaaattaacaataaaattactcattcttctaattataaatttactatcaatgcaatcggtaatcacaatattttaaatgcaactgcaagtattgttgcagccaaactaaatggaataaaaaataaagatattaataatgcgttgattaattatgtaggtgtaaaaaggagatttacatttattggaaaaaaaaataagtcctttgtgtacgatgattatgctcatcatccaacagaaatttcagctacattaagcgcagctaaaagtctaaaaaataaagtaatagttgtttttcaaccacatagatacactagaactaaaatactaattagagaatttataaatgttttatctaaagttgattatttatttttattagaaacctattcagctggagagaagattatcaagggtgcaacttcaaaagatatattttctaaaatattaaaaaaaaataaaaatactacatatttaaaaaatatacgtgatttaaataaattaatgaaacctcatacaatgaaccaaaatactattgtttttatgggtgcgggttcaatatcaagtattgcaaaaaaatatttgaataactaat

SEQ ID NO: 313421 - DNA, 657 bp, Unknown
  Bacterial polypeptide expressing nucleotide sequence isolated from the Sargasso Sea
aatgagtaatctgccactatcaattggtttaatacattttataggcattggtggtattggtatgtcaggcattgctgaagttttaaacgaacttggatacgaagtttctggaagtgatatagcagaaaatagcaatactaaaagattagaagatttaggtattgaagtctttataggacacgaaaaaacgaacgtaagtggcgctcagataattgtagtgtctacagcaatatcaaaagataattctgaacttattgaagctaaaagtaagaaaataccaatagtacacagagcagaaatgttatgtgagctgatgagacttaagtggtcaatcgcaatagctgggacacatggtaaaacaactacaacatctttggttgcatcattattagatggagctgattttgacccaacagttattaatggaggaattattaataattggaagagtaatgcaaaaattggaaaaggggaatggatggttgtagaagcagatgaaagtgatggttcattctctaaattgacacctacagtggctgttgtaacaaatatagatagcgaacatttagattaccatggctcattcgaaaatcttgaaaatgcatttaataaatttgtctcatctattcctttttatggttttaaagttttatgcat

SEQ ID NO: 313422 - DNA, 670 bp, Unknown
  Bacterial polypeptide expressing nucleotide sequence isolated from the Sargasso Sea
aatgagtaatctgccactatcaattggtttaatacattttataggcattggtggcattgggatgtcaggcattgctgaagttttaaatgaacttggatacaaagtttctggaagtgatatagcagaaaatagcaatacgaaaagattgaaagatttaggcattgaagtctttatagggcacaaaaaaacgaacgtaagtggcgctcagataattgtagtgtctacagcaatatcaaaagataattctgaacttattgaagctaaaagcaagaaaataccaatagtgcacagagcagaaatgttatgtgaacttatgagacttaagtggtcaatcgcaatagctgggacacatggcaaaacaacaacaacatctttggttgcatctttattagatggagctgattttgatccaacagttattaatggaggaattattaataattggaagagtaatgcaaaaattggaaaaggggaatggatggttgtagaagcagatgaaagtgatggttcattctctaaactcactcctacagtggctgttgtaacaaatatagatagtgagcatttagattaccatggttcattcgaaaatcttgaaaatgcatttaataaatttgtttcatctattcctttttatggttttaaagttttatgcatcgatcatcccagt

SEQ ID NO: 313423 - DNA, 524 bp, Unknown
  Bacterial polypeptide expressing nucleotide sequence isolated from the Sargasso Sea
attgccgcaggatatcggctccatccatttcgtcggactgggcggtatcggcatgtccggcatcgccgaagtgatgctgaaccacggctacaaggttcagggatcggatctgaaggacggcccgattctggagcggttgcgcagcaagggggccacgaccttcatcggccagtccgaggacaacctgaccaacgcggaggtcgtggtgatctccaccgcgatcaagaggggcaacccggaactggacggtgcgcgcaagcggggtctgcccatcgtgcggcgggcggaaatgctggccgaactgatgcgcctgaaatccaatgtcgcggtggcgggcacgcacggcaagacgacgaccacatcactcgtctcggccattctggatgcgggcggggtcgatccgacggtcatcaatggcgggatcatccatgcgtatggctccaacgcgcggatgggggccagcgactggatggtggtcgaggcggatgagagcgacggcaccttcctgaaactgcccgcgacca

SEQ ID NO: 313424 - DNA, 1233 bp, Unknown
  Bacterial polypeptide expressing nucleotide sequence isolated from the Sargasso Sea
gatgaaattttcagagttagcattaaataaagttcatattattggaattaacggtattggtatgagtgctttggctatttatttaaaaaaaaatagcataaatgttacaggaagtgatattgcacacaatgctaatactgtaattttagaaaaatataaaattccagtatttataggtcacaaatcttcaaatattaaagacagagatataatattttattcttcagcaattaaagataatcctgaaattaaagaagcgaaaaaaaataaaattccctgttacaacagatctaaacttcttcagctaatatgcagagataaattcacgattgttgtatctggctcacatggaaaaacttcaactacctctattttaggacatttgttagttcgtgcaggtctaaaccctactattatatctggcggtattatgcagaattttggacaaaatatatatcttactgacagtaattatgtagtcgtagaagctgatgagagtgatgggacagtatttaaattaagtccaagatatttattatttttaaacgttgatagagagcatattgatttttataaatcttactctaactttaaatctaaaattaaaaactatatacttagtcaaattaaaaaagatgttaaaattttcataaacaatgatgataattttcttttttcattaaaaaaatattctaaaaatttaaaaacatttggctcaaataaaaaagcaaactatagttataaattaataaagttatctgataaaaaatcttcatttcaaatttataaaggtaaaaaaatcatatcaaataaattaactacaaatttattaggtgaacacaatgtacaaaatctaactgcagttttatccattatagatgatttaggatatgaaataaaaaaatctcatatccttgattttaaagggactaaaagaagaatgaatattcttggtaaattaaaaaaaactacttttattgatgattatgcacatcatccaacagaaatagataaattaattaatattatatcattatataaaaagaaaactgtacttttaataattgaacctcatagatactctagattaaatgatttatataaagaatatttgcatgtattaaggaataccaataacttgattattttaaaaacctatgaagcaggcgagagttacaaacaaggtatgaaaaattctaaaaacttggtgaatgatttgaatgtttcaaataa

SEQ ID NO: 313425 - DNA, 1417 bp, Unknown
  Bacterial polypeptide expressing nucleotide sequence isolated from the Sargasso Sea
aatgcgcagagtagagcggatccacttcgttggcatcggcggcgctggtatgggtggtattgccgaagtattagtcaatgaaggttataaagtttcgggttcagatatagcgccaaaccctgtggtcgaccgtttagcgtctttaggcgcctgtattgtgattggtcacaaagctgaaaacatccaaggtgccagtgtagttgtggtctccagcgctattaaaaccgataacccggaagtggctgctgctattgaacaacgtattccggtggtgcgccgtgctgaaatgctggctgaactaatgcgtttccgtcatggtattgctattgccggtacccacggtaaaaccaccaccaccagcttaatagcttctatttttgctgaagctggcactgaccctacttttgttatcggtggcttactgaattctgcaggcaccaatgctcgtcttggtgctggtcgttatttaattgccgaagcggatgaaagcgacgcgtctttcctgcatttgcagcctatggcgtcggtgatcactaatatcgaacctgatcatatggaaacttatcagggtgactttgaaaaaatgaaagccacctatctggagttttgccataacctgccattttatggtgtcgccgtgatgtgtatcgacgatgccgtagtgcgtgagctgatcccacagattggccgttttgttattacttatggttttagcgaagatgcggattatgtgatcagcgacttcggtcaaaccggcactcaaagccattttgttattaccgataaaaacggtgtagccagccaaatcgagttgaacttagccggtcgccacaatgcattaaatgcaaccgccgcttttgcagtggccaaagatgaaggtatagaaccccctgctattttggctgcgctgaaaaaattcgaaggtataggccgtcgctttgagcagtacggcgagtttgacacaggccgtggcaaggtgctactggtcgatgactatggccaccatccaagcgaagtggcggctacgttagctgcagcacgcaacgcctggccagagcgccgtattgtgatggcgtatcagccgcacaggtacaccagaacccgtgatttatacgaagatttcgctaaagtgctgtcgtcagtcgacttattgttattgcttgaagtttatgccgcaggcgaagccgctatcccaggtgctgacagccgcagtttatgccgctctattcgtgcccgtggtcagttggaccctatttatgtagcaacaccagctgacttacccgcagctttagctgatgtgttgcaggacggtgatgtgctgttgactcaaggcgctggcaatataggggcactggctaaacaactggcggcctctaaattagcaatttctgcattaaaaccaaacgagggagcttga

SEQ ID NO: 313426 - DNA, 1157 bp, Unknown
  Bacterial polypeptide expressing nucleotide sequence isolated from the Sargasso Sea
tatgaaaattaatattggccaaaaagaggttattcattttattggtgtgggcggtataggtatgagtgggctagcacaaattatgaaaattatgggcttcaaggttcaaggcagtgatactaacatgaataaaaatattgaaaattgtaaaaaattaggaataaaattttttctaggccagaaaaaaaaaaatattagggaagcaacaatattagtaaaatcttcggctattagagataataatccagaaattagagaagctaataaaaaaaaattaccaatatatgaaagggtcgaaatgctttccaatatagtttctttgaaaaaaaatattattatttctggctcacacgggaaaactactacaacgtctttagtttcaaaaatacttctagagtctaaattagaccctacaattattaatggaggagttatcaattctttaaaaaataatgctaaattgggaaaaggagattgggcagttctagaggcggatgagtctgatggcagttttttaaaacttccaattaactattcgattgtaacaaatattgataaagagcatattgatttctataaaaattacaaaaaattagaaaattgtttcattaagtttataaataaaactccaccaatcggaaaatgtataatttgtattgatgataaaaatataaaaaagattaaaagaaaaattaaaacaaaaaacatattaacttatggttttagctctttatcagattatcaaattataaagcccaaatataatataaataattgcaaatttgatcttgttgtaaaaaattttttaggaaaaagaaaaattattaaaaatatagttttaaatttaattggtaaacataatattttaaattctgtggcggctataagcgtgtgtcttaatttaggtattaaaattaaaattattaaaagggctttattaaaatttacaggagtacagagaagaatgactaagatatttgaaaagaataataatgaattttatgatgattatgctcaccatccaactgaaatttattcagtgttagagagtataaaaaatgtcgctaataaaaaaaaaattacatcagttttccaacctcacagatatagtagagtaaattttttaaaagaggaattttcaaaatcgtttaaatttt

SEQ ID NO: 313427 - DNA, 1045 bp, Unknown
  Bacterial polypeptide expressing nucleotide sequence isolated from the Sargasso Sea
aatgataattaacttagcaaaaactgaaattatccattttgtcggcataggaggtatcggcatgagtggtttggcaataattatgaaaggattaggttttaatgttcaaggaagtgatttaaatcccaataagaatattgaaagattaaaaaaaaataaaataaaagtatttattggacataaaaaggaaaatatttcaaatacaactatcctagttgtttcatctgcaattaataagaataatgtagagttaattttagctagaaaaaaaaaactgccaatttatcagagaggagatatgttggctcacattgtatctttaattaaaaaaaatgtagttgtaagtggatcacatggaaagaccacaactacttcattagtttcaggaatcttctcaaaagcaaagttagatcctacagtcataaatggtggagtaataaattcatttaaaaattctgccaaattaggaaaaagtaactggtgtttaattgagtcagatgagtcggatggaagctttttaaaagtttctccaacatattcgatcgtaacaaatattgataaagaacatatggatcattataaaaatcttaattcattaaagaaatcatttatagagtttattgaaaaaacaccatcatttggtaaatcaattatttgcatagatgacaaaaataataatgaaataataaaaaagattaatgttaaaaattatttgacttacggtacaaacaaaaaatctaacttccgaataaataatattattcaaaataaagagttttcttcttttgatcttgatattaacttacctggaaagagaagtttttctattaaaaaaattaaaattccattgcttggcttacataatatacgtaatgcagcagcctctgcagctatatgtaaaataattggaatttcatcagttttaattaaaaaaggtttaaatgaatttgcaggtgttgaaagaagatttaataaaataaaattttatagaggtagtttaatttttgatgattacgcgcatcacccaacagagataaaagaagtt

SEQ ID NO: 313428 - DNA, 1369 bp, Unknown
  Bacterial polypeptide expressing nucleotide sequence isolated from the Sargasso Sea
tatgctttatagtatcaaaaaagtacatcttattggaataggtggaattggaatgagtggaatagcagagctgctaaaaaataaggaatttgtggtttcaggttctgatattgctgactcaccaaacgttcagaggctaattgatttgggaataaatgtatctattggtcataataaagaaaatatttctgatgctgagctagtaatatactctgatgctatcccaaaagataatgctgagttgatagaagcattagcaaaaaatataatagtttattccagagcaagaatgatttcggaaatagctaagctaaataattctacagttgctattgcaggaactcatggaaaaactactacaacatcaatggttggtactattttaaaatctatgaatttagaccccacaattattgttggcggggttgttaagtctttagaatcaaattcagttttaggaggaggtgacacatttgttgttgaagctgatgagtataataaaagcttgctacatttgagtccaacagttgcggttatcaacaatattgattttgaacatattgaatgctacaatgatattgatgatttaaaagatacatttcttcaatttgcaaattcagtacctttctacggtactgtttgtgcatgtaaagattccaataatgttgcatcaatattatcaaaaatagataaacctataatcacttatggaatcgaaagtcagaatgtggatattaaggcagaaaatttgcatcaggaaaacggtactatttcatttgatgtaaaaattaaagatcaaatattttcagttaatctttctgtaccaggtaaatacaatgcctataatgctcttgcagcactatcagtttgtgaaacaatgggaattgatttagaaagcgcatgtaaagcacttagtaatttcagcggtgttaagcgaaggtttgatgtaaaagcaaacaaagatataatgattattgatgactatgcacatcatcctgttgaagttcaaaatgtaatagaaactgtaaagagcaattggaataaaaatttaaatattatatttcagccacatcttttttcaagaacaaaagaattttataaggattttgcaaaagctttaatgatagcagataatgttatgattactgagatttttggctctagagaaaaagaggatagttctactacttcagacttaataattaatgaaatgttaaaattaaaccataagaatgtttcatatgtttcctcaaaagatattgttgaggaagtaaagtctagaggagttaagggagatatttttttaatgatgggagctgggaacatttggagatatgctgaagagttaggaaaacattacaatgattga

SEQ ID NO: 313429 - DNA, 1144 bp, Unknown
  Bacterial polypeptide expressing nucleotide sequence isolated from the Sargasso Sea
tgctacgattttacaaaaagaggttttaaagttacaggttcagatcttgttattacagatgagttaaaggaattaaaaaaacttggtgctaaagttcaaattggtcacgaacccaggcttattaagaatgctgatttggttgttgcttcatctgcaatatctaagggaaattctgagctttcatatgccaagaaatcaggattaactattattcctagggctgagatgctcggaactctgatgaaaccgtatcgaagtattgcgattgctggcagtcacggcaagactactacaactagtatagttgcaagtatttttaacgctgcaaatttaagtcctacttatgttattggaggtcaagtattaagcgttggaagaagttctgaacttggagagggtgactatatcattgttgaggctgatgaaagcgatggatcatttcttcatcttcaacctgatattgctgtaattactaatatagacaacgatcatttagatttttatgaatcaaatcaagaaaaattaaatcaatcttttttaagttttgccgaaaatttacctttttatggttatattttaatcaatttagatgactcaaatattcgaaaaatttctaaagatattcatagaagacaaataacatttggctttagtgcaaaaaatagatttcaaataactgatataaagttaaaaaacggcgttcaaaaatttcaaataatagaccacagcaataagaaaaattataaattttctacctatttaagtggtaaacataatctatgcaatcttactgctgctatttgtgtagcaattgaagaaaatatttctaccaagaatatttcaaaaggactaaacaattttaaaggtgtaggtagaaggtttgagatttcaaatcttactttctatgatcagcctcgaattttaatagatgattatggccatcatcctgttgaaatttcagcaaccattcaagcaatacgccaaaaatttcctcgtaagaaaatatgcatgatttttgagccacatagatttaccaggactcatcaacttttcgatgattttgttaaagtgctctcccaagtagatagcttattgcttttagacatatatcctgccagtgagaaaccaatcaaaggaatttctt

SEQ ID NO: 313430 - DNA, 1285 bp, Unknown
  Bacterial polypeptide expressing nucleotide sequence isolated from the Sargasso Sea
atgggctctattcatcgcgttcattttgtgggtattggtggcgtgggtatgggtgggattgccgaggtattaattaatcttggttatgctgttcaaggttcagatgtaaatcaaaatcctatcacagagaggcttgctaaccttggcgctaaaatttttattggccatgattcaggtcatattgcaacagctgatgtggtggtggtaagtagtgctattgcacctgataaccccgagattgttaaagcaacaagacaacgtattcctgttattcaaagagcagagatgctagccgaattaatgagatttcgtagtggcattgcagttgctggcactcatggaaagacaactactactagcctcatagcaagtatgcttgctgaaggtgggcttgatcctacattcgttatcggtggtcgacttgctagtgctaatgccaatgcgcaattgggtgaaggtgagtatctggtagcagaagctgatgaaagtgatgcatcatttctgcatttacagcctgttattgcaatcgttaccaatatagatgctgatcatctagaaagctatgaaggtgactttggtcgattaaagcaggggtttgctgacttcttgcacaatttgcctttttatggattggccgtaatttgcaatgatgatttaaatgccagaacacttataccagaagttggtcgacgtgcactcacgtatggagtttcggatggatcagatattcgagcagaagaagtcaaatcagctggattagcgagctcatttataatacatcgtgaaggccatgagccattagaggtaaagcttaatcttccaggtttccataatatattgaattcgttggcagcggttagtgttgctacggagcttggtgtttccgatgaggcaataaaaaaagcattactagagttctctggaattgatagacgatttcaggttctgggaacagtcacaactcgcaatggccttgtaacatttgtggatgattatgcacaccatcctacagaaattgccgccacaatagaggcggctcgcgagtcttggccaggtaatagattggtagttgcatttcagccccaccgctacactcgcacgcatgcacttatagatgatttttctgaggttctttcaggggctgatgtattgttattaaccgatatctatagtgccggagaagaaccgatcactggagcagatggacgtgcactagctcgagcagtgcgcagtcgagggctcgtagagcctgtttttgtagaggacttgaaggagctgcctaacg

SEQ ID NO: 313431 - DNA, 1390 bp, Unknown
  Bacterial polypeptide expressing nucleotide sequence isolated from the Sargasso Sea
aatgaatacctcacaatataagctcaacaatatccatttcataggtattggtggcagcggtatgagcggtatagctgaggtgctgaacaatcttggttacaaagtttcgggctcagatagtatctcttcatcaaataccgataggcttgagaggttaggcataagtattagctatgatcataatccaaataacttaacaaatgttgaaatggtggttatatcgagcgctatatctgatgataatcctgaattagtctatgccaaggaacatttaattccagtgttagctagggcagaaatgctatcaagtttgatgaacaataaaagaggaatagctattgcaggtacgcatggcaaaacaactactacaagtttagtagcatcaataatgactgacgctaatctagatccaacttttattaatggtggaataataaatagtttcaactccaatgcacagttaggagagggagattacttaattgctgaagcagatgaaagtgataagtcttttttgctcctgcaaccttctgtgtctatagttacgaatatagagccagatcatttagttaattatgatggtagttttgataatctaaaaaaagccttcttggaattcataaaaaaactgccgttcaatggagtatcaattgtttgtggtgacgacactgtagtgaaagagttgaagatcaactttcaaagacctcatattagttatggttttgaaccttcaaatgactatgtgttatcgaattacagcacagatgggaggaactcttactttaaattatcttcagatacaaattcatttgactttaggcttaatatgcttggtaagcataatgttcttaatgcagctgcagctattgtattatgtttacaagaagggatagcagttgaagtcattcaggattctctatctaactttatgggcatagatagacgaatgcaaattttaggggaaaggaaaattggaaatagtacttgcgtttacattgatgattacggacatcatccaactgaaattagaaaaacaattcaggcaataagaaattcttttcctgactttgagctgaaaatggtttttcaacctcatagatttacaagaactaaagacctatatgaagaatttattgaagttttaagccatgtagatgaattatttcttttggatatttattctgctggagaaaattcaatagaagggatcaatagttcaaacatacaaagttccttaattagatctggttttgataatgtaaagttattgaataaaaaagaagtagctaaagaatttgataaagatttaactaaagatactatatttgttttccagggtgctggtgacatatcttccattagccgaagtatagttgaggaattcaaataa

SEQ ID NO: 313432 - DNA, 937 bp, Unknown
  Bacterial polypeptide expressing nucleotide sequence isolated from the Sargasso Sea
aatgaaaattgaattagctaaaaaagaaacagtccatttcgttggaataggaggcatagggatgagtggtctttcgttaataatgaaaagaaaaggatttaaagtccaaggaagtgatatttcaaataataaaaatgtagaaagattaaaaaaagaaaaaataaaaatttttttagggcattcgaagcaaaatttaaaaaatgctacgatagtagttgtttcatctgcaataaaaaaaaataatccagaatttatagaagctaagaaaaaaaaaattccaataattaaaagaggaaaaatgttagcaagtatagtttctttattaaaaaatattgttgtagttggttcacatggaaaaactaccacgacttctttaattacttctatttttcaagaaactaaattagaccctacaataattaatggtggtgtgattaactctattaaaaatactgctaagttaggaaaaagtgattggtctattttagaagctgatgagtctgacggaagttttgctcatattttaccaacttactcaataattactaacacagatcgagaacacatggatttttataaatcgattgatgatttaaaaaaatattttttagaatttattaaaaaaacaccatcatttggaaaatcttttatttgtattgatgataagatcaatagagaattaatcaaaaaaattaaaaataaaaattattttacatatggtgtgagatctaattctaattttagaataaaaaatataaaacaatttaaatctttctcagaatttgatattcaaattagtcttccaaataaaaaaactctaaatatcaaaaatattaaaattcctttacttggcattcacaatataagaaattctgttggggcattaggtgtagcattatcagttggaataccaatacaaaaaattaagaaaggttta

SEQ ID NO: 313433 - DNA, 1396 bp, Unknown
  Bacterial polypeptide expressing nucleotide sequence isolated from the Sargasso Sea
gatgaaaatcgaattagctaaaaaagagattatccattttataggtattggtggaataggtatgagtggactcgcattgattatgaaggcaaaaggttttcaaatccaaggaagcgatattaataagaacaaaaatattgaaaaattaaaaaaacagagtgtcagaatttttattggtcataaaaaacaaaatataaaagacgttacaattgtagtgacctcctctgcaataaaaaaaagtaatccagaattactagaggctaaaagaaaaaaattaccagtgataaaaagagggaagatgttagcaaatcttgtttctttaatgaaaaatattgttgtagttggctcccatggtaaaacaacaacgacatctttagtgagctctatttttgaaaatacaaagttagatcccacaataatcaatggaggcataataaattcaataaagagtactgcaaaattaggtaagagtgactggtctatattagaggcagatgaatccgatggaagctttactcatatttctcctacatattcaattataactaacatagatagagaacacatggatttttataaatctatgaaggatttaaaaaatcattttctacactttgtaaaaaaagttccgtcatttggaaaatcttttatttgtattgatgataaaattaacaatgaattaataaaagatataaaaaataaaaatttttttacttatggagtcaagtctaacgctaattttcttattaaaaatatcattcaagacaaacttttctcaaaatttgatttatctataaatttaccaaataaaaaaaaaaatatcttaaaaaactttcagatcccattattaggtattcataatataagaaactccacagctgcaattgcagttgctcttactgtaggaattcccgtatctaacattaaaaaaggtctgaagaacttcaaaggtgtccagcgaagatttaataagatatttacatttaatggtgttgatttttatgatgattatgcccatcatccaacagaaataaaatctgtgttagagggagtaaaaaaagtttttgataagtttgaaagagtgtgtatttttcaaccccatagaatctcaagattaaaagatttaagaaatgaatttgctcattgtttcagagatgcagacacaattatattatgtcccgtttttacagctggggaaaaaataaaattgggttttaattatagtgattttgcaaaagaaataataaaaaattctaaagtaaaactgtttatgattaaaaataatattgatttagctaaatttcttaagcaaaatatttatggaaataagattgtcataggaatgggtgctggctcaatctcaaattggatgaaaaaattacctgaattaatgtaa

SEQ ID NO: 313434 - DNA, 1468 bp, Unknown
  Bacterial polypeptide expressing nucleotide sequence isolated from the Sargasso Sea
atgactaagacagaaagatacttacagctaagaagtatgatcccggaaatgcgccggattaagcgtattcatttcgtcggcattggcggcgcgggcatgggtgggatcgctgaagtattagtaaacgaaggttatgtcgtcagtggttcagacatagcgcaaaacgccgtgactgacagactctgcctgctgggcgcaaaaattcatatcggccatggcgccgataacgtgcagcaagccgatgtggttgtggtctcgaccgcgattaatcctgagaacccagaaattattgcggcgaaggaattgcgtattcctatcgtgcgccgcgccgaaatgttggccgagttgatgcgttatcgccatggtgtggcgattgcggggacgcacggtaaaaccacgaccaccagtttgattgccagtttgtatggtcaagcgggtcgcgatccgaccttcgtgatcggcggcctgctgaacagtgcaggtactaatgctcgcttaggtacgagtcgttatcttatcgccgaagccgacgagagtgatgccagcttcctgcacctgcaacctatggtcagcgtggtgacgaatattgaagccgaccacatggacacctacggtggggattttgaaaagctcaaatcaaccttcgtggactttttacataacctgccattctatggcgtggctgtagtgtgtatcgacgatgcagtggtgcgtgagattatgccgcgtattggtcgccatatgatcacctatggcttcagtgacgatgccgacgtgcaggcactgaacttccatcagcagggtcaccaatgccgctttaccgtcagacgtaaaggcaaagaagatttagatctgctgcttaacctaccgggtcagcacaatgtattaaatgcgctcgcggcgattgccgtggcgacagaagatgaaatcgatgatagcgccatcattcaagccttggctgaattccagggtattggccgtcgtttccaacacttaggtaagttcgcgacgccaaagggcgaagtgatgttagtggacgactatggtcaccaccccagcgaagtggcggcgaccattaaagcggcgcgtgcaggctggccagacaaacgcttagtcatggcctatcagccacacagatacactcgtacccgtgacttgtacgaagactttattgaagtgttatctcaagtggattgcttgctgttactcgaggtgtatagcgcgggtgaagcgccgatccccggtgccgatggccgtgcactgtgccgctcgattcgcttgcgcggacagttagatcccatctttatcgccagcccagatcagttagccgaagtgctacccgatgtgttgcaggagggggatttattgttgacccaaggtgcgggtaatataggcgccctgtcgcgccagttagccgcctctgaattgggctttagcactaccgcgacaaccgaggtaaaaccttgat

SEQ ID NO: 313435 - DNA, 1408 bp, Unknown
  Bacterial polypeptide expressing nucleotide sequence isolated from the Sargasso Sea
tatgaaaaaatattttaataaaaagatagggaaaaaagaaaaaattcattttataggcattggtggaagcggaatgtcaggcattgcgtcagtcttatgtgatcttggctatgatgtatcaggctctgatattatagattcgtctacagtaaaaaatttagaagataaaggaattactgtaaaaattgggcatcacaagaaaaatatcttaggaaaagatattttagttatatcaagcgctattgacaaaaaaaatgttgaattaaaagaaggattgaaagcaaatattcctgtaattcaaagagctcaaatgcttgctgaacttatgagatttaattacggtgtagctatagctggtacacacggtaaaactactacaacctcaattttagttcatatcttgtgttacgccaattttgacccaacatacattattggtggaaaaattctgaactctaaaagctcgtctttgggttcaagtgagtaccttatagcagaggccgatgaaagcgatgcttcatttttgaatcttacaccaaatatagcagtaattactaatattgataacgatcatttaataaatcatgataatagttttgataaactcaaagacaattttattaaattttctaacaatattcctttctacggtaaatgcattataaataaatctgataaaaatatttcaaagattgaaaaaaaaatccttagaaaaaagatttcgtttagtattaatactaaagcaaactacatggtaacaaaaataaaaaataattttttgtcaagtgagttcactgtaaaagaaaaaaaaaagaaatatgcagttaccttaaatataccggggtttcataatgtagaaaatgctcttgcagcaatagcaacagcacgtgagatgggtgtaaatattaaggatatacaaaattcaataccatcatttttgggtataaaaagaagatttgaattattaggagagtttaaaatagatcaaaattcattttattggattgatgattatggtcatcatccaaccgaaatacttgcagtttataactctgtaaaagagatatggccaaaaagaaagattctagtagttttccaaccacacagatattcacgaaccaaagacttaagcaaagaattcaaaaaaatttttcgtaaaatagataaacttgtaatacttgatatttatgcagctagtgaaaaaaataaagataaaattgatataaataaaatattcaaagaaaatttaagtaaaaaaaatgctcttcatattaaaggatttaataatctagaaaaatatttgttaaaaagtattcaaaatgagtacgttttaataacaatgggtgctggtgatatatcgaaatttgtattatcttttaaggatcacaaaaaagttagcaagatatga

SEQ ID NO: 313436 - DNA, 1396 bp, Unknown
  Bacterial polypeptide expressing nucleotide sequence isolated from the Sargasso Sea
tctgaacaaaaaaataaaaatttttttagtaggaataggcggtataggaatgagtggtattgctgaaatactatataatttaggatatgaggtttcaggatcagataaaaaagagggttcaaatgttagtagattaaaaaaactaggtataaaaatcaaaattggccatagatcaagtaacatcaaagactcatctttagttgtttattcttcagcaattaaaaatgataaccctgaaatcaaaaaggcaattaaggaaaaaattcctgtaataggtagagcagaaatgcttgctgaattgatgaggatgaaaaaaacaatcactgtcgcaggaagccacggtaaaacatcaaccatttctattatttctgagatctttgtaaaatctcgattagatcctaccgttgtaaatggcggtataatcaattctttaggctctaatactagacttggttcaggtgactggatgatagttgagacagatgaatctgatggaagttttataaacttaccttctttttgtggcttgataacatctgttgatgacgaacatcttgattactataagaacatgaaaaatcttgaacatgcatttaagaagtatattaagaatatatctgtttttggattttcagtgatttgttctgatgacaaaaaagcatataaaatagctaaaaaacaaaaaagatctgatcatattttttatggaactgactctaaggctcattataaagctatgaacttaagaagagatcatactgggcagacttttgatattgaaatctcaaatagaaatagaataacaacaaaatataaaaatatccaatttccaatgcatgggaggcataaccttcttaatgctttgggcgcaatcacaatatctcacaaaataggaataaattttaagtttattcgtaaggctttgaaaggttttaaaggcgttaaaagaagaatgacattaataaatgaaatagcaggggtaaaatattttgatgattatgctcaccacccgacggaaattacagcttcattaagagcaataaaagaattaacaaataaaagagtaatagctgttgttcaaccgcatcgtttttcaagaattaatcaaacctataataaatttgtaaatagttttagaaattcggatatggtgatagttcttcctatttacgctgctggagaaaagggaataaaaaaaattaacgctaaatccttggccttaggtattcaaaaaaactcacgcacgaatacatattcttttaatcattttagaaaggttcaggagtttttaaataaagaaataaaagaaggtgaaacagttgtatttatgggggcaggtaatatttctgagttagcttataattatgtaaatgagttgagtaaagcaaatgtctga

SEQ ID NO: 313437 - DNA, 1390 bp, Unknown
  Bacterial polypeptide expressing nucleotide sequence isolated from the Sargasso Sea
aatgaaattaagcaaaattaaaaatattcattttattggaataggtggagttggaatggttggaatagcagaaatgcttttaaaccagggctttgctgtttctggcagtgatctagtggaaaataaaaatactgaaagacttaagtatctaggggcaaaaatttttattggccataatgaaaagaatgtaagagattcagatgttgttgtttactctacagcagttactgaatcaaatcctgagatgcgatgtgcaaggtctttaaataaaacaatcattgcaagggcagaaatgttatcaagccttatgcgtggattccaaagcatagctgtagctggttcacatggaaaaacaacgactacaagtctcatagctaatatttttataaaagccaaacttgaccctacatatataattggtgggaggatattgggacaagaagataagagtattcttggctctagtgagtatcttattgttgaagctgacgagagtgatgcatcatttctacatttaagtccagagataagcgtaataactaatgttgataatgatcacctggatttctacgaaaataatatagaaaaactcaacgaaacatttcatcaatttcttgaaaatttacctttctatggcacagcaataatttgtactgatgaagaaaggtctgaaaagcttttcaacaatctagctagaccaaagatatcttatggatttagcagatcagcagattactatttaaaagatttaaaacaagtaagtaattttcaggaatttactttggtgagaaactcagttggtaaggaagttagattgaaattgaaaattgctggacgccataatgcattaaatgcaacagctgcatacatagttgcaaaggaagcaggcataaccacaaaaactataaaagattctctaaagtcgtttggaggagtatctagaagacttgaattcaaaggagacttaaaaattaacaataaaaaagtaaagttacttgatgattatggccatcacccaacagagattagtgcaacagttgcagcgattaagtcttctcataaaaataaaaaagttaatatgatttttcagcctcatagatattcacgatcctcgatactttttgatgatttcatagagtgccttggagcagtagataaagtgattattctagatatttactcagcgggagaacaaaatagtgagcgcataagttcttatgattttgttaattctttaattaaaaggggcaagaaagccttttttgctaaaaatttaaaagaaatttctaaaatccttgaagctgaagtaatgaataatgaaattcttgttacacaaggagctggcaacatagttgatatttcaaattctcttttggcaatgtacaaatga

SEQ ID NO: 313438 - DNA, 1324 bp, Unknown
  Bacterial polypeptide expressing nucleotide sequence isolated from the Sargasso Sea
atgaaactctttaaaaaagcaaaaaatattcattttgttggtattggtggtgcaggaatgataggtattgcaagagtattattgcaaaaaggatacaaaatatctggttcagatatatctgattcgaatgagcttaaaaagcttaggaaggatggagctaaagtttatataggacattctaaagaaaatatattaggagctgatttgttggttatgtcttcagcaattgataaaaagaatcctgagattattaaagccaataaagaatcaataacaattatcccaagagcagaaatgttaggtagtatcatgattgggtatgacagtattgcagttgctggaagtcatggaaaaacgactaccaccagtatgatcgcaaaaatattaagtgttgcaaatttgagtcctacatatgtcgttggaggaaaagttttaagtactgatgaaaattctgatttaggtgatggtaattatcttgttgcagaagcagatgagagtgatgggacatttacccaccttcaaccagatgtagctgtgttaactaatatagatgatgatcatttagtgcattacaacaatatttttgaaaatttattagactcatttgtaatgtttttagaaaatattcctttttatggttatatggttatgaatggagatgataaaaatataaaaaaaatttcaaaaagaatttctagaaaacaaattacttttggtgaatcaaaaaattgtgactatcaaatcattaatatcaaagcatcaaaaggaattcaaaacttcgaaatttttaataataaaaataacaaaacgcataaattcagattaaatatacctggcaaacataatgtatttaatgcttcagcatctattgctctttctttagaagaaggggtgccggttggtgcaataaaaaagggaattgctgaattttcaggagttgggagaaggtatgaaaagcataatatagaaattgattctaaaaaaatgattcttatagacgattatgggcatcatccgctagaaataatctcaaacatacaagcttataaagaagagtatccaaacaaaaaggtttgtatgatttttcaaccgcacagatttacaagaacagctcagttatttgatgattttataaaagtattaaatcaaacagactccttaatattattggatatttattctgcaagcgagaaacctattaagggtatacattctagaacgattacagagactataaagcaattaggacacaaagacgttacgtatatcaaacatcatgatgatgtaattaaattggttaatgataaaaaagattctttttgat

SEQ ID NO: 313439 - DNA, 1333 bp, Unknown
  Bacterial polypeptide expressing nucleotide sequence isolated from the Sargasso Sea
atgagctataataaatatttttttattggagttggaggaattggaatgtcttctatagcaaattatcttattgatactaagaatattgtttttggatatgatagatcatcgaataaactggttgataaattaatagataatggacttcagtttactgataaactagatataggtttaataccacaggagttccttgatgataatgttattgttgtatatactcctgcaattaaaaatgataatatatatcttgactttttttcaaataaaaaaagaaataaaatttttaaaagatccgaaatattaggtcaaatatctacaaattcaaaatgtatagcagttgcaggaactcatggtaaaacatctacaactgctatcttaagccatttattatactctaaacaagttaaatttagatcatttgttggtggaataatgaaaggatttgattcgaattacttatctaccggtgatgaatatgttattattgaagcagatgagtatgacaggtcttttctagctctagatccagactatactttaataacttctattgaaaaagaccaccttgatgtttatggtgacttggaatctattctaacaagctttgggattttttgtgataaaacaaaagaatttgtaatagcagaaaagggcattaatattaaaaaagatttctcgttctcagtagatgaagatgcagattactctgttaatattataaaaaacgaccttaatggaattcattttgattttaaaactccaaataatttaatttcaaatattcatgcaagagttataggaaaacataatttaaaaaatgttatttcagccttatcattaattgatcaaattgaggattttaatttagaagaattcataccgcatttatctgaatttaagggaattgaaagaagaatggatatttataaatatgaagataaagtaattatagatgactatgctcatcatcctaccgaaataaagtcaattattgatacaatagattataattttcaagataagcctaaagcggttatttttcaacctcatttgtactctagaacaagggatttaatggatgattttggtaaagttctatcttattttcaagaagtataccttttaaatatttatcctgcaagagagaagccaattaatggtataacttcagaagctttattgaataaaatagatacatcaaaaaaacaaataattaaaaaggttgatatcaatgatataattaataagactaaatgcaaaataatttcaattcttggtgcaggcgacttaacgttaaatctaaacaaaaaaatatttacaaatgaataga

SEQ ID NO: 313440 - DNA, 1321 bp, Unknown
  Bacterial polypeptide expressing nucleotide sequence isolated from the Sargasso Sea
gaagttttatttaatttaggttatacggttactggatcagataagaaggagtctgacataactaatcgtttgactgatatgggcatagaaattacttatgaccattctgcacttaatttaaaaagggtagaaatggttgttgtttccagtgcaatatctgaaagtaatcctgaaattaaagaagcaaaaaagagatctattcctgttcttgctagagctgaaatgctttctagtttgatgaacactaaaagagggatagctattgctggaacgcacggaaagacatcaacgacaagcattatcgcttccataatgactgaagcaggcctggaccctactttcattaatggcggcataattaatagttttaattccaatgctcagttaggcaaaggaaaatatttaattgctgaagcagatgaaagtgatcagtcattcctcttgttgcagccaagcatgtcaatcattactaatatagagccggatcatttagtgaattatgagaatagttttgagaatctcaagatagcttttttagaattcgtaaaaaaacttccttttaatgggatggctatagtttgtggagacgatccgataatcaggcaattaatacctgaattttcaagaccatatataacttatggatttgatgaagaaaatgattatgtcctttctaattattcctcaagtgactttcaatcatcatttaacttaagatctgaatcagaaagcttagatcttagttttaacatgcttggaagacataatgctttaaatgctgcagctgcagcagttctttgtattcaagaaggagtttctaccaaggtcattaataattctctaaaaaatttcatgggcataaatagaagaatgcaagttcttggagaactacctataaatggatcgaattgcatcttagttgacgactacggacatcatccttccgagattaaatctactattgattccattagagaatctttccctaataaagaactgaatatggtcttccagcctcacaggtacactcgaacaaatgatttattttatgagttcgtagatgtgttaaccaaagtagataatctgatcttgttagatatttattcggctggagaaagtcctataaaaggtattgatagtgaagaattaatgaaaaaaatctcagatcaaggttttagtaaggttaagttactaaattcaggaaaggaaattattagatctcttgaagatcacgttgataatgaatcagttcttattatgcagggagcaggaaatatctcagatgtaagttcagaaataaagaagaagtatttagactgat

SEQ ID NO: 313441 - DNA, 1387 bp, Unknown
  Bacterial polypeptide expressing nucleotide sequence isolated from the Sargasso Sea
atgtttagaaaagtaaataaggttcattttgttggtattggtggaattggaatgagtggaatcgcagaattattgatcaatcaaggttttgaagtgagcggctcagatttaaagaattctgaaataataaataaacttgagaaaaatggtgcaaaaataaatataggacataattcagataatgtggcagactgtgaggttttagtttactcaagcgctgttccaaaaaataattcagaacttgtttttgctcagaataaaaaaatacctgtcatcaaaagagcagaaatgttagcggagttaattgcattaaaaaatactagtattgctgtgagcggaacccatggcaaaacctcaacatcatcaatgatcggatctctattatcacattcaaatttagaccctaccctcatcgttggaggtcttgttaaaaatataaattcgaattctaagcttggttcaagcgagctttttgttgttgaagcagacgaatatgataaaagttttctacaattaaaacctacaattgccgtcataacaaatattgaaaaagaacatatggactgttatgacaatatgaatgatttatttgattcatttttaaaatttgcaaattctgttccattctatggagcagttattgcctgtaatgattcagaaggcataaataaaattaaagatgaaattaaaagaccaataaccacatatggtctttctcctgatgcagatatttatgctaataatttaagctttgataaaatgaattctacctattcccttaattataaaaatgaaaatattggaaaagttaatttaaatgctcctggcaaacataatatcttgaattctcttgctgctatagcaattggatttgaattagggctaaacaaacaaacaattattgagggtataaacagctatcaaggcgtaagaaggagatttgaaattaagggcgaagtagatgatgtaattgttgtcgatgattatgctcatcaccctactgaagtattggcaactattgaaacggccagtatcagttggaatagaagaataattgctattttccaaccccatctttattcacggactaaagaattttacaaagattttgcaaaagcactgataaaaagtgatgttgctataattacagatatttatccagctcgagaaaaacctattgatgggatcacaggtcaattagtttatgaagaattgaaaaaaaatgggcatgttgatgttatctatgaaccaaatttagaaaaattaactcaccttgttgatggcattgttaaacaaaatgatttggttattactcttggcgcaggaactatttggcgatatagtgaattaattgttcaaaatctcaaaaaaagattaaaaaattagt

SEQ ID NO: 313442 - DNA, 1396 bp, Unknown
  Bacterial polypeptide expressing nucleotide sequence isolated from the Sargasso Sea
atggaccatcttaataaaaaaggaagaatttttttagttggtataggcggcataggaatgagtggtatagctgaaatacttcacaatttagggtatgaggtaacaggctcagatcaaaaggaaggatcaaatgttattagattaaagaaattaggaataaaaattaaaattgggcataatgctagtaatattaaaggctcatcattaatcgtttattcttctgcaataaaaaaacaaaatgttgaaataaaagaggccctaaagattaaaattccattgataagtagagcagaaatgctagcggaattaatgagaatgaaaaaaacaatcacagtagccggaagccacggcaaaactactacaatatcaattatttctgaaatatttgtaaaatctgaattagatcctaccgttataaatggaggaataataaattctcttggatctaacactaggttaggttttggcgattggatgatagttgaaacagatgagtctgatggaagttttactaaattaccttcttttagcgggttaataacttcaattgatgatgagcatatagatttctacaataacatgaggagtcttgaaaatgcatttgaacaatatattaacaacatatctgtttttgggttttcggttatttgctctgatgataacaaattatataaaatagcaacccaacaaaagagatctgatcatttcttttatggaacaaatgcaagagctaattataaggcaaaaaatattagaattaataagcaaggacaaacttttgatattgaaattaaaaatataaatgaaaagagaaaaatctataaaaatattcaattcccaatgcacggaagacataatttactcaatgctttaggtgcaattgcaatatctcataggattggaataagtttcaaatttattcgccaagcattgagaggttttgaaggtgtgaaaaggagaatgacattaataaaaacattagataaaagaaaatattttgatgactatgctcatcacccaacagaaattaaagcttcattgaaagcattaagagatctatctaacagaagaataattactgttgtacaacctcatcgcttttctagaataaagcaaacatttgataaattttctaaaagtttcaaaaattctgattttgtcattattcttccagtttatgctgctggcgaaaaaaaaataaaaaatattaacgctagtagcttggctaaaagtattcaaaagaactctaaaactaaaactctagcatttaatgattttaaaaaagttgaagattttttaaatcatgaagtcaaaaaaggagaaacagtaatatttatgggcgcaggaaatatttctaatttagccaataattatgtaaatactttagggaaataac

SEQ ID NO: 313443 - DNA, 1399 bp, Unknown
  Bacterial polypeptide expressing nucleotide sequence isolated from the Sargasso Sea
aatgaaacacatcgtcaaacacattcatttcgtcgggatcggcggcgcgggcatgagcggcatcgccgaagtgctcgtcaacctcggctacgaggtcagcggctcggacctgtcgcgcaacgcagtgacggatcgtctgcaggcgctcggcgcccggatcgcgatcggccacgacgcggcgaacatcgagggcgcgaacgcggtcgtcgtgtcgacggccgtgcgttcggacaacccggaagtgctggccgcgcgcgcgcagcgcgtgccgatcgtgcagcgggcggtgatgctggcggagctgatgcgcctgaagcagggcatcgcgattgcgggcacccacggcaagaccacgacgacgagcctcgtcgcgagcgtgctcgcggcgggcgggctcgatccgaccttcgtgatcggcgggcggctgatcagcgccggcgcgaacgcgcggctcggcacgggcgacttcatcgtcgccgaggccgacgagtcggacgcgtcgttcctgaacctgtatccggtgatcgaagtcatcacgaacatcgacgccgaccacatggacacctacggccacgatttcgcgcggctcaagcaggcgttcatcgaattcacgcagcgcctgccgttctacggcagcgcggtcgtgtgcgtcgacgatccgaacgtgcggcagatcatcccgttcatctcgaagccggtcgtgcgctacgggctgtcgccggacgcgcaggtgcgcgccgaagacatcgatgcgcgcgacggccgcatgcatttcacggtgatccgcgaagggcgcgcgccgctggcggtcgtgctgaacatgccgggcctgcacaacgtgcagaacgcgctcgcggcgattgcgatcgcgaccgatctcggcgtgtcggacgacgcgatccagctggcgctggcggaattcaacggtgtcggccggcgcttccagcgctacggcgaagtgccgaccgcggacggcggccactacacgctgatcgacgactacggccatcacccggtcgagatggccgcgacgatcgcggccgcgcgcggcgcgttcccgggccgccgcctcgtgctggcgttccagccgcaccgctacacgcgcacccgcgactgcttcgacgatttcgtcaacgtgctgtcgacggtcgacgcgctggtgctgacggaagtctacgcggcgggcgaggcggcgatctcgaccgccaacggcgacgcgctgtcgcgtgcgctgcgcgcggtggggaaggttgacccggtgttcgtcgcgacggtcgacgacgtgccggacgcattggcgaaggtcgcgcagaacggcgacgtggtgatcacgatgggcgcgggttcgatcggcggcgtgccggcgaaggttgcgcagcacactcaacagaaggcatga

SEQ ID NO: 313444 - DNA, 504 bp, Unknown
  Bacterial polypeptide expressing nucleotide sequence isolated from the Sargasso Sea
gggccatagctttagcctatcttaatggcataaagattgaggattccttagaagctattaaaacttttccaggagtaaaaagaagaaccgaatatttaggttcaataaagggtattaagttatatgatgattatggtcatcacccaacagaaataacagctacaatttctgctcttaaagaaaatactttaggaaaattgtacgtcatatttcaacctcataggtacacaagaaccaaaaatggttttgaggactttaagacatccttatctaaagcagatgaaaccatcgttgtcgatatttacccagctggggaagaacctatcccgggtgtaagcagcaaaaactttgaacaaaaaaacataaaatatttgaaatctatgagaatggttcccagctatctatcaactagagtaaagaaaaatgatatcattttaactttaggcgctggagatattacgttattgggaccacagatattaaaatatttagatgaaatataaa

SEQ ID NO: 313445 - DNA, 1393 bp, Unknown
  Bacterial polypeptide expressing nucleotide sequence isolated from the Sargasso Sea
atgaaattaaataaaaataaattaatacatattgtaggagttggtggaattgggatgagtggaattgcagaaattttatcagaaatgggatatcaagttcaaggaagtgacataaaaattaacgcaaacactgttcgattaaataaaaagaaaataaaaactttcaattcacataaacagtcaaatttaaaaaatgtaagcttagttgtttattcatctgcaataagtaaaaacaatattgaacttgaacattccaaaaaaattaaaattccttcaatttcaagagctgaaatattatctcaaattgtaaaactaaaaaaaactatagctatatctgggtctcatgggaaaactactacgacatctctaatttcagcagttttaaatggggcaagaatgaaacccactgtaatcaatggcgggataataaatcagtttggaacaaatacaaaattaggatcaggtgattggttagtagttgaagctgatgaatctgacggtacttttgtgaaacttccagcctcaatttctgtggtaactaatattgataaagaacatcttgattactattcaaattttcaaaatcttaaaaactatttcaaaaggtttatcacacaagttcctttttatggtttcgcagttatatgtatagatgataatgagctacgtaagttagctgcaaatataagtactacaaaaattattagaaccggttttcatagagaaagtgatatcaaatgtattaaattaagacataaagccaatgaaacaatatttgatgtttttgtaaaagagaaaaaccaaactattaaaaatattaagttaccacttcatggagcgtataatgtaaataatgcattagctgctatagcagttggtcttcaattaaatgtaaaaccagaaataattaagaagtctctaaattcttttaagggtgtccaaagaagacttactgaattatggagtaataataacataagagttgttgatgattatgcccatcatccgactgaaataaataatgtattaaaaggattggttgatgcagacaaaaaaaatagaattattactattttccagcctcatagattctcaagggttttagatttgaaaagcaaattcacgacgtgttttaaaaatagtgaatatgtatttgtttcggatgtttatggagcgggtgagaaaaaaccaaaaaatttcgatttaaataaatttattagtaacattgcaaaaaattctaaagtcaaagctgaatattttgttaaaaatgatcaactatttgaattaacaaagaagaatagatcaaaaataatctttttatttttaggggctgggacagttacagattgggctcaaaattttgctaaagagttaaaaaaaatttatgaatgaa

SEQ ID NO: 313446 - DNA, 1390 bp, Unknown
  Bacterial polypeptide expressing nucleotide sequence isolated from the Sargasso Sea
atgaaattaagtaatatcaaaaaaatacacttcattggtattgggggtgtgggaatggttggcattgcagagatgctgataaatcaaggcttttacgttagtgggagtgatctagttaaaaataaaaatactaccaggttgaattccttgggtgcaaaaatttttatcgggcataacgagaaaaacgtaagaaattcagatgttgttgtttattcttctgcagttaatatttctaatcctgagatgaaggctgctaagtctttaaatattactttaataccaagagctgaaatgttatcaagtttaatgaggggatttcaaagtattgcggtcgcaggctcacatggaaaaacaaccactacgagtttaattgctgacatttttgtcagagcaaagcttgatcccacatttattattggtgggaaaattttaggtcacgaaaataagagtattttaggaacgggcgaatatttaatagttgaagctgatgaaagtgatgcatcttttttgcatttgaatccagaaattagtgtcgttacaaatattgataatgatcatcttgattattatgagaataatcttgaaaaattggattctacttttctgcaattccttgaaaatttaccttttttcggaagtgcaataatttgtacagattctgaaagatcgaaaaaagtattcgaaaacttatcaagaccaaaaatatcctatgggtttgataaaaaagcagattattttattaaagatttgaaacaacaggctaagtttcagaaatttaaaataattcgaaattctacaggcaaggaaatatcgttagaattaaccttatctggaaagcataatgcgcttaacgcgacagcagctttcatagttgctcagaaggcaggaataaatacaaaggttattaaagattctttcaaaaattttggtggagtatcaagaaggcttgagttcaaagcagatttaaaaattggtggtaaatctgtaactcttattgatgattacggacatcatccaactgaattaaaagccacaattgaagcactaaaatcaactaaccccaacaaaaaaatatgcatgatatttcaaccacacagatattctcgttcaacgttatttttcaaagagtttatagaatgtttaagagatgtagatacttcaataatccttgatatctactcagcaggcgagcaaaatttacaaaaaataagttcatatgactttgtaaatgcacttattgaaaaaaagaaaaatgccttctttgctaaaaatttaaaagaaatttgtaagattttagaatctgagatcaagggtaatgaaataatagttacacaaggcgcaggcaatattgtagatatatcaaactctattaaagccatatacaaatgaa

SEQ ID NO: 313447 - DNA, 1402 bp, Unknown
  Bacterial polypeptide expressing nucleotide sequence isolated from the Sargasso Sea
ttgacttttagaaaaataaaaaatgtattctttgttggtattggcggtattgggatgagtggaattgccgaattattattgaatttaggttttaatgtatccggatctgatataaatgaaaatgataatgtaaagcgattaagaaatttgaatattgatgtaaaaattggccatagccccagcaacataaatcaagatacggatgttttagtttattcgagtgcagtaccgatagagaatcctgagattattcgcgcgcgtcaaaaagggattcctatcatacgtagagctgaaatgttaggagagcttatttctgtaaaagaaactagtatagcagttagtggcactcatggaaaaacaacaacatcatcgatgattggaacaatactagcatatgccaaaaaagatccaacaatggttgtaggcgggcttgtgcataatattgacacaaattcaaaattaggtaatggagatatgatcattgttgaagcagatgaatttgaccgtagttttctagcactcaaaccaacaattggcattattacgaatatagaattagaacataccgactgttatgatgatttaaaagatctacaagatgctttcatccaattctgcagatcagtccctttttatggagaagtgattttatgcgcagattctccagcggtacaggaaatcattccaaaaattgagaggcccatgaccacctatggacggtcaagggatgcggcctatcgagcgaaaaacatacgatttcaagagaataaatccacatactctatttttcgcgcggaggaatgcttgggagaaataaagttaaatgttcctggcgaacataacgtactaaactctcttgcagccgttgtattaggcatagaaatgggcctctcttttaatgatattcaaaaaggtatatataattacaaaggtgtacgtaggagatttgatattaaaggtatctttaatgatattatggttcttgatgactatgcccaccaccccacagaagtaaaagcaacaatagaggcagcgaaagctggttgggatagaagaattattgctgtatttcaaccccatttatttaccagaacaagagagttttttcgagaattttcaaattcattagaacttgcagatgtagtattgattacagacatctaccccgctcgtgaaaaacctatcccaggagtcacatctaaattaatctatgatatactttttcaaaaaatgaaagattattgctttttagttcctgaccttgatgatcttgaatcaatgcttgataaaattatagaacctggtgatatgataattacaatgggagctggaaatatttggcgttattgtgaatcatactctaagcaccttaattcaacttttgaggaaattgaaggttgaa

SEQ ID NO: 313448 - DNA, 1280 bp, Unknown
  Bacterial polypeptide expressing nucleotide sequence isolated from the Sargasso Sea
atcgattaatagaaatggggaattaaagtacatattgggtcaaagggcagaaaatataaaaaatgttagtattatagtaatttcttctgcaataccggaagataatgttgagttagtagcaggtgctttaaataaaataccaatagtgagaagagcagatatgcttgcagaattaatgagatttaaaaagtcaatttctgtaggtggttctcatggtaaaacaacaactacatcttttataagctcattattagaaggagctaaattagatcctacagttgttaatgggggtataattgaagcatatggaactaatgctagattgggaaaaagtgattggatgattgtcgaggcagacgagagtgatggtacatttataaagctgccatctacttatgtagtaattactaatattgatagagagcatatagatttttataaaacatttgataatttaaatagggcttttagaaattttgtggaaaatattcctttttacggtgttgcttttgtatgtatagactctccggatacagaaaatttgtgcaaggatattaaatataggaaattaattacttatggttttaatagaaaatctgatctgatgatttctaatgtaaaggttaaaaattatctaacttattttgacattactataaataaaagtaatttatctaaaaaaaaatttattaaaaatatagcaattccaattcctggagatcataatattagaaatgcatgtgcatcaattgcagttgctttagaattagatattaaagaaaaaactataaaagatgtgttactaaattttagaggagtagagagaaggtttagtttcgttggctcagttaataatattaaaattatagacgattatgctcatcatcctacggaaataaaaaatactttaaaagcagcaagattattatgtaatggtaaattaattgttgtatttcaacctcatagatattctcgaataatagacttatatgatgaatttattaattctttttttgatgcagatatcttatttgttacaaagatttacagtgcgggcgaaaaacaaattacagacataaatgaaaaaataatagcaaaatcaatacagaaaatgggtcataaaaatgtaaaatgttttaaggatgagaaatgtatggaagtggaattatctgaagtttcttcaagtaatgattttataatttttctaggagcagggtcaatttcaaaaaaggcaagaagtatggaagaatctatgttaaaaataattaggaagaattaag

SEQ ID NO: 313449 - DNA, 1356 bp, Unknown
  Bacterial polypeptide expressing nucleotide sequence isolated from the Sargasso Sea
aatgaatgtttcaacaaagtttccagtagaaattggaccaatacattttatcggaattggtggtatcggcatgtctggtattgcggaaattttaattaaccaaggttattctgttcaaggttcggatttgaaggaaacagaaattactttacggttagagagaatgggtgcgtcaataaaaattggccatgataaaaataaccttaagagagcggctgttgtcgtgatttcgtctgcaatcaataagaaaaaccctgagttgaactatgctcgttccgcaggtttgccggttgtacgaagagccgaaatgttagcagaattaatgagaatgaaatcaaacgtggcgatagctggcacacatggtaaaaccaccactaccactttggtcgctactttgttagacgaaggtgattttgatcccacagttattaatggaggaataattcatgcgtacggctcgaatgcaagggctggagatggtgagtggatggttgtggaggccgacgaaagcgatgggacctttactaggctacctgcaaccatagcggttgtcactaacatagaccccgagcatttggagcattggggtaacttcgactcgctaagaaaagggtttctggattttatttctaatattcctttttatggaatagccatttgctgtagtgaccatccggaagtgcaaaaacttattggcaaaatctctgatcgccgaataaaaacctttggcctcaatgctcagtctgacgttcgggcaataaatctaaattataaaaatggtcgagcctattttgacatcaggttccagcaggagaaatttacaattaacgactgtgttcttcctatgcctggcgaccacaatgtttcaaatgcattgggagcagttgcggtcgcacatcatctaggtattgaaaatgctaaaatccgtgaggcattagcgaaatttaagggtgttaatcgtaggtttactaaggtgggtgaagttaacggtgtaaccataattgatgactatggtcatcacccagttgagatatccgcggtattaagggctgcaaggcagataagttcgggacgagttatagccgttcatcagccgcacaggtatacacgtcttaatgctttattcaaagatttttgttcatgttttaatgacgctgacatagttgcaattgcggatgtttattccgctggagaaaaggcaataccaggtgcaagtagagatgatctcgtaacgggcttggttagtcacggccatcgtcatgctgtcgcggtttctaatttacaagatttgtcacaactaatggcaaaaaatgctaaatctggtgatattgtgatatgtcttggggctggtactat

SEQ ID NO: 313450 - DNA, 1396 bp, Unknown
  Bacterial polypeptide expressing nucleotide sequence isolated from the Sargasso Sea
aatgaaaaagtttgaaaaagtaaaaaatatccactttgttggcattggtggtgctggcatgataggcatcgctcgtgttttactcaaaaaaggttataaagtatcaggttcggatattgattattcaaatgatttaaaaaaattaaaaaacgatggagcaattgtttatgaaggacatcatgagaataatattaaagataaggatttattagttgtttcctcagccattgattccgaaaatgtagagttgcttcaggctaaaaaagactctatcacaataattcccagagcagagatgctaggaagtcttatgattggatatgagagcatagcggtggcaggtagtcatgggaaaacaacaaccacaagcatggttgctaaaattttaagtgttgcagatctaagccctacatatgttgttggaggaaaagtattaagtactgatgaaaattctgatttaggtgaaggtaaatatttggtagcagaagcagatgaaagtgatggatcttttattcatttgcaacctgatgtagcagtaattacaaatattgatgacgatcatttagctcattttaataatatatttgaaaacttgcttgattcttttattgctttctgtgaaaacgtacctttttggggttatttggtaataaatggtgatgataaaaattttcaaaaaatttcgagcaaaatctcaagaaaaaaaattacttatgggacttcgcaaaactgtgattacaaaatagtcgacatcttatcaattgatggatgtcaaaaatttaaaattgaagattcttttcgaaaaaaatctcattcttttcaaataaatttgcctggaagacacaatgtatttaatgcagcagcatcaattgtagttgctatacaggaaggccttgatattgaagcaattaaaaaaggagtgctagatttttcaggagtaggcagaagatatgaaaaacatgtgataaattttgataaagagaaaaaatttttaattgatgactatggtcatcatccgcttgaaataagatgtaaccttgatgcgattagagaagagtttcaagataaaaaaatattgatgatttttcaaccacatagatatacaagaacagctcaattgtatgatgagtttgtggatgtacttaatagagtagattctttaattctgttagatatttattctgcaagtgaagagcccataaaaggaattacctctagtgctcttgctgaaacaataaaaaaacaaggacataaaaacgtattacatgtaaaaaatcatgatgatttatttgatattatcaaagaaaaaaaagatctttttgatgtaatagttacacaaggcgctggtagcatatctaaagtttgtgaaagcattatccgaagatggaagatataa

SEQ ID NO: 313451 - DNA, 1396 bp, Unknown
  Bacterial polypeptide expressing nucleotide sequence isolated from the Sargasso Sea
atgaaaattaaattagcaaaaactgagttaatacattttgttggcattggtggtattggtatgagtggtttagctttgataatgaaaggtaaaggatttagggttcaaggtagcgatatctctattaataaaaatattgaaaggcttaaaaaagaaaaaataaaagttttaataggacataaaaaacaaaatataaataaggcaacaatattagtcatatcttcagctataaaaaaaaataatccagaaatgttagaggcaattaagaaacaattgcctatttataaaagaggcgaaatgttagcaaatattgtgtctttaacaaaaaatattgttgttgtgggctctcatggcaagactactaccacatctctgattgcttctatttttcaagaaacaaaaatagatccaactgtcattaatggaggtgtaatcaactctataaataattctgcgaaacttggtaaaagtgaatggtcaatattagaagcagatgagtcagacggcagctttgttcatacccctccaacttatgcaatcataacaaatattgatagagaacacatggactattatggttctatggataaattaaataaatattttgtaaattttgttaacaaagttccatcctttggaaagtcttttatttgtttagataataaaaataataaaaacttattaaaaagattaaaaaataaaaatttttatacttacggtatagataacaaatctaattatatcgttaaaaatataaaacaatttagagaatactcggagtatgatttaaaaattagattgcctaataagaaaattgtaataattagaaaaataaaaattccactattaggcttgcataatattaaaaattcagtagctgcaaccgctgtagcacttaatgttggcttaagtatttcaaatataaaaaaaggacttaaaaactttaaaggcgttcaaagaagatttaataaaatttttacctttaacaaagttgatttttttgatgattatgctcatcatccaactgaaattaaagaagttctcaatggagtaaaaaaagtttattcaaattatgaaaaaatatgtatttttcaaccgcacaggatatcaagattgaaagatttaaagtcagaatttgcctctgcatttaaagatgcagacaaagtaattctttttccaatatatactgcaggtgaaaaaatcaaattaggttttagttattatagttttgcaaaagaaataataaaaaaatccaaagtcgaactatttctattgaatgacaaatatcaattagcaaaatatataaaatataatatttacggggataaaatagtaataggtatgggggcgggttctatttcatcgtggatgagagaaatgccaaaatttttgtaat

SEQ ID NO: 313452 - DNA, 1364 bp, Unknown
  Bacterial polypeptide expressing nucleotide sequence isolated from the Sargasso Sea
tggtggtgctggaatgggcggcatagccgaggttttaaaaaatttagactacgaaataagcgggtccgatgtaaaggaaacatcaataacaaaaagactcagatctttaggtataaaaatttcaataggacatgatatagaaaacatacttaataccgatgttgttgtgtatacaagtgcgattaaggaaaataataaagaactagttgctgctagaaaaaatagaatacccgttgtacgtcgagctgaaatgctagctgaattaatgcgatttagtcagggcattgctatagctggaacacatggaaaaacaaccacaacaagtttagtaacaagtgttttagcagaaggaggactagatccaacctatgttatagggggcctattaaatagctctggaacacacgcgcatcttggaaaaggtaaatatattgttgcagaagcagatgaaagcgatgcatcttttttacatcttcatccaatcatagctattgtaacaaatattgatgctgatcatcttgagaattattccggcgatttttcatctttgagatacaattttgtagaatttttacatcaattgccattctatggattagcagttttatgtattgatgacgagggcgtaagaaaaatattaccggaagtaaccaaacctatagttacatatggtttagattttgatgctgattacaatgctcaaatcattaatcaagaaacaacaaagacttggtttaaagtatcaagtaaagaaaaaaaagattggttagaaattgaactcaatctacctggcaaacataatgttttaaatgcgttagcaacaattgcgctgtctcatgaattaggtgtaagtgataatgacatcattaaggccttgtgtaattttcaggggatatctcgtcgttttcaaatacgaggagaaatagatatcaatggaataaatttattgttgattgatgattatgctcatcatccaacagaaataaagtcaatttttgaggcaataaggtccggttggccttctaggcgtttagttgtaatttatcaaccacatcgttttacaagaatgcgagatctgttcgaggatttcaccgagattctatctcaaacagatagattgcttgtttttgatgtataccctgcaggagaagagattattcctggctcggatagtcgttctttatgtcgagcgattagatcgagaggaatggtcgatcctatttttcttgaagataaagattcagtctttgaaattctacctaatgttgttgaggaaaatgatctgctcctaacactaggggcaggcgatattggttctttatctgcaaagttatataagaattattctgcaacttttcattaaa

SEQ ID NO: 313453 - DNA, 1396 bp, Unknown
  Bacterial polypeptide expressing nucleotide sequence isolated from the Sargasso Sea
atgaaaattaaattagcaaaaaccgagttaatacattttattggcattggtggaattggtatgagtggtttagccttaataatgaaaggcaaaggatttagggttcaaggtagcgatatctctattaataaaaatattgaaaggcttaaaaaagaaaaaataaaagttttaataggacataaaaaacaaaatataaataaggcaacaatattagttatatcttcagctataaaaaaaagtaatccagaaatgttagaggcaattaagaaacagttgccaatttataaaagaggcgaaatgctagcaaatattgtgtctttaacaaaaaatattgttgttgtgggctctcatggcaagactactaccacatctctaattgcttctatttttcaagaaacaaaaatagatccaactatcataaatggaggtgtaatcaactctataaataattctgcgaaacttggtaaaagtgaatggtcaatattagaagccgatgaatcagatggtagctttgtttatactcctccaacgtatgcaatcataacaaatattgatagagaacacatggactattatggttctatggataaattaaataaatattttgtaaattttgttaacaaagttccatcctttggaaaatcatttatttgtttagataataaaaataataaaaacttattaaaaaaattaaaaaataaaaatttttatacatacggtatagattacaaatctaactatagcgttaaaaatataaaacaatttagagaatactcagagtatgatttaaaaattagattgcctaataagaaaattacaataattagaaaaataaaaattccattattaggtttgcataatattaaaaattcagtagccgcaactgctgtagcacttaatgttggcttaagtatttcaaatataaaaaaaggacttaaaaactttaaaggcgttcaaagaagatttaataaaatttttacctttaataaagttgatttttttgatgattatgctcatcatccaactgaaattaaagaagttcttaatggagtaaaaaaagtttattctaattatgaaaaaatatgtatttttcaaccacacaggatatcaagattgaaagatttaaagtcagaatttgcatctgcatttaaaggtgcagacaaagtaattctttttccaatatatacagcaggtgaaaaaatcaaattaggttttagttattataattttgcaaagcaaataataaaaaaatctagagtcgaactatttctagtgaatgataaatatcaattagcaaaatatattaaacataatatttatggggataaaatagtaataggtatgggggcaggttccatttcatcatggatgagagaaatgcctaaatttttgtaat

SEQ ID NO: 313454 - DNA, 1369 bp, Unknown
  Bacterial polypeptide expressing nucleotide sequence isolated from the Sargasso Sea
tatgctctatagcgttaagaaagttcatctaataggaattggtggtattggtatgagtggcatagctgagcttctatcaaataaagattttatagttacaggatctgatatttctgattctcctaatgttcaaaggttaaaaagtcttggaataaaaattacaattggacatgataaaaataatatttctgattctgagcttataatttattctgatgcaataccggatgataatattgagcttaaagaagctatttccaaaaatttattaatttactctagagctaaaatgatatcagaaatagcgaagttaaataattcaactgttgctattgctggaactcatggtaaaacaactaccacttcgatggttgggagtatattaaaaaatttgaatttagatccaactataattgtaggaggagttgttaagtctcttgattcaaattcagtattaggaagtggggatacatttgttgttgaagcagatgagtataataaaagcttgcttcatttgaatcctacaattgcagttataaataatattgattttgaacatattgaatgttacaaggatctgaatgatttaaaaaaaacgtttatacaattcgcaaattctgttccattctacgggaaggtctcggtctgtttggattcagaaaatataaaatctattatcaaaaaaattgataagcctttaattacttatggggttgaaaattcagatgtagatattaaagcagagaatattcaacaaaaagatggaaaaacaacttttaatatcataatcaataatcaagtattcaaagttaatttatcagttccaggaaaatataatgtatataacgcacttgctgcaatttcagtttgctttataatggggattgatattagtagtgcatgcaaagctttaagtggttttagtggagttaagagaagatttgacatcaaatcaaaaaataacgttatgattgttgatgattatgcacatcatcctgtcgaagttcttagcgtgattaatgcagttaaggataattggaataaaaaattaactgttatttttcaaccccatcttttttcaagaactaaggagttttataaagacttcgcaaaatctttgatgaaagctgataatgttatgattactgaaatttttgcatcaagagaaaaaaatgataattctataacctctcaattgattgtagatgaaatgatcaaattaaagcatccaaatgtatcttttgttccacaagctgatatagttgataaagtaaaatcaatagcaacaaacgaagatatatttttaacagtaggtgctggaaatatttggagatattcagaggaattaggaaagtattttaatgattaa

SEQ ID NO: 313455 - DNA, 1297 bp, Unknown
  Bacterial polypeptide expressing nucleotide sequence isolated from the Sargasso Sea
atgaatagtaatcaaaaatatttctttattggaattggaggtatagggatgtcttctatagcaaaatatttcctagacaaaggaaatgaaataatgggttatgatagggtagaatcagagattgttgaaaatctttctaaagaaggtgttaaagttttagataaaactgatgtaaatcttctgcctgataattttaagtcaaatgatgtaattgttatatactcttcagcaatatctgaagaaaattcatatctaaattattatttaactaataaaaacaaaatttataaaagatctgaaatattaggtgagattacagaaaaaacattctgtatatctatagcaggaacacacggaaagacaaccacatctgcaatattaactcacttattctataaatgcgaggagagttttcagtcttttgttggtggaatattaaatggttatgagactaattttattagtacaggaaaaaaatattcaattgttgaggcagatgaatatgatagatcatttcttcagctaaaaccaaagattggaattattacttctattgaaaaagatcacctagatatatatggtgattttaaaagtctcaaagagtcattccatctattttcagatagggtgtcagataagatattttattctgatcaagtagaaggatttgaaggattatcatattctattaatcttaaaacggattactatgcaagaaacatatctctgatagaaaaagggtataaatttgatataatcacaccatataatgagtttactaatgttgaatttaatcaaataggtggtcataaccttttaaatgccataggagctttctctgtagcacactatctagggttagaaggaaacaaattaataaaggctttagctgattttaagggagtatatagaaggatggatatttttagattagctaataaaatagtaattgatgactatgcacatcatccatcagagataaatgctgtattaaattcgataaaagataaatataacaatgttaaagcaggagttatttttcagcctcacttattttctagaacaaaagatttgttagatgattttgctaaagtattatcaaaatttgatgaggtctatttgttagatatatatccagctagggaagaaccaatagaaggggtaagttcagatgttttactagaaaaaataatttgtgacaaaaaaagtgttttaaaaatagaatctattaatgaaaaaattgaatctatagattgtgaaattattgcagttttaggagcaggaaacgttgcaaatt

SEQ ID NO: 313456 - DNA, 1468 bp, Unknown
  Bacterial polypeptide expressing nucleotide sequence isolated from the Sargasso Sea
tatgactaagacagaaagatacttacagctaagaagtatgatcccagaaatgcgccggattaagcgtattcatttcgtcggcattggcggcgcgggcatgggcgggatcgctgaagtattagtaaacgaaggttatgtcgttagtggttctgatatcgcacaaaacgccgtgactgacagactctgcctgctgggcgcgaaaattcatatcggccatggcgccgataacgtgcagcaagccgatgtggtggtggtctcgaccgcgattaatcctgagaatccagagattattgcggcgaaggaattgcgtattcctatcgtgcgccgcgctgagatgttggctgagttgatgcgttatcgccatggtgtagcgattgcaggaactcacggtaaaaccacgaccaccagtttgattgccagtttgtatggtcaagcggggcgcgatccaacttttgttatcggtggtttacttaacagcgctggcaccaatgcccgcttaggcacgagtcgttacctgatcgccgaagcagacgaaagtgatgcgagcttcctgcatctgcaacctatggtcagcgtagtgacgaatatcgaagccgatcatatggatacctacggtggtgattttgaaaagctcaaatcgaccttcgtggattttttacataacctgccattctatggcgtggctgtcgtttgtatcgatgatccagtcgtacgtgagattatgccgcgtataggtcgtcatatgatcacctatggcttcagtgacgatgccgacgtgcaggcgctgaattttcatcagcagggtcaccaatgccgctttaccgtcagacgtaaaggcaaagaagatttagacctgctgcttaatctgccgggtcagcacaatgtattaaatgcactggcagcgattgccgtggcgacagaagatgaaattgatgatagcgccatcattcaagccttggctgaattccagggtattggtcgtcgtttccaacacttaggcaagttcgcgacgccaaagggcgaagtgatgttagtggatgattatggtcatcaccccagcgaagtggcggcgaccattaaagcggcgcgtgcaggctggcctgacaaacgtttagtgatggcttatcagccacacagatacactcgtactcgcgatctgtacgaagactttattgaagtgttatctcaggtagattgcttgctattgctcgatgtgtatagtgccggtgaagcaccgatccccggtgccgatggtcgggctctatgccgttcgattcgtttgcgtgggcagttagaccccatatttattgctagcccagatcagttagctgaagtgctacccgatgtgttgcaggaaggggatttattgttgacccaaggtgcaggtaatataggtgccttgtcgcgtcagttagccgccactgaattaggctttagcacggctgtgacaaccgaggtaaaaccttga

SEQ ID NO: 313457 - DNA, 1146 bp, Unknown
  Bacterial polypeptide expressing nucleotide sequence isolated from the Sargasso Sea
aatgaattgtttagaatatacaaactattattttattggtattggaggaattggaatgtcttcattagcagaatatatgttacatctaaataaaaaagttgagggttatgatcgtgaaaaatcttttcaatcaaataggttgaataaattgggaataagaataatattttctgaaaatgaacaaataattaattcaaattttaagaattcaaaaaatactcttatagtttttactcctgcaattgataaaaaaaataaaatattaaattactttaaatcaaataactttaaaattgttaaaagggctgatctacttgctgatatagttaattcaagtttttgtatagcaattgctggaactcatggcaaaacaaccacaacttcaattttatctcacattctttataattcggagttgaaatttacttcatttataggtggagttttaaataaatacgaatcaaatattatgattaaagggagtaagattttcattgttgaagctgatgagtatgataaaacatttttaaaaatcaagccaaatattgcatcaatattaaatattgatggagatcattatgatatatataatgacattgatgacattagcaattctttcaaaaagtttgctaataatctaaagaaaaatggaatattatttcataattcaactttaaattataatggaatttcatttggtgaggattcttttgcagacgctaaaataattaataagaaaaattataatgataaactaatttttgatattcaatatcaaaataatgtttataaaaatattgtcttaaatatgttaggtgatcataatgcctctaatgcaatggcagctttcataattgcaatttccttagacattgaatctgaaattataataaaagcattaaaaacttttcctggtataaagagacgattttcagttgagttaaaaaatcctaagatttttattgatgactatgctcatcatccaagtgaaatagagtcaatatataattcagtaaaatctttataccctaacaaaaagaaactagtaattttccaaccacatcttttttcaaggactagggattttttaagagaatttgccgaagcacttgaaaagtttgacaaaatagcccttattagatattt

SEQ ID NO: 313458 - DNA, 1251 bp, Unknown
  Bacterial polypeptide expressing nucleotide sequence isolated from the Sargasso Sea
ctaaatatttggttcaacaaaatattgatgtatctggatacgatcaacggaaatcatttataaccaaccagctgaatcaagatggtataaaagttgattttaatttaagtaatttaaaatattctaagaaaatactttatatttattcatcagctattgcaattaacgaaacaacgctaaaaaattatttagatagtgagaatgttttatcaagaccggaatttcttaatatgttatcaagagaaaatacaattattggagttactggaactcatggaaagacatcaaccactgcattgctagctcacatatttcattataacgaaaggaatgtttcatacatatttggagggagtacatcatttcatgggatagggggtcattatggtgaccaggatcagcctattattttagaaacggatgaggcttttaatacttttaaagatattaatattgatgatttactagtaacaaatattgatattgatcatattgattattttaaaaactttgagaatttgctcaatgcatttaagcatgttattcagaacgttaaaggtaatttagtactaaattttgatgataaaaacttaagagaattgaaaacaaacattaattgtattagttattcttcaaaagaaactgctgatatacaaattaaatacccaaataaaattattaaagaaaataaagaatacgttatttctacaaaattaattggcaatcattttatttcaaatatagctggggctatagcagtagcctatcttaatggcataaagattgatgattccttagaagctattaaatcttttccaggagtaaaaagaagaatagaatatctaggttcaataaatggtattaagttatatgatgattatggtcatcatccaacagaaataacagctacaataacggctcttaaagaaagtactttaggaaaactgtacgttatatttcaacctcataggtacacaagaacaaaaaatagttttgaggactttaagaactctttatctaaagcagatgaggccattgtggttgatatttacccagctggagaagaacctatacctggagtaagcagcaaaaactttgaaaacaaaaatataaaatatttaaaatctatgagaatggttcctagttatctatcaactagagtaaagaaaaatgacatcattttaactttaggcgctggagatattacattattgggaccacagatattaaaatatttagatgaaatataaa

SEQ ID NO: 313459 - DNA, 1399 bp, Unknown
  Bacterial polypeptide expressing nucleotide sequence isolated from the Sargasso Sea
atgaaaattaaacttggaaataaagagactatacattttgtaggaattggtggcattggaatgagtggattggctataatcatgaaaggtcttggtttcaaaattcaaggaagtgatttatcatttagcaaaaatatagagaggctcaaaaataatagaataaaagtttttttaggtcatagagaaaaaaatatttttaattctacaattttagtgatttcctctgccatcaagaagaataatccggaattaattaaagctaaaaaaaaaaaattaccaatctataaaagaggagaaatgcttggacatattgtgtctttaatgaaaaatatagttgttgctggatctcatggaaaaacgacaactacctctctcatttcatcaattttttcattttcaaaaatcgatcctacggttattaatggtggtgtgttaaattcttatggtaattcagcgaaattgggaaaaagtaattggtgtattttagagtctgatgagtctgatgggagttttttggatattccagtaacttactctattgtaaccaacattgacgcagaacatttagattatcataaatccttagataaactcaaagaaagtttcgttaaatttttgaataaaacgccttctttcggcaaaagcttcatatgtatagatgacccagaaataaaaagtatttcaaataaaattaaaaataaaaattttttgacttatggattagacaagagtgctaattttagaatagagaatgtaattaataataaaaattactcccaatttaacttatctataaatttaccaggtcaaaagaaagactatataaaaaaattaaaattaccgattattggtttacacaacataaggaatgcagcagcctctgcggcagtgtgttatttaattggtatttcaaatagaatgattaaaagtggattaaaaaattttcaaggagtgcaaaggcgttttaataatttatttagttatagaaacataagttttatagatgattatgctcatcacccttctgaaattagttgcgttttaactagtttaagagaagtgtatagggaaaaagaaatagtttgcatttttcagcctcatagagtctcgagattaaatagtttaaaagatgaatttacaaaatgttttagacattcagattatttaatattatgtccagtatttaaagctggtgaaaatattaaactaaattttaattataaaaactttgcaaaacaaataataaagaattctaaagtaaatttagtaattgttaatgaagaaaaagatatattaaaatacgtaaaacaaaacatttttggaaataaaattgttattggtatgggggctggatcaatatctaattggatgcggtcattagagcataaactcaaatgaa

SEQ ID NO: 313460 - DNA, 1417 bp, Unknown
  Bacterial polypeptide expressing nucleotide sequence isolated from the Sargasso Sea
aatgcgcagggtagagcggatccacttcgttgggatcggcggcgctggtatgggtggtattgccgaagtattagtcaatgaaggttataaggtttcgggttcagatatagcgccaaaccctgtggtagaccgtttagcagctttaggtgcctgcattgtgattggccataaagctgaaaacatcgaaggtgccagcgttgttgtggtttccagcgctattaaaaccgataacccggaagtagctgctgctattgaacaccgaattccggtggtgcgccgtgctgaaatgctggccgaattaatgcgtttccgccatggtattgctattgccggtacccatggtaaaactaccaccaccagcttaatcgcttctatttttgccgaagctggtactgatcctacttttgtgatcggtggcttactgaattctgcaggcaccaatgctcgtttaggtgctggccgctatttaattgccgaagcggatgagagcgatgcttctttcctgcatttgcagcctatggcgtcggtgatcaccaatatcgaacctgatcatatggaaacctatcagggtgactttgacaaaatgaaagccacctatctggagttttgccataacctgccattttatggtgtcgccgtgatgtgtatcgatgatgctgtagtgcgtgagttgatcccacaaattggccgttttgttattacctatggttttagcgaagatgcggattatgtcatcagtgacttcggccagaccggaactcaaagccattttgttattaccgataaaaacggcgttgccagccagattgagctgaatttagccggtcgtcacaatgcattaaatgcgaccgcagcttttgctgtggcaaaagatgaaggcatagcaacggattccattttagccgcgctgaaaaaattcgaaggtataggccgtcgctttgaacaatacggtgagtttgagacaggccgtggcaaagtgctgctggtcgatgactatggccaccatccaagcgaggtcgctgccactttagctgcagcacgtaacgcctggccggagcgccgtatcgtcatggcctatcagccacaccgttacaccagaacccgtgatttatacgaagacttcgccaaagtactgtcttctgtcgatttattgttattgcttgaggtgtatgccgcaggcgaagccgctattccaggtgccgacagccgcagtttatgccgctctattcgtgcccgcggtcagctggatcctatttatgtggcaagccttgcagacctgcctgctgctttagctgatgtgttgcaggacggtgatgtgctgctgactcaaggcgctggcaatataggtgcgctggccaaacaactggcggctgctaaattagcaatttctgcattaaaaccaaacgagggagcttga

SEQ ID NO: 313461 - DNA, 1114 bp, Unknown
  Bacterial polypeptide expressing nucleotide sequence isolated from the Sargasso Sea
attgaatttaaaaattaagacaaaactacctcttgatttaggtaaaatgcattttataggtattggtggaattggtatgtctggtattgctgaaataatttataatcttggttataaagtttcaggttcagacttaaaatatactcctattatcaatagattaattaaaatgggtattgatgtaaaaattggtcatgattctaaaaatattgatgcagcagagattatagtgatttcttcagcgatcagttcagaaaacttagaattaaaagaagcaagaagaaaaaaaattccagttattcgaaggtctgaaatattagcagaattgatgcgcttaaaatcaaatattgcaatagctggaacgcatggaaaaactactaccacttctatggttgccgcagtactggaatctggaatgtttgatcctactgttgttaatggaggtattattcaagattatggttctaatgctagactaggtgatggtgattggatgatagtagaggctgatgaaagcgatggaacacttattgaaattccttctaccatttcgataattactaatttagacccagaacatttagaccactatggtacatttagtgctttaaaaaaaacatttttagaatttttaaatagtattcctttttatggggtagctatatgttttattgatcatccagaagtaaaaaacctaatatcaaaggtaaaagatagaaatgttcttacttatggttacagtagtgaagccgattttcaaataaaaaatttggagtataaaaaaaataaagctttttttcagatattcaaaaaacaaaatgaagaaaatattgaatttgagttaccaatgtatggtgatcataatgtagcaaatgctgcggcggcaattacagttgctttatatttaaagattcctatagaaaatattaaaaaaggtctcaaaaattttaaaggggtaaagagaagatttactaaggtttgtaactggaatggtattgatataattgatgactatgctcatcatccagttgaaatattggcagtgttatctgctgcaagaaaatatacttctggaagagtaattgcaattcatcagccacatagatacacaagg

SEQ ID NO: 313462 - DNA, 1396 bp, Unknown
  Bacterial polypeptide expressing nucleotide sequence isolated from the Sargasso Sea
atgaaattttttaaaaaagtaaaacatatccattttgtaggaattggtggagcaggaatgataggcattgctaaagtattgctgaaaaagggatacaaaatatcaggttctgacatatcagactctcgtgaattaagaaaattagaaaaacatggtgcaaaggtatttattggtcattcatctaagaatattaagggtgcagatttactagttatatcatctgcaattagttccagaaatcctgaattagtccaagcaaaaaaagattttattacatcaataccaagggccgaaatgcttggaagtataatgattggatatgaaagtattgctgttgctggaagtcatggcaaaaccacaacaacaagcatgattgcaaaaatactaagtgttgcaaatttaagcccaacatatgttgttggaggaaaagttttaagtacagatgagaattcagatttaggtgaaggaaaatatattgtcgcagaagcagacgagagtgatggatcatttgttcaccttcaacctgatgtcgctgttttaacaaatatagatgatgatcatctggctcattttaataacatttttgaaaatcttttagattcatttgttttattctcagaaaacgtacctttttatggatatctgataatcaatggcgatgacaagaacataaaaaaaatctcaaaaagaatatctagatcacaagttacgtttggagagtcaaaagattgtgattataaaattatcaaaatcatttcaaaaaacggtaagcaagattttcaaatttttgataaaaaaacaagaaaggttcataaatttaaaattaatcttcctggtaagcacaatgtttttaatgcaacagctgcaatcgctgttgcgttagaggaaggtatttcaattagctcaataaggaatggcattaaagaatttacaggggttggaagaagatatgagaagcatgatattaaaattgatgataaatcattaaccttaattgatgattatggtcatcatccgttagaaattgaatcaaatataaaagcgtataaagaagaatataaaaataaaaaagtatgtatgatttttcaaccacataggttttcaaggacagcacagctctttgatgattttataaaggtattaaagcaaaccgattcattaataatgttagatatttattctgcaagcgagaagccaattaaaggcataaactcaaggagaattgtagaaactttaaaacaaaatggtcataaagatgtaacttatttgaaaaaacatgatgatgtaatagatttgattaaaaagaaaaaggatgatttcgatattttagttacccaaggtgctggtagtgtttcgaatatttgtcaaataattaaaaatcaatgggaaaaataaa

SEQ ID NO: 313463 - DNA, 1250 bp, Unknown
  Bacterial polypeptide expressing nucleotide sequence isolated from the Sargasso Sea
gatgaaactatttaaaaaagtaaaaaaaatacattttgttggtattggtggggcaggaatgattggtatagcaagagttctattaaaaaagggatataagatttctggttcagacgttgttgattcaagtgatttagaaaagttaagaaaggatggagctaaagtttttattgggcacaaaaaggaaaatataaaagattcaaatttattagttgtctcttctgctatcgacaaaaataatcctgaactagttcatgctaagagacaatcaattacaacaatacctcgagcagaaatgcttggcagtataatgataggctatgaaagtatagctattgcaggcagtcatggtaagaccacaacaacaagcatgattgcaaaaataataagtaaggcaggattaagccctacttatgttgtaggaggaaaggttttaagtactgatgagaattcagatctaggtgagggtaaatatattgttgttgaggcagatgaaagcgatgggacattcacacatttacaaccagatgtagctgtattaactaatattgacgatgatcatttggttcattacaacaatatttttgataacttattagattcatttgtaatgtttgcagaaaatgttccattttatggatacttggcaattaatggagatgatgtaaatattaaaaaaatatcaaaaaaaatatcgagagctcaagtaaaattcggagaatcaaaaggctgtcattatcagataactaaaatatcatcaaacaaaggcaagcaaagctttgagatctttgatgcgaaaaacaataagaatcataaatttaagcttaatttacctggaaagcataatgtctttaatgctgcagcagcaattgcagtttcaatggaagaaggaatttcattaggagcaattaaaagtggaatccaagagttttcaggagttagaagacgttatgaaaaacatgatttaattataaatcaaaaagagctcactttgattgacgactacggtcatcatcctctcgaaattgagtcaaacattaacgcatacaaggaagaatatccaaataaaaaggtttgtatgatttttcaacctcatagattttctagaactgcgcaattatttgatgattttgtaagggttctcagcaaaacagatttattaatattgcttgatatatattctgcaagtgaaaaacctataagaggaatccattcaagaacaatttcggaaacgataaaacaaaaaggtc

SEQ ID NO: 313464 - DNA, 862 bp, Unknown
  Bacterial polypeptide expressing nucleotide sequence isolated from the Sargasso Sea
aatgaataaattgaataaaattaaaattcatttcgttggtataggaggcataggaatgtcaggaattgctgaattaatgtttgatcttggttataatgttcaaggaagtgacattagcttaaatacaaatattaaaagattgaagaaaagaggaattaaaatttataatacccataaaaaaaataatattcacaatatgtctgcaattgttatttcttcagctataaaaataaataatcctgaactacaagaatgcagaagattatccataccagtaattactagagcagatatgttgggtgaattaatgaaattaaaacgatcaatagcaatcgctggctctcacggtaaaacaactacaactagcttagttggttcaatatttgataatgcaaaatttgatccaactatagttaatggaggaataattaattcgtattcaaataataatcgttatggaaaaagtgattggatgattgtggaagctgatgaaagtgatggctcttttttaagattaccccatgaaattaacataattacaaatattgatattgagcatttagattattataaatcatcacaaaatctttttttagcttttgaaaaatttataaacaatcttcctttttatggttattcagtaatttgtactgaaaatatcaatactcaaaagatttataaaaagataaaaacaagaaaaatcattagctattcgcaaaatgaaaattctgatgttagaattataaaaatcgaaaaagataaaaaaggaagtaatttcaccttattatttaagaaaggaataattaaagggataaatggaaaatataactttaaaactaatctttgggagatcacaatatat

SEQ ID NO: 313465 - DNA, 1138 bp, Unknown
  Bacterial polypeptide expressing nucleotide sequence isolated from the Sargasso Sea
atgcaaattaacagtaaaattcattttataggtatttcaggaataggaatgtctggtattgcagaattgatgctagataaaggatattcgatccagggtagtgatatatcagaaaatgacaataccaaaagattaaagaaaaaaggtataaaattttttttaggacataataaaaaaaatattaaaaatgctcatgctattgtttattcatcagctattaaaaaaaataatcctgaaataagagaggcatatattaaaaaaataccagttctttctcgagctgatatgctttctgaattaatgaaaaataaaaaatctattgccatagctggatctcacggaaaaactactactactagtttggtaggaaatattttcaatgaagcaggtttagatcctactattgtaaatggcggtattataaattctttttctaataataatcgttatggaaaaggtgaatggatgattgttgaagcagacgagagtgatggtacctttttaaagcttccacatcaaatatcaattattactaatttagatattgaacacatggatttttataaatcaaaaaaaaatttaattaatgcatttgaaaaatttataaatctgcttccattttatggaactacaataatgtgttacgatgataagaatctaaaactattaattaacaaaataaaaactagaaatattttaacttattcaataaaaaataaaaaagcagacgtattaatctttgatattatacaaaacaaactaaaaacttcctttaaattaaaaattaaaaataaaattattcattcttctaattataaatttacaataaatgcaatcggcagtcacaatattttaaatgcaacagcaagtattattgcagccaaactaaatggaattaaaaataaagatattaataatgctttgattaattatgtaggtgtaaaaagaaggttctcatttattggaaaaaaaaataagtcctttgtgtatgatgattatgcacatcatccaacagaaattgcagctacattaagcgcagctaaaagtttaaaaaataaagtaatagttgtttttcaaccacacagatatactagaactaaaatacttattaagagagtttataaaagttttatctaaa

SEQ ID NO: 313466 - DNA, 1060 bp, Unknown
  Bacterial polypeptide expressing nucleotide sequence isolated from the Sargasso Sea
attactttaataccaagagctgagatgttagctaccattatgcgtggttttcaaagtattgccgttgcaggatctcatggaaaaacaacaacaaccagtttaattgctcatatttttaccaaggctgaacttgatccaacatatattattgggggcagaattttaggaatggaagataaaagtattttgggttctagtgactatattgttgtcgaagcagatgaaagtgacgcatcatttttacatcttaatccagagatatcagtattaacaaatattgataacgatcatctagatttttatgaaaataatccaaagaaaataagtgatacttttttaaagtttctcgaaaaactaccattttttggcgtggggattatttgcactgatgacccaaagtcaaaaaaactttatcaaaaactttcgagaaggaaaatatcatttggatttgaacgaacttcagatttttctataaaaaattataaacaaactaaaactcatcaagaatttatattgaaagataacattaaaaagtttgagtttgatataaaacttaaaattcctggtaaacataatgctctaaatgctactgctgcttttattgtcgctcaacaagcaggaatacaaaccaatgttattaagaattctttaaaaaatttttctggtgtttctagaagatttgaagaaaaaggtactgtaaaaataaatggaaaagaggtgttagtagttgatgattatggacatcatcccacagaaataaaatctacaattcaagcagccaagtcaaaatataaaggcaagccaataaatatgattttccaacctcatcgctattctcgatcatctatattattcaaggaatttatatcagtactttcagatactgattctgtacagttaatggatatttacgctgcaggagaagcaaatacatcgggcatttctagttacgactttgtagactctttgttaagaaggaatattgatgctaaatatgcaaaaaatctaaatcaaataagaaagaacttaaatgaaagtattaaaaaagacagtattctca

SEQ ID NO: 313467 - DNA, 1405 bp, Unknown
  Bacterial polypeptide expressing nucleotide sequence isolated from the Sargasso Sea
cttgtcccgtccgcttgaacgccagcaccccgtgcatttcatcggcgtcggcgggattggaatgtctgctctggccaaaatccttgttgaccgtgggcatccggtgagcggatccgatccacgggtcacaccaacttcccatcagctcatgcaactcggtgtgacggtcgtccatgaacagaccgcagcaacgatcgaaacactcctcagcgacggccgaagacccatcgttgtggtgtcaacagcgatccccaccagcaatccggaactgagacgcgccggtgatgccggactggagatctggcatcgctcagatctgctggctgcgctgatcgatcagcaagcctcgatcgccgtagccggcagccacggaaagaccaccaccagcactttgatcaccaccctcttaatggaggccgaagaagatcccacagccatcatcggcggcatcgtgccctgcctcggcagcaatggtcatgctggtcagggccggctgctggtggccgaagccgatgaatcggacggctcgttggtgaagttccgtcctcagctgggcttgatcaccaatcttgagctcgaccacaccgaccactacgacggtctggatgacttaatcagcacgatgcggcgctttgccgatggctgcgaccaggtcctggccaaccatgactgcctcatcctcagggaacacatccagcccgatgcctggtggtctgtgaccaccgccaatggcgtggatttcgcagccctgccgctccaactggatggcgatcgctgccacgcgcgcttctacgaaaacggcgcgccagttggggacttcatgctgcccctgcctgggttgcacaacctcagcaacgcagctggagcgttggcggcctgccgaatggaaggtgtgcctttcgagcggctggtgaagggactcacggccttgaaaccgcccggccgtcgttttgatctgcgaggcacctgggagggtcgacacatcgtcgacgactacgcccaccatcccagtgaggtgaaggccaccttggccatggcgcagctcatggtgagcagtggccgcagcccattgcccagcccgccgcaacggttgcttgctgtgtttcagccccaccgcttcagccgcacccaggaattcctcgagtccttcgcaagtgcattgcagaactgtgattccctgctgctggcgccggtctacagcgccggcgaagaaccgctgaagggggtttgcagccagaccctggccgatcggatccaggagctcaagccggatctcgagattgccgtggctgacaacctcgaccacctcacccaattggtcaggacccgcagccagcgtgaagacctggtgttggccatgggcgctggggatgtcaacggcctctggccacggttgtcggcctga

SEQ ID NO: 313468 - DNA, 1312 bp, Unknown
  Bacterial polypeptide expressing nucleotide sequence isolated from the Sargasso Sea
atgaataaatataaagaagtatacatattaggtatcggaggctcagggatgagttctatagctaaatatttggttcaacaaaatattgatgtagctggctacgatcaacggaaatcatttataactaaccagttgaatcaagatggtataaaagttgattttaatttaagtaatttaaaatattctaagaaaatactttatatttattcatcagctatttcaattaacgaaacaacgctaaaagattatttagatagtgataatgttttatcaagaccagaatttcttaatatattatcaaaagaaaataaaattattggaattactggaactcatggaaagacatcaactactgcactgctagctcacatattccattataacgaaaggaatgtctcatacatatttggaggtattacctcattccatgggatagggggacattatggtgatcaggatcagcctattattttagaaacagatgaggcgtttaatacatttaaagacattaatatcgatgatttattagtaacaaatattgatgttgatcatcttgattattttaaaaattttaaaaacttgctcaatgcattcaagcatgtaatcgagaacgttaaaggtaatttagtactaaattttgatgatcagaacttaagagaattgaaaacaagcaataattgcattagttattcttcatcagaaattgctgatattcaaattcaatacccaaacaaaattattatagaaaatgaggaatatgttgttactacaaaattaatcggcaatcattttatttcaaatatagctggagctatagctttagcctatctaaatggaataaagatagaagactccatagaagctgttgaaactttcccaggagtaaaaagaagaactgaatatcttggctcaataaagggtataaagttatatgatgattatggtcatcaccctacggaaatagcagctactatctctgcccttaaagaaaatacaataggtaaattgtacgttatatttcaacctcatagatatacaagaacaaaaaatggttttgaagactttagagcctctttatcaaaagcagatgagactattgtagttgatatttacccggctggagaacaacctatacctggaataagcagtaaaaactttgaaaacaaaaaaataaaatatttaaaatctatgagaatggtccctagatatctatcaactagagtaacggaaaatgatatcgttttaactttaggtgctggagatataacgttattgggaccacagatattaaaatatttagatgaaatataaa

SEQ ID NO: 313469 - DNA, 643 bp, Unknown
  Bacterial polypeptide expressing nucleotide sequence isolated from the Sargasso Sea
ttatcatcttaaagatttaaaatcatcttttaatcttaaatcagaatctgaaaatttagatcttagtttgaatatgcttggaagacataatgctttaaatgctgcagcggcatcagtgctttgcatacaagaagggattcctacagaagtcatcaattcttcgcttaaaaacttcatgggtataaatagaaggatgcaagttttaggagagctatctataaaccaatctaattgtattttagttgatgattatgggcaccatccaacagaaattaagttaactattgattctataagagagtctttccctgaaagagaaattaatatgatctttcagcctcatagatatacgagaacaaaagacctgtttacggaatttgcaaatgtactgacccaagtagataacctgtttttattagatatttattctgcaggtgaaaatccaattgaaggagtttctagtgaggagttaatgaataagatattagatttaggcttcaataaagttaggatatttaaaacaggaaacgagattattaaatctgttaaaaatttaataagtaatgattctgttctcattatgcaaggtgctggaaatatctcagaaataactagtgagataaaggagaattatttagattga

SEQ ID NO: 313470 - DNA, 421 bp, Unknown
  Bacterial polypeptide expressing nucleotide sequence isolated from the Sargasso Sea
atgaatcactcaaaatataaattaaataatatccatttcgttggaataggagggagtggaatgagtggtatagccgaagttctaaataaccttggttataaggtatctggttctgatagtgctacttcttccaacacccaaagacttgagggtaagggtattaaaatttattacgaacataagtcttccaatcttgaaggggtcgagatgctggtgaagtcaactgcagtacctgaagataatgtagagattaaggaggcaagagatagattcatcccagtactagcaagagctgaaatgctttctagcttgatgaacaacaaaaaaggtatagctgttgccggaacacacggcaaaacaaccactaccagtctagttgcttcaataatgagtgacgcaggtcttgacccaacgttatcaa

SEQ ID NO: 313471 - DNA, 323 bp, Unknown
  Bacterial polypeptide expressing nucleotide sequence isolated from the Sargasso Sea
catgcgccgtatccgccgcattcacttcgtcggtatcggcggcgtgggcatgtgcggtatcgccgaggtgctgctgaacctgggttatgaagtatccggctccgatctcaaggcctcggcggtgaccgagcgcctggaaagcttcggtgcgaagatcttcatcggtcatgctgccgagaacgccgagcaggccgacgtactggtggtgtccagcgcggtcaacaccagcaatccggaggtcgccaccgccctggagcgccgcattccggtggtgccgcgtgccgagatgctcgccgagctgatgcgctaccgccacggcatcg

SEQ ID NO: 313472 - DNA, 1396 bp, Unknown
  Bacterial polypeptide expressing nucleotide sequence isolated from the Sargasso Sea
atgcagcaatttaagaaaataagaaatattcattttataggcattggtgggtctggaatgataggaattgcaacaattcttcacaagaaaggatataacatttcgggttcagatatctccaaaacaaaagatctggatgagttagcaaagtcaggcgttgacgtaacttactcgcacaaaagcaagaacataaacaataaagacttaattgttttatcctccgcaattgattcttcaaatgtagaggtatcttctgcaaaaaagaaaaatataccaattattcctagggctgaaatgcttagcggtatttccagaggataccaaggaatagcagttgctggcagccatggaaaaacaaccacaacaagcttaattgctcatatctttaatcaagctttattgagtccaacttatgtaattgggggaaaaatacttagttcagacggtaactcacgtcttggtgacgggaattttttcatatttgaggcagatgaaagtgataaatcttttttaagtttttatcctgattccgctgttataacaaatatagatgatgatcatcttgaggcttatgagggcaatattaacaacttgaaagaatcttttttagatttttcagataatattcctttttttggatatgtcattgctaattatgatgataaaaataccagggatatattaaaaaaaataaaaagacgggtaatcacatttggtttaaataaaaaaagtgacattacagttagtgaaatcaattacttctttgattatgttgattttaaaatttatattaaagacacaaataaaaaacataaattcaggttatcactccaggggaaatacaatatttataatgctgttgctgctatagcagttgctatagaggaaggaattagtattcagacaatcagggctgcattgaaatctttttctggcgtcgaaaggagactagagagatttaagctaataattaaaaataagcaagttactcatattgatgattatggacatcatcctaaagaaatagagcaagtaatagtttctttaagaaggcactttaagaaaaagaaagttctcatgatttttcaacctcatagattttcaagaacaaaaatgctttttaaggattttatttcaacattaagcaaagttgataaggtatttttattgccaatttattctgcaagtgaaaaagaaattaagggagtctcttcaaaaaatatggcacaaaaattaaatacaataaatggaaaagacttttgcagtctcgtaaaacatgaaaatgtaaatgatatggttgagcaatgtatagataaatatgatgttgtaataactcaaggagcaggaaatgtttctatggtttcaaagggtttaatcaagaaatggaagatatgaa

SEQ ID NO: 313473 - DNA, 1408 bp, Unknown
  Bacterial polypeptide expressing nucleotide sequence isolated from the Sargasso Sea
ttggataaaaaattactattaaaaagtcattttcattttattgggattggaggtattgggatgtcagcattagcaataggtttacttaaaaaaggttgttcagtttcaggatctgatttagttaaaaacgatgaaactaaaaaattggagaaattaggtgcagtaatctttacttctcaaattcgacaaaatattgattttgttatttcaaaatttaccaacaaattgattaattttgttgtaagctccgcgatcaagccagaaaatgaagaatttttatactgtagagaaaaaaatttatcaataaaacatcgttcagagatactcgcaatgctaatgcgcacttatactacattggcggtagccggcagccacggaaaaacatcaaccagtacatttctatctacaatacttgagttatgtacacgtaattcttcttcaataactggaggaataattcctatttacaactctaattgtcatttagaaaatacaaaattcttagtggctgaagttgatgaatctgatgggacaattaacaaatataattctgatatcggaataatcaataacattgattatgatcattgcgatcacttttctaatttaagtgaagtcatatcttcttttaaaagttttgctaaaaactctaaaaaattactacttaattttgattgtgaattctcaagaaataatttttattctaattgtaattggtcaaacactacggctaaaaacgtagcttatgcaatcattccgactgagattaattcaaagtatacaattggaaaatattatgaaaatgaaaattttattagtagtttaaatattccaattccaggattacacaatctatctaatatcaccgcagcaatagcagcttcaagaatgataggagtagattttctagaaattaagaaaaatataaaatatctgaaactcccaaaaaaaagatttgaatttagagggcaaatagatgcaagaagtttatatgatgattatgcacatcacccaaacgaaataaaagagaccattaaattaggaagattattccttcagcaaaaacataataatatatgtcaaaaaagtagattaatagccatatttcaacctcatagatactctcgagtaaagcaatttcatgaagagttcgctgaagaattatcaaaagcagatgttatttatgtaaccagtatttatggagcaggagaaggaaacgaagataaaattacttcgaaaattatcactgatttgatttataaaaaaaataaaaatgttagttacattaataattattatgaagttacaaagaatttttttgaattaactcaaaaaggggatttaattttgaatatgggagctggtgattgtcataatttatggtcaattttaaaagaaaaaaattaaa

SEQ ID NO: 313474 - DNA, 1399 bp, Unknown
  Bacterial polypeptide expressing nucleotide sequence isolated from the Sargasso Sea
aatgaaaattaaattagcaaaatcagaattaatccattttgtgggaataggcggtattggaatgagtggcctggccattataatgaaagagctaggttttaaagtacaaggaagcgatatttcaactaataaaaatatagatagagttaaacagaaaaatattaaaatctatataggacataaaaaacaaaatattaataaatcaactattttagttatttcatctgcaatcaaaaaaaataatcccgaagtattgtttgccaaaaaaaaaaaaataccaatttatacaagaggtgaaatgttagccaatgttgtttctttaatgaaaaacgtagttgttgctggatcacacggaaaaactacaactacttcactaatatcaaatattttctcacatgcaaaaattgatcctactgttataaatggaggggttcttaattcgtttagtggttcagcaaggttaggaaaaagtgattggtgcatcttagagtccgatgaatctgatggaagttttacaaaaatacctccaacttattccatcgttacaaatatagataaagaacatttagattattacaaatccttagaaatcctaaaaaaaaattttgttaaatttatagaaaaaataccatcatttgggaaagtatttatttgtttagatgataaaattaataaacaagttattaaaaaaattagaaatttgaattatagtacttatggaacaaataaattatcaaattttaaaatattaaatatttcacaaaatgaaaattattcaaaatttaatataaaaataagcttaccaggatcaaaggaaaaattaataaaaaatattaaagttcctcttattggtttacataatattagaaactcaacagctgcagctgctgttgcattttcaatcggcataccaattaagattattaagaatggattagaaaaattttctggtgttcaaagaagatttactaaaattttttcttttcaaaatgttccattttttgatgattatgctcatcatccaaccgaaataacagaggtattagatggtgttagagaagtttataaaaataaagaaataatatgtatatttcagccccatagaatatctagattaaaaaatttacatgaagaattttcaaaatcatttaaaaaagccgatactgtaattttatgtccaatatttaaagctggagaaaatattaaattgccatttagctataattattttgcaaaaaaaataattaaaaagtcaaatgtaaaactaattttaattaataataatttagatttagttaaatatgtaaaacaaaatgtatatggaaataaaatagtaataggaatgggagctggttcaatatctaactggataagagatttaccgaattatataaaataa

SEQ ID NO: 313475 - DNA, 1390 bp, Unknown
  Bacterial polypeptide expressing nucleotide sequence isolated from the Sargasso Sea
atgaaattaagcaaaattaaaaatattcattttattggaataggtggagttggaatggttggaatagcagaaatgcttttaaatcagggattctctgtttctggcagtgatttagttgagaataaaaacactgagagacttaagtatctaggagcaaaaatttttattggccataatgaaaaaaatgttagagactccgatgttgtggtttattccactgcagttactgaatctaacccagaaatgcgcagtgcaagatccttgaataaaactattattgctagagcagagatgttatcaagtctaatgcgtggttttcaaagtatagctgtagctggatcgcatgggaaaacaaccactaccagtcttatcgccaacatctttataaaagctaatcttgatcctacttatataatcggtggaagaatattaggccaagaagataagagtattcttggctctagtgaatatcttattgttgaagcagatgagagcgatgcatcttttttgcatctaagtccagaaataagcgttataacaaatgttgataatgaccacttagatttttatgaaaacaatatagagaaacttaatgaaacttttcatcagtttcttgaaaatttgcctttttatggcacagccataatttgtatagacgaaaaaaagggagagaaactttttaatgatctttctaggccgaaaatatcctatggatttaataaatcagcagattattatttaaaagatttgaaacaaactagcagtttccaggaatttaccctggtaagaaattcagttggcaaggaagttagattgcaattaaagatcgcaggacgccataatgcattaaatgctacagctgcctatatagttgcaaaggaagcaggtatagcaacaaaaataataagagattctcttaaatcatttggaggagtgtcaagaaggcttgaatttaaaggagacttaaaaattaatgataaaaaaataaagttgcttgatgattatggtcatcatccaacagaaattagcgctacagtagaagctattaaatcgtcttacaaaaacaaaaaaattaatatgatttttcagccccacagatattcacgatcttcaatactttttaatgattttgtggattgtcttggctcactagataggataattattttggatatctattctgcaggagaacaaaacactgagggaataagttcatatgactttgttaattctttaattaagaaaggtaataaagctttttttgctaagaatctaaaagaaatctctaagattcttgaaagtgaagtaaagaataatgagattcttattacacaaggtgccggtaatatagttgatatttcaaattctcttttggcaatgtataaatgaa

SEQ ID NO: 313476 - DNA, 1153 bp, Unknown
  Bacterial polypeptide expressing nucleotide sequence isolated from the Sargasso Sea
atgaagattaaattagcaaaatcagaaattatccattttgtaggcataggtggtattggcatgagtggactatctttaataatgaaaggtaagggctttaaggtccaaggaagtgatatttcaagtaataaaaatattgatagattaaaaaaagaaaaaataaaaatttatataggtcataaaaaacaaaatattaatgaggctacaattttagttatttcttctgctatcaaaaaaaataatccagaacttttggaggctaaaaaaagacaacttcctatttataaaagaggagaaatgttagcaaatattgtttcgttaacaaaaaatattgttgtagttggttcacacggcaaaactactaccacatcattaatagcttcaatatttcaagaaactaaattagacccaacaattattaatggtggagtaataaattcaataaataactctgcaaaacttggaaaaagtgaatggtctatattagaagctgatgaatctgatggaagttttgtttatatacctcccacttattcaataatcacaaatattgatagagaacatatggattattataccactatggataaattaaacaaatactttataaaatttgttaacaaagttccttcatttggaaaatcatttatttgtctagatgataaaaataataaaaatttaataaaaagtattaataataaaaatttttatacttacggtttagatataaattcaaatttttgtataaaaaatattaaacaattaagacaaagcgctgaatttgacttaaaaataaaattaccaaataaaaaaaatcaattaattaaaacacttaaaattcctctcattggtaagcataacataaaaaactctgtagctgcagcagcattagcattaacagtaggtcttccaattaaaaatataaaaaaaggtcttaaaaattttaaaggggttcaaagaagatttaataaaatattcagttttaataatgtagatttttttgatgattatgctcatcatccaactgaaattagagaagtattagatggtgtaaataatgtttatgaaaggtatgaaaaaatatgtattttccaaccacataggatttcaagactaaaggaattaaaaaaaagagtttacgtttgcatttaaa

SEQ ID NO: 313477 - DNA, 766 bp, Unknown
  Bacterial polypeptide expressing nucleotide sequence isolated from the Sargasso Sea
aatgaatccatctaaattcgctttaaataatatccattttgtcggcataggaggaagtggaatgagcggaatagcagaagttttatttaatttaggttataagattacaggttctgataaaaccgaatcggatatcactaatcgtttaagtaatatgggtatagatattgcttacaaacatacatcttctaaccttaaaaatgcagaaatgcttgttgtttcgagtgccatttctgagaataatcccgaaattcaagaagcgaaaagaaattctatacctatacttgctagagctgagatgctttctagccttatgaacacaaagcgagggattgctatagccggtacgcatggcaagacatcaacaactagcatgatcgcctcaattatgagtgaagctaatcttgacccaacatttattaatggaggaataattaatagctttaattctaatgctcagctgggcaagggggaatatttaattgcagaagcagatgaaagcgatcagtcatttttattattgcaaccaagcatgtctatcattaccaatatagagtctgatcacttagtgaattatcaaaatagctttgaaaatcttaaattagcttttttagatttcataaaaaaacttccttttaatggtatggcaattgtttgtggagatgaccctgtaattaaggagttaataccagaattttcaagaccttatattacttatggattcaatcaatataacgattatgtgctttcaaaattatcattctaa

SEQ ID NO: 313478 - DNA, 1405 bp, Unknown
  Bacterial polypeptide expressing nucleotide sequence isolated from the Sargasso Sea
aatgaaacacatcgtcaaacatattcactttgtcggcatcggcggtgtcggcatgagcggcatcgcggaggtgctggtcaacctcggctatcaggtgagcggctcggacctgtcgagtaacgcgatcaccgatcgactcgccgcgctcggcgcgcgtattgcgattggtcacgcggccgagaacattgaaggcgcgaacgccgtggtcgtttccaccgcggtgcgcagcgacaacccggaagtgctggccgcgcgtcatcgccgcattccgatcgtgccgcgcgccgtgatgctcgcggaactgatgcgtctgaagcagggcatcgcgattgccggcacgcacggcaagaccacgaccacttcgctggtggcgagcgtgctggcggcgggcggcctcgatccgacgttcgtgatcggcggacgcctgatcagcgcgggcgcgaatgcgcgtctgggaacgggcgacttcatcgtcgccgaagcggacgagtcggacgcgtcgttcctgaatctgttcccggtgatcgaagtcatcacgaatatcgacgccgatcacatggacacatacgggcacgacttcgcgcgcctgaagcaggcgttcatcgaattcacgcaccgtttgccgttctatgggatcgcggtgctgtgcgtcgacgatccgaatgtgaaggaaattctgccgttcgtgtcgaagccgatcatccgctatggcttcgcgccggacgcacaggtgcgcgcggtcaacgtcgaagcgcgtggcggcaagatgcacttcaccgcaatgcgtgaggacgcggcgccgctcgacatcgtgctgaatctgccgggcgagcacaacgtgcagaacgcgttggccgcgatcgcgattgcgactgaacttgaagtgaaagatgccgatatccagcgagcactcgcggatttcaacggcgtgggccgccgcttccagcgttacggcgaagtgccggtcgtgtcggaaggcaaagcagccggcacgtacacgctggttgacgattacggtcatcacccggtggaaatggcggcgacggtcgcggcggcgcgtggcgcgtttccggggcggcgtctggtgctggcgttccagccgcaccgcttcacgcgcacgcgcgattgcttcgaagattttgtgaaggtgctgtcgaccgtcgacgcgctggtgctgaccgaagtctattcggccggtgaagcgccgatcgtcgccgcggatggccgcgcgctggcgcgcgcattgcgcgtgacgggcaaggtcgagccggtgtttgtcgatacggtggatgaagtgccggacgcgctctcagcagtggtgcgcgacggcgatgtggtgatcacgatgggtgcgggttcgatcggcggtgtgccgggtcgcctcgcgcaagaaacgaaggtatga

SEQ ID NO: 313479 - DNA, 1132 bp, Unknown
  Bacterial polypeptide expressing nucleotide sequence isolated from the Sargasso Sea
gaatttattaaagcaaaaaatctcaatatcccaatatattcgagagcccagattcttgcagaagttatgcaaaaaaagaagtctatttgtatttctggtacgcatggcaagacatcatgcacatcaatgatatcttggatattatcgtatgacacaaaaaaacctaccacattgattggcgggattgattactcattcaattcaaatctacagataggtgacagtgactggatggtagttgaagcggatgagtccgataaaacatttttagcattaccatcagatatatcagtagttactaatatagatgatgatcatatggaaaactatggaacgatgaagaatgttgagcagtcatttttaaactttgcaaataatattaacgagggtggatattttttatatttcaaagataatcctattgcttccaaagtttttagtcattcaaaatcaaacaatataataagttatggtactgataagcattcagatgttgtaataaaaaatatagagaaactgccttttggccataacttcgaactatctggatttatcaatgggaaaaaatataatttgaagcttcaaattaatagaccaggaatttataacgtctggaactccacggctgcggttgtaattggcttgctccatgggatagctgaagaaaagattatttatcaattagcaaaatatcggggggtgtatcgaagattttccagtattattgaaaagagcggcataagatattacgatgattatgcacaccatccaacagaaattaatcagttattgatgtcggcaaaagaacaagctgaaaataaggtgatcatgatttttcagccgcacaggtatagtcgaacattgtcattatatgatagtttatgcaactcattcaaatatgcagattgtctcggaattttaccaatttatgctgctggtgaagaatttgaaaatatgtttgactattggaaatttgcagaagatataaagaaaaaatctaacacagatacatatattttatcaaggagtgagatcagtaaatttctgaaaaatataacaaaagaaggtgatattgtgctatttgttggtgcgggggatatcaatgaaatatcaaaagttattgtaaagaaat

SEQ ID NO: 313480 - DNA, 933 bp, Unknown
  Bacterial polypeptide expressing nucleotide sequence isolated from the Sargasso Sea
ggtaaatcaacatttgtatctgttttaaatgaaatacttcaaaaatcaggcctaaaaagttgtatagctggaaatattggtataccggttttatctttaaatacagatgaatttgatatcattattttagagctttcatcctttcaattggagttaattgatgagtttagagcggatatatcggttttattaaatgtttttgaagatcacaatgagcgatatgaatcctatgaggtataccaaaaaacaaaaacaaaaattttcttaaatcaaagaaactcagatcatgcaattttcgatgatttttatttatcagaaaaagcattaaaagaaattaatccctcaccaaagcatgtattatttaaagataatgaatttaatgatctgagtaataaaatttctcaaaacggaataattaaaaaatttttaccagccctaatcaaggttacggatattttagatgttgatcgaaattttgtaatcaatcaattaaaaaaatttaagaatcttaatcatagaatttatgaagtttgttcaaaaaatggtgtaagttttattaatgattctaaagcaaccaatcctgcagcagctaactttgccgcaagtcagtttaaagatatatattggattcttggcggtttatcaaaaaataatgatctaactaaattaaatttatctaataaaaatatcaaaaaaattttcttaattggatcatcatctgaccaactcagtcaaataatacctaaaaaagttaaatttgaagtatcgcataatctagaaaatgcaactagatctgcctacaaggaagttttaaaaagtcaaaagggttgtattcttttgtctcccggttgtagttcgcaagatcaatttattgattatcaggaaagaggaaataaattcactaaaattgtgaataatttagtagtaaaatgt

SEQ ID NO: 313481 - DNA, 817 bp, Unknown
  Bacterial polypeptide expressing nucleotide sequence isolated from the Sargasso Sea
tcttaccaattagaatatagcaaattttttaaatcagaatattctctaatattaaacatttcacccgaccatcttgaaagacatggaaattttgaaaattatgtaaaagtaaaatttaaattaataaaaacccaatcaaaaaatagttatgcttttatagaaaataaaaattatttattaaataatttaattaaaaaaaataaaattaattccaaaattttcagagtaaattataaaaaatatcaaaaatataataaaatgataacaaatgaatattttatgaatgtgtcaaaccttaagaatctctcttttatatttgctatttctaaaaatttgaaacttagtttaaaaaaaataattaatgttgctaataaatttaaacaattgaattttaggcagcagattatttaccgttcaaaaaaattaattatcattaatgactcaaaatcaaccaccttatcctcaacactgcctctgttagaatcttttaaaaatatttattggattttaggaggaatagcaaaaaaaggagatcaattaaatttaaaaaaagaaaattttagaaaaatcaaagcatttatttatggaaaagataaaatctttttttcaaaaatattatcaaataaaattaattataaaatatcaaaaaatttaaattactcattgttacaagtttttaaagatttaagaaaaaaagaagaacaaaaaaaaatacttttattcagtccttctgcagcatctttcgatcaatttaaaaattttgaagataggggaaaatatttcaataaaattattaaaaaatacttgaaaaaataaa

SEQ ID NO: 313482 - DNA, 607 bp, Unknown
  Bacterial polypeptide expressing nucleotide sequence isolated from the Sargasso Sea
cctgcagcgcgatgaattacctcttatcggagctcataacgttacgaatgctttggctgctgcgctgacggctcgacttgctggtgctggctcaggaggtgtcgtggcaggactcggttctgcgcgtgcgctcccacatcgtctagagcctgtagcagatcgcgccggtgtcctctggatcaatgactcaaaggctacaaatgttgcagcgactcgtagtgctctctctagtctagatcgctcggttattcttctcctaggtggcaaagataaaggtgaagactttgcgcagcttaccgaggccatgcgtggtcgcgcgcgtatcgtagtcggttatggtgccgcaggttctagggcgatcaatgaactgagcgaagccctccgtgttggcattaatgaagaggaggagtctattggaggaccccgcgccagcccttcgttgcggctggtcgaaggatcactcgaagatgtcgtagtgagtgcacgtaactgggccgagtcaggtgatgtagtacttctctcaccagcttgctctagcttcgacatgtacgagaactacgagcacagaggccagcacttcacacttctcgcgagggctgaagtgtga

SEQ ID NO: 313483 - DNA, 769 bp, Unknown
  Bacterial polypeptide expressing nucleotide sequence isolated from the Sargasso Sea
tatattattttaagtccaggaattagcttacatcaatcaaaatataaaagaagtttaattaaatataagcataaaatacttactgatattgatttaatttatttgctgaagaaaaactttaaaagtattgttgttactggctctaatgggaaatcgacaacatgtaaaataatttatcatgttcttaaaaaaaataaatttaaaactttattaggcgggaatataggaacacctatattaagtttaaatccaaaaaaaaataattttttaataattgaagcatcatcttttcaactagctcattctaaatttataaaaccggattatgcttttttattaaatatttcgaatgatcatttagattggcatggaagtatgaagaattacattgaatcaaaatttaaaatttttgaattacaaaaaaaaacccattattcttttattaataaaaaatttaaaaagaaattcaaaaataaaaatctattaggaaaattaattattcctaatgttaaaaattatgaagaaataaaatcaaagattaataataattacatcaagtcaaacataaatgatgaaaacatgcgtaatgtctttgcgttatcaaaaattcttggaataaaagaaaaaaatcttattaaatcactaaaaacttttaaaagtttaccacatagatatgaaatttttctaaaaagaaaaaactctgtttttataaatgactcaaaagcaacctcgtttcaatcaactaaatttgcattacaaaatacaaaaa

SEQ ID NO: 313484 - DNA, 873 bp, Unknown
  Bacterial polypeptide expressing nucleotide sequence isolated from the Sargasso Sea
cagttaactaaccaaaatattaaaattcatgacttatcggatcctagtatttggtcaaatattgatttattacttatttctccaggtattccttatctttatccaaatgcacatccagctgtaattcaggcattaaataattcggtcaggatagataatgacattggcatattttttgaagatttggaaaaaaagaaaaaaaatacaacaattatttgtgtcacaggttctaatggaaaatcaaccacagtttctttaattaaccatgtgttattgaactttaaaaaaaactcagaggttggtggtaatattggacgacccgttttaggattaagcactgatgaaagtaatacttttaaagtattagagctatcttcatatcaaattgaaattgctaaatttttatcgcctgatattgcaatttttctaaacttatctagtgaccatttagatagacacggaggtataggaggatactttaactccaaagcaaggcttttctatagtgggatgcccaagtatagcataataaatgtagaccaacctgaaggaaaataccttgctaattatttagagcaaagtgccaattttgacacaaaggtaatccatatttcttcaaagaaaattctaaataaatctaattggtccatttctttaatcaatgggtctattatagagagaaaaaatggtattgaattatttagatcaaacataagtgattttataaatcttccaggtgatcataatctaatgaacgcatgtactgcttatgcagcttgtaaattatttcaaaagtcatctttagaaattttaaacaagatgaaaaactttaaagcattaccgcatagatcagcttttgtaagaaaaattaaa

SEQ ID NO: 313485 - DNA, 535 bp, Unknown
  Bacterial polypeptide expressing nucleotide sequence isolated from the Sargasso Sea
atgataccaaaaaacattgaaaataaagaaataggattattaggattaggggtttcaggaaaatctgcattcaaaagcttgaaagctggtggaggtaatatatatgcatatgatgataatatttctaatgaccctatagttatagaacctgacaaatggccatgggaaaaattaaataaaattgttgtttctcctggtatatcactaaatcatccaattatcaaaaaagctgaagtatttaaagtagacataataaatgaaattgatgtttttgctaactcaaagcctaaagcaaaagtaataggagttacaggcactaacgggaaatctacaacatcggctctacttggacatattttaaatttaaatggatttaagactaaagtaggaggaaatatcggagaagctgccacttcaatcgacgatcctggggaagacggttttataatactagagctttcctcttttcaacttgaaacctgcagtgatttaaaattagatggtgcaatattacttaacataacccctagatcat

SEQ ID NO: 313486 - DNA, 172 bp, Unknown
  Bacterial polypeptide expressing nucleotide sequence isolated from the Sargasso Sea
attgctctcaccggcttgtgcatcttttgatcaatttagtaattttgaagatcgtggtgactattttaagagtttggtcgaggagttgccgggaacacatcaggacccatttgaagagccaggactagttccatcgctcagtgacaaaaaaaacaaaggggtccctaagtga

SEQ ID NO: 313487 - DNA, 665 bp, Unknown
  Bacterial polypeptide expressing nucleotide sequence isolated from the Sargasso Sea
tttaagtaagagtggggaatcaattctaaattatttaaactctattaatgaaaattatttttgttgggatgataacattaaaatcagaaaaaaaataaaaagaataaataaaaaaaataatttcatagaaccagaaaaattaaattttgaattgatcaaagaatcttttataactccaggaatatctttaaaaaataaaaaaactaatatacttaaaaagtataaagttaaattatacagagatttagagttatactctcgaatagctcataagaaaacaattatagctgtaactggaacaaatggtaaatcaacaactacaaaattaataagtaatattttagaacaaaatgatatacctaattttatgggaggcaatattggtattccattattagattttccaacaaaatataataaattaaaacatcacgttatagaactaagttcttaccaattagagtcatttaaaaaatttgatccttatatttcaatacttttaaatatttcccgagatcatttggatagatataaaaattttaatgaatatatttctcaaaaagaaaaattaattatttctaatcgtaaaggttataaaataatatgtattgatgataaacatacttatttaatttatcagaaatataaaaaaaagatcataccta

SEQ ID NO: 313488 - DNA, 478 bp, Unknown
  Bacterial polypeptide expressing nucleotide sequence isolated from the Sargasso Sea
cctgagagtgttattgaatcattacagtcatttaaagggctcgatcatcgatataaaagagtcgcgatatataaagggatagaatttattaacgattcaaaagccactaatttgggcgcattaaaatcagcgttagagaattacaccgatgaaactgtggttttgatagctggtggcgagggcaaaggaagtaggtttgaagagttttccaagattatcgatggcaaacttaagactcttatcgtaatgggtcgagatggagggcgtctcgccgttatatcggagcgtctgaatatatccacgtatcaagttagttcgatagaagaagctgtaaagaaaggttttgaaattgctaacgaaggggacactattttgctctcacccgcgtgtgctagtctggatatgtttaaaaattttgaggaacgcggtcagcgctttgagtttgctgttcgtcagctcattaacgagcgtagctaga

SEQ ID NO: 313489 - DNA, 843 bp, Unknown
  Bacterial polypeptide expressing nucleotide sequence isolated from the Sargasso Sea
aaaggaaaaaatataattatcatgtaatagaattaagttcttttcaattggaaacagtaaaaaatattgatacaaaaatctcaatcattacaaatttatcaaatgaccatttagatagatatgaaaatataaaggattatatagatcaaaaaaaaaatattattaccaaaactggaatcaatattatttctattgatgatatttattccagaaaaatttatcttaaaaaaaatattaaaaataaaatttgtttttcaacccatgactcttctgctgatatttatatgtctaaagactttattttagataattattttaataggaataaaaaactttatataaaaaatatttctagagatttatatggaaattttaataatcaaaatataattattgcttacatctgttgtaagttattgaaaatttctttaaaaaattttttatatgtaattaaaaattataagggattgccatttagatcaaatacaatatttgaaaataaaaaattaattattactaataatagtaaagcaactaatttaaattcaacaataaattccattattaatcataataaaatatatttaattcttggaggcatagccaaagatagaaattttgaaataatagcaaaatataaagaaaaaatttgttttgtttatgtgtatggaaaatcggctaaattaatagaaaataaattaaaaaaattaatcaatattaaaaaatttaaaaatcttaaattagttttaagagaggtttttaatgatttaaagctagacaaaaatcaatcatctgttttatttgcacctgcttgtagtcttacgatcaatatgataatttgaa

SEQ ID NO: 313490 - DNA, 790 bp, Unknown
  Bacterial polypeptide expressing nucleotide sequence isolated from the Sargasso Sea
ctacgttctggaattgtcgagttttcaacttgaaactacttattccttgaagccaaccgtggcggcattaattaattttgcggaggatcacctggacagatatgagtgttcccaagactatctagaggctaaattaaagattttgaaaaatgcaaaggttgcagtacttaacagtgatgatgatgtgctgaattccgtagagttttctgggcaaaaagttaggttcggtcaaaacgagccaacaaaggaaagttatggtctcacgagagattttgctggacatcatctctctaaaggaagcgttaagtatgctgatattgagtcgcttcggatctttggcaagcacaatattacaaatgccttagcttccctggctatctgtggtgtcgttatagaactgagtccaaaagttatacgaggattgcaagcgttcaagggattgcctcataggtctgaattggtaggaacatttaaaggcactactttcatagatgactcgaaagctaccaatatatcagccaccaaagcaggcattaacgcttgtctttcagagaaaaaaggggtgttaattttggggggtttgtttaaaggaggaaatttggaagatttaattaagaccattgaggtaagggtccatactgtggttttaatcggtcaatctgctgaattgttctatcgtctacttcggggtagggtaccttgtatacgtgcaaactgtatgacgtcagcggtaggtgtcgcttcagcttttgctgctgatggggaagtggttttgttatcgccagcttgt

SEQ ID NO: 313491 - DNA, 950 bp, Unknown
  Bacterial polypeptide expressing nucleotide sequence isolated from the Sargasso Sea
tgatgactcaaaagtaagaaaacagattactcaaacaaaattcaaaaaattttttaatacaagtaaagtatggaaaactattgactatgtagtgccaagtccaggaataagtattattggaaaatcacaacataaactaattaatattgctaaaaaaaataataagagaattattagtgaacttgatttatttcaaattgcgatatcgaaaaatgataaaatcaataaaagtaatattaagataattgctgttactggtacgaatggaaaatcaacaattgtaactttaattaatcatttattaaaatccaatggaataaaaacttctctaatcggtaatattggaaattcaatatttagttcaaagctaataaggaatggatttctcataatagaagtatcatcatatcaattagagacttcaaaaatctttgccccaaatattgcagttatttccaatttatcttcagatcatttaagtagacataaaaatatgagaaattactttaatcaaaaagcaaagattttaaaaaatctaacaaatgatgacacagcaatattgaattgtaatcatgatttaattaaatcaaaagcattaaagctattgaaaaataaaaaaaataatacaatttctcttcattttgaaaaaagaaaaagtcaatcttactcatcaaaaaagaaattaatagttacatcaaaattaaggaaaataaagcatagtaacccacacttgaacggtgagcataatgaagaaaatgttcaaatcacctatcaaatattctcttctcttcaattaaaaaatctatttactaaaaaagcgcttaatagttatattggattaaatcatcgtcaagaactgatttttgataataacaaaactatgatcattaacgactcgaaggcaaccaatatcgaatctatggtaagagcgataaagaatataaaaatat

SEQ ID NO: 313492 - DNA, 857 bp, Unknown
  Bacterial polypeptide expressing nucleotide sequence isolated from the Sargasso Sea
aataattacagatttagatttagcatttttattcaaacgtttttataaaagtatagttgtaacaggcacaaatggaaaatcaacgacatgtaaaattataaaccatttactaaataaaaataaatttaattcattactaggcggaaatattgggactcctgttttgaatcttaaatcaagtaaaaaaaattttttaattatggaagcgtcatccttccaattagcttactctaaattcttaaaaccagattatgcaattttattaaatatcacaaatgatcatttagattggcatgggtcaatgaaaaattatatcaattcaaagtttaaaatttttacaaatcaaaatcaaaatcaatattcttttattaataaaaaatttaagttaaatttctataaaagaaatttaaaaagtaaattattaattcctgaaattcaaaaatataaaaaaataaaatttaaaattaaaaattcctatctaagtctaaatataaatgatgaaaatacgtccttcgtatattcattatcaaaagtactaaaaattaatgaaaaacatttcataaatgctttaaattcttttcaaggattgccccatagatatgaaatatttcttaaaaaaaaaaattgtatttttattaacgactccaaagccacttcatttcaggcaacaaaatacgcccttcaaaataccaaaaacatttattggattgtaggcggtttaccgaaaaaaaatgataaaattaatgttaaggatttgaaaaaaaatattattaaatcttatataataggtaatcacgtaaatttttttaaaaaagatttacagagtcaaattaaaatatgtgttacaaaaaattgaa

SEQ ID NO: 313493 - DNA, 635 bp, Unknown
  Bacterial polypeptide expressing nucleotide sequence isolated from the Sargasso Sea
aatgaaatatatctatggtttaagtaggagtggggaatcaatcattaattatctaaactccattgatgaaaattttttttgttgggatgataacattagaattagaaataaaataaaaaaaataaataaaaaaaataatttaatagaacctgataaactaaattttaaactaattaatgagtcttttgttactccaggtatatctttaaaaaataaaaaaattagtatacttaaaaattataaagttaaattatatagagatctagaattatattctcgtatagcctataagaaaaaaatcatagctataactggaacaaatggcaaatcaacaaccacaaaattagtcagtgatatattaaatcaaagtgatatacctaattttatgggaggaaatattggtattcctttattagattttccaaaaaaacataaaaatttaaaatatcatgttatagagctcagttcttatcagctagagtcatttgagaaatttaatccctacatttcaatacttttaaatatttctagagatcatttagatagatataaaaattttaaagaatatattgatcaaaaagaaaaattaatttttactaatcgtaaaggttacaatattgtatgtattgatgata

SEQ ID NO: 313494 - DNA, 769 bp, Unknown
  Bacterial polypeptide expressing nucleotide sequence isolated from the Sargasso Sea
tggaaatcttggaaattctctattaaattcctttttaacaactaaaaaatatacacatcatgtaatagaattaagctcttttcaattagagttgattaaaaactttaatccatctgtttcaattttactaaacttatcaaaagatcatcttgatagatatgaaaattttaggcattacattaatcaaaagaaaaaagttttttctaaaaatcaatatggattaaatttaatttcaattgatgataataattccaaaactatttataatgatgaaaaaatttctaataaaatttctttttctgttaataattcaaaagcagatgtttatttaaaaaataatactatttatgataattatttttttaaaagaaagaaaattattgttaaaaatatttctattgatttagcaggtgattttaactatcaaaatattttagtagcttacattgtttcaagaatttttaaaatacaattaaatgtttttaaaaatattgttaaaaactttgttggtttacctcacaggtataacattattgaacaaaacaacaaatttgtagctattaacaatagtaaagctactaacatacattcaacttgcagttctttaaaaaatttaaaaaatgttattttaattttaggaggtagggcaaaagataataattttaatcaaataaataaatcggcaaatcatattattaaagcatatgtttatggtgaatcaagcaaacaaataactaaaaagataaaatctaaaataaaagtaagtgta

SEQ ID NO: 313495 - DNA, 923 bp, Unknown
  Bacterial polypeptide expressing nucleotide sequence isolated from the Sargasso Sea
tattgagttattttttagatttaatcccgaagaaaaatatataggagttactggtactaatggaaaatcaactacagtttctttattaagccatgtttttaagaaattaaaaattaataatagtcttagtggaaacataggtaggccagtatttgatttaaaaagatttaaaaaaatatttaatatattagaaatctcatcatttcaattagaattgatgaaaagaacaacattcaaagttgcagttttattgaatataacaaaagatcatattgagagacatcaaagttttaaaaaatatataaatgaaaaaattaaaatttttaataatcaatcagaagatgatgtttctattattggagtagataatgaagtaacatcttctttagtaagaaaattaaaaaagaaattagattcaaaaataattactgtatcaggggagaacaataaagctgatatttatattaaaaataaaaaattaataataaattttaatttaagaaaaaataaaatatcaaaaataatcgacataggacagtttaataactttcttggagtacataattatcaaaatatagcagccgtgtatgcgatagttttgtctttaggtttttacaagtggaaacaaattgagaattctattaagtcttttaaagctttgcctcatagactacaaaaaataaaacagattaacaatataactttcgtcaatgacagtaaggccacaaatattgatgcaacaaatcaagccctaaaaaattttaaaaatgttttttggatattaggtgggcgacttaaagaaagaagtttacaaaaattaaaaaaacatttttttagaataaaacatgtttttttagtaggagaaacaaaatttttatatcaaaaaatatttaaaaaattttttagattgtacaactgttaag

SEQ ID NO: 313496 - DNA, 705 bp, Unknown
  Bacterial polypeptide expressing nucleotide sequence isolated from the Sargasso Sea
aatggatttaaaaaaattatcttttttagtctacggtttaggtgttacaggaagatctgtaatcaaatttcttaaaaaaaaaaacttgaagaacttctatatatgggatgacaataaaaaaagttcatttaaagacaaaaggcccttaaatttaaataagtgtattaaagaagttgattttataattttaagtcctggaataagtttactaacatcaaaatacagaaatcagttaaccaagtttaaaaaaaaaattattactgatttagatttgattttcttatttcaaaaaaactttaaaagcattgttgttactggtaccaatggcaagtcaacaacttgtaaaataattaaacatgttttaaaaaaaaataattttagatcattgttaggaggaaatattggtacacccgttcttgagcttaatccaaaaaaaaataattttttaattattgaagcttcatcttttcaattatcatactcaaaatttattaatcctgattattcaattcttctaaatatcactaatgatcatcttgattggcatgggagtatgaaaaactatattaatgctaaattcaaaatttttcagcttcaaaataagaatcagttttcattattaaataaaaaatttgaaaaaaattttaagagtagaaaactcttaggaaaattaattattcctaaatttaaaaactataaaaaaat

SEQ ID NO: 313497 - DNA, 124 bp, Unknown
  Bacterial polypeptide expressing nucleotide sequence isolated from the Sargasso Sea
gcctataaaatttgcctccaaaaatgaaaccgttttactttcacctgcatgtgcaagctttgatttgtttgaaaattatgaagaccgagggaaccagtttaaaaaagcggttagggctttgtaa

SEQ ID NO: 313498 - DNA, 706 bp, Unknown
  Bacterial polypeptide expressing nucleotide sequence isolated from the Sargasso Sea
aatatgccaagcgaccatctagactggcatggaaattttaaaaattatttagaagctaagtccaagattattaaattcactaaaaagaataacatccttgtttatagtgatttaattcgagagatagcagattatgaaactataagaattattagtaatacgagttcatttaatattgacacgcctttttcagatgaattattagtacctttttgggatttgatttatttattggatttaaatatagaaaatttagaagaagcttttcaaaaattcctaataaatttaaatcaattagaacacagatatgaaaaaatcgattttaaaggaaatataaaatttataaatgattcaaaagccacaaattttcatgctgttacaaatgccattaatagatcaaaaaatataattcttatccttcatggattaactaagaatatccccagcgaagaattgaaactcacaagtgatgttaaaaaaatattcgtacaatctgagatgaacttagatttaaataaatttaatggaaaaaaaattatttataattcaattaatgaaattaaaaaccttataaagaacgagatggaagatggagatactgttctcttttcatgtggaggtgcaagtttcaatgatttcaaaaactacaaagaccgaggaaaatttttcaaaaatatagtaaaagagattgaaaatgaaacttaaa

SEQ ID NO: 313499 - DNA, 775 bp, Unknown
  Bacterial polypeptide expressing nucleotide sequence isolated from the Sargasso Sea
ctttttaaattttaaaatttttgatgataagcacaaaaatctttttaaacagtacagaactaaaaatttgaatcaaacattaaaacaagttgactatattgtactatcgcctggaattaacttaagtaaaaataaaaatctaagtcaatataaacataaaattattactgacattgatttattttatcttactaatgataactttaaaagcattgttgtaactggaacaaatggaaaatctactacatgtaaaatattagagcatcttttaaaaaaaaataacttcaagtgttttcttggggggaatatcggcaatcctatcttaagtattaataaaagattaaatggcaatagttttgtaataatagaggcttcctcttttcagctatattattctaaatttattcgtcctgattttgctttttttttaaattttactaatgaccacctagactggcatggcagtatgaatgcatatttaaatgcaaagcttaaaatttttcaagatcaggataaatatcagtatgcattagttaataaaaaattaaaaatgattttcaagaaaaaaaaatttctaagcaagcaaattaatccagaattaaaaaactataacaaaattaaattaaaaataaaaaataaatacttatcctcaagttctaatgatgaaaatatgagctttgtttttgaattctctagattaattaaaattagtgaaaaatcttttattaaatcaattcaatcatttaagggcttagaacatagatttgaaatattc

SEQ ID NO: 313500 - DNA, 250 bp, Unknown
  Bacterial polypeptide expressing nucleotide sequence isolated from the Sargasso Sea
catggtttgcagtaaggttaaagcaattatatgtctaggaaaagacaacaacaaattaattgatgtattctcatctcacactgatgttatagttagtacagataaaatttctgatgccgtttcgagtgcatacaagatttcaaagcctggagacgttgttttattatctcctgcatgtgcaagttttgatttatttaaaagttttgaagacagaggtgaacaattcaaagaagaggtaagaaaactatga

SEQ ID NO: 313501 - DNA, 634 bp, Unknown
  Bacterial polypeptide expressing nucleotide sequence isolated from the Sargasso Sea
tatgtatgtagattttaaaaaaaattatttatcattttattgtagttcaaaaaaaatctttataaaaaaaaatattcagaatgccaatgtttctaattctcacctattaggaagccataataaagaaaatgttttctttgctattcaaatatctagattgttaaatatcaaatattcaaaagtattaaatgcaattagaacattcaaaggtctggaacatagacaggaaatagttttagaaaataaaaaaatgatgattattaatgattctaaagcaacaaattttgaatctttaatacctgctttaaaaaactataaaaatatttatttaatatgtggtggtctagctaaagatcataacattaaaattttagacaggtatattaatcaattggttgttgtgtttattattggtctaaatgagaatccttttcttaattattttaaagacaaaatagaaactcattatgttaaaaatttatcacttgctgtaaaaatggccgtatcacgtgctagaaataataagtctaataatacaattttatttagtcctggcgcagcttcatttgatcaatttaaaaattttgaaatgagaggaaaaagatttaaaaaattgattaaattaaataaataa

SEQ ID NO: 313502 - DNA, 858 bp, Unknown
  Bacterial polypeptide expressing nucleotide sequence isolated from the Sargasso Sea
tctcttgatgacccgggcgagcatggcacactagtgctggaattatcatcctatcagctagaaactacgccatcgctgaaaacatcaatttccatcttgctgaacatcagcccagatcatcttgatcggcatggcgggatggctggttatattgctgccaaagctttgattctggaacgacttgaaaaatcaggcctcgccatcgttggtgccggggacgagcatgtgagaacccttgcaaaggtgaccgcggccaaagggattagaacaatgatagccagtccggacctggcgccagatgaccaaaaggcatcaaccgcgcttgctgggacacataacgcagaaaatgcagcggcggcagcattagcgctttgcgccctcgggttggatgatcagatgatcaatcgcggcgtatctagctttaccaacctaccacatcgcctccagcgggttgccagctgtggtaaggttcaatttatcaatgattcaaaagcaacaaacggcattgctgcagctaaagccttgacttccttcaacgatatttattgggttgctggcgggcttgccaaacaggatgggttatcaccaactatgccccacttgggcgcggtgaaaaaagcttatttgattggtaccgccgctcccacttttgccaccagcctatctggcatttgccctgtagctatttgcgatagcctggaacaggcaacacgcgctgcctttgatgatgctagtgccaatcccgatggtgggacaatcctactggccccagctgccgcctccttcgatcagtttccaaatttcggagcacggggcgatgagtttgctgctcttgccaaagcgctttgcgctgcggga

SEQ ID NO: 313503 - DNA, 742 bp, Unknown
  Bacterial polypeptide expressing nucleotide sequence isolated from the Sargasso Sea
gcggcggtagcatcacttgatgccgccggtgtgacctcatttgcacatgatgacaacagtccggatacccccgtttcaaacggcacacttttgccgtggcaggactggccatggcaagatttggacgcactggtgattagccccggaatcccgcatctgcaccctgccccgcacccggcagcagctcgtgcctccgcagcaaatatcgaaatcctgagcgaggttgaaatcgccttgcgcgggatgccacaagcccccatcgtggtgattactggcaccaacggaaaatcgacaaccaccacgcttgttggccactgtttgcaagaggcgggaaaggctgtggcgattggcggcaatattggccgggcagcctgttcgctcgacgatcccgggcctgatggtgtcatcgttcttgagctctcatcctatcaattagaaacaacaccagcgctttcaccaaccatcgccgtggtattgaacatcacccctgaccatcttgaccggcatgccggtatggccggttatgtggcagcaaagactcgtgccttaaccacattgcgcgccgatgggacggctattctcgggcggtcagatgaccatgtgaaacagctcgccaatgcgtgcatagctcggggggtcagaacattgctggcaatgcccgaccaggccccggctggccgcaaacattgcctggcactgcgcggtgatcataatgctgaaaatgcggcagcggccggattgg

SEQ ID NO: 313504 - DNA, 496 bp, Unknown
  Bacterial polypeptide expressing nucleotide sequence isolated from the Sargasso Sea
atgaaatctcttatttttggttatggagtcacaggccaatctttcgaaagatatctaaagaaaaaaaatatagatttcgaaatttatgatgcaaatgtaatagggcccaatatcaccaatattttgcctgatcaaaaaaaattagaatcttatgaaatgatctacatgagcccaggaatcaatcttcaggagatttatttaaaaggagagtttgatgaaattccctatttaactgacgtagatattttttttcaagaagatcgttcttataagatcggaattactggcacaaatggcaagagtacttgctgttatcatttgtatcagcttttggagaattctcaactagttggcaatattggaactccagtattggataatattaattcttgtttatattcgattattgagctttcaagctttcagctagagaaggcaaaggaattacaattagattttggagttcttttaaatatttcacccggatcatgttgat

SEQ ID NO: 313505 - DNA, 730 bp, Unknown
  Bacterial polypeptide expressing nucleotide sequence isolated from the Sargasso Sea
attttaaaaaaactatcttttttagtttatggattaggccttacaggtcaatcggttgtaaaattttttaaaaagaataatttcaaaaactttcaagtctgggatgacaaaataaaaaacttatacaaaagcaaaagagcaaataatttaactaatactcttaaaacagctaattttatagttcttagccctggagtaagtcttaataaaaatatcaagagattagaaaaatacaaaagaaaaattattacagatattgatttgatatttctactttataaatttaaaaaaagtattgttgtgaccggtaccaatggaaaatctactacttgtaaaattatagctcacgttcttaaaaataataaatttaaagtacttttaggcggaaacattggaactccaattcttgacctaaaagtaaaaaaaaatactttcttgataatcgaagcttcatcttaccaacttgcccactcaaaatttattcgaccagattatgcgtttttattaaatatttcaaacgatcacttagattggcatgggaatatgaaaaattatgttaattcaaagtttaaaatctttaaacaccaaaaaaaattccaatattcttttgtaaataaaaaactaaaaaaaaattttcaaaaaagaaaattttcaggaaaattgataattccaaatactaatgaatacacaaaattaaaagccaaaataaaaaacccttattttaagatga

SEQ ID NO: 313506 - DNA, 561 bp, Unknown
  Bacterial polypeptide expressing nucleotide sequence isolated from the Sargasso Sea
aatgaaagattatgtatacggcataagcaaaagtggactttcagtgattaagttattaaaaatacaaaataaaaattttgattgttgggatgatagtaaaaaaactacatatttattaaaaaaaaaatttagaaatttaaatttaattccaattaacaaaacaaacttaaaaaactataataatatttatgtaactccaggtatatcagttaatgatgataaattttcaaaagttaaaaagtctaaaataaaaagagatttaaatttatactatgaaaacatcacgactgaaaaaataattgcagttactggcaccaatggaaaatcaactactaccaagcttattggagatattttaaaaaattgttcaaaaaaggtatttgtaggaggcaatattggtgacccactctgtagttcaattttacaaaaaaaattattttcttatcatgttatagaattaagttcgtatcaactggaaactataaaaaattttgaacctaaaatttctataatactcaacctttcaaaagatcatttggatagatataaaaattttggaca

SEQ ID NO: 313507 - DNA, 732 bp, Unknown
  Bacterial polypeptide expressing nucleotide sequence isolated from the Sargasso Sea
tatgcaaaatccaaatgttagatctattgttgttacaggaacaaatggcaaatctaccacatgcaagattatagaacatttattgaagaaaaatggtttttctactcaattaggaggcaatattggaaaaacaattttaaatataaagaaaagaaataataagcgaactttttttataatagaagcatcctcatttcaactcgcatattctaaatttatcaaaccaaattacgcttttatattaaatattagcaaagatcatttagactggcatggaaacatgggtaggtatataaagtcaaaatttaaaattttttcattacaagaaaaaaatgattttgcttttttgaaagataaaaaattgattaaaatatttagaaaaaataaaaatttaagtaaattacaatctgtatcttcaaaatattacaaaaaaatacaaaataaaattgacaataagtatttaggatcaaaggcaaatgtagaaaacatgtcttttgtttataaattttcaaaaattttaaaaattaaggacaaattttttattgaatcttttaaaaaatttaatggattacctcataggtatgaaatattttttaaaaaaagaaacataagattcataaatgattctaaagcaactagttttgaatccagcaggtttgctcttgagagcaatagaaatattttatggatagttggtggattgccaaaatctggggataaattttatttaaa

SEQ ID NO: 313508 - DNA, 438 bp, Unknown
  Bacterial polypeptide expressing nucleotide sequence isolated from the Sargasso Sea
ttttgagttatggcgggttgccgcaccgcagccagatcgtcgccgaagcgggcggcgtcacctatgtgaatgacagtaaagccaccaatgtcgacagcgccgccaaggctttgtcagcgttcaaacgtatccgttggatatgcggcggattggaaaaagaaggcggtgtgtcggcgttgtccgatgcggcgggcgcggtggtcaaagcctatgtgatcgggcgcgaagccgcagggtttgcaatacaattgagcggcgtcgagaccgaggtgtgcaccacgatggaagaggcggtgcgccgcgcggcctccgacgctgaggcgggcgatacggtgctgttggcgcctgcggcggcgagtttcgatcaatacgacagcttcgagcggcgcggcgaggatttcatggcgcaggtggcaaaagtgaccggcgcggcctagg

SEQ ID NO: 313509 - DNA, 859 bp, Unknown
  Bacterial polypeptide expressing nucleotide sequence isolated from the Sargasso Sea
agaatttgccagtaaatttacaaataagcctattgtagccgtaactgggtcaaatggtaaatcaaccactgtaaatatattatttgaaatgctaaaagttggtggttataaaccactcctagcgggaaatattggtgagcctttttcaaaaggtatatatgaactattaaataacattattaaagtagacatcattatacttgaaatatcaagttttcaattagaattcatcgaccaatttcgcccttatattagtctttatttaaatattacagcagatcatctagataggcacaatagcatggaagaatatctaaaaatgaagcttaaaatgattaaaaatatgaaacaagatgattttattgtatacaataaagatgatgagattattaataaatcttttgaacatactgctccaaataagatttcttacagcttaatagaaaaaaacaaattttttagccttaacagtacaaaaatttatgatgaaaaccttgaatctttcattgcaattaaagacatacttttaaaaggtaaacacaatttatctaacctaattgcatctgctaccgtagcaaaaattttaaatataaaaaataaaaatatcaaaagtgttatggagcaatttccaggtataaaacacagacttcagttcatcaaaaaactaaaagaagtcacatatataaatgattcaaaagcaacaaatatttcatcagttattgcagcaattaaaagttttgatagtcctattgtactcctattaggaggtaaaaacaaggactcagatttccggctacttcttccgcataccaaacgtcatgtaaagcacatagtatcatttggagaagccgggggggag

SEQ ID NO: 313510 - DNA, 722 bp, Unknown
  Bacterial polypeptide expressing nucleotide sequence isolated from the Sargasso Sea
aatgatatttaaaaaaatactgaaaaataaaagttttttagtctatggattgagcttaactggattgtccgttgttaaatttttaaaaaaatcatatgcaaaaaatatttttctttgggacgataacataaaaaagagaaaaacatttaacttaaaagaaaatgataattcaataagaaaaaaattttcagatgtagactatattattttaagtccgggcataagtataaataacagtaaaaaaaaaaatttactttatgaaaataaagaaaaaataataacagatattgatcttttttttttaaccaacaaaatttttaaaagtatagttgtaaccggtacaaatggtaaatctacaacatgtagtattattcaaaaagtattatctgactccggatttaaaacattgttggtaggaaatataggtaaaccgattttgaattataatttaggaaaaaagaggaatgtagtattgataattgaaatgtcgtcattccaattagaatattcaaaatatgtaaagcctgatcacgcaatcttgattaatataactaaagaccatttagattggcatggaaatatgcaaaactacataaaagcaaaattaaaagttttttcattacagaataaaaaaaattatgcataccttccaaataaccaaaaaattataaaagaattcaaaaaaaataaaatacaatcatctgtccaaattatcaaatctt

SEQ ID NO: 313511 - DNA, 167 bp, Unknown
  Bacterial polypeptide expressing nucleotide sequence isolated from the Sargasso Sea
tgttatagttagtacagataaaatttctgatgctgtttcgagtgcatacaagatttcaaagcctggagacgttgttttattatctcctgcgtgtgcaagttttgatttatttaaaagttttgaagacagaggagatcaattcaaagaagaagtaagaaaactatgag

SEQ ID NO: 313512 - DNA, 868 bp, Unknown
  Bacterial polypeptide expressing nucleotide sequence isolated from the Sargasso Sea
atgggcgaaaacatgggcgtgtccgccgccgagatggccctgagcctgcagcgacagtcagccgcaccacccgactggctggtgatggaactgagcagttaccagatcgaagccgccgaacgcatccgccccaggatcggcatctggaccacgctcaccccggatcatctggaacggcacggcaccgtcgaggcctatcgggcgatcaagcgcggcctgctcaaacggtccgaccaggccatcttcaacgccgatgatcccgacctgcgccagcagcgccggagctggaacggcggcatctgggtcagtgcggagtcggcccaacccgatggtctccccgccgacctctggatcgacgacgaaggctgggtccacgagccaacccagcggttgttccgcgccgacgccctggccatgccgggggcccacaaccgtcagaacctgctgctggtgaccgccgcagcgcggcggatcggcctcagccccgcggcgatcgaagcgggactgcgctcattcccgggagtccctcaccgcctggagcccctgggctgcatcggaggctcacaggtcttcaacgacagcaaagccaccaattacgacgctgctgcagtggggctgcgggccatgcggggtccggtggtggtcctggcggggggaaccaccaagcagggggatgccagcgactggcttgcggaactgaaccgcagggcctgtgccgtggtgcttttcggggctggcgccgaggaactgcaggggctaatcaccacgtcaggcttccctggtccgctgagcctctgcaacgacctgtccgctgctgtggaccaggccgttcagcgtgcagaggcgctgggagcctccaacctgctgc

SEQ ID NO: 313513 - DNA, 532 bp, Unknown
  Bacterial polypeptide expressing nucleotide sequence isolated from the Sargasso Sea
atgacagaatacgtttatggtttaaacaaaagtggaatttctgttatcaaattattaagacttcaaaaaaaaacttttagctgttgggatgatagtaaaaaaatcagagattcattaaaaagaaaatattcacgtttaaattttacttcaattaataagactaatttaaaaatatataataatatttatttgactccaggtgtatctatttttgataaaaaattttcaaaaatttcaaagtcaattattaagagagatttaaatttgtatcatcagaatttaaaaaatgaaaaagttattgcaattaccggcactaatggaaaatcaactacaacaaaattaattggtgatataataaaaagaaaatttaaaaatacttttgtaggtggaaatattggtgacgcactttgtaattcaatagtaaataaatcacgttattcacatcatgttattgaattaagttcttttcaacttgaaactataaaaaaatttgaaccaaaaatttctataatacttaatctttcaaaggatc

SEQ ID NO: 313514 - DNA, 410 bp, Unknown
  Bacterial polypeptide expressing nucleotide sequence isolated from the Sargasso Sea
tcgtttagaaaaagtaaggactgagggtggagttacattttataatgattcaaaggcaacaaatttagattcagtaaaagtagctataaaatcatttgaatctccgataatattaataattggtggacgaaataaaggtggaagtttcaaagaattaaaatcacttttcccgaatagagtaaaattagttattgctattggtgaagccgcagatgaaatcgaaaaagacttttataaatctcctccagttcaaaaagctatatctatggcttcagctgtgtcattagcctacaaaaatagcattaaaggtgacattgttcttctttcaccaggatgtactagctttgatatgtttaaaaattttgaggaacggggtaatatttttaagaaagaagtaatgagattataat

SEQ ID NO: 313515 - DNA, 768 bp, Unknown
  Bacterial polypeptide expressing nucleotide sequence isolated from the Sargasso Sea
aaaaattatattacttggggatgacaaaaattatttaaaaaaaaataaaaaactttataaaaaaaaagggaaggattttttaaagctatgtaattttgtagattatataatagtaagtcccgggataaatataaacaaaacaaaattaaaaaaaaccctattaagaaattattctaaaattattacagatcttgatcttttttatatgattaaccaaaaagttaaatcaatagttgttactggaaccaatggaaaatctacaacatgtaaaattatttaccacttattaaaaaaaaataaatttaataccgtgataggtggcaatataggaaaaccagtcttagatttaaatttgagtagaaaaccaatagttataattgaagcttcatcgttccaattatcttactcaaaatatataagacctagttacgcactcatacttaatattaccaatgatcatcttgactggcacggtacaatgagcaattacataaacgcaaaatttaaaattttttcacttcaaaataaaaataattttgcttttataaatgataaaagattgaaaaggaaatttaaaaaaaataaatatttagctaaattaatttttattaatttcaaaaaatatttaaaaataaaaaaaaagattaaaaataattatcttaactcagaagcaaatgaagaaaatatgagctttatttttgctttatcaaaaatactaaaaataaatgaaaaatcttttataaaatctttaagatcttttaagggctt

SEQ ID NO: 313516 - DNA, 922 bp, Unknown
  Bacterial polypeptide expressing nucleotide sequence isolated from the Sargasso Sea
ttaaaattattatacaaaagtgattatatagttaaaagccctggaataaatataaattctgtaaagtttaaaaaacatttattaaaaaataaacacaaaataatatcagaccttgatttgttctatattaaaaattctaattcatcttcaattgttattacaggtacaaatggaaaatcaacaacctgtaaaattatagaacatttgcttaaaaaaaatggatttaaggtaaatttaggtggaaatattggagaacctgtattgaattttaaaaataacaaaaatacattttctataatagaagcatcttcttttcagttagcttactctaaatttataaaaccaaaatatgcgttaataataaatatttcaaacgatcatttagattggcatggtaaaatgcaaaattatcttaattcaaaatttaagatttttaaatttcagaaaaaaaatgatatcgctttattaaaagaaaaagagttaattaaaaaatttaaaagagaaaaatactttagcaaattaaaaatagtatcagataaaaaatatcgaaaaataagcgataaaattaaaaatagatatttaaaaattaaatcaaattatgaaaacatgtcttttgcatatcaacttggaaaaatattaaaaataacagactctaattttattaaatcatttaaaaattttaaaggtcttccgcatagatacgaaatattttataaaaaaaataatataaattttatcaacgactccaaagctacaagttttagatccagtaaatatgcacttgaagataacaaaaatatatactggatagttggcggtcttccaaaattaggtgataagtttcatgttaataatcttaaaaagaatattacaaaatcttttattataggaaaaaatacaaaatttttcgaaagacattaaa

SEQ ID NO: 313517 - DNA, 864 bp, Unknown
  Bacterial polypeptide expressing nucleotide sequence isolated from the Sargasso Sea
aatgaaatatatttatggtttaagtaagagcggggaatcaattttaaattatttaaactcaattaatgaaaattttttttgctgggatgataatattagaattagaaataaaataaaaaaaatgaataaaaaaaatcatttaatagagccagaaaaattaaattataaactaattagtgaatcatttatttcaccaggaatatctctaaataataaaaaaattaatatacttaaaagttacaaagtaaaattatatagagatttagaattatattctcgcatagcttataaaaaaaaaattattgctgtaactggtacaaatggtaaatcaactactacaaaattaataagcaatattttaaataaaaataatatttctaattttatgggtggaaatataggtattcctttattagattttccaaaaaaaaataatgacttaaaatatcatgttatagagttaagttcttatcaattagaatcttttaataaatttaacccttttatttcaatacttttaaatgtttctagagatcatctagacagatataaaaattttaaagaatatatttatcaaaaagaaaaattaatattttctaatcttaaaggttacaatataatatgtattgatgataaaaataccctatccatttataaaaaatataaaaaaagagccatcccaatatcatctaaacctttcaaaggcactgtattctataaaaataaatctataattgatgattattttgaaaaaaataaaaaaattgaactaaaagagatatctagttcactttttggcaattttaatattcaaaatatcttagcagcatatgcagtatctaaaattttaaatataaatgtaaa

SEQ ID NO: 313518 - DNA, 902 bp, Unknown
  Bacterial polypeptide expressing nucleotide sequence isolated from the Sargasso Sea
tgataaaaacttaattagggaactagatcttctagttgtaagcccaggggttcctcacttgtacccaagggcacacccaatagttacattagcgtatgaattaaacataagagtagacaacgatattggactttttttttcaagccatattcaagaagagtatgaaactttcagtgatccaccaaagataattgcgataaccgggtcaaatggtaaatccactgcaactgcgttggctagccacgtactttctaaattttttagtgatgtagaaatgggaggtaatatcggcaaacctgttttagagttaagccctcttagggaaggctctatcaggatcctggaactctcttcttatcaaattgaattggcaaaatgtttagctccaaatttcgcagcttttattaatttttcttcggaccatcttcaaagacacggagggctagggggctatttttatgctaaagctcgattatttttagaaaacctaacagatatgtcggtcattaatattgatactgccgagggcttatttttatatcagagactaaaatcatccgataacaaaatgatcgctgttagcagtaaactaaatgtcaaagattatttttgggcggtagggttaaaaggatactttattacggaatggaaaaaaggtcgacaggtctactcccatgatttaagggatttgggaaatagcttctttagcttaagggaaagccttttaaccgtttatgcattgggaagatcatttggtattgctcctaaaagcattctaaccaaatgtgacgggtttatgccattagcgcacagaaatcaattggtagacgtaattgggggcatagcatttataaacgatagtaaagctacaaatgttgatgcaactatacatgctctttcta

SEQ ID NO: 313519 - DNA, 835 bp, Unknown
  Bacterial polypeptide expressing nucleotide sequence isolated from the Sargasso Sea
gatgcatacctatcatattgcaagtgaaacgggtatacaaagtgaaaaggtctatgattcagatctatgggtcttgtctcccggtgtatctaaagataatgcaattgttttaaaagcaattgaaaagggtattccaattgtaggagaaatagagtttgctagttggtttactgaatctccaattatagcaatcacagggtctaatggtaaaacaacaacatcatatattttatctgaaatgtgccaaactgaaaatattaatggtgtaatggctggaaatatgggtctccctttttctgaaagagtgttaaatgaaatcctcagcccagatgaaaacatgatttacatattggaagtgtcaagcttccaaatggaattcactaaacatttttcaccgacattttctatatacactaatatttctcccgatcatttagaccggcataatactatgaaagaatacattggtatgaaattgaaggtaactaataatcttaaaaaagatggctctattatttttaatgatgatgattctttactaaaaaaggcagtaagtaagattaataaaaaaacaagagcattcagtaccattagaaaagatgtattattctatttagataatgaaaaaattgttggtccatcaaaaaaatcacttttagatataaatgatcttagggttcaaggtaaacataatatttccaatctatttgcagcagcgacatgcagtcacttaattggtattaatgaagaacacataagtaatgttatgaaaaatttcaaaggtgtagaacaccgtttggaacatgtagagttcatcaataatgtagaatatata

SEQ ID NO: 313520 - DNA, 574 bp, Unknown
  Bacterial polypeptide expressing nucleotide sequence isolated from the Sargasso Sea
ttttctaatgatagaaatatatcaattcatgaagatgagatttctttaaaaggtattcataatatttctaatataatggttgcagctgaaatagcttataaagtcggtattaagaaagacaatatttttaaagctataaagaattttaaaggattagaacatcgatttgaatttttaaaatcatttaatagtatagattatataaatgactcaaagtcaaccaatgttgactcaacagtaaaagccttaaaatcaattacaaaaaaagtagttttaattcttggtggcattcctaaagaaaacgattttaatgatattcttttacataaaagtaaaatcttaaaaatagtagtatatggcgaagcaaaggacatgatttatgattctctttctcaagaagttgaagttttaaaaattcatgaatttgatgatgcggttcatttagcaatacaaaatgcaactaaagatagcgttgttttgctttcacccgcatgtgcaagctttgatcaatttaatagttatgaagaaagaggaattaagtataaaaatattattgaaaggttttatgcatgaa

SEQ ID NO: 313521 - DNA, 181 bp, Unknown
  Bacterial polypeptide expressing nucleotide sequence isolated from the Sargasso Sea
actgctgcagtgcccggagctcgagagcgctgtgaacctggctgaaacggccgtgcagcggcatcaggccacaacgctgctgctgtcaccggcctgcgccagctttgatcaataccgggatttcgaggccagaggggaacacttccgcaccttgatccagcccctgctcgacgtcgcctga

SEQ ID NO: 313522 - DNA, 424 bp, Unknown
  Bacterial polypeptide expressing nucleotide sequence isolated from the Sargasso Sea
agattagaatggatcggacaaatcaatgaagtcaattactttaatgactcaaaagcaacaaacatcgctgcagctacagcagcaattaaatcatttaaaaaaaacataattttaattcttggtggtcaagataaaggcgatactgattttagtattctcaaaccaattatgaaaaatagaattaatgaaataattgcctatggagattctggaatcaaaattaaaaatacacttgataaatattttaaaatttcttttcataataaatttgaagatgctgtttataatgcacatataaagtctaaaaatggagatacagttttattatctccagcctgtgctagctatgatcaatttaaaaattatgaagaaagaggtgaaacttttataaaattatttaaaagacttgaaatagaatgttaaa

SEQ ID NO: 313523 - DNA, 439 bp, Unknown
  Bacterial polypeptide expressing nucleotide sequence isolated from the Sargasso Sea
cttcttgactttttctggtcttcctcatcgacttgagaaatttttgaaaatacaaggagtcaattatataaacgattcaaaagctacaaatgttaatgcagcatattatgcgcttgattcaatgcaatctcctacaatttggattgctggtggagtagataaaggaaatgattattcagatttacttccaattgttagggagaaggttaaagcaattatttgtcttggaattgataatactaaaattatggaaacttttaagcctgtaattgaaattatagttgaaactgagtcaattactgaagcagtaaaagttgcaaataaaattgcagttaaaaaagataatgttcttttatccccagcatgtgcaagttatgatttatttgaaaattatgaggacagaggtaatcaatttaaagatgcagtaagaaatttatag

SEQ ID NO: 313524 - DNA, 779 bp, Unknown
  Bacterial polypeptide expressing nucleotide sequence isolated from the Sargasso Sea
aatttataaatcggtagttgtaactggtacaaatggtaaatccacaacatgtagcataattcaaaaagttttgaccttctcaggttttaaaacaattgctgtaggcaatattggtaaaccaatactgaattataatttagataaaaaaaaaacaattgtagttatagaaatgtcttcttttcaattagagtattcaaaacatgttaggccagatcatgcaattttgattaatatatcaaaagaccatttagattggcatggtagtatgaaaaactacttaaatgctaaactaaaaattttttctcttcaaagtaaaaatgattttgcgtatttttctcaagataaaaatataaatagacattttaaaaaaaataaatttaaatcaaataagtttttaattaaaaaaaatataagaaaactaattaaaaaaaatattaaaaataattacttaaaatcaaatagcaatttagagaatctttcttttgtatataatttaaaaaagaatttaaaagtaagcgataaaaagtttttttcagctttaaataaatttaaaggattacctcacagacaagaaatgtttttgagaaaaaaaaatatatattttattaacgactctaaagctacaagttttcaagccaccaaggaatgtctagagaattataataaaataatttggattgttggtgggctaagaaaacaaggagataatttttatttaaaccatattaaaaagaatgtaacaaaggcttttataattggtaaagaaagaaacttttgag

SEQ ID NO: 313525 - DNA, 694 bp, Unknown
  Bacterial polypeptide expressing nucleotide sequence isolated from the Sargasso Sea
atgatatttaagcagattctaaaaaataaaagttttttggtttatggattaggtttaaccggtcaatctgtaataaaatttttaaaaaaaacaaaagtaaaaaatatttatctttgggatgataatatcaatttaagaaaaaaatttaatttaagagaaaacaactattcgataaaaaaaaaattttcagaggtagattatataatactaagccccggtattagtcttagaaaaagcaataaaaaaaaacaactaaataaaaaccaaagaaaaataattactgatatagatcttttttttctaactaacaaaattttcaaatctgtggttgtaacaggtactaacggaaaatctacaacatgcagtattgttaaaaaggtattatctgattcaggatataatactgtagcagtaggtaatataggcaaaccaatattaaattataatattggaaaaaaaaaaaatgttgtaatagtcattgagatgtcctcttttcaattggaatattcaaaattcgtaagaccaaatcatgcaattcttaccaatataactagagatcatttagattggcacggaagtatgaaaaattatattaattctaaatttaaaatctttttgcttcaaaataaaaaagattatgcctatttacctaaaaataaaaacataattaaacttttcaaaaaaaataatatgg

SEQ ID NO: 313526 - DNA, 697 bp, Unknown
  Bacterial polypeptide expressing nucleotide sequence isolated from the Sargasso Sea
tttgattaaatacaagaataaaataataactgacatagatttaatttttttacaaaaaaagttttttaaaagtattgtaataactggaactaacggtaaatctacaacttctaaaattatagatcatacattaaaaaaaaatggctataaaacattattaggtggaaatattggattacctattcttgatttaaatattaaaaaagatcattttttgattatagaagcttcttcttttcaattatctcattctaaatttattaatccagactatgctttattattaaatctctcaaatgatcatttggattggcatggaaacatgaaagattatgaaaattcgaaatttaaaatcttcaaacatcaaaataaaaatcaatattcattaataaataaaaaactcaaagctaaatttaaaaaaagaaatttattaggaaagttaattctacctagattatcaaattaccagaaagtaaaatcaaaaataaaaaattcctacttaatttctgatatgaataatgaaaatatgtcatttgtatttgctttaataaagctgcttggtataaatcaaaaatctttttttaaatctttaaaaactttcaaaggaatgcctcatagatatgaaatttttctaaaaaaaaaaaattgtatttttattaatgactccaaggcaacatcatttcaagcaactaaatgt

SEQ ID NO: 313527 - DNA, 109 bp, Unknown
  Bacterial polypeptide expressing nucleotide sequence isolated from the Sargasso Sea
atctctgctgctgtcaccggcctgcgccagctttgatcaataccgggatttcgaggccagaggagaccacttccgcaccctgatcacccccctgctggacgtcgcctga

SEQ ID NO: 313528 - DNA, 707 bp, Unknown
  Bacterial polypeptide expressing nucleotide sequence isolated from the Sargasso Sea
actgtatttaagtaattcaaattttaaatctattgttgttactggatcaaacggaaaatcaacaacttgtaaaattattgctcatgtattaaaaaaaaataaatttaacgtcgagctgggtggcaatattggaaaaccagttttaaatttaaaaatcaaaaaaaatactttttttgttattgaggcttcttcctttcagctttctcattcaaaatttatacatcctaattatgcaatattattaaatattaccaatgatcatcttgattggcatggatctatgcaagcatatattaaatcaaagtttaaaatatttgatctacaaaagagaaataattttgctttagtgaacgatgattttaaagatatttttagaaaaaaaaaatatttgagcaaattagtttcggtaaaaattcaagattataaaaaaataaaatctaaaataaaaaataattatttaaaatctagcacaaatgacgaaaatatgaatttcgtttatactttggtaaaattattaaagattaagaaagattcttttataaaatccataagttcattttctggactgcctcatagatatgaaatttttttaaaaaaaagggtattacttttatccatgattcaaaagcaaccagtttttcagctacaaaatttgctttggctagcagtaaaaacatttattggatacttgggtggattgccaaaga

SEQ ID NO: 313529 - DNA, 710 bp, Unknown
  Bacterial polypeptide expressing nucleotide sequence isolated from the Sargasso Sea
aatgaatataaaaaataaaagaataactgttttagggctagggaaaagtggatatggtgtcgctaagttagcaaatcatttaggggcgcgagtatttgtaagtgaccaagggagtaaaaaagccactttatcatacgcaaatgagttactcataaaacataacatcgcttttgaaacgggattacactcaaaaaacatctataattcaagtttgattattgtatctccaggtatttctaaaaattctaaagttgttaaagatgcgctacagttaaaaataccagtaataagtgaaatagagtttgcatttcaatatacaaaaagtccaattattgccataacaggatctaatggtaaaacaactacatcaaaaattttatttgatatgttaaaaaaaaccaataaaaatccagttcttggaggaaatattggaatatcattttcggaacaagtactatctgaaaaagttaatccaaagaaaaatcaaatttacattttagaaatttcgagttttcagctggaaatggttaaaaattttcaaccaaatattgcgatatttttaaatatatctagtgatcatttagataggcatataaccatggatgaatacattaaaatgaaatttagattaatcgaaaatatggtcaaaaaggatatagtaatatataatggagatgacgaaatattagtaaagggttttaaaaacattg

SEQ ID NO: 313530 - DNA, 831 bp, Unknown
  Bacterial polypeptide expressing nucleotide sequence isolated from the Sargasso Sea
ggaggaaatattggcaaacctttattggatttcaaaaacaattatgatctttcaaattatcacgtaattgagttaagttcatttcagttagagtcagcacctaattttaaaagctatatttcaatacttctaaatatatcaaaagatcatctggatagatatggtaatatcaaaacttattcttttgcgaaagcaaaaatatttaataaaaatactaaatataatattatttcaattgacgataattattcaaaaaaaatttatcaatctctaaaaagtcataataaaattgcaatttcattgaataaaaaattgaaaaaaggaatttattatttcgataataaaatttttgataattatttctataagaataagatgatagaaattaataaaatatccgagtccttaaaaggagagtttaatattcaaaatttactatttacttatacagtttcaaaaattttaaaaattaattcaaaaatatttaataaaacaattaaaaattttaaaggcttacctcatcgccttgaaaaaatttttgaagataaaaaattaattataattaataatagcaaagctacaaatttagagtcaacccttcaatcaataaatatttacgataatatctatttgatacttggtggagttgcgaagcaaaaaaattttaagtctataattaaatataaagataaattaaataagtgttatttaattggtaaatcgtcaaatgaaatttataaacaaataaaaaatgatataaattcaaaaattactaaaaatatagaaaattctgtaaatgaaattttcatggatattaaaaataaaaattaa

SEQ ID NO: 313531 - DNA, 289 bp, Unknown
  Bacterial polypeptide expressing nucleotide sequence isolated from the Sargasso Sea
aacgataaaataaatattaatcaatttagaaaaaaaattattaaagcttatattataggaaatcatacgaatttcttcgtgaaaaaaataagaaataaaattaaatatgaggtcacaaaaaatttaaaagtaaccgtcaacaaaatatttagatttattaaaaaaaaacaaaaacttattattttatttagtccagctagcgcttcttacgaccaatttaaaaattttgttgaaagaggtgaaaaattcaaaaacttagtaaaatataatgctaaaaaatttaattaat

SEQ ID NO: 313532 - DNA, 450 bp, Unknown
  Bacterial polypeptide expressing nucleotide sequence isolated from the Sargasso Sea
gatgactagcgcaaccattgccagctcagaaagacgcctgatcttcggtctcggcgccacggggcagtcagtcgcccgctggtggcgccagcagggcctggcctttgcggcgctcgatacccgtgtggagcttgctgatgatgcagcagcagtggccgatatttaccgagacaacgccgctttcggtgacgtggatgcagcgtttgtcgaccactgcactgagatgatcgtgagtcccggggtggcgcttgatcaccccctgatcgagagagcccgtgaacagggctgccgtgtgcggggtgacatcgatctgttcatggaggcggctcaagcacctgtagtgggtattaccggttccaacggcaaatccacggtcacgtcaatcctcggggcaatgattgctgcctgtggtgtcaaagtcgcggtgggcggcaatttgggtcgcccggc

SEQ ID NO: 313533 - DNA, 826 bp, Unknown
  Bacterial polypeptide expressing nucleotide sequence isolated from the Sargasso Sea
aataaaaaacaattaacaaaatataaaaaaaaaatcataactgatatcgatttaatttttttgattaagaaaaatttcaaaagcattgttgtaacggggacaaacggaaaatctacaacttgcaaaatcttatatcatgttcttaaaaaaaatggatttagagtaaaacttggtggaaatataggaacgcctattcttgatctagatattaaaaaaaaaagtataataattattgaagcttcatcttttcaattatctcattcaaaatttattattcctgattatgcttttttattaaatattacaaacgatcatttagattggcatggaagtatgaaaaattacgttaattctaaatttaaaatttttaatcttcaaaaaaaaaatcattattctttcatcaataataaatttaaattgttttacaaaaaaaaaaaattaaaaggaaaacttattatacctagtttacttgattatagaaaatttaaaaaaaatatttataattcttatcttaatttgaatataaatgatgaaaatatgtcttacgtgtttgcattctcaaaaatattaagaataaataaaaatgcattaataaaatctctaaaaacttttgtcggacttccacataggtatgaggtcttcttaaaaaaaaagaaatgtactttcattaatgattcaaaagccacctcatttcaggctacaaaatttgctttaatgaacacaaaaaatatatattggattgttggggggttaccaaaaaaaaaagatataattaatataaaaaaactaaaaaaaaatattataaaaacttatattatcggaaaaa

SEQ ID NO: 313534 - DNA, 919 bp, Unknown
  Bacterial polypeptide expressing nucleotide sequence isolated from the Sargasso Sea
acaaaaagatatagttgataatattgttataagtcccggaataaatatcaataaatctaaaattagtagatttctaaaaaaaaatcgtaaaagaataattaccgatctagatttattttttgaatttaacaaaaaggcatcaattatttctataactggaactaacggaaaatctacaacctgtaaaattattgaaaaaattttaagaacagctggcttaaaaaccaaaacagtaggaaatataggcaaacctattttattttcagctaattttaaaaacagaaatatttttattttagaagtatcctcatatcaactcgagtattctaaaccaatacgctcaaaacacgcagctatattaaatattactcccgaccatctagacaggcacaaaaatatgaaaaattatgcaaatatcaaatcgaaaatatttgcagcacaacttaattcagattattcatatcttgatacagaaaataaatattcaaaaaaaatagaaaatagatttaaaaataaaaaattaaagtcaagattaattttgattaataaaaacgttcctaatttttttacgaaacaaataaataataaatattttagaagcaaaggtaatatccaaaatttatattttgcatacaagattgcaaaaaatttaaaaataaatgataaaaccatcattagggcagtcaataaatttaaaggtctatcccatcgccaagaaattgtattatcaaataaaaaacttttatgtataaatgattcaaaagctacaagttttgatgcatgctcacaatctttattgaataataataatatttattggatagttggcggccttcctaaagataaagattattttgatttaaaaaaaatcaaaaataaaattataaaagcttatgtaataggaaaaaatactaacttt

SEQ ID NO: 313535 - DNA, 895 bp, Unknown
  Bacterial polypeptide expressing nucleotide sequence isolated from the Sargasso Sea
tcaatgaaatatatttacggtttaagtaagagtggggaatcaattctaaattatttaaactctattaacgaaaattatttttgttgggatgataacatcaaaattagaaaaaaaataagaagaataaataaaaaaactaatttcatagagccagaaaaattagattttgaattaatcaaagaatcttttataactccaggaatatctttaaaaaataaaaaaactaatatacttaaaaagtataaagttaaattatatagagatttagagttatattctcgaatagctcataagaaaaaaattatagctgtaactggaacaaatggtaaatcgacaactacaaaattaataagtgatattttaaaacaaaatgatatgcctaattttatgggaggtaatattggcattccattattagattttccaacgaaatataataaattaaaacatcacgttatagaactcagttcttaccaattagagtcatttaaaaactttgatccttatatttcaatacttttaaatatttcccgagaccatttggatagatataaaaattttaatgaatatattgctcaaaaagaaaaattaattatttctaatcgtaaaggttataaaataatatgtattgatgataaacatacctatttaatttatcagaaatataaaaaaaagatcatacctatttcttcaaaaccatttaagggttcaatattttatgaaaataatacaattgttgatgatttttttgaaaaaaataaaaaaatcgaactaaaagatatttcaagttcactttttgggaattttaatattcaaaatatattagctgcatacgcagtgtctaaaattttaaatataaatttaattaaatttactaatatttatcaaaattaag

SEQ ID NO: 313536 - DNA, 326 bp, Unknown
  Bacterial polypeptide expressing nucleotide sequence isolated from the Sargasso Sea
acaaagcattaatggacatatcgtattgatcgcgggtggtgttgcaaaaggagcagactttgctcctttgactcctgtaataaataaatgggctaaagaattagttctaattggtaaagatgctgaagagatggcttctaattttaatcaagatattccaactaattttgcgaaagatatggaggatgctgttggaattgcgagtgaaaaggcatcaccaggagatgttgttttgctttctccagcgtgcgcaagttttgatatgtatacaaatttcgaacatagagggcaggcattcatcgattccgtgaaaaatctattatgag

SEQ ID NO: 313537 - DNA, 598 bp, Unknown
  Bacterial polypeptide expressing nucleotide sequence isolated from the Sargasso Sea
ttgagagataaaagagttacagtaatcggtctgggtataagtggtgtggaagcagctaagcttgcgaattatcatggcgctagagtatttgcaagtgatttaagctccagcgaaatggtaaatactcattcaatggatctaatgcataaacatcatattccaagtgagacaggtgttcaaagtgataaaatttatgattcagacttatggatagtatctcctggtatttcaaaaaataatgaaattgtattagaagcaattagaaaagatattcccgtagttggagaaattgagtttgcaagttggttcacagattctccaattattgcaattaccgggtctaacggaaagacaacaacagctcacgtactatctgaaatgtgtcaaaataaagatattaatggcgtgatggctggcaatatgggcttaccattttctgagagagttttaaatgaaaccttaacaccagacaaaaatagactctacatactagaagtgtcgagtttccaaatggagttcactaaacatttttcgcctgattttgctgtatttactaatatttcagaagatcatttagaccgtcacagcactagaaaga

SEQ ID NO: 313538 - DNA, 259 bp, Unknown
  Bacterial polypeptide expressing nucleotide sequence isolated from the Sargasso Sea
ggcctgggtgcggatatcgacggcaagctggtgttgatcgctggtggcgatggcaagggcgcagacttctccgcgctgcgtgcgccgattgcgcgctattgtcgtgccgtagtgctgctggggcgtgacgcgcaacgtcttgctgacgcactggccgataccaccacgctggttcatgtcgccacactggacgaagccgtgcagcgcgccgccgaatgcgccgaagcgggcgatgcggtgctgtgtcgccggcctgtgc

SEQ ID NO: 313539 - DNA, 853 bp, Unknown
  Bacterial polypeptide expressing nucleotide sequence isolated from the Sargasso Sea
ccaaaccttcgacatccaccccttccccggcagtgtcggcgccgagatcatcggcctggacttatcccgcccagtcaacgaccaggacttcgcccgcatccatcgcgcacacttggactaccacgtcatcgtgttccgcgaccaacgcatcacccccgaacaacagatcgccttcagccgccgtttcggcgtgttgcagatccatgtgctcaagcagttcctgttggccaaccaccccgagatcctgatcgtttccaacatcatcgagaacggccaatccatcggcctgggggatgcaggcaagttctggcattcggacctgtcatacaaagaactgcccagcctgggttcgatgctgcatgcccaggaactgccatctgaaggcggcgacactctgttcgccgatatgcacaaagcctgggagcacttgccaggtcacctgcgcaacgcggtcgaaggccgcagcgccgcgcattcctacacggcgcgctacagcgagaccaaattcgaaggcaactggcgcccaaccctcacccccgaacagctcgcccaggttgccgaagtggtgcaccccgttgtgcgtacccacccggaaaacggccgtaaggcgctgttcgtcagcgagggcttcaccacccgtatcgtcggcctgcccgatgacgaaagccgtgacctgctggcccagctctacgcccacagcgtgctgccggaaaatatctaccgtcaccagtggcagccccacgacctggtgttctgggacaaccgctcgctgatccacctggccgccgggtgcccaagccacctgcggcgcaagttgtaccgcaccacgattcagggtgatgcgcctttctaa

SEQ ID NO: 313540 - DNA, 958 bp, Unknown
  Bacterial polypeptide expressing nucleotide sequence isolated from the Sargasso Sea
catggggctggccagatcaggtaaggctgcagttgcttcgctagttctcggtggggctacagtgctggcatgggacgatgatccgaaaaggcgagaagaaatttctggcgatggcgtcgagataagagatcttcatgatattaattttaaagatttagacgcacttgttctgagtccaggaataccgcactcatttccaaaacctcatccagtagcagcaaaagcgaagacatctggtgtgcctattatcggtgacattgatatattcgcacaaaattcgaacaataccccgattataggcgtcacaggaacaaatggtaaatctactactgcctcacttatcggacatcttttatcccactcaaatatttcaaacgaagtagctggaaatatcggtcggccagttctagaaatatccccagatccagggccggattttattgttttggagttaagttcatatcagcttgaattatccccgtctttaggatgcagcatcgctgtgcttctgaatataacgcccgaccatttagatcggcacggcggtatggagggatatgttcgcgcgaaacggcgaatttttgataagctaattcacgacccaaaaatcattattggtatagatgatgaaattacgcgatcaatataccaacaacttaagcatgaaacagacttttcaataatacccatttccggctatgaaattccaaatgaaggagttggtgttaaaagtgggaatttaagaagcaagctgccgggcataccgaaatgtgaaataaatttaaagggaatgaaaactctcatcggcggtcataactatcaaaatgcagcggctgccgtcgcaatagcgctttcattgagggtcgaaaaaccagaaatagaacttgcattgcaatgttttaaagggctgccccatcgtcaagaattagtaagggaattatttggtgttaattttatc

SEQ ID NO: 313541 - DNA, 997 bp, Unknown
  Bacterial polypeptide expressing nucleotide sequence isolated from the Sargasso Sea
gagcattgaggcaggcaacgttgggcgacctgtacttgaagcgcttgaaagcgacgcagatgtagtggtgatggagctatcgagctttcaacttgaaacaacctcaagcctagttctagaggctgccactgtgcttaatatttccgatgatcacttagaccgccacggcacccttgagcattatgttgatgcaaaacatcgtattttcgctaacgccaagtcagcggtagtgtggcgcgacggcgagtttgtcgcgccagacgacgccttgaatgtcgaaggtcaggctaatgcgcaaaaagcaaatcaaaacgggcttttgcgaagcgcgatagaatacggtcttggtgcctctgatagcggcttttcaatagtcacaatgttggacagcaaacatatcgcatttaacggcaagccaattattgcgcttagcgatattcacttagcgggcatgcacaatgtattgaatatcatggccgcgctgggcatttgctgtaagctcggggtttcaccagaccaagcggttaagcatttacatagctttaagtctgcgccgcatcgctgtgtggaagttgcgcgggtgaatagcgtgcgctatatcgacgattctaaggcaacaaacatcggtgcaaccattgctgctttagaagggataagccccacaattgcgggtaaacttttacttattgcgggtggagacgccaaaggcgcagatataagtagcctagccccttatcttacgcaatacgtgtcacatgtttttgctttaggcaaagatgcccacttgtttgcgcaaagctttgcacatacaacccaagtcgcgaccatgaaagaagcggtgaaaggggctttacgcttagcagcgccaggtgatgctgtattactatcgccagcttgtgcaagtatagatatgtttaaaaactacatgcatcgtggcgaaatgtttaagcaaaccgtgcatgacttacttgatataaagcaggaggccctatcgtga

SEQ ID NO: 313542 - DNA, 833 bp, Unknown
  Bacterial polypeptide expressing nucleotide sequence isolated from the Sargasso Sea
atttagatatatttttaggcataataattcatataagatcgtgtaccccggaccaaacggtaaaagttcatttgcttactatttagagcaaattcttaatcaagtctcgagtggaatcattgttggaaattttggcaatcctgtcttagacttccttcagcataaaaaaaaatactcaataattgagctatcaagcttccaactcgagaaactaaataaatcattactagatttatcagtagttactaatatttctccagatcatcttgattttcatggtaatttcgaaaattataaaaaagcaaagcttaaaatttgtaacaataaaacaaaaacttttttcgcaaataatgatataagtcttaaagattttgctattgaaattgcatcaagcttagaaaaaatagatcttgatacttctagaactctaaatgatcttccacacaggcttgaggaggtgattccaggaataattaatgattcaaagtctactaattcagcttctttgctctatgcaatcaaaaaactaaattttgatggcaatctaataatttgtggtgatccaagaaaagagcgaaaatcttatgaagttcgtggacctcagcaagtctatatttttggtatgcatagaaatgagcttaaagacaaagttaaaggtagtagtgtaaaaattttttcaaatttagatttagttttacaagacataaagaaatcagattcaaagcctaacattcttttttcgccaggcaattcaagtggtgaggatttcaaaaattttgaagatagaggtaatttcttcaaagagaaagtattaaaatattttagtgattgaa

SEQ ID NO: 313543 - DNA, 923 bp, Unknown
  Bacterial polypeptide expressing nucleotide sequence isolated from the Sargasso Sea
cgtattaaaacaaaataaaattaatgttaaattaggcgggaacattggaaaacctattttagatataaatttaaacagcaatccaattgtaataattgaagcttcttcttttcaattagcatattcaaaatttataaaaccagattttgcggcaattctaaatataacaaaagatcatttagactggcatggttctatgaaggattatgttgattcaaagtttaaaattttttcaaatcaaaataataatgattttgcgtatctaaataataaagttttaataaaaaaatttaaaaagaataaattctcaagcaaattaaaatatattaatataaataaatataaaaaattacaaaataaaataaataacagttatcttagatcagatgttaatattgaaaatctaagttatatttttgaattatcaaaaaaactcaaaataaaagaaaataatattataaaaactctaaaaaattttaaaggtttagaacatagacatgaaattttctataaaaaaaataataaaatatttatcaatgattcaaaagcaactagttttgatgcaacaaaatcagcacttaaaagcaacaaaaatattttttggattgtgagaggtttacctaaaattggagataaatttaaaataaatggactaaaaaaaaacattataaaagcatacgtaatcggtaattatttaaaatattttcaaaaaatttttaccaatcatattgattttgaattaagtaaaaatatgaaaaatgcaatatgttcactatttaaggatattagaaaattaaatcaaaaaaaaattacgattcttttaagccccgcatgcgcttcatatgatcaatatgaaaattttgagcagagaggaaataattttaaaaatctagtaatgcaatatgcaaaaaaatatttttaat

SEQ ID NO: 313544 - DNA, 1288 bp, Unknown
  Bacterial polypeptide expressing nucleotide sequence isolated from the Sargasso Sea
aatgttagaaaattatgaaaatattattatttatggtttaggattaagtggattggaggtattaaataagcttaagaataaaaaaaatatttttatatgggatgattctgaaaagaaaaggaaagaattagaaaaaaaaggttatcagtttttagaccctagagattggccttgggaaaatattgatctgttaatttcatcgcctggaatacctataaattttggaatgaattcctttattataaaagaatctaaaaaaaataatattaagattattggggatatagaagttttttatcaagaattccaaaattttaaaaataagaaaattattgctgtaactggtacaaacggaaaatcaacatttgccactattttgtatgaaattctctcaaaatctggattaaaggtatctttagggggaaatataggtataccagcattatctttgaatattaatgaatgtgatattattatttttgaaatctcatcttttcaattagaattaattgaggatttcaaagctgatatttcaatattgttgaatattactgaggatcatgctgaaaggtatgagtcttttgaggaatatcaaaaaactaaaataaaaattttcttaaatcaaaaagatgaagactatgcaattttagataatacttatttgtccaaaaaaatattggatgaaatcaatcctttgccaagaaaaatttacttcaatgaattaaaaacaaatgcacctaatttaaatctgaataaaaatagagttttaaaatatattcttccagcattaataaatgttacagatatattaagaatcaaccgagattttgttatcgatgaattatcaaaatataaaaaccttaaccatagaattgatgaaatatgctctttaaatggtataaattttgttaacgactctaaagctactaatccagcagcagcaaactttgcaataaatcagtttaatgacatttattggatacttggcggattatctaaagacaatgatcttaataaactagatctttcaaatcagaatattaaaaaaatttttttaattggctcatcatctaaacaaataagtaaaattattcctaagaatattaattttgaagtttcttacaatttggaaaatgcaacaagatctgcatatgaggaagcgctaaaagatcaaaaaggttgtgttctattatcgcctggatgtagttcacaagatgagtttaatgattatcaagatagaggaaatatgttcacaaaaattgtgaataatttagaggttaaatgttaa

SEQ ID NO: 313545 - DNA, 529 bp, Unknown
  Bacterial polypeptide expressing nucleotide sequence isolated from the Sargasso Sea
gttgattgaagaatattttcttatcattggttcaggtttatctggagtctcagtttctgagtatcttttaaaaaaagatctaccttttgacatagctgatactcgtgaagtaccgccatttgaaattaatccctcaaaaaatgggaaagctttttttggagatgattttaaaaagatagattttcaaaaatatcaaaaaatttacttatctccaggattcaatcctgaacaaattgtagagttttcaagtaaatttattactgagttagacctatttctcaatgactcatctgctccaattattgcggttactggaacaaatggtaaaagctccaccataaatcagttagagcagattttatcaatgcaaggcttgaagtctgcgaagggaggcaatattggaataccaatgcttaataatctaaagcttgatgatcaaatagacgttcatttaattgagctttcaagttttcagttagagtcctttaaaggaaaaaaattagaacataattcttctactttcggtgtt

SEQ ID NO: 313546 - DNA, 1291 bp, Unknown
  Bacterial polypeptide expressing nucleotide sequence isolated from the Sargasso Sea
atgaatgatagacaagtattttttaaaaataagaaaattttaatatatggttttggtaaatctggaatatcttgttttaattttttaaagaaaaataatatttgtagaatatttgatgataataaaaaaaatatcccgttcaaactaagaaaagaattaattaatgttagtaaattatcacttattagctttgattatattgtcctaagtccaggtattgatatcaaaaaatgtaaaatttctaattatttaaaaaaaaataggtccaaaattattacagagcttgatatatttgaaataagttatccaaaaataaataaaatcacgattacaggaacaaatggtaaatcgactacctcaaaactgctcttcgaggttctgaaaaataataagatggatgtaagattaactggtaatattggatatccagtattaatggagaaaagaattaaaaaaaatacaatttttgtgatcgaggcatcctcttatcaacttgactatagtaaatattttaggtccaagtattctgtgatacttaatttaaacccagaccatctagaaaggcatggaacttttaaaaagtatgcagaggctaaatttaagattgttaaatcacaaggtaaaaatgattatgcttttgtagataaagaaaataaatttctaagtcaattaattaaaaaaaatcgattaaaatcaaagattacaaaggtaaactatttaaaatataaaaaatattttaaacaaatagataatgtttactttaataattctagcaacaaaaagaatcttagttttgttttggcagttgcgaagacattaaatataaaaataaagaaggtaataaatactgcaaacaaatttaaaggattaaattataggcaacaaataattcataaatcaaaaaatttattaattataaatgactcgaaatcaactagtttttcatcaacagttccattacttgaagcttacgaaaatattcattggatagtgggaggtcaggctaaaaagggagataaattcaaattaaaaagaaaatatttttcaaatattaaagcatatatttacggcaagaatagaaattttttaattaattcattatcaaataaaattttttataaaagttctttaacacttaatgaagctattagaaatttaaataataacattaaaaatgacaagcaaaagaaagtaattctttttagtccttgcgctgcttcttttgatcaatttaaaaattttgaggaaagaggaaaattttttaataaaaatattcaacatatattaaaca

SEQ ID NO: 313547 - DNA, 1033 bp, Unknown
  Bacterial polypeptide expressing nucleotide sequence isolated from the Sargasso Sea
cgggcccagtcatttgaaagatatttagaaaaacagggagaagcctatgaaatttatgatgcaaatgtaaaaggatcaaatattatcaataaattacccgaccgtaaaaaattagatagttacaaaatgatctatttaagtccaggaataaatatcaggaagatttattcaggaggagaatttaataacgttccatatacaactgatttagatattttttttaaagaagataattctgtaaagattggaatcaccggtacaaatggaaaaagtacatgctgttatcatctgcatcagttgctagcaggttctcaattaatcgggaatataggtaccccagtattagataatattaattcatgctcatattcgattattgagatctctagctttcaactcgagaagcttgaagatataaatttagattttggagtactgctcaacattgctcctgatcatatcgatcatcatggaagcttcgcagagtataaaaagataaaaaataaaattaaaaaatctaaaatatcaaccaatcagtccgatccaaaaaagctatggtcaatgattactggaagggaagaaaatgaagttaaggatattaaattattggatttgcctcatagattagagcatatattgactatgagaaatttagtattcataaatgattccaaggcaacaaatactaacgccttgaaatttgctttgaatcaagtttctaatccgcttgaattaattctatgcggagatccagttaaggagcagtatgatagtttaaaaattgtaggtccaaaaaaagtatatatttttggcactcatgcaaaggagatagataagaaagttttgcaccctgataaaatattatttcataatcaagaccttgcatcagtattgaatttaattaagaagaaagattatgattttcgaacaaatattcttttttccccgggccatcctagtggcaaggattatataaatttcgagaagcgtgggaatcattttacccaattagtaatgaaccttgatgattgat

SEQ ID NO: 313548 - DNA, 859 bp, Unknown
  Bacterial polypeptide expressing nucleotide sequence isolated from the Sargasso Sea
tgtcgagttttcactggaaagaaccgcttctcaacatatgaggctgcaaccatacttaacattactgaagatcatctggaccatcatctgaatatggatgcgtatattcgcagtaaacacaagattttctctaaagcaaaggttagtattttcaatcgggacgacaaaaatacttttcccacccaccaaagaacaatggccagttttgggtctcgaatttcctccaatgaaaatggctgggcaatcgagcagcaaggtagtaaaaagctggttacgcgagctggccgtaagatggctgtattagaaggtttaggcttaaattcccatcacgcagaattgaatgttctttgcgtaatcgctttagcttttaactttgttgatcctgagagtgtaattgaatctttacaatcatttaaagggctcgatcatcgatataagagagttgcgatatatgaagggatagaatttattaacgattcaaaagccactaatttgggcgcattaaaatcagcgttagagaattacacccatgaaactgtagtgttgatagctggtggcgagggcaaaggaagtaggtttgaagagttttccgagattatcgatggcaaacttaagactcttatcgtaatgggtcgagatggagggcgtctcgccgttatatcggagcgtctgaatatagccacgcttcaagttagttcgatagaagaagctgtagagaaaggttttgaaattgcgaacgaaggggacactgttttgctctctcccgcttgtgctagtctggatatgtttaaaaattttgaagaacgtggacagcgctttgagtttgctgttcgccagctcattaacgagagtagctaga

SEQ ID NO: 313549 - DNA, 715 bp, Unknown
  Bacterial polypeptide expressing nucleotide sequence isolated from the Sargasso Sea
aatggtctcggttagaaatttcaaagaactaacttttttagtatatggcctagggtctacaggaaaatcagtagtaaccttttttaaaaaaaataacattaaaaactattacgtatgggacgattatgaaaaaagcctctacaaaagaaaaagggtccgaaatttaaaaaaaactataaaagaggtgaattacattattttaagtccaggagttagtttaaaaaagacctattatagaaaagaactaattaagaacaaaaaaaaaataattacagatattgatttaatatttttattaaaaaggttttttaaaagtattatagttacgggtactaatggaaaatccacgacatgcaaaattatatctcacttattgaaaaaaaataaatataaaacattattaggaggaaatattggaacaccaattttaaacctagatattaaaaaaaaaaattttttagtaattgaggcgtcatcgtttcaactcgcacactcaaagttcatttctccagattacgcgctattacttaatattactaatgatcatttagattggcatgggagtatgaaaaattatattaactcaaaatttaaaatttttaaacttcagcgagctagtcaatatgcattattaaataaaaaactaaaattaaattacaaaagaagaagcttttctggaaagttgattgttccagaaactagaaaagaattataa

SEQ ID NO: 313550 - DNA, 535 bp, Unknown
  Bacterial polypeptide expressing nucleotide sequence isolated from the Sargasso Sea
ggggatagctttttaagcttgtgggaaagcgttttaactgtttatgcattagcaagatcattcggtatggcccctaaaagcatactaaccaagtgtagtggatttgtaccacttgcgcataggagccaatgggtagacgaaattaaaggcgtagcatttattaacgatagtaaagctacaaatgttgatgcaactatacatgcgctaaagacttttaaaaatgtccatttgattttaggagggcgtgctaaagaagataatttttgtcgactgcaagatagcatgaaaaacatttctaggatatatcttataggagaggcagcttctcttatagcaagtaacttagaaggtcatgaaattgagcaatttgatactttaaacgatgcttttgatagtgcgataagtattgccacacaaggagacacgattttattctcaccagcctgtgctagttttgatcaatacttgaattttgaagaaagaggtaagcactttatctctctagttaaagaatatagaaaaaatgtaatttagt

SEQ ID NO: 313551 - DNA, 1090 bp, Unknown
  Bacterial polypeptide expressing nucleotide sequence isolated from the Sargasso Sea
taattctattaaagaagttttaagagaattatctattcagtggcttaaattttttaaaaaaccaataattgcaattactggctctaatggtaaaactactactaaagaaatgattagattaatatttggatctattaaaaaaaataattatacaataggtaattataatagttctattggtcttcctattaatttatttaatttttctttatcatcagatccaataatattagaaatgggagctaataaccctggtgaaatagattatttatgtaaaatagcaaaacctgattatagtttaattactaatattcaaaatgctcatattgggaattttaaatctattcaagaattagttgaaacaaaagtttcaatttttaaacatacccataataatggattaatttttgaaaattcagatgatatatatctctctaatatatgtaaaaatttttcaaataaaatacgctttggatttaatgataaaaacgttgatttttttggatctatcaaaattattgatgataaaattaatttttatattaatggaaaaaaaattgaaaattcaaatatgaatgaaattatggcaaaaaatatgcttgctgcatattcaatagctaacacatatggaattgatcatcaaattattaaaaatgtattacaagaattcaattttttaaaaggtagaggtaaccatattcataataatggatatttaataatagatgatacttataatgcaaatcttgattcatttaaacagggtattgattctttttcaaccattaattgtaaaggaagaaaattcttaattataggtgatatgaaagaattaggagataaaaaaaaaattcatcatttagagctgggtaaatatattaataatcataaaattgattttgtgtttggtattggaaaggaaattcaaaatacaattaatgcaattaacaacagtcagatttattcaagatattttaaaaataaattttttttaatcaattttttaaaattagagttaaagaaaggagattctatttatctaaaagcatcacgttcaatgtgttttgaagatatagtagaacaattatga

SEQ ID NO: 313552 - DNA, 736 bp, Unknown
  Bacterial polypeptide expressing nucleotide sequence isolated from the Sargasso Sea
gttgctagaggactcccaactaatcgggaatattggcgctccagtattagataatattaatgcatgttcatattcaattattgaactctctagctttcaacttgagaagcttcaaaaaataaatttagattttggagtacttctaaatattgctcctgatcatattgatcatcatggaagtttcgatgagtatgcgaagattaaaaacagaatcaaaaaatctaaaatatcaacaaaacaatccgatccaaaaaaactttggtcaatgattaccggacgggagattaatgaagtgaaagatattaaattattggatctgcctcatagattggaatatttagtgacgcaaggaaatttattatttataaacgattcaaaggcaacaaatactaatgcattggaatttgctttgaatcaagtaccacgtccttatgaattgatcctgtgtggagatccactaaaagaacaatacaattcttataagcttttagggccaaaaaaggtttatatttttggcaatcatgcaaaagatatagataagagagttttacacccaaagaaaaaaatttttcatatgcaagacctttcttcggtaatgaattcaatcagaaagcaagattataattttcaaacaagtatacttttttcaccaggtcatccaagcggcaaagattataaaaattttgaagaacgtgggaatcattttactaagttatcaatgagcttttatgattga

SEQ ID NO: 313553 - DNA, 965 bp, Unknown
  Bacterial polypeptide expressing nucleotide sequence isolated from the Sargasso Sea
aatgatatttaaaaaaattctaaaagataaaagttttttaatctatggtcttggtttaacgggtgagtctgttttaaattttttgaaaaaatcaaaagctaaagatatttatctatgggatgacaacacaaaactaagaaataaatttaaaacaggaaataatgaaaaccatcttaaagcaaaaattatctgctcggattttatagttttgagccctggtataagccttcttaactgcaaacatggaaaattacttaagaaaaataaaaataaaattattacagatattgatcttttttttttaacgaataagatttttaaatcaatagttgttacaggaacaaatggtaaatcaactacctgcagtattattcaaaaagttttaaagtcttctggaataaatgcaattactgttggaaatatcggaaaaccaattcttagttataatttgggaaaacaaaggagaacagtaattgttattgaaatgtcctcatttcaactagagtattcgaaatatactagaccaaatcacgctattttaataaatatttcaaaagatcacttggactggcatggtaattttaaaaattatattgatgctaaatttaaaattttttctttacaaaacaaagatgattttgcttatctccctcaagataaaaaaataattaatttatttaaaaaaaataaatttcaatcttctattgtttatattaacaaaaaaactaaaaaacttattaaaagaaatactaaaaataattatttaaagtcgaataataatattgaaaatctttcatttatctataaattaaaaaaaaattttggtatcaacgactacaactttttttcaaaattaaagaaatttaaaggattgccccatagacaagaaatatttttgaaaaaaaaaaatataagttttgtaaatgattcaaaagctacttctttgaagcagcaaaagattgtta

SEQ ID NO: 313554 - DNA, 985 bp, Unknown
  Bacterial polypeptide expressing nucleotide sequence isolated from the Sargasso Sea
tttattagccccatttgcagggaatattgggactccattatgcgaaattgctcactcaacaaaaagcaaaaatattgattggatagtcgctgaattaagcagttatcagatagaaatagcgacaaattgcataaaacctaaaattggaatttggacaacatttactcccgaccatcttgatcgtcacaaaaacattgataattatttcaagataaaaaatagcttactaaaacgagcagaatttagaatttataattacgatgataaatatttaaaagaaaatttcaaatcactttcaaatggaacatggataaccactagttctgacgaatcagatctagatcagtgtgattattggattaataatgaaaactttattgtagagagaggggaaaaattattgagtttaaaaatctttaaattaaaaggtaatcataatgttcaaaatctattactagctgtagcagctgcaagaaaaattggattatccactgagataataaagaatgctttacttagctatgaacaacttccccatagaatggagacaatattccaatgcaatgaacttgaaataattaatgatagcaaggctaccaactttgactcttccgtagcaggtataaatgcaattaaaggctctcccataataatttctgggggtaggttaaaaaatggcgattataatgagtgggtaaagattattaataaaaaagcaaaagctgtatttctctttggcgaaagctcgcaaaccttaaaaaaattgatcattgaaggaggatttaagaatgatattttgacttttaatgatctttcagaagtaatcaactacgcctattcttatataaaaaataatcaaactgaaactttactattttctccttcatgctcgagttttgatcaatttagagactatgaacatagaggagatatttttaaaaaattaatccatgaaaaattcaatataaagtttttcgctcattaa

SEQ ID NO: 313555 - DNA, 178 bp, Unknown
  Bacterial polypeptide expressing nucleotide sequence isolated from the Sargasso Sea
cgaaattaatgtagaaaaaattgaacactttgaaaacgcggttcataaagctattgatagtgctgttgaaagtagtgtcgttttgctttctcctgcatgcgcaagcttcgatcaatttagtaattatgaagaaagaggtaaaaaatttaaaaatattatagaaaggtattatgcgtga

SEQ ID NO: 313556 - DNA, 532 bp, Unknown
  Bacterial polypeptide expressing nucleotide sequence isolated from the Sargasso Sea
ttcattaaagggtattcataatatatcaaatattattattgctgctgaaatcgcaagaagagttggaattgatcaagagaatattcgtaaggctgttagggaatttgaaggattagaacatagatttgaacactttatttcatataatggaattgattttattaatgactcaaaatcaacaaatattgattcagcaaaaaaagcacttgaatctatttcggagaaaatagtcttaatactaggaggcattccaaaagaagatgactttagtgatatatcattatttaaaaagagtattttaaaaattatagtttacggtgaagcttcacataaaatttataattctcttccaaaggatgtaagtattgaaagaattgaaaaatttgaggatgcggttcaggttgcaataaatagtgctgtagaaaatagcgtcgtattgctctcgccagcttgtgcaagctttgatcaatttgataattataaagaaagaggtaaaaagtttaaaaatattgtagaaaggttttatgcatga

SEQ ID NO: 313557 - DNA, 772 bp, Unknown
  Bacterial polypeptide expressing nucleotide sequence isolated from the Sargasso Sea
cgagcgattaagcgcggcctgctcgaacgctcggaccacgccatcttcaacgccgatgatccagacctgcgtcagcagcgccaaagctggaccggtggcacctgggtcagcgccgagtcgacgcaacccgatggtcaaccagccgacctgtggatcaacggcgagggttgggtctgtgatcgatcacagccgttgttccccgctgaagcactggccatgccggggtcccacaaccgccagaacctgctgctggtcaccgccgcggcgcggcagatcggcctcagccctgcatcgatcgaagcggggctgcgttccttcccgggagtccctcatcgcctcgaaccgctcggacgcatcagaaacgcgcaggtgttcaacgacagcaaggccaccaattacgacgctgctgcggtgggactgaaggcgatgcaggggcccgtggtggtgctggcgggaggttccaccaaacagggtgatgccaccggttggctggaggaactgaaccgcaaagcctgtgccgtggtgctgttcggcgccggcgccgaggaactgcatgggctcatcacaggggcaaacttcacgggagcgctgacccgccgcagagacctgacgtctgccgtcgaagaggcggtgcggtctgctgaagcgctgggggcatccagcctgctgctctctccggcgtgcgccagctttgatcaataccgcgacttcgcagcccgcggcgatcacttcaaacagctgattcatcaggttcagagcgggttgagctaag

SEQ ID NO: 313558 - DNA, 789 bp, Unknown
  Bacterial polypeptide expressing nucleotide sequence isolated from the Sargasso Sea
tcatttagacaggtacgactataagctagccaattacgctgcttcgaaaatgcgtattgtgcaaaatcaaacctcagccgatgctttcatttactgtgcggatgatgacgagacaaagaaagctttagatacagtaaatatagcagcacaagcttatcctttttctatccttaaaaaagtagaaaatggagcctatttagaagacaataacatttatatcaacaccaatttaaacaacacattaaccatgtcaatttcggatttagccttacaaggtaagcacaacatttacaactcaatggcttctggcatcgtagcaaaggtattagagttgcgcaacgaaactatccgcgaaagcatgggagagtttaaaaatattgatcacaggttagagtttgtagcaaaaatcaatgatgtcacttacatcaatgactctaaagctacgaatgttaattctacttggtacgccttagaaagtgtaaatactgatgtggttttaattatgggaggtgttgataaaggcaacgactatgaaatgctgaaagacttggtaaaaagcaaggtaaaggctattgtatgcttaggtaaggataataagcggatacacgatgcttttgaagatgatgtggatgttattgtgaatactttttcggcagaggaggcagtgcaggtagcttatcatttagcaaaaaaaggcagtacggttttgttgtctccagcatgtgcaagtttcgatttgtttaaaagctacgaagatcgtggcaaccaatttaaggcggcagtaaaaga

SEQ ID NO: 313559 - DNA, 793 bp, Unknown
  Bacterial polypeptide expressing nucleotide sequence isolated from the Sargasso Sea
gccattgaaaatggagtggcaatagataatgatattggcttatttttcaggtctattggttcgtctgattgggcaaaattcgaatctataccaaaaataatagcagtaacaggatctaacggaaaatctacaaccagtgctttaattcatcatatactaatttctgaaaaccgcccttctcaactggctggtaatattggtaaaggtgtttttgacctagagcccttgactgatggtgagactgtagttttagagctttcttcttatcaaactgaagttgcaaatagtttaacacctgacgttgcagtttttacaaactttgcacctgaccacttagagcgacatggtggtatcggtggttattatgcggcgaagaaacgcctttttacttctggatgccctgatcgttcggtgattggtgtggatgaatttgaaggtgaactcttagcccaagaagttgcggatcatttgcatgatgaccgcattattagagtgtccggttcgagaaaaattactaatctgggttggactgtttttgccagtaagggatttttatcagagtacagacgagggaaacaaatagcgtctttagatcttcgtaagtgtaaatatttaaaagggtcacataaccatcaaaatgcttgtgccgcttatgctgctgttcgtactctaggtataggaccacgtgcagttgaaaaggcattaaagagttttactggtctggcacatagagctcaatatgtaactgaaatcagcggagttgttttcataaatgatagtaaggctacaaatg

SEQ ID NO: 313560 - DNA, 892 bp, Unknown
  Bacterial polypeptide expressing nucleotide sequence isolated from the Sargasso Sea
aatgtatttaatttatggaattcaaaaatctggactttctatattaaattattttgaaaataaaaaaataaaatttaagatgtgggatgataatccaatagtaagaaaggctataaaaaaaaattacaataaagattatttttttaatataaaaaaagataatttgaatgattttgaaaaaatttttgttagcccaggaatatctttaagacaaaaaaaatttaaaagaaaaaatatatctaaaaaagtaaatagagatttaaatttatatatttcgaatttaacaaatcaaaagatcgtagctattactggcacaaatggaaaatcaacaacaaccaaattaataggagacattttaaaaaaaaatagtattaaaacatttgttggaggcaatattggagaatcattatgtaatgcttttcttcttaaaaaaaaatataaagttcatgttatagaattaagttcctttcaattagaaacagttaagtcacttgatagtagaatatcagtaataacaaatttatctggcgatcatttagatagatacaaaggtattagtgattatattaatcagaaaaaaaatattatttctaaaaatggaattaatttgttatccattgatgatatttattcaagaaagatatttaatcaaaaaaaaattaaaaataaaattagtttttctttagtcgataaatcagcagattgtttcgctaataatgattatattctagataattacttcaaaaaaagcagaaaattatttataaaaaaaatctcaaaagacttagaaggtcattttaatattcaaaatattttaatagcatacatatgtagcaaaatatttaaaattccagaatctaattttcttaaggttattaaaacatttaagggt

SEQ ID NO: 313561 - DNA, 728 bp, Unknown
  Bacterial polypeptide expressing nucleotide sequence isolated from the Sargasso Sea
aaggtattttaccgccaagataaagcaactttccccagatagagagggtctaggatcaattagttttgggtttagcaatccttctgaatctgaatctgggggagtcagggagaatcagtttgacttttgtatattaaggggttcccaagaaatgtgttcggtaccaaaggcttacttgggtggtcgagttcattatttactgaatatagtggcggcattggcttcaatttacccgttcaattcggcagccgaatttgagtccattgagtctttcgagggattgaggcacagattcgaattagtcaacgaagtaaatggagtaagattcataaacgattcgaaagctactaacgttagcgcgactgagtcggctctgaggaatttcgaatctaaagagcaggttattcttatactggggggagatgcgaaaggcgtcgacctgagccttttagagatcagtataagcaagagagtgtttggcctagtgattttggctcttgacccagcaccgctattagaactgggacgacgttgtggaatcgagacttttgctaccatttccatggaagaggcggttaaagaggcttatcggttagtgaacaccagtgccgatgcaaaaaatgtagtcctttccccggcgtgtgcgagcttcgatttatttacagattatcaagaaaggggacgaagttttgaggccgcggtgaaaaagttgagtgaaatcgggtgat

SEQ ID NO: 313562 - DNA, 640 bp, Unknown
  Bacterial polypeptide expressing nucleotide sequence isolated from the Sargasso Sea
ctggctttagatttagcaggttctgaatacggcgtgattcaacatcagggcgagagctggttagtagtagctggctctcctttaatgccggtgcgcgacatgaccatagtgggtctgcataaccagtttaatgccttggccagctgcgctttagctttagccgctggtgcaagccgtgctggtttaattgatgcattaaaaacctttgtttccttgccacaccgttgccagttagtgctggataataaaggcgtgcgttgggttaatgactccaaagctactaatgtcggcgcaactttggctgctattgctggtttgcgcgcagaagtgaagggcaaactgattttaatagcaggtggtgatggcaagggtgctgatttcagcgaattagccacagtgctgaatacggatgtcgatcacttaattaccttagggcaggatggtccagctattgctgcattaaaagctggcagttttgaagtgaaagatttaatggcagcggtcaaaactgcggcgcaactggctactgctgatgatctggtgttgttatcaccagcctgcgccagtttagatatgtttaaaaattacgaagaccgtggccaacaatttgccgcagcggtgcagaaggtgtggttatgaa

SEQ ID NO: 313563 - DNA, 820 bp, Unknown
  Bacterial polypeptide expressing nucleotide sequence isolated from the Sargasso Sea
gcagctaaacttgcttataaattcggtgctaatgtttttgttagtgatttaaataaaaatcaaaaaataaagattaaaggaattaattcagaatttggcaatcactctagtaagattttagagtctgattttattattaagagccccggtatttcaagagaatcaaaaataatgaaatctatcttagatttatcaataccaatatttagtgaattagaatttgcaagttggtttactaagtcttttattatagcattaactggcaccaatggaaaaacaactacagtagaattaataaatactatattaaaagattgtggctttaagacatttttaggaggtaatattggtattcctttttcagataatgttattcatgagattgatgaaaatgataatttaaaaaataattttcatatattagaggtaagtagctttcaacttgaggatattaaattttttaaaccaaatatttcaataatattaaatattagtccagaccatttagataggtataattcatttaaggattacatcaaaacaaaattaaatattttaattaatcaagacaaagattgttatgcaattataaatgacagtaatataaatattcataataaaaattataattctaatatattaaaattttctatttctaattctcaattattaattaatggtaaagaaaaaaaaatagatatatcaaatactaaattatttggtacacataattatgaaaatattgcagcagctagtattgtatctagtttatgcgggattaaagaaagctctataattaatagtattaataaattttcac

SEQ ID NO: 313564 - DNA, 610 bp, Unknown
  Bacterial polypeptide expressing nucleotide sequence isolated from the Sargasso Sea
ttgccgggaacggaaggtcccgtgctggacttggctgaatgcatgctggaaggaacgcacaatgccgaaaacctcatggccgcgtggctggtggggcgcgcgatgaaattattaccggcggagatggtgccggtgctgcaaacgctccgaaccggcgagcaccgttgtgagctcgtggcggagtgggagggtgtgcggttttacaacgactccaaagctaccaatgtgcatgcgctggttagcgcgctgcgatcgatgccgccggcgaagcaggcagcccggaatgtttggctcattgccggagggcaaggcaaggggatggattatcaggcggcggcttcagcggtgggggaacgggtcaaggaggcttggttgatcggagcttcggctgcagaaattcagtctgcctggagcccttttgcgccttgcaatttggtggcggatttgatagaagccatagctgaagcagggaggaatgctgccccgggagatgttgtgttgctgtcgccggcttgcgccagttttgacatgttcgacagctaccagcatcgaggaaaccaattccgagccgccgtgacggaatgggtggagtcgaggcaaggcgattgat

SEQ ID NO: 313565 - DNA, 439 bp, Unknown
  Bacterial polypeptide expressing nucleotide sequence isolated from the Sargasso Sea
ttgtgtgccccaccgcttggaacgcatccgcgagttcagcggcatcaccttctacaacgacagcaaagccaccaactacgacgcctcattggtggcgctgcagtcgctcgagcggccgctggtggtgctggctggtgggcgcgccaaacgcggtgaacccggtgcctggctggaggccctgcatcacacagcagctgctgtggtgcttttcggtgaagcacgaagcaccttctctgaactgctcggtagtgccggctatcccggcgtgatcgagcagcaggagcacttggatcaggcgctgccgctggcgcgccggctggccgaacagctcaactgccaagcagtgctgctctcaccggcctgcgcgagttttgaccaataccgcgatttcgaggtcaggggtgatcatttccgtcagttagtggaggccatggcatga

SEQ ID NO: 313566 - DNA, 913 bp, Unknown
  Bacterial polypeptide expressing nucleotide sequence isolated from the Sargasso Sea
agaagtttcatcttatcaattagcattaactcaggacttaacatttgatatagccgttctcttaaatatttctgaagatcacctggaaatgcacggttcatttcaatcttacattaaacttaagaagaaaatttttaatcaaggacgtttagcaaccgcaataatttgtacagatgatgaaaacagcaaatccatttatgaagagatttgtgggtatgaaaacattaattgcgtagaagttactacctccaaaattgtaaatgatggaatctcgataattgatggtttacttcatgaaaatggtaaggctgtttttgatttaacaaaagtaacaagattgaaaggtgcgcacaactggcaaaatgcaggtgcttcgtgggcagtggctcgtaacatgaaggtccccattgaaaaaatctatagagcattttcttcatttccaggtcttgcacatcgtatggaattcgtcgcaactatagatggaatctcgtttattaatgatagtaaagccactaattttgctgcaaccgccagagcattatcaagctttgaaaacatattttgggtagcaggtggaagatctaaacttggcagttcagatataattcatgatcatctaaataatattaaagctgcttttatatatggagaatgtgctgacaaaatttgtaacgatataaacaaaaaggtaaaagtcacaaaattcagcacattaaaagaagctgtttcagctgcaatggattgtgcaaaaaatgaaacaattgaggataaggtagtacttttttctcctgcctgctcatcttttgaccaatttgtaaattttgaagctcgaggagatgagtttaagaaattagtcaactttcttgaccaccatatacaaatctgcaaggagagggaatttgagcagctttag

SEQ ID NO: 313567 - DNA, 672 bp, Unknown
  Bacterial polypeptide expressing nucleotide sequence isolated from the Sargasso Sea
attgtataaatacaaaaaaatattcaattatcgagctctcaagcttccaattagataagatgactaccaataaacttgattttgggatacttctaaatattcagactgatcatcttgactatcatggcaattttgagtcttataaattagccaaggagagaattcttgatgcaaaaaaaagtatctcttttgaagataacccttatgatttatttgagtggataacagaccaaaaatcatcagaaattaatttaaaaaatcttccattcaggttccaacatatttcaaaaaatattattaatgactcaaaatctacaaactatcactctttaagttatgcagtgaaaagggcaaatgaaatattcttaaataatgaatatgttcttattgtttgtggttctccaaaaaaggaggaatttagaaagattaacattaaagggccagatcaaatttatatttttggaaaacatgctaatgagataaataaatgcgttaagaacaagaacaaaaaagttttcaacgaactttccgatgttataagtcatttaaacaaacataaccaaaaaaatgttttattttcacctggctatcctagcggagatgacttttcaaattttgaagatagaggcgtctcatttaacaagatttttggaaatttaaatgaaaattgat

SEQ ID NO: 313568 - DNA, 808 bp, Unknown
  Bacterial polypeptide expressing nucleotide sequence isolated from the Sargasso Sea
atgcacacacatcatatagcaagtgaaacaggaattcatagtgataaaatctatgattcagaactatgggttatatctcctggcataccaaaggattctgatattgtattaaaagccacacagaaaaagatacccattgtgggagaaattgaattcgctagttggttttcaaacgatccaattattgctatcacaggttcaaatggtaaaaccactacatcacatatgcttaacaaaatgtgccaaactaaagaaataaaaggtactatggcgggcaatatgggaatcccgttttctgaaagagtattgaacaatattaaaaatcccgaaggaaatattttatatatattagaaatatcaagttttcagttagagtttattaaacatttttcaccggatattttagtttatacaaatattacgccagatcatttagatcgtcatggttcgatggaggaatatattaatatgaagctgaatgctatcatgaatatggaaaacaagggccatatcgtttataataaggatgatgctttacttgatgaagttctatcacctttaccacataaaaaagagccctttagcacaaaaaataaagatgttttatttaatttagatagcagcaatatagttggaccatataatgacaaacttcttcacataaatgagctaagtattccaggagaacataacctccaaaactttttagcagcatcaacatgttctcatttgacaggaattactcaaaatcaaatagttaaatcattgaaagagttcaaaggtgtcgagcatcgtcttgaacacgtta

SEQ ID NO: 313569 - DNA, 895 bp, Unknown
  Bacterial polypeptide expressing nucleotide sequence isolated from the Sargasso Sea
ggagcatgaagcattgcaacaagccaagaacttaaatatacctattcagactgatatagatatttatttgaaatacagtcatagctataacattttagttacgggaactaatggtaagacaaccactgtatctatgttagagcatcttttgaaaggattcttaaggaataagtccatatcagcaattggtaatataggaaaaccagttttggatttcttagatcaaaaaattgatattgctatcatagaaatttcaagcttccaaattgaatcaagctcaagactggaatctgaaataggccttcttttaaatatagaagaagaccatatagataggcataaatcttttgaaatttataaatctctaaaactacgtgtacttcgagaatctaatattaatatttctaaattagagaataaaatagcaggaaaggaattttatgattatgaagattatttccctgaacctcatatcttaaataatcctgctttaaagaaatggcctatgcacgatgtttttaacctaaaggcttctttattggctttaaaattaattctcgaagaaaaagaaaatttaaaaatatatgatgttaatgactttttagataaggctattggagtatttgcatcattcgaaaaacaaccacatagatatgaagtcttaggaaaagtaaacgatgtcacatatgtgaatgattcaaaggccactaactttgatgctactctcaaatcaattgaatcaagtaggaatctaaataaacaaggaaatatttatttaatctgcggaggggatttaaaagaacaggacttgagtaaggagaatgctgttatttttaaagaaataaagaaatgtttcatttatggaaaagataaagatcttttaaaagaattatta

SEQ ID NO: 313570 - DNA, 810 bp, Unknown
  Bacterial polypeptide expressing nucleotide sequence isolated from the Sargasso Sea
ggaaaaattaaataaaattgttgtttctcctggcatatcactaaatcatccagttatcaaaaaagctgaatcatttaaagtagacatcataaatgaaattgatgtttttgctaactcaaagcccaaagcgaaagtaataggagttacaggtactaacgggaaatctacaacatcggctctaattggacatattttaaatttaaatggatttaatactaaagtaggaggaaatattggagaagctgctacctcaatcgacgatcctggggaagacggttttataatactagagctttcctcttttcaacttgaaacttgcagtgatttagaattagatggtgcaatattacttaacataacaccagatcatctagactggcatggaaacttagataactatttcaattcaaaattaaaaataggaacctttctaaaagaaggtgcgcctatagttgtatcaaatacaaataatctaaccaaaaaagcttgtgaattattttataaaaataaaatcaaggttattgaagttttgaaaaatgatatttcgcatcttcagacaatacttgaaaacaaattttataatgaaaaccatttaacaataatacaattattaaaagaatttggagttaaaaaagaaagatctattgaggcaataaaatcatttaatgagttgcctcacagattagagttttgctatcaaaaaaacaatttaacatttataaacgattcaaaagctacaaatgctgaagcaactatcaatgctttagaaaaatatagaaatatttattggattgctggtggaataggaaa

SEQ ID NO: 313571 - DNA, 727 bp, Unknown
  Bacterial polypeptide expressing nucleotide sequence isolated from the Sargasso Sea
acgctcacccctgatcacctcgatcgtcacgtcaccattgagcgctaccgcagcatcaaggcgtccctgctgcgtcgcagcaggattcagatcctcaatggcgatgatcctgatctgttgcatcacgccgccgaatggcccgatgcccgctgggtgacggcaggtccccgcgatggactcaaggggattgatccccagctatggattgacggtgatcggatctgcgatgccaccggcgggctgtttccagccacggccttagcgatgccagggcgccacaaccgccaaaatttgatgctgtcggtggctgtctcgcgcgcgtgcggcctcaccaccagccagatcgaatcgggctgccgcacctttcctggggttccgcatcgactcgaacgcctacggcagcgcagcggagtgacctattacaacgacagtaaagccaccaactacgacgcagcactagtggcgctgcaggccctggaatacccactggtggtcctggcaggaggccaggccaaacggggcgaaccgggtgcctggctgtcagccttaaagcaaaaggcagccgccgtggtgctctttggtgaagcaacccccaccttcagggagctgcttggtgtcagcggttatggcgggcgcatcgaacagcgcgaacatctcgatgcggcggttccactggcggcacagctggctggtgagcttggagcgacagcagtgctgctctctccag

SEQ ID NO: 313572 - DNA, 647 bp, Unknown
  Bacterial polypeptide expressing nucleotide sequence isolated from the Sargasso Sea
gatgataccaaaaaacattgaaaataaagaaataggattattagggttaggagtttcaggaaaatctgcattcaaaagcttaaaagctggtggaagtaatatatatgcatatgatgataatatttctaatgaccctaaagttataaaacctgataaatggccatgggaaaaattaaataaaattgttgtttctcctggcatatcactaaatcacccagttataaaaaaagctgaatcatttaaagtagacattataaatgaaattgatatttttgctaactcacagcctaaagcaaaagtaataggggtaacaggcactaatgggaaatctacaacatctgctctacttggacatatattaaatttaaatggatttaagactaaggttggaggaaatattggggaagctgctacctcaatcgatgatcctggtgaagacggttttataatactagagctttcctcttttcaacttgaaacatgcaatgatttaaaattagatggtgcaatattacttaacataaccccagatcatctagactggcatggaaacttagacaactatttcaattcaaaattaaaaataggaacttttttaaaagaaggagcgcctatagttgtttcgaatacaaataatctaaccaaaa

SEQ ID NO: 313573 - DNA, 885 bp, Unknown
  Bacterial polypeptide expressing nucleotide sequence isolated from the Sargasso Sea
acgaatttcttcaattactgtaagcccaggaatcgattgggaacatatagctctaaaagaattaagacagaaaaatattcacatgcggggagaagtagaattagcttgggaaagattgaatcatatacaatctattggtataactggaaccaatggaaaaactaccgtcacaaatatgcttaatcatgttcttaagttaaataatttaaatactgatatgggaggaaatgttgggaaagcattatcaaaaattgctttagaaagtatgaaaaatgattatcaagaactcaactggctagtattagaattaagtagttatcaaattgaaggttcatcaaaagtatcaccaaccataggtatatggaccacatttacacctgatcatttagaaagacataatgacatagaaacttattttaaaataaaacgaagtttactagaaaaatcgtccatccgtatttataattctgatgataaatatttatccagcaaaagaaaagaattacctaaaggtacatgggtaggtacaaatcaacagtccttctattcagaatatacaaaattttggattgataaaaaaggatacatatttgaagacaaaaaacaactatttcacagttcaataattaaaataccaggtaatcacaatttacaaaacctattgctcgtaacagcagcagcaagagaaatagggatcgatcattcatcaatagccaaatctataacttcatttaaatcaattcctcatagattagagtatttaggaaaggtaaataatttaagtttttacaacgacagtaaagccactaatttcgactcttcaataactggtttaaaatctattgcttgtccaataattttactagctggtgggatacaaaaaaa

SEQ ID NO: 313574 - DNA, 706 bp, Unknown
  Bacterial polypeptide expressing nucleotide sequence isolated from the Sargasso Sea
ggtttctcggtagcgattggagggaactatggtaaaccggcgctcgacctgctggatgaaaaggccgatctctatgtcctagaactatctagtttccaactagagaagattcaaaatttgaatcttcacactggcgttttcttgaatttctctgatgatcatttggactatcacggctcacgtgcctcttatctagatgccaagagaaggatctttgatttttcagataggaaggtattttcccgccaagataaagcaactttcccagatagagagggattaggatcaattagttttgggtttggcaatccctctgaatctgaatcttggggagtcagggagaatcagttcgactattgtatattgaggggatccgaagaaatgtgctcgttaccaaaggcttacttaggcggtcgagtccattatttactcaatatagtggcggcattggcttcaatttatccgtttaattcggcagctaaatttgagtcgattaagtacttcgagggattgaggcacagattcgaactagtcaatgaagtaaatggagtaagattcataaacgactcgaaagctactaacgttagtgcgactgaggcggccctgaggaatttcgaatctaaagagcgggttattcttatactagggggagatgcaaaaggggtcgacctgagcattttacggatgagtataagcaagaaagtct

SEQ ID NO: 313575 - DNA, 723 bp, Unknown
  Bacterial polypeptide expressing nucleotide sequence isolated from the Sargasso Sea
tattaaatatcaatagctcatcaaaccttattggaaatattggaaatacaatgttggacaaaattaataataatagagactactctgtaattgagttatcaagctttcaactagacaaaatgaaaaaaaataatttagattatgggattttattaaatattgatattgatcacctagattatcatggagactttgaattatataaacttgctaaagaaaaaattttacatgcaaaagaaagtatttcatttgaaatggatccatacaaattatttcattggataacaaaatcaaaagctgaggaaattaaattcaagaatctcccatataggtttgagtttatatctaataaaatcattaatgattcaaaatctactaattcacattcattattttatgctttgagaaaagcaaacaaaatatttgattcagactacatcctaatagtttgtggagatccaaaaaaagagaggttcagagagatactcattgatggtccaaaagaagttttaatttttggccaacatctaaatgaactaaacaaatgtataaagaataataacaaacactcatttgtcactcttcaagaattatttaatttcattaaaaacgaaaataaatttcaaaatattttattttctccaggatatccaagtggaaaagattttaaaaattttattgagcggggtgaggcatttaattcttttgcaaaaaatatataaa

SEQ ID NO: 313576 - DNA, 772 bp, Unknown
  Bacterial polypeptide expressing nucleotide sequence isolated from the Sargasso Sea
tctgctgatacaataattacaagcccaggaatccctccaagagagtggcccgatacaaatattgaaataatttctgatattgaatttgcataccgaattttaaaatatgaaaatcgcttgcctcgatttattggcgttaccggaaccaatgggaaaaccactgttacagctgggattgctcatgcattggacgtaaaagcttatggcaatattgggtatccattaatttcagaagtggatcaactaagctcagaatccacagttgtgattgaattatccagttttcaattgttttcatcacccacgttgcactgtgatattgctattattgtgaatattgaacctgatcatctggattggcacgaatcgtttgatcattatgaaaaagccaagaaaacattaataaaatcatccaatcaaattgtttatttaccacaaaggttagccaatgagtgtgaagtgaatggctctgaactacgtgaaattgagtcgctggcaacaaccaattggcaacaatttaatggtcgtcacaatcaattaaatgccaatattattcaaagtatttgtaaagagctcggacaatctgacaatgagttaacaaagcgaatggccacattcacattgcccccttttcgttgtgaaattatttattcaagtgagcgtcgaatcataattaatgattcaaaggccacaaatatggcggccacactagccgctgttcaaagtttttctggaaaaaaattattaattttatcaggggagcccaaagagc

SEQ ID NO: 313577 - DNA, 667 bp, Unknown
  Bacterial polypeptide expressing nucleotide sequence isolated from the Sargasso Sea
atgacgttctccggaaaggttgatctcagcgcggctgaccggctcttcgactggtctggtgtgcatgttgtcatcgctggtttaggcacgtccggctatgccgccgctgacgcgttacttgaacttgacgccacggtcctcgtccttgacgactgcgatgacgactcccaccgtgacaaaggtggtctgctggaggttctcggggctgaagtgcgtttgggccccggatcagcatccgacttgccggaggaaacggacctcgtcgtcgtctctcctggctggcgtcctacccaaccgctggtagctcatgcccttacccgagggattcccgtttggggtgagcctgaactggcctggcgcctcatgcatcccgaccgtgttattccgtggctggcgattaccggcaccaatggcaagacgacgactacccagatgaccgagtcgattcttcatgcggcaggtctgaaggcatgtgctgtcggtaacattggccgccccatccttgaggccatggctgacgagatcaactacgatgtttttgcagtggagctgtccagcttccagctgcactggtcaaactcactgtctctccattccgcggcagtgctcaaccttcaccaagaccacctggagtggtacgcccacgaatcggatccgctcggttcgt

SEQ ID NO: 313578 - DNA, 889 bp, Unknown
  Bacterial polypeptide expressing nucleotide sequence isolated from the Sargasso Sea
caaagattcatcccatcgtcgccacgcccgagcggcaaaatgtgaggtcatcggcgacatcgagcttctggtccggacccaacggtggtgcaatttcattggcgttacgggcaccaatggcaaatccacgactacggcgctgctgggtcacataatgcaggtggccggacgcgaggctgaggtggggggaaatctgggcattcccgtactgacgctggacccgttgggggcggaaggcacctatgtgcttgagatgtcgtcctatcagttggaattgacgccgtctgcgacttttgacgtggctgtcctgctaaacattagcgccgatcatttggacaggcacggcggtatggatggctacatcgccgcgaaacgcatcatatttcagcgtcagacaaagccacgcgccgctgtaataggtatggacgacaacatctgtcgaggaatctgcgatgaacttaaagccacggatgaacaggtagtcattcccgtctccgggcaagaccgcgtgcacggtggagtttatgccatcaacggtgtcctctatgatgacatggatggcgacgaaacgcccgtctgcaatctccgacaaaatccaagcttgctgggttcgcacaacggccaaaacgcggcggcggcttacgccgcggcgaagaccgccggcgttgcaccgcacgccatcatggcttgtctgcagagctacccgggacttgtgcaccgacaggaggctgtcgccattgttgatggcgtggcctacttaaacgacagcaaggccactaatgatgaggccgcagcccgagcgctggcttgtttcaacaatgtctattggatcttaggcggccagcctaaaaaaagtcgatctagccgcctgtctgccgcatctcgatag

SEQ ID NO: 313579 - DNA, 685 bp, Unknown
  Bacterial polypeptide expressing nucleotide sequence isolated from the Sargasso Sea
atgtctaaagcgcgaagagtaattgctggtttaggaaagactgggttaagttatgcaaaatttttgaccgctcaaaatcttgagtatgaggttcttgaagacaatttgaccgaagaacaaatgtctcaattaaacaagataaaaaaaggagttaaggtcagttcgtttagtgatcataggcttctagatgtctcagaaatatatctcagtcctggtgtgcccaagttcaagaaatgtatcgatcaggcggtaaaaaatggcgctcaaatagtaagtgacatcaagatatttttcgatagagcgcggtgtccggtggtagctattaccggaacaaatggaaaatcaactgtgtctgaattagttgctcttgcgctctctaaccactatgaaaatatattattagctgggaatatcggcaagcctgttctagatcacataaattcaaacccagctctcgctgttttagagttgtctagttttcagttagagaatctggttgaagtcagcccagaggtggcagtagttttgaatttatctccggatcatatggatcgatattatgatgtgaattcgtatttttcaacgaaattatcgatctatgacaattgcaagaaagcagtaattaatcgtgctttatcagaaaagataaaaggcagttttaaaagaatagcgaccttggcctagg

SEQ ID NO: 313580 - DNA, 825 bp, Unknown
  Bacterial polypeptide expressing nucleotide sequence isolated from the Sargasso Sea
ttactaaattataaaaatatatatcttactccaggcttatctatattagataaaagattatcatatgttccaaagtctaaaattaaaagagatttaaatttatattataataacttaaaaaatgaaaaaattattgcaattacaggaacaaatggaaaatcaacaacaacaaaattaattggaaatatattaaaagaaaaatataaaaatatatttgttggtggaaatattggtgatgcattatgtaattcaatagaaaataaaaataaatattctcaccatgtcattgagttaagttcttttcagcttgaaactataaaaaaatttgaaccaaaaatttcaattttacttaatctttcaaaagatcatcttgatagatataaaaattttaaaagttatatatctacaaaaaaaaatatatttaatacagaaaataaaaaacttaatttaatttctttagatgatccatattcaaaaaaaatatttaatgataaaaatattaaaaataaaatatcattttcaattaaaaagacttatgcagatattttttataataaaggatatatagtcgaccaatatttttataaattaaagagatttaaattaaatgatatttctgtagatcttcaaaacaatcacaatattcaaaatattttagcctcatatattgtttgtaaatatttgaaaattccaatgaagtttttttttgaaggtgtgaaaaaatttaaaggcttaccttatagatctaaaataatttataattctaaaaaaaaaataataattaataatagtaaagctactaatataagttctgctatagctagt

SEQ ID NO: 313581 - DNA, 790 bp, Unknown
  Bacterial polypeptide expressing nucleotide sequence isolated from the Sargasso Sea
actgcaggggtatgtcgccgcaaaaaagcggatttttagatcccgaaaagaccgcccccagatcgccgttatcgggaccgacgatgaatacggaagaaagatatgctcagagctctctgcggacgatcactggcaggtcataccggtctctgtcggcacgaaaaatgacggcgtttacgtgtttgatagcattctgcacgacgctgacggcaacaatctggatatttccggcctcgaaaccctgcgtggcaatcataattggcagaatgcggccgcatcgtgggcggttgccagggcacggggacttcccccagacgcaatcggacgagcgtttgccaattatcctggcctgccacacaggcttgaagccgtcggcgaaatagacggcatacgtttcatcaacgattccaaggcgaccaacggcgaggcggccgcgagagccttgtcgagctaccagaacatatactggattgtcggcggcatcgcgaaggaggacggcctggagccgacattcccatggctggatcgggtggcacacggcttcctgataggggaagcggctgaaacctttgctgagacactctcggaacgcggaaatcaggtaactatctcgggcgacctaggaaccgccatagccaatgctttcgaacaagcgtggacggcaggcggtgaggcggtggtgcttctgtcacccgcctgcgcatcgttcgatcagttttccaatttcgcgttaagaggcgaccgcttccgcgaactggctaccgcaatctgcgcggagggccgccaatga

SEQ ID NO: 313582 - DNA, 628 bp, Unknown
  Bacterial polypeptide expressing nucleotide sequence isolated from the Sargasso Sea
atgaaagagattcagctagatttaggagttctcttaaatatttctcctgatcatattgaccatcatgaaaattttaaagagtacaagaaaattaaaaatagaattaaagaatcaaaaaaaacaacagaagagtctaatccaaaaaaattatggtccatgattactggtagacctcaaagattagtgcaagatattgagttaaaagatttgcctcatagacatcagttcatatctacgcatgatcatgtagtatttatcaatgactcaaaggccactaatttggctgcgcttcagtttgcattaaataaaatgtctaatccttatgtgttgatactttgcggagatccagataaagaacgatatgaaagctatgaaattgaaggcccaacaagggtttacatttttggtaatcatgcagaagaaatatcaaagaaaatatttcatccaaaaaaaatcttgttccataatcaaggcctttcatctgtaatgaaatcaatacttaaagaaaaatatgattctcaaactcatatacttttttcacccggacatccaagcggccaagattatagaaactttgaagaacgaggagatcattttataaagttagcaatgagttcaaatgattgat

SEQ ID NO: 313583 - DNA, 605 bp, Unknown
  Bacterial polypeptide expressing nucleotide sequence isolated from the Sargasso Sea
gcacaacggccagaacgcggcggcggcctatgcagcggcgaagaccgccggcgttgcttcgcacgccatcatggcctgtctgcagagctacccgggacttgtgcaccgccaggaggcagtcgccattgtcgatggcgtggcctatgtaaacgacagcaaggccactaatgacgaagccgcggctcgggcgctggcctgttttaacaatgtctattggatcttaggcggccggccaaaaaaggtcgatctagcggcatgtatgcctcaccttaatcgggtacgccatgcttacctgatcggcgaggcagcggtgaccttttctcaggttcttgatggtaaagtgcctttctccctgtccggtgaattagatgccgcggttgttgctgctcacgaacaagccctggcggacggcttgcctcggcccattgtggctctgtcgccagcgtgcgcatccttcgatcagttcgcgagtttcgaagcgcgcggcgaggtcttcaagagtttggtggaggccttgcccggcgatcatctggacccctttgagaaacccgggatttttccagggacaaccgaagccgatggcacgacggagtcccgaatatgag

SEQ ID NO: 313584 - DNA, 595 bp, Unknown
  Bacterial polypeptide expressing nucleotide sequence isolated from the Sargasso Sea
aatgaaatcattaatttatggttatggtgaaactggaaaatcctttgagagatatctagctaataaaaatttagaatttgagatttttgatgcaaatgttgctaagtttaataaagaatataatttaaaagattttgatcaaattttatgcagccctgggatatcgaaatctaattatgagaaattaattaaagagcacaataatgtgcttacagatatcgatattttttttcacattgataaatcaattaaaattggtattacaggcaccaaccggaaaagcactaccgcatatcatctctttcagctatttgaaaattatagtagctcaaacttgataggtaatattggaaatccagttttagaatctataaacaatgataaagagttctcaataattgaattatcaagttttcagcttgaaaagatgaaaattaataagcttgatttcggaatattactcaatattgatattgatcaccttgattatcatggagattttgaatcttataaagcggctaaagagaaaattttattagcgaaaaaaagcatttcatacataacctgtccatatgaactttatgaatggattaca

SEQ ID NO: 313585 - DNA, 875 bp, Unknown
  Bacterial polypeptide expressing nucleotide sequence isolated from the Sargasso Sea
tgaaaatggagtagcaatagataatgatattggcctgtttttcaggtttgctggttcggctgattggggaaaatttgagtctatacccaaaataatagcagtaactggatctaatggaaaatctacaactagtgctttaattcatcatatactgaaggctgataatcgcccttctcaacttgctggtaatattggtaagggtgtgtttgatcttgagcctttaactgatggcgaaaccgtaattttagagctttcttcttatcaaactgaagttgcaaatagtttaacacctgacgttgcagtttttacaaattttacacctgatcacttagagcgacatggtggtatcggtggttactatgcggcgaagaaacgtctttttacttcgggatggcctgatcgttcggtaattggtgtggatgaatttgaaggtaagcttttagcccagcaactcgcggaccatttgcatgatgatcgtattatcagagtgtccagttctagcaaaattactaatctgggttgggccgtttttgccaacaagggatttttgtcggagtacagactaggaaaacaagttgcctctttagatcttcgtaaatgtaacgctttgcaaggatcacataatcatcaaaatgcttgtgcagcttatgctgctgttcgtgctctaggtatagggccgcgttcaatagaggaggctttaaatagtttcactggtttagcgcatagatcacaattagtaactaaaatcaatggagttgtttttataaatgatagtaaagctacaaacgtagatagtgctatgaaatcacttgaaaccttcccaaaagttcgctggatatgcggtggcgagcaaaaagaacaggatattttccgac

SEQ ID NO: 313586 - DNA, 811 bp, Unknown
  Bacterial polypeptide expressing nucleotide sequence isolated from the Sargasso Sea
atatctctaaggcaaaaaaagtttcaaagaaaaaatatatttagaaaagtaaatagagacttaaatctatatatttcgaatttatcaaataaaaatatcgtagctattactggcacaaatgggaaatcaacaacaaccaaattaataggagatattttaaaaaaaaataatattaaaacatttgttgggggcaatattggagaaccattatgcaatgcttttcttcttaaaaaaaaatataaagttcatgtcatcgaattaagttcttttcaattagaaactgttaagtcactagatagtataatatcagtaataacaaatttatctggtgaccatttagataggtacaaaaatattaatgattatattaatcagaaaaaaaatattatttctaataatggaattaatttgttatccattgatgatatttattcaagaaagatatttaatcaaaaaaaaattaaaaataaaattagtttttctttagtcgataaatcagctgattgtttcgctaatgatgattatatattagataattacttcaaaaaagggagaaaattatttttaaaaaaaatttcaaaagacttagaaggtcattttaatatccaaaatattttaatagcatacatatgtagtaaagtattaaaaattccagaaactaattttcttaaggttattaaaacatttaagggtctgccatttagatcatctacaatttttagaaataaaaaattaaaaataataaataatagtaaatctactaatttaaattcaacaataaattcagttgtaaattacaataatatttatc

SEQ ID NO: 313587 - DNA, 776 bp, Unknown
  Bacterial polypeptide expressing nucleotide sequence isolated from the Sargasso Sea
ggcctatcgggccatcaaacgtgggctgctcgaacgctcggagtaccccctctttaatgccgatgatccagacctgcgccagcaacgcagcagctgggactgcggctcctgggtgagcagtgagggggctcgtccggatggccagcccgcagacctctggattgatgaagagggcatggtgcgcaataactccaccagattgtttgcggctgatgccctggcgatgccgggccaccacaaccgccaaaacctcttgctggtgacggctgctgccttggaggtcggcctctccccccagcagatcgccgacgccttgcgcacgtttccgggcgtgccgcaccgccttgaacacctgggaactttggcgggagcgagcgtgttcaacgacagcaaagccaccaattacgacgcagctgaggttggcttgcgggccgtgcaggagcccgtcgtggtgctggccggggggcagaccaaacagggcgatgccagtggatggctgaagcagctgcacaccaaggcctgctgcctgatcctgttcggcgcgggggccaacgagctgaccagtctcgccaaagcggctggatacccaggggaactgctgcagtgcctggagctcgaaagcgccgtcagcctgtccgtaacggccgtgcagcggcatcaggcctcgtcgctgctgctgtcaccggcctgcgcaagctttgatcagtacccagacttcgaggccagaggggagcacttccgctccctgatccaacccctgctgaacgtcacctgag

SEQ ID NO: 313588 - DNA, 1007 bp, Unknown
  Bacterial polypeptide expressing nucleotide sequence isolated from the Sargasso Sea
atcggccccggcatcccctgggatcatccaactctggttgagctgcgatccgaaggcgtccaagtgcgcggcgagatggatctggcctgggatgcccttcagcagatcccctggatcgggatcacaggaaccaacggcaaaaccacggtcacgcatctgctcagccacgtgttggaggcctcaggcctcatggcaccgatgggggggaacatgggccagtccgcggctgaactggcctaccagatcgcctcaggtgccgttcccgggccggattggctcgtcatggaactgagcagctaccagattgaggcggcgcccactgtggcccccaagatcggcatctggaccacgctgacccccgaccatctcgagcgccacggcagcctggaggcctatcgggccattaaacgtgggctgctcgaacgctcggagtacgccctcttcaatgccgatgatccagacctaagccagcaacgcagcagctgggaccgcggcacctgggtgagcagtgagggagctcgtccggatggccagcccgccgacctctggattgatgaagagggcatggtgcgcaacaacgccaccagattgtttgcggctgatgccctggcgatgccgggccgccacaacctccaaaacctgttgctggtgaccgctgctgccttggaggtcggcctctccccccagcagatcgccgacgccttgcgcacgtttccgggcgtgccgcaccgccttgaacacctgggcactttggcgggagccagcgtgttcaacgacagcaaagccaccaattacgacgcagctgaagttggcttgcgggccgtgcaggagcccgtcgtggcgctggccggggggcagaccaaacagggcgatgccagtggatggctgaagcagctgcacaccaaggcctgctgcctgatccctgtcggtgcggggggcaacgagctggccagccctcgcaaagctgctggatacccaggagaactgctgcagtgcctggagctcga

SEQ ID NO: 313589 - DNA, 910 bp, Unknown
  Bacterial polypeptide expressing nucleotide sequence isolated from the Sargasso Sea
catctcccctggagtgcctagcgatatttatataattgaaaaagcaaaaaaattaaatattccgataattggagaagttgaatttgcaagcaatctcacagaactgcccataattgctgtcaccggttcaaatggtaaatcaacaactgtaagtataatgcataatatgctaaaaacagaacatttaaatcccattctcgctggcaatattggaataccattatcaaaaattatcttagaagaaataaaaaacccagatattggtaacattctaatattagaaatatcaagctttcagctagagtttataaatcaattcaggccaataattagtgtttttctgaatatttctccagatcatttagatcggcataaagatatggatgaatatataagaatgaagttgaaaatgattactaattctaaagagggcgataaaatagtttataatgaggatgatcaaacactaaaaaaagaatttagtaaaaaaaaatcaaatgaaatatcatttagtataaaaaataagacacaattttttagcgtaaacaaaacaaaaatttatgatgaaaaaaatgaactattttgttctttaagtgaaatccttttgaaaggaaaacataatttatcaaacctaatggcatcagcaactgttgctaaaatattggatgtagatagtcaaaaaataaaaaatacaatgaaaacttatagtgggattgatcatagacttcaaacaataagaaaattaaatggagttacatatattaatgactcaaaagcaacaaatatccaatctgtcatagttgcaataaatagttttgagaatcctattattttgattttaggaggtaaaaataaaaattcagattttcggctacttcttccgcataccaaacgtcatgtaaagcacata

SEQ ID NO: 313590 - DNA, 489 bp, Unknown
  Bacterial polypeptide expressing nucleotide sequence isolated from the Sargasso Sea
cggggctgcgttcctccccgggagtccctcatcgcctcgaaccagtgggacgcatcggaaacgcgcaggtgttcaacgacagcaaggccaccaattacgacgctgctgcggtgggactgaaggcgatgcaggggccggtggtggtgctggcaggaggatccaccaagcagggtgatgccagcggttggctggaggaactgaaccgcaaagcttgcagcgtggtgctgttcggagccggcgccgaggaactgcatgggcttatcaccggggcaagcttcacaggagagctgacccgccgcacagaactaacgtctgctgttgaagaggcggtgcggtctgctgaagcgctaggggcatccagcctgctgctctcaccggcgtgcgccagctttgatcagtacaaagacttcgaagcccgcggcgatcacttcaaacagctgattcatcaggttcagagcgggttgaacgagacaaatcgactcgattgat

SEQ ID NO: 313591 - DNA, 621 bp, Unknown
  Bacterial polypeptide expressing nucleotide sequence isolated from the Sargasso Sea
tatgtatgattggtgtcaattgaagacggtaggagttattggtctaggtcgcacagggcgctcggttgtatcgtatttgcactctcaaaatataaacatcattgcttttgaggaggacttaatgtcctctggcatagattttatcaaagagttttattccaatgttgagtgcagagtaggtgctatgtctgcttgggattggcatgagctggctgaacacctggatttacttgttgttagtcctggtgtggacttgcggcagcccgttttgcagaattggctgcgttctggattgcctttgtgtggtgatatcgatattttttgtcattttactacctcttctatagttgctgtgacggggtctaatggaaaaaccacagtttcaaccctaattgctgaatcattgtctttatcgggaaagacggtgtctttagcgggtaatgttggtaagccagtgttggatttattgcagtctcctgaggcggagtatactgtcttagagctgtcttcttttcaattggagtccatcaatcggttgcgtaatcatgtggggctggtagtgaattatagccccgatcatatggataggtatcatgattttaaagaatatgtggttactaa

SEQ ID NO: 313592 - DNA, 794 bp, Unknown
  Bacterial polypeptide expressing nucleotide sequence isolated from the Sargasso Sea
aatggtagcttcaaaaagaataaatcctaagaataaaaatattgcaatcattggaattggtgaaactggtcaaggcgcagcgctcttagcaaaaaaattaggtgcaaatgttttagtaagcgattcaagtgaaataaacaataaaacattcttcaaaaaagcgcatgaaatgggtataaaacttgaaactggtggtcatacaaataaaatatataattcagatttatggattctttctcctggaatatctgacaaaattgaaattgtaagaaatgctaaaaacaaaggaatcgcaattgtaagcgaaattgagtttgcaagctggtatacagataagccaattatcgcagttactggtactaatgggaaaactacaactgtcagcattataaacgatattttgaacaaaagcgatctaaatccagtcttagcaggaaatatcggatttgctttttctaaggcaatattagatgatcttgctaaatgcgacgagaatagaatatatgttcttgagctatccagctttcaattagagcatatatctacatttaaaccttttatttctatcatattaaatattacacctgatcatcaagacagatatgaaaacatggaagcgtacattaaagcgaagatgaaaattgcaataaatcatgactctgaaagttatctactatttaactctgatgattctcaattagtaaataaatgcaaaaatttacacacaaataaaatatcctttggattggttaatgataatcaaaatactataaaaattaataattctcatatcg

SEQ ID NO: 313593 - DNA, 532 bp, Unknown
  Bacterial polypeptide expressing nucleotide sequence isolated from the Sargasso Sea
aatgaggtctctaatatacggttatggggatacaggcaaatcatttgaaagatacttagacaaaaaaaaatatgattacgaaatatttgatacaaatatttctcaatacaatctgaattatgactttcaagattttgatcaaattttgtgcagtcctggtatacctaaagatatttttgagaatataaagactcaaaataataatgtatttacagatgttgatattttttttaacgaagataggtcaataaaaattggtattacaggaactaatagaaagagcactacagcatttcatttacatcaactatttaaaaaatataaaccatcaaatttagtaggcaatataggaaacaccatgctcgactatatcaacaatggaaaaaaattctcaataattgaactgtcaagttttcaactagataaaatggatcacaatcgtcttgattatggtattttgatcaatattgaagaggatcaccttgattatcatggcaattttaaatcttataaacaagcaaaagagagaatc

SEQ ID NO: 313594 - DNA, 553 bp, Unknown
  Bacterial polypeptide expressing nucleotide sequence isolated from the Sargasso Sea
tatgttaagtataaataaaattcctattcaaggaaaacacaatttgcaaaactctatggctgcaataagtgtagctcagattttgaaaatatctaatcaaaaaataaaggaaagtttaaaaacttttaagagtattcctcatagattagaacattttctaacaattcaaaaagtaaaatatatcaatgactccaaagccacaaatgtaaattctgctttttatgctctagattcatttgatgggcctattgtatggatagcaggaggagtagacaaggggaataattatgatgatttaattccaatggttagcagtaaggttaaagcaattatatgtctaggaaaagacaacaacaaattaattgatgtattctcatcttacactgatgttatagttagtacagataaaatttctgatgctgtttcgagtgcatataagatttcaaagcctggagacgttgttttattatctcctgcatgtgcaagttttgatttatttaaaagttttgaagacagaggtgatcaattcaaagaagaggtaaggaaactatga

SEQ ID NO: 313595 - DNA, 863 bp, Unknown
  Bacterial polypeptide expressing nucleotide sequence isolated from the Sargasso Sea
agacgcccttgatcgtggggcgagattggtcattgctcagtcacctttcgatacaagcgggtatgacaacgttttggtaatacctgaacttgatcttcgtcgtggtgagattgcggcgaggtatcaccatcatccatcgcgcgaaatgctggtctgcgcagtaacaggtaccaatggaaagtcatccgttacccactatgtcgcacagtcactgaatgcgctatcgcgaccatgtgggattgttggaacccttggggtgggaatgattggtgacctgactaatctgggttcgacgactccgggtgcgctcacactccaacaatcgctggcttctctgagggatggcagcgcgcaagcagtcagtattgaagcatcatcacatggtctcgatcagggacgtctccttggctgtgaggtcgacgttgctgttttgaccaacatttcaaatgatcatcttgactaccatggtagtttcgatgcctacaagcaggcgaaattcagtctgttcgatttgccaactgttcggcattggattgtcaatgtcgatgatgcctctgggcgggagttgattggcagagcagcccacccggtcaatgtcgttcgtttttctctcacgaatgacgtggattcggatgtccatgttctgcggtcctcattccgtagggatggcatagaagctcaggttcaaacgccctggggtactttggcgcttcacatgagcttgctggggaagttcaatctgtcgaacgtccttgctacggtgggagttcttggcgcactaggttactcattgaccgatattgagagatctatccgtgaccttcagcctgtcattggaaggatgcaggtctttcatgttgaga

SEQ ID NO: 313596 - DNA, 412 bp, Unknown
  Bacterial polypeptide expressing nucleotide sequence isolated from the Sargasso Sea
ttttcaaataagagaataaaaatcattaatgattcaaaagcaacaaactttgaatcacttattcctgccttaaaaagttataaaaatatttatttaatatgtggaggactggcaaaagataacaatatcatgatcttaaataaatatataaatcaagtagttatggtatttattattggctctgatgagaaacctttttttaattattttaaaaagcgaactgagacttattatgttaagaatttagctaaagcagtgaaaatggttttatcaagtgttaatgattgtaaatctaagagtacaattctatttagtcctggcgcagcttcatttgatcaatttaaaaattttgaggttagaggagaaaagttcaagaaattaattagatccagaaaagcttatggaggataat

SEQ ID NO: 313597 - DNA, 652 bp, Unknown
  Bacterial polypeptide expressing nucleotide sequence isolated from the Sargasso Sea
atgaaatcccttatttttggttatggagttacaggccaatccataggaaggtatttagaaaaaaaaagcaaggcttttgaaatctatgacgaaaatgttaaagggcctaatatttttaacgcgttgccaaatcaaaaaaaattaaattcctatgagatggtttatttgagccctggaatcaacataaagaaaatttatccaaatggagaatttaataacatttcatatttaactgacatagatattttttttcaagaagataagtcattcaagattggaattaccggcactaatggaaaaagtacatgttgctatcatttacatcaacttttagaagaatctcaattagttggaaacattggcgccccagtactggataatatcaattcttgtcgatactcaataattgagctttctagctttcaacttgagaagatgaaagagattcagttagatttgggagttctgttaaatatttctcctgatcatattgatcatcatggaaattttgcagagtataagagagccaaaaatagaattaaagaatcaaaaaaagtaacaaaagaatctgatccaattaagttgtggtccatgattactggaaagcctcaaagagctgtgcaagatattgagctaaaagatttgccccata

SEQ ID NO: 313598 - DNA, 808 bp, Unknown
  Bacterial polypeptide expressing nucleotide sequence isolated from the Sargasso Sea
atatttttttcatgaggatgaatctattaaaataggattcaccggtacgaacaaaaaaagcactacctgctttcatttaatgcagctattagaggaagactactctgtaaatcttataggaaatattggcaagccagtcctagatgttttgaataatggaaaaaaatattcaattattgaactctctagttttcaattagacaaggtttcaaatattgatcttgattatggaattcttcttaatttagatagtgatcatcttgattatcacgaaaatattgaagactatgttcaatcaaaaaaaagaatattggaggctaaaaaaagtatccagaatgatgatataaaaataatatatgaatttattactgggtctgctcctccaatgaaagaactaaaagatcttccatttagatttcaaaaaataaatcaaaatactatcaatgactctaaatcaactaactttcattccttaaaatatgcaatgcgtgaagccagtaaaatatttaatgattttgctttgatcctaataggtaatcctaaaaaagaaggctacaaagaaattgagatttctaatccatcattagttgttatatgcggcaaacatgcaaatgaaatcttcccatgcataaatcatgagaataaagttttatgcgaagatctaagtttagcaatcaaacagattaaaaaatctaatattaaaaatattcttttttccccaggctatcctagcggagatgactatattaattttgaagaaagggggaaggcattcaataaactcatagagagaaaatatggaacttaa

SEQ ID NO: 313599 - DNA, 830 bp, Unknown
  Bacterial polypeptide expressing nucleotide sequence isolated from the Sargasso Sea
tcctaaaatcgccgttatcttaaatatcactcccgatcatttagataggcatgaaagctttatgcaatacgtaggtttaaaagaaaaaatttatgctaaccaaactaaaaacgattctcttattttaaactacgatgattctaatacccgttctatggggggaaattgtccagccaagcaaatcttctttagcctagagagcgaattgggaagcggagtctatgtgagtaaaggaaaaatattcgcacgcataaatgaatttgaaggtgaagtttttgctctcagctccctctcacgaggattggcctggcagatagaaaatgttttgcctgcggtggcagcagctctactgcttaaaatctctttggaatccatcaaaaaagttttgggtaattttacaggtttagaacaccggctggaatgggtatgcagtcaagatggggttgactttattaacgactcaaagggcactaatgtcggttcagcatataaatcattaaatacttttgaccgtccaatcattcttattgccggaggaaaagataaaaatgcagacttctccagtttgaaaaaaattatgaagaaaaaagttaagcacttgattttaattggtgaaacacgaccaaaatttaggagtttgctgaacggatcttttggttatgaagaatccgattctctgaaagatgcggtacataaagcaaaagaaaaggcggataaaggcgatgtcgtccttctttctccagcctgtgcaagttttgatatgttcacagactatatcgatcgtgggaatcagtttaaatctatagtcaaaaatcttgagggaaattaag

SEQ ID NO: 313600 - DNA, 619 bp, Unknown
  Bacterial polypeptide expressing nucleotide sequence isolated from the Sargasso Sea
atgaaatcccttatttatggttatggtaaaactggaaaatcatttgcaagatttctagaatctaaaaaatacaagtttgatatatacgatgataatttaccaaaatactctaaaaaaattgatttaaaaaaatataatcaaattttgtgcagcccaggtgtcccaaaaaatatctttgaaaaaataagaaatattaataaaaacgttttaactgatcttgatattttttttcaagaagatacttcaataaaaattggtattacaggaactaatagaaaaagtacaacagcatttcatctataccaactttttgaaaagtttgagccagctagcctcataggaaacattggaaatccaatgctcgattgtataaatacaaaaaaatattcaattatcgagctctcaagcttccaattggacaagatgattaccaataaacttgattttgggatacttctaaatattcagactgatcatcttgactatcatggcaattttgagttttataaattagccaaggagagaattcttgacgcaaaaaaaagtatttcttttgaagataacccttatgatttatttgagtggataacaggccaaaaatcatcagaaattaattaaa

SEQ ID NO: 313601 - DNA, 801 bp, Unknown
  Bacterial polypeptide expressing nucleotide sequence isolated from the Sargasso Sea
ctgaccatctcgatcgccatggcacgctcgagcgctaccgcagcatcaaggcggggctgctgctgcagagcgggcggcaatttctcaatgccgatgatcgcgatctctacgcccatgcagccgagtggccccaagcgctttgggtgagcggcggcgacaaagaccaattcagcgctgcgatgaccccgcatctatgggtcagtggcggacagctctgcaatcaaaccgggccgctgtttccctgcgcagccttggccatgcctggcgcccacaaccgccagaacctggccttggcgacggctgtggccctggagtgcggcctcagccccgctcaaatcgaagcgggctgccgcagcttccctggcgtgccccatcgcttggaacgcatccgcgagctcagcggcatcacctattacaacgacagcaaagccaccaactacgacgcctcattggtggccctgcagtcgctggaacggccgctggtggtgctagctggtgggcgcgccaaacgcggagagcccggcgcctggctggaggccctgggccagaaagcagcggctgtggtgctcttcggcgaagcacaaagcaccttccgcgagctgctcggcagtgctggctatcccggcgtgatcgagcagcaggagcaccttgatcaggcgctgccgctggcacgccggctggccgaacagcacaactgccaagcggtgctgctctcaccggcctgcgccagctttgaccaataccgcgatttcgaggtcaggggtgatcatttccgtcagttggtggaggccatggcatgag

SEQ ID NO: 313602 - DNA, 479 bp, Unknown
  Bacterial polypeptide expressing nucleotide sequence isolated from the Sargasso Sea
tagccccgcgcaaatcgaagccggctgccgcagcttccctggtgtgccccaccgcttggaacgcatccgcgagctcagcggcatcacctattacaacgacagcaaagccaccaactacgacgcctcattggtggcgctgcagtcgctcgagcggccgctggtggtgctggctggtgggcgcgccaaacgcggtgaacccggcgcctggctggaggccctgcgccgcaaagcagccgctgtggtgctgtttggtgaagcgcgaagcaccttctctgaactgctcggtagtgccggctatcccggcgtgattgagcagcaggagcacttggatcaggcgctgccgctggcgcgccggctggccgaacagctcaactgccaagcggtgctgctctcaccggcctgcgccagttttgaccaataccgcgatttcgaggtcaggggtgatcatttccgtcagttggtggaggccatggcatgag

SEQ ID NO: 313603 - DNA, 649 bp, Unknown
  Bacterial polypeptide expressing nucleotide sequence isolated from the Sargasso Sea
atgaagagtattacaatacttggtgcgggtgaaagtggatttggagctgctatgctagctcgtcagaagggtctagacgtctttgtttctgatttaaataaaataaatgaggacagaaaattagaaatgattaagaattctatagtgtttgaagaagaaaatcactcttttgacaaaattaagttatcagattatgtaattaaaagtccaggcatatctaatacgtctgaaataattttaaaaattaattcatctggtatacctataatatctgaaattgaatttgcaagtagttattcaaattcatttaagatatgtattactggaactaatggaaaaaccactaccacaaagcttatctaccacatactaaaaagagcagggttagatgtaggtcttgcaggtaatattggagatagcttttctaaaatgcttttatctggtgataaggatatctatgtacttgagattagcagtttccaacttgatgatatcaaaaaatttagacctaatatttctgttattacaaatattatagaagatcatttggatagatatgagaatgactttggtaagtatgttgatgcaaaaatgaaaattgcaaaaaaccaaaagtcatctgactatttaatatataactcagatgaca

SEQ ID NO: 313604 - DNA, 925 bp, Unknown
  Bacterial polypeptide expressing nucleotide sequence isolated from the Sargasso Sea
aatgctagcttcaaaaaaaggttataatgtttttgtgtcagatcttaatcaaatagatgataatataaaattactttttgaagataactcaattgaatatgaagaaaataaacattccattgataaaattcaatcttcagatttaataattaaaagtcctggaataccaaattcagcagatataatcattaaaatcaaatccctggaaattcccataatctctgaaattgaatttgcaagtactaattcaaattcatttaaaatatgtataactggtacaaatgggaaaactacaactactaatctaatttataatattctaaaagctgcaggtcttagtgtaggcattgcaggaaatgttggtgatagtttctccaaaatgttgctttcaggagataaagatatatatgtattagaaataagtagttttcaattagatgatattaaagactttaaaccaaatatatcagtgattacaaatgtgctagaagatcatctagataggtacgatttcaattttagtaagtacatagatgcaaaaatgaaaattatctcaaatcaagataactctgactatttgatctataactctgatgataaacaattggttgatgcattaaataatgaaaagtcaacagtaaatagaatttcatatggtattgaaaatcaaaacaaaaacttaataaatattaaaaaaaatattctgtcaaacaaaaaaaaaacaattatgataaatacagaagaacttgcattaaaaggaagacacaatttgcttaatgctatggctgcattaacagtttcagatttattaaaaattgaaaatgaaataataagagaaagtttattgggtttttcgggacttcctcacagattagagaattttttaaaaatacagggggttaattatataaatgactctaaagca

SEQ ID NO: 313605 - DNA, 596 bp, Unknown
  Bacterial polypeptide expressing nucleotide sequence isolated from the Sargasso Sea
tgatggaaaaaatattctaataaaaaacaaaaaaaaaactcttatgataaatatagaagaactttctcttaaaggaagacataatctgttgaatgctatggcggcaattacagtagcagatctattaaaaataagtaaagactctataagagacagtttactcacttttaaaggtcttccacatagacttgaaaatgtactcacaattcagggagtaaattatattaacgattcaaaagcaactaacgttaatgcagttttttatgctttagactcaatgaactctcaaacagtatggattgttggaggagttgataagggtaatgattattcagaactgttgcctcttgttcgtgaaaaagttaaagcaattatctgtcttggagttgataataaaaaaataattgaaacattcagcccaattgttgatttgattgttgagacagaatcaatggaagaagcagttaaaatttcaagaaaaattgctgaaaagaaagatacagttcttctttctcctgcttgtgcaagttttgatctttttaaagattatgaagatagaggaaatcaatttaaagaagctattaggaatctatagg

SEQ ID NO: 313606 - DNA, 683 bp, Unknown
  Bacterial polypeptide expressing nucleotide sequence isolated from the Sargasso Sea
aatgatagacattaatggtcaacaaatttcaattattgggctaggtaaaagtgggtactcagctgctaaactggcatctttttttaacgctaaagtgcatgtatctgataatggaaaaagcaaaattattaaaatttataagaaagaacttgaagagctaggagtggttgtagaagctggaaaatactctgacaaaatatataattcacaattatggattttgtctccaggagtaacattgcccaaaactataattcttaaagctaaatcaaaagatattttaataataagtgaaattgaatttgctagttggttcgcgaaatttccaattgtcggcgttacaggctcaaatggtaaaaccacaactgtaaatttaatatatacaatttgcaacaatcaaaatatatgccccaagcttgctggtaatataggaattccattttctaaaattgttttagaggatttaataaaaaaacccaaaaaaagactatatatagtggaagtatcaagctttcaactggaaaaggttaatcattttagagcaaaaatttcaatttttttgaatatatcagaagatcacttagatagacacaaaacaatgaaaaattatattaagactaaaatggcattaataaaaaatgctagaaaagatgattatatcatttacaattatgatgatgaga

SEQ ID NO: 313607 - DNA, 847 bp, Unknown
  Bacterial polypeptide expressing nucleotide sequence isolated from the Sargasso Sea
gaaaccacccaaagattccatcctaaggtggcgattattcttaatatcacacctgatcatttagatagacataagagctttgagaaatactccacagttaaagaaaaaatttttgccaatcaaactaaaaacgattttcttattttaaaccaagatgatcccattacacgcgatttaggaaataactgccctgcaaaaaaaatctacttcagtatggaaaaccctttagagagtggagtctatataaaaagtgaaaaaattatagcgcatctcaataattatgaaggaaaagtatgtgatttaagctctctttcgcctggattacgttggcaggcagaaaatgttttacctgctgtggcaacagctctaattcttaatattcctttagatgccattcaaaatattcttagaaactttccaggattagaacatcgattggaatgggtatgcaatcaagacggcattgacttcattaacgattcaaagggcaccaatgtaggttcagtatgtaaatctttaaacacttttgatcggccgattattcttattgccggaggaaaagataagaatatcgacttttctggattaaaaaaaatcattaaaaagaaagtaaagtacttgattcttattggggaaacaaaacaaaagtttaaaagtattttgaacggcaattttgattatgaagagtctgattcgctagtagaagcagtcaggcttgcaaaaaccaaagctaaaaaaggtgatgttgtgcttctttctcctgcttgcgcaagttttgacatgttcgaagattatatagatcgcgggaatcaatttaaatctatcgtgaaaagactggaaggatgat

SEQ ID NO: 313608 - DNA, 505 bp, Unknown
  Bacterial polypeptide expressing nucleotide sequence isolated from the Sargasso Sea
gatgaaaaaaattattcttggctatggatcaactgggaaatcttttgaaaaatacttaaagaaaaactccgaaaaatatttaatttatgatcacttagaagaaaaaagtcaactaaagaagaatgaacttaataaatttgacactttttatgtatccccaggtataaggttagaagatttattttcaaaaacagatcttcaaaaaaagactttcctaacagacttagatattttttttaaaaaaaattcctcttataagattggcataactggcacaaatggtaaaagtacatttgcatactatctttttcaatatttaagtttatccacaaaggtgtctttagtcggaaatattgggaagccaatgctcgaatgtataggctcaactgcaagatttacaattattgagctttcgagcttccaactgcataagatgaaaaaaaattttttagatctctctgtcattaccaatattcaaacggaccatttggattatcatggaaat

SEQ ID NO: 313609 - DNA, 421 bp, Unknown
  Bacterial polypeptide expressing nucleotide sequence isolated from the Sargasso Sea
gttgccatggatacgagacctatctggagtgagtttttacaatgactcaaaaggcactaatgttggtgcaacggtggccgctatcgaggggttgggacatcgaattaagggggatgttatcttgatcgcaggtggtctcgcaaaaggggcagattttagccctttggttcctgcgataaataaatgggcgaaagaattggttctaattggcgaagatgctgaggagatggcttctaatttttgtaagaacattccaactaattttgcgagagatatggatgatgctgttgggattgcgaatgaaaaggcatcgccaggagatgcagttttgctttccccagcatgtgcgagttttgatatgtatagaaattttcagcataggggtcaggtattcatgaagtccgtgggaaatttatcatga

SEQ ID NO: 313610 - DNA, 889 bp, Unknown
  Bacterial polypeptide expressing nucleotide sequence isolated from the Sargasso Sea
gatgataaatactcacgcaatggaattgatgcatagacatcatattgctagtgaaacaggcatccaaagcgataaaatttatgacgcagacttatgggttctatctcctggagtatcaaaaaataatcatattatcttgaaagcaattgaaaaaggtattccaattgttggagagatagagtttgcaagttggtttacagattctccaattattgcaattaccggttctaatggaaaaacaacaaccgctcatattctggccgaaatgtgtcaaaataaagatattaatggcgtgatggctgggaatatgggtctaccattctctgaaagagtattaaatgaaatattaaaaccagaaaaaaacagactctacatactagaggtgtcaagtttccaaatggaattcacaaaacatttttcacctgactttgctatatataccaatatttcacaagatcatctagaccgtcacaatactatgaaagaatatattcaattaaaaataaacctagctaagaatcttaaaaaagaaggatatataatttataatattgaagatgatgaactaaataaagctctgaaaaaccaccctcgccaaaaagaaacttttagcatttctagaaaagacacattattctatttagataaaaataaaattataggcccatcaaaaaatatcttggcaaatgtggaagatttaaaaatacagggtaaacataatttagaaaatttatttgcagcagcaacatgctcttatttgattggtgttcaagaaaataacatttgtagtactataaaaagttttcaaggtgttgaacaccgattagaacatgtcaaaattatcaataatgtagaattcataaatgattcaaaagctacaaacatagaa

SEQ ID NO: 313611 - DNA, 769 bp, Unknown
  Bacterial polypeptide expressing nucleotide sequence isolated from the Sargasso Sea
ccaaaccctacgcacgatggtagtcgtggccaaactgccattgtaggtgcgggtcgaaccggtatgtcgttcgctaggtatctgagtaatcgtgggcgcccatacatcttgttggatcaggcaccgaccgagggtcagcgagcggagctgcgggaaataagtggtgccggtcttcttgagttcaatcgaagccgcttgctaacggcccgagaaataatgctcagtccgggtgttcctcgtgcgggtgcagacatacaggccgctctggcaagtggtatccccgttcgtggtgaccttgatgtttttgcaggtgattgcggccattccgcatcggtgatggcgatcactggaaccaatggcaaaagtacagtaacgacattactgggtcagatggcggaggatgctgatatgtccatgaaagtggggggcaaccttggtatcccttgcctcgatcttttggatgaatcggcgaaaggttacattcttgagatttccagttaccaacttgagagtgcaggtgcgtttcgttctgatgtggccaccgtgctcaaccttgcgccggatcatcttgatcgctacgacaacctggagcactactacgaaacaaaagcgtcattgtaccggcgtacaaacatcgctgtggtcaacaaagaaactgactatccctttgatctgtctggctgtgaagagatctttagctttggccgcgaaaaaccgaacgacacccgagagttcgggttggttggcgatgcactgtatcagggcgaac

SEQ ID NO: 313612 - DNA, 853 bp, Unknown
  Bacterial polypeptide expressing nucleotide sequence isolated from the Sargasso Sea
ggcgcgccgctgacccatcccaagccgcactggagcgtcgagcgcgcccatgaggcgggcgtgccggtcatcggcgacgtggagctgttcgcgcgggcgctggccgccctgccgccgggggagcggccgcgcgtggtcgccatcaccggcaccaacggcaagtcgacgaccacggccctgatcggctgggtgctgaagcaggcggggctgagcgtccacatcggcggcaacatcggcatcggtgttctggccctgccggagccgacggcggatgcggtctatgtgatcgaggtgtcgtcctatcagctggatctgacgacgggcttcgcgccggacgtggcgatcctgaccaatgtgtcgccggaccatctggaccgccacggcgggatggagggctatgtcgccgccaagcgccggatattccaggcgcaggatgctgaggcgctggcgctggtcggcgtggatgaggaatggggccgcaaggctgcggcggacctgcgcgcgcaggggcggcgggtcgagacggtcgtatctcttccttctcccacaaggggagaagggtatggggcggcggcgggcgtgttgacggcgggcggcgacctgctggccgatctgaccgccgcgcggtccttgcccggccgccacaacgcccagaatgcggccttcgcctatgccgccgcgcgtgcgctgggcgtgtcgcatgaggcggcggtcgagggcctgctgagcttccctggcctgtcgcaccggatggaggctgtcgggcgtcttggctccgtgcgtttcatcaatgactccaaggccaccaacgccgacgccgcgcggcaggcgctggcctcctacccctccgtct

SEQ ID NO: 313613 - DNA, 673 bp, Unknown
  Bacterial polypeptide expressing nucleotide sequence isolated from the Sargasso Sea
tatgaaatatatttatggattaaataaaagtggaagatcaatcatagattatttggatagtattaatgaaaattatttttgttgggatgataattataaaaaaagagaagaattaaagaatattaataatgctataagttatgccgaaccaaacaatttaaattttaaattaatagatgaatctttcattactccaggtgtttcttttaaagataaaaagattcagatcttaaaaaataataaaatccctcttctgagagatttggaattatattctagaatcagtaaagataaaaaaattattgcaataactggaaccaatggaaaatccacaacaactaaactaattagtgatgttttaaaaaaaaataatataaaaaactttgttggaggcaatataggactgcctttactagaatgttttaaagaaaaaaataagttagaatttcatgtcattgagcttagttcttttcaattagaatgcaaaacatctttaaaaccatatatctcagttttattaaatatttccccagatcatttagatagatataaaagttatgatgaatatgcaacttacaaagaaaaaattatccatttaaataaaaatggtttcaatattgtttcaatagatgactctaaaactctagaaatttataaaaaaaatattaaaaat

SEQ ID NO: 313614 - DNA, 836 bp, Unknown
  Bacterial polypeptide expressing nucleotide sequence isolated from the Sargasso Sea
tatgttagctcatcataagggctttaatgtatttgtatccgatttaaataaaataaatgaaaacagaaaatcagaaatgattaagaagtctataatgtttgaagaagaaaatcactcttttgataaaattaagttatcagattttgtaattaaaagtccaggtatatctaattcgtctgaaataattttaaaaattaaatcaaatggaataccaattatatctgagattgaatttgcaagtaactattcaaattcatttaagatttgcattactggaaccaatggaaaaacaactaccacaaaacttatatacaacatactaaaaagagcagggttaaatgttggtctggcaggcaatattggtgacagcttttctaaaatgcttttatctggggataaagatatttatgttcttgagattagcagtttccaacttgatgatattaaaaaatttagacctaatatctcagttattacaaatattattgaagatcatttggatagatatgaaaatgattttggtagatatgtagatgcaaaaatgaaaattgcaaaaaaccaaaaatcatctgactatttaatttataattctgatgacaaaattttattagaggcactaagagtaaacaaattagaggtaaataaaattccaattgggataaaaacaaaaggacaaaatcaaatatcattagataaaaatattctttataacaaaaaaaaaactattatgataaataccgacgaatttgcgcttaagggaaggcataatcttcttaatgcaatggctgcaattacagtctctgatttactaaaaatagataatgcaataattaggg

SEQ ID NO: 313615 - DNA, 862 bp, Unknown
  Bacterial polypeptide expressing nucleotide sequence isolated from the Sargasso Sea
attgattttaatgttgccgctttcacaaacatttcccccgagcacttagattatcatggtagttttaaaaaatataaaaagacaaaagctaaattatttaaattattaaaagacaattcaatagcggtaattaatatcgatgatgactttggggaaaagctatctaaaaagttatctaaaaaagttttaccattttcaaaaaatgatccgaatagcctacactttaggagcataaacttttctaccaatggaatttcaggtattgctagttacgaaaatgagaaatttttaatcaaatctaatttaattggaagttttaactctgaaaacattctcactgccctaggtgtttcattagcattaggaataaataataattccattaagaatgggataaaaaactgtccattagttcctggaagaatggaatcatttcatcttaaaaatcaaagtatcgcgattattgattacgctcatactccagattcttacaataaattgatgatcacattgaaagagttgcagaaaaaaaatggcaacctttatgttgtatttggggcaggcggagatagggataaacaaaaacgtcctaaaatggctcaaattaccgaaaaatatgctaaacattgcttcattacacctgataatccaagatttgaaaagcaaagtgaaattaatgctgacattgtttcaggattcaagaaaaaaaattattcaatttaccactctcgagccaaaggtgtaaaagcagctcttgaactattaagaaaaaatgatatcatagctattttaggtaaaggtagagaggagtatcaagatattcaaggtgaaaaattatattattcagatttagatgtcataa

SEQ ID NO: 313616 - DNA, 911 bp, Unknown
  Bacterial polypeptide expressing nucleotide sequence isolated from the Sargasso Sea
aactaccactgctatgcttacacatcatatacttaaaactgctggttttgacgttgggctagtaggaaacataggtaatagttttgctaaagatgttgctgaaaatgatcatgagtattacgttttagagattagcagttttcaattagatgatataattaattttgctcctaaaattggggtaattacaaatataactccagatcatcttgaccgttatgattatgattttagtaaatatttaaaatcaaaattacggatcaatcaaaaccaaactcaaagggacttcctattattcaatgctgatgatccagaattgaataaagcaattaagcaaattgataccctagccacgattcacggttttggatacaattcttttgatacaaatacaacatacttagaggatgaccaaatcgtcataaaaacaaaaaaagaaaaaataatgatcgatacattagattttaccttaaaaggacgacacaaccttttaaacgcaatggctgctagtacggtagcaaatttactggaagtcagcaaaaagactatccgggaaagtcttttgaattttaagggtgctcctcaccgattagaacaggttctaaagattgaaaaaattaattttataaatgactcaaaagcaacaaatatcaattcggtttattttgctcttgaaagtatgaaatcacccacggtttggattgtcggaggcgtcgataaaggaaatgattatgaggcgctttatcctttggttagagaaaaagtaaaagctattgtttgtttaggaattgataatcaaaaaataattgattcttttaacccttttatagacataatattagagacgcaatcaatgaaacaggctggtatgatcgctcacaagatagccgataaaatgaaaatgtattact

SEQ ID NO: 313617 - DNA, 913 bp, Unknown
  Bacterial polypeptide expressing nucleotide sequence isolated from the Sargasso Sea
aaaaaatcttatcctgaaattgatagtaaaaaatttatctctgaaattgagtttgcaagtaggtttacggatgcatttattatagctgtaacaggctctaatggaaaaacaacaacagctaccttaatataccatatcttaaaaagtgcaggtctaaatgtaggtctagcaggtaacataggtgttagttttgcttcatcagtttgtgattattcatatgattattatgttttagaagttagtagttttcaactcgatcactcattaacttttaaaccaaatatttcagtaataactaatatttcacctgatcatttagacagatatgatgaagattttgatttatatacactatcgaaatatagtatagtcaaaaatcaaaaaccaaatgattttttcatctacaataaagattgtaacgtgacgaaaaaaatattttctagaattcaaataaattcaaaatcaatttcattttcaacaaaacaaaatagtggacttaaagactccatctacgtaaataataaaaatatcatttcatcaataaataaagaaaaatttatgttaagtacagacaaaatacagataaaaggaattcataatattcaaaattcaatggctgcaattagtgttgctcaaattttgaaaatttctaatcaaaaaataaaagaaagtttaaaaacttttaaaagtattccccaccgtcttgaacattttttaacaatccataaggtaaagtatatcaatgactcaaaggcaactaatgtaaattcagtttactatgctcttaattcatttgatgaaccaattatttgggttgtaggtggtatcgacaagggaaataattatgatgatttaattcctttggtaaaaaggaaggttaaagcaataatatgtttaggaaagcaaaacaaaa

SEQ ID NO: 313618 - DNA, 559 bp, Unknown
  Bacterial polypeptide expressing nucleotide sequence isolated from the Sargasso Sea
atgccatctttgatatatggcttcggtgtaactggaaagtcatttcaaagatatcttgacatcaaaggtgaagagtttgaaatatatgacactttgcatagtgattcattaaaaattgcttcaaagattgaggatggtttttataaaaatatctatgtaagcccttcagtgcctaaagagaagtttaaaaacttaaagaaatattcaacagtttttactgatatggatatctttttcaatgaagatgactctataaaaataggaataaccggtacaaataaaaaaagcaccacctgctatcatttaatgcaactattagaggaaaaatactctacaaacttagttggaaatattggtaagccagtcctagatgttttgaataatggaaaaaaatattcaattattgaactttctagtttccaattagataaggtttcaaatattgatcttgattatgggatacttctcaatatagatagtgatcaccttgattatcacgaaaatattgaagactatgttcaatcaaaaaaaagaatatggaggctaaaaaaagtatcca

SEQ ID NO: 313619 - DNA, 853 bp, Unknown
  Bacterial polypeptide expressing nucleotide sequence isolated from the Sargasso Sea
tgatttaaatgtatttaaaaaaatatttttatctcctggaatatcattaagaaaaaaacaatttaaacatttaaataaaattaataaattacaaagagatttaaatttatatacgtcctatttaactaaagaaaaaattattgcaataactggaactaatggaaaatcaactactactaaattaattggagatattttaaaaaaaaataaaatgaaaacttttataggtggtaattatggaaagccattatgtaaatcaataacttcgaataaaaaatttgattatcatgtaattgaattaagttcttttcaattagagacgatcaaaaatattaacactaaaatatcaattattacaaatctttctaatgatcacttagatagatattataatatagcagattacataaaacaaaaaaaaaatattatttcaaaaaacggagtaaatttaatttcagttgatgataaatattcaaaaaaaatctttcaaacaacaagaaataaaaaatttattagcttctcaatatataataaatcagctaatctttatatgggagaaaattttattcttgataattattttaagaaaaacaaaaaaatattcattagtgaaatttctagtgatcttgagggaagttttaacaatcaaaatatacttatagcctatatttgtgttaagcttctaaaacttccagaaaaaatattcttggatgtaataaaaaaattcaagggtctgccctacagagctagtataatttttaattctaataaacttaaaattataaataacagcaaatctacaaatattaaattcacaattaattctattaaaaatataaaaatatttatttga

SEQ ID NO: 313620 - DNA, 742 bp, Unknown
  Bacterial polypeptide expressing nucleotide sequence isolated from the Sargasso Sea
aatgaataaatctttaaatttaagcaaaaaaagttttgcaatttatgggcttggaaaaacaggaaagtctgtcattaattattttgaacgaaaaggttttgaaaattggagtgcttgggatgacaatgcaaaggagaaagatttttgtggacctattaagaaaaaagaaggagaaagactttttacaaagcgtttggactcagcaaaatttattgttataagccccggtataagcttacacaaagcatcgttaaaaaaaaaacttatagaaaataaagaaaaaattattacagatcttgatcttttctatcttttaaatccaaaaataaaaacaatcgttattacgggaactaatggaaaatctacaacgtgtaaaattcttgagcatgtattaagaaaaaataatactaatgtgagattagctggaaatataggtaaacctattttagatttaaatttaaaaaatagtccaattgtaattattgaagcctcatcctttcaattagcttattcgaagtttgttagacccaattatgcggcaatattaaatataacaaatgaccatttagattggcatggctctagtaaaaactatattaattctaaatttaaaattttttccaaccaaatcaaaaaagatatagcatttattgataatattaaatttttaaaaaaatataaaaaagctaagtatcttgcaaaattaaaatttataaaaacagaaacatataaacaagataaa

SEQ ID NO: 313621 - DNA, 1282 bp, Unknown
  Bacterial polypeptide expressing nucleotide sequence isolated from the Sargasso Sea
atgcgtgaatcatataatttcaaagacaaaagttttgccgtttatggcttaggagtaacaggaaattccgtagttgattttttgaacaaaaatagagcttacaaaatttatacttgggacgattatttaagtaaatcaaatttatatcttaaaaatagatttatagatggtttaaacaccgttgattatatagtgatgagtcctgggataaatatcctgagatcaaaatttaaaaaattattattaaaaaataaaaaaaaaattataactgacctagatttattttttttaaaaaataaagttcaaaaatcaattgtaataactggaaccaatggaaaatcaactacatgctctttaatccatcatatttttaaaaaaaatggaattaaaaataaattagtaggcaatataggcaaaccaattttagatgtaaaatttataaaaaaagaaatttatattattgaggcttcctcgtttcaactagaatattcaaagtttataaaaccttattgtgcagctatattaaatatatcccaagatcatttggattggcatggctcaaaaaaaaaatatataaaatcaaaaattaaaattttcaacaaccaaacaaaaaacgatatagcatttttaaatgatttaaatttaaaaagattatataaaagaaataattttttaggaaaattaaagtatataaaaaataactcaataaagataactgataatcaaaaccgatatcttaaactagaggcaaacaaaaacaatgtaaagtttgcttattatatagctaaaatttttaatattgataaaaaagcttttttaaaatctttaaaatcttttgagggtttagcccataggcacgaaatctttctaaaaaaaaataataaaatttttataaatgactctaaagcaacaagttttcaatcaagtaaatttgctttgcaaagtaataaaaatattttttggatagttggaggtatgcctaaattaggagataaatttaagcttggaaaattaaagaataatattgttaagtcgtatattgttggtaaacatatgggaatttttaaagctcagcttaatagaaaagtcgactttcaattatccaaaacattgaataatgccactatctcaatttttaaagatataaaaaatatagtagataaaaaaataacaattttattgagccctgctagcgcctcttatgatcaatttaagaattttgaagaaagaggaaataaattcaaaatattggtaaaaaactatgcaagaaaatatctctgaa

SEQ ID NO: 313622 - DNA, 961 bp, Unknown
  Bacterial polypeptide expressing nucleotide sequence isolated from the Sargasso Sea
gatgaagtttgaggaaaaaaatataggaattttaggattaggtaaaagtggatattggtctgctaaattagctaaaagtttgaaaaataatgtttttgtatcggattcaaatacaaacgttaatgaaatgtttgttgatgatttaaaaatgttaggtattgatgttgagattggcattcattctaatcaaattttggaatctgatttaataattaaatcacctggtattcctaatgattcagaaataatgaataaaattaattctgaaaaaattccggttattagtgagatagaatttgccggaaaccattctaaaacaaaaaatatttgtattactggtacaaacggtaaaacaactacagtttctcttgtaacagaaatacttagtaaagaaatgaacgttctaaagtctggaaatattggtattccattctcaaaaattgttcttgagaacaaattgtacgatcaaaatgatattgattattgtattttagaattatccagttttcaactggaacattgctcaaaacttaaaaaagaaatttcagtcattttaaatatatcgttagatcatatggacagatatgattcttttgaagattattttgaaaccaagataaagattttcgaaaatgcaaaatattgtttatttaattatgacgataattttttaaatgaaagaattaaaagtaatgacaaaaatataattccattatctatcagtgaagaaaaaggatattattactatgatacaaataaaattctttcaaatggaaacagtatatcaattgatatagaagatatttcattaaagggtattcataatgtatctaatattattattgctgccgaaatagcaaaaaaagttggaattgatcaaaagaatatttgtagggcagtaagggaatttgaaggattggaacatagatttgaacactttatttcatataatgggaattga

SEQ ID NO: 313623 - DNA, 1114 bp, Unknown
  Bacterial polypeptide expressing nucleotide sequence isolated from the Sargasso Sea
tcctggtattgctactgaaggaaaaaatgtacataaatacattaaaagattaaaatctaaaaaatgtaagataattagtgaacttgatttatttcaacattttataaatagcataaataaattaaaaaaaattaagattatcggtatcactggaactaacggaaaatctacaactgtttccatgattcatcattcattaaaaaaaaataacgtaaactcagttttgataggtaatattggacaacctatattttcttcaaaaaagttaaatcgtggtgtctatattttagaactttcatcatatcagctggagcaagcaaaaatatttaagccagatatatcgtgtatattaaacttaacacctgatcatttagatcgtcacattacaatgcataactatactaccgcaaagtgtaatatatttcaaaatataagtgctagggatgtttgttattatgactccaataaaaatataaaaaaaattgctaatacgaatttagataagaaaaaacttaaactgctaattcctgtaaaaaaaattagtagcagttttaaaaataataaaaacattagcttgatatcaaaaaaacacaatatgcaaaacttatatttttcttttttaatattaaaaaaattaggtttaaagacgtcagatatttataaatctttctcttcatttagtggactgcctcacagacaagagataattgtaaaaagaaagaactttattgtaataaatgattctaaatcaacaaattttgaatctttagtgccagcgttaaataacttcaagaacataattttgatttgcggaggacaaattaaaagtaataaaatcaaaatattagataaaaaccgacacaatgttattaaggccattgtaataggtgagactaaaaatattttttttaattattttaataagtatgtggatacttcatatgtaaaaaccttaaataaggcagttaaaatgtcattatcaatagcaaatattatgaatgagtattgcacaattttatttagtcctggagccgcatcgtttgatcaatacaataattttgaagaaagaggagatgattttagaagaaaaataaaagttgatattttaaaatga

SEQ ID NO: 313624 - DNA, 1333 bp, Unknown
  Bacterial polypeptide expressing nucleotide sequence isolated from the Sargasso Sea
catgtcaggcacaaagatcgggatcctaggtctcggcctgtccggcatggccgcggccaatgctctggccgcggctggtgcgaggctgtggcttcatgacgacaatgccacgccgcgcgacgaggtcccgcaaggtgcgcaactttgcggctggcagcactggccctgggacgagctgacctcgatggtgatcagccccggcatcccgcatgcgcacccgaagccgcaccccgccgccgcccgcgccggcgaggcaggtgtcgaggtgatcagcgagatcgaaatcgccatgcgcgccgcgccgcaggcgcggatcgtggcgatcaccggaaccaatggaaaatcgacaaccacagcgctgacaggccattgcctgcgcagtgccggaagtgctgtcgccgtcggcgggaacatcggcgatgccgcctgcaatctggacgaccccggggcggacggggtgatcgtgctggagctgtcctcctaccagctcgaaaccaccccatcccttcgcgctgatatcgcgatgctgctgaacatcacgccggaccatctggcgcggcatggcggcatggaaggctatatcgcggccaaggcccgcattctcgatgctgccggcgccgaaggccttgtcgtgatcgccaccggaccgcatctggaaccgcttgccgacgcccgacgcaaggccggcagcaaagtgaacataatcaatccggccgatgcccccgccaccatcgccggtgtcgcatcgctcgccgggccgcataatgccgagaatgctgcggccgccgccgcatgccttgccgcgctcggcctcgcggaggacgagatcaccgagggcatggccggttttggcgggctgccgcacaggctgcagaccgttgccaaacatggcggcatttcctttgtgaatgattccaaggcgaccaacggtgcggccgccgccaaggcgcttgccaccttcgacaatgtctactggatcgccggcggcgaggccaaggaagacggactcggcgaggcagcccgggaaacagcgaaggtggcgcatgcctatctgatcggcagcgcggcgcaggcctttgccgtcgaactggacggcatcgtcaagaccagcctgtcgggcgacctcgagacagccacgacatccgcctttgccgacgccagcgccgccaccggaaccgacggacgggatgccactatccttctgtcgccggcagccgcctcgttcgaccagtttgccagctttgtcgcccgcggcgacgccttcaccgccatcgcccgccggcttgccgccgatgcgggcgcagcggccgttcagggaggcgcgcatgcttga

SEQ ID NO: 313625 - DNA, 929 bp, Unknown
  Bacterial polypeptide expressing nucleotide sequence isolated from the Sargasso Sea
agattttgaactgagtgatcaagatataacgtttattatcgagttatcttcatatcagatagaattatcaccaaatataaagccagatattggaatactactcaatataagccccgatcatcttgatagacacggtgatatggataaatacacaggtattaaatttgatattttcaaacaccagaatgaagatgatatttcaataattggcttagacggtgaaatagtatcgtctgaaataaaaaaaagaaattttgaaagtaatttaattttatataaaaataatccacaggacgggaaaaaaatggctgaactacacgccagtggtgaggtgtctaagtatgatatatcaagatactcagcatcccataaaattacctatccatcaaatatcagtgcttgtatcgcttgcatgcatgcgatgaagattgaatataattcttattgtaagcatttcaatagttttagaggcctgcctcatcggactgagttaatccatgaatataaaaatatccaatatataaatgatagtaaggcaactaatgctgatgcagcaaaacaagcattgaccatatataataatatttattggatactcggtggtgttgagaaatatggtggtatttcgcaaataactcaatatttttcaaaaataaagaaagcttatctaataggtgaatcagcggagtcgctaagtacaaccctattcaattcaaaaattgagtatgagaattgtgtgacattaagaaatgcaatcaataggtcaaccaaggatgctgaaaagtccaagtcaaaagtgactattttattttctccagcatgcgcatcgtttgatcaatataaaaatttcgaggaaagaggtttggaatttacaactattgttggggaagtggttaaggaaagaaatgaaattcagcagatcaactaaa

SEQ ID NO: 313626 - DNA, 1384 bp, Unknown
  Bacterial polypeptide expressing nucleotide sequence isolated from the Sargasso Sea
aatgaattataagattaatacaaaaaaaagaacagttgcggttcttggtttggggataactggaaaatctataattgattattttaaaaattctgaaattgagcttatttgctgggatgatgacttaattaagagaagacaattaataaaccaaaaaattagacttcataatttatcagatcctgaaatctgggcagacattgactcattactcatttcaccaggtattccttacttgtacccaaaggctcatcctgcagttattaatgcattagagaattcagtaagaattgataacgatataggattgttttttaggaatattattaataaaaataaaaagccttttacaatatgtgttactggttcaaatggcaaatctacaactacttcattaataaaccatatcctaaatagtatttcgaataattcagaactaggagggaatattgggcggccagtattagaattgaataataataaaagtataaaatttaatgttttagaactatcatcttaccaaattgaaatcgctaattttttgtccccagatattgctatttttttaaatttatcgagtgatcatctggaaaggcatggaggaattgggggctattttaatgctaaggcaagactcttttactatgggttgcctaaatttagtattataaatatagatcaacctgagggaaagtatttagcgaatattttagaaaaaaatagcaatatggatactcaagtaatatgtctttcttcaaataaaacaaatacaaattctaaatggtctatttcactagaggatgattttatagtagagagaaaagatggcttggaaacatttagatataatatacatcaatatgtaaatttacctggtgaacataatttaatgaattcatgcattgctttcataacttgtaaattattacaaatagattctactcaaatcctaaacaatatgattaattttaaagggttacctcatagagctgaattggtaagaaaaataaatgaagtatcttttataaatgatagcaaagcgacaaatatggattctgcactaaagtcaataatgacttatgacagaattagatggatagttggtggtcaaaaaaaagatggggataaagtaaatattgagtctcaaaagaaaaaaattaaaaagatttatttaattggttcttcttcttttgaattgtccaaatcattcgatggcatggactattctatgtgtattaatttagataatgctgttgaaagagcatttaaagattcagagcctggtgacacaattttatttgctcctggttgtgctagctttgatcaatttgagaattttgaaaaaagaggtgaaaaattttgtgagttagttaattttttataa

SEQ ID NO: 313627 - DNA, 781 bp, Unknown
  Bacterial polypeptide expressing nucleotide sequence isolated from the Sargasso Sea
gatgataaaaattaaagacataacaatattaggatcaggaataagcggattaggttctgcaaaattagccaagaaatttggaataaatgtatttgtatctgataaaaactctataacagaaaaggtcaaaaagcacttaaataataacaaaattagttttaaagaaaatggacatgatcttgaacgattattaaaaagtgatgaagtcattattagcccaggaatttcatttagtaatttaaaaaagacattcccaaatattaaagaagaaaaatttatttctgagcttgagtttgccagcagatatacagatgcttatttaattgctgttactggttctaatggaaagacaaccacagcaagtttaatttatcatttgttaaaaaataatggattcaatgtgggattggcagggaatattggagttagttttgctgaatctgtatgcgacttttcctatgattactatgttcttgaagtaagcagctttcagctagatcacatattaaattttaagcccaacattgcaataattacaaatatttcaccagatcatctggacaggtatgattacaaattccaaaattataccaattccaaatacagaattgtaaaaaatcaaaaaattgaagatcactttatctataactataattgtgaagtcacaaaaaatatttttaaaaaaactaaaataaattcaaaaatatattcgttttcgttaacgaaaaatcaggttaaaaacccacaagtttttcttgataaaaatcatattaactcatta

SEQ ID NO: 313628 - DNA, 1489 bp, Unknown
  Bacterial polypeptide expressing nucleotide sequence isolated from the Sargasso Sea
atgtcgtataacgtacgtgagcatagttatgtagtcggtggcctaggtgttacaggtcaggcttgcgtgcgctttttgttgcaaaagcaggcaacggttaaagcatttgatacacgtgctaattttactgcacctggtgatcttgatactgacatgcaagcgtttatggcagagaaggtcacttgcactgccctaagcgaagattactttgatggtgtagacaccttggtgttaagtccggggcttgctctgaatatagaacaagtggtgttagcgcaaaagtgtggtgttgaggtgatcggcgacgtggaattgttcgcccgtttaaatgcctccccgagtagtgctacgccagctaagcgcgtagtaggtataaccggctctaacggtaaaaccacggttactttattagtgaaccatctgcttaaaagctgcggcgtaaaaagcattgaagcgggtaacgtaggtcgccctgtgcttgaagcgcttcaaagtgatgcagatgtagtggtgatggagctatcaagttttcaacttgaaactacgtctagcttggtgctcgaagctgcaactgtccttaatatttccgatgaccaccttgaccgtcacggtacccttgaagcctatatcgatgccaagcatcgcatttttgataacgcgaaatctgcagttgtgtggcgagacggtgagtttgtagcatcttacgagcagcttattaccgatgctaaggggattgctgcatcaaatgcagtatctgatggcgaatctaatgccgcgtctaatgaagagtcgctagcgtcaaaaaatatcgtggaatatggactgggagagtcgaccacagggtttgcgattgcgtcttttgacggtgacggtagtgctcgtgacgatgaacaaagtctatatatcacgtttaaaggcgaaaagcttattgcccttaacgatattcatttggcgggcatgcacaacgtactaaacatcatggctgcattgggtatctgccttcagctaggtgtttcgccagcgctcgcggttaaacatctacacagttttaaagctgcaccacatcggtgtgtggaaatagcccgtgtaaacgacatccgctatatcgacgattccaaagcaaccaacattggcgccactgtagctgcccttgaagggttagccccgactatacaagggaagctcattcttattgcaggtggtgacgctaaaggcgctgatatggccagcctctcgccttatctaaataaatatgtatcgcacgtgtttgctttgggcaaagatgcacacctgtttgataagagttttgcgcatacaactcgtgtggcaacgatgaaagacgccgtaaaagcagcaacaagacttgctgccccttgtgatgttgtgctgctttcgcctgcgtgtgcaagtttagatatgtttaagaattatatgcatcgcggtgacgtgtttaaacaagatgtacacgacctacttaatctacacggta

SEQ ID NO: 313629 - DNA, 610 bp, Unknown
  Bacterial polypeptide expressing nucleotide sequence isolated from the Sargasso Sea
atgccatctttgatatatggcttcggtgttactggaaagtcattccaaagatatcttgacatcaaaggcgaagagtttgaaatatatgacactttgcacagtgattcattaaaaattgcttcaaagattgaggatggtttttataaaaatatctatgtaagtccttcagtgcctaaagagaagtttaaaaacttaaagaaatattcaacagtttttactgatatggatatttttttcaatgaagatgactctataaaaataggaataaccggtacaaataaaaaaagcaccacctgctatcatttaatgcaactattagaagaaaaatactctataaacctagttggaaatattggtaagccagtcctagatgttttgaataatggaaaaaaatattcaattattgaactttctagtttccaattagataaggtttcaaatattgatcttgattatgggatacttctcaatatagatagtgatcatcttgattatcacgaaaatattgaagactatgttcaatcaaaaaaaagaatattggaggctaaaaaaagtattcagagtgatgatataaagaccatatataaatttattactggatctatacctc

SEQ ID NO: 313630 - DNA, 868 bp, Unknown
  Bacterial polypeptide expressing nucleotide sequence isolated from the Sargasso Sea
aatgttagagaattatgaaaatattattatctatggtttagggcaaagtggcatttcttcatatgaaaaacttaaggaccgaaaaaatatttttatttgggacgattgtgagaaaaaaagaaaagaattagaaaaaaaaggttatgagtttattgaaccaagaaaatggccatgggaaaagattgatttattaatatcttcaccaggcattgcgttaaattttggaactaactcttttattgttaaagaatctataaaaaataaaataaagattgttggtgatattgaggttttttaccaagagttaaaaagtctcggaattagaaaaaagattatcgctgtaactggtacaaatggtaaatcaacatttgtatctgttttaaatgaaatacttcaaaaatcaggcctaaaaagttgtatagcgggaaatattggtataccggtcttatctttaaatgcagatgaatctgatatcattattttagagctttcatcctttcaattggagttaattgatgagtttagagcggatatatcggttttattaaatgtttttgaagatcacaatgaacgatatggatcctatgaggaataccaaaaaacaaaaacaaaaatttttttaaatcaaagaaaatcagaccatgcaattttcgatgatttttatttatcagaaaaagtattaaaagaaattaatccctcaccaaagcatgtattatttaaagataatgaatttaatgatcttagtaataaaatttctcaaaacgaaataattaaaaaatttttaccagccctaatcaaggttacggatattttagatgttgatcgaaattttgtaatcaatcaattaaaaaagtttaagaatcttaat

SEQ ID NO: 313631 - DNA, 1045 bp, Unknown
  Bacterial polypeptide expressing nucleotide sequence isolated from the Sargasso Sea
tatgaaatctttaatctatggttatggtaaaaccggtaaatcttttgaaagatatttaaataataaaaaattagactttgatatttatgatgcaaatatttcaaaatttaataaaaaatatgatttaaaaatttttgaccaaattttatgcagtcccggcattccaaaaaaaaagtttgaagagattaaaaaagaaaataataatgttttaacagatcttgatatattttttaaagatgacacctcgatcaaaataggtatcactggtacaaataggaagagtacaaccgcatatcatttacatcaactattcaatatctatagctcttctaatttgctaggaaatattggtaatccagttcttgattccatcaataacaataaaaaatattcaattattgaattatccagctttcaactagataaaatgagatctaataaattagactttggtattttgttaaacattgaagtagaccatttagattaccatggagattttgagttatataaattatcaaaagaaaaaattttgttatcaaaagatagcatttcatatgaaatgaatccatataaattatttgaatggattacaaaaaagaaagctgaaaagattgaatttgaaaaccttccttttagatttcaaatgatatctaataatattattaatgattcaaaatctacaaacttccattcgctttcttatgctttgaaagaagccaaaagattatttaattctgaatatatcttaattatttgcggagaccctagaaaagaacaatatagagagatttatcttgatggaccagaaacaattttcatttttggtaatcactcaaacgaaataaataaatgtattaaaaatactaataaacaaatatttaaatctattgaagacttatttaattttcttaaaagcaacaatataaaacataatttattattttctccaggctatcctagtggtagtgactttaatgattttatagaacgaggtgaatattttaattttattgcagagaagtatataaatgcaggccactaa

SEQ ID NO: 313632 - DNA, 1177 bp, Unknown
  Bacterial polypeptide expressing nucleotide sequence isolated from the Sargasso Sea
aatgaatattaaagaccgagataaaatagaaataaaaggaaaaaaagttgttgttctcggtctcgcccttagtggagtatcagctgcaacactagctatctataaaggtgcagatgtattcgttagcgatcaaggtaattcacaatatttagctgattcttttaatgaactaaaaaagattggttcaaaaggagagataggaaaacatagtgataaaatttatgatgcagatctttgggtaatatctcctggaattccacaaaattcaaaattaattgaaaacgcaatagtaaagaaaattcctgttgttagtgaaatagaatttgcgagttggtatacagaagctccaattatagcaataactggtagtaatggaaagactacaactgcccatatacttgaaaaaatggtccaatctgatgaattacatggtcttatggcgggtaatgtaggtattcccttttcaaaaatggtgttaaatgatttaaagaatccagattctaaaagaatctggattttagaaatttcaagtttccaaatggagtttatagttcattttaaaccatttgtttcaatttttctcaatattactccagatcatttaaatagatacaattccatgaaagagtacatagctgcaaaaatgaatatgtggtcaaatcaaagtaaagatgattttatagtttataatgttgaggacaatatattggtagaggaaattgcggagtccacctctagaaaaatcgccttcgggttaaattatcatccggaggcgatttttcaaccaaatcgtacaaaaatttatacccaagatcacgccactctaattcaaatggacgaaattttaattcctggacaacataatgttttaaattcattggctgctgctacagctgcaaatttaattggtattacaaatcaggatattttttcagctttatcaactttttcaggtgttcctcatcgattagagaaggtatctgatataaatggtgttacatatataaatgattcaaaagcaacaaacttagatgctgtacaagtagcattagaaagcttctcacaacctattattctcctcttaggaggcatggataagggtggtgattttcgatcactccttcctcatacccacaagtacctcaaaacagtgatcgcatcgggcaagctaaggaaa

SEQ ID NO: 313633 - DNA, 1071 bp, Unknown
  Bacterial polypeptide expressing nucleotide sequence isolated from the Sargasso Sea
aatgaagtatgagggaaaaaatattggtattttaggcttaggtaaaagtggatactggtctgcaaaattggccaaaagtttaaataataatgtttttgtatcagattcaaatgaaaatattaatcaaatatttattgacgatttaaaaatgttaggtgttgaattagaaattggtgttcattcaaatcaaattttgaaatctgatattataattaagtcacctggaatccctaataattccaaaatcttgcgtaaaattaatgctgaaagaattccggtaataagcgaaatagaatttgctggaaatctttcgaaatcaaaaaatatttgtattactggaacaaacggtaaaacaactactgtctctcttctaacagatatacttagcacccaaaaaaaagttcttaagtctggcaatattggtattccgttctcaaaaattgtacttgaaaatagattgtatgaaaaaaatgaaattgatttttgtattttagaattatcaagttttcaacttgaacattgtgaaactttaaaaaaagaaatttcagttatactgaacatatctgttgatcatatggacagatataattctattgaagaatactttgaaacaaagttgaatatttttaataattcgaagcattgtttttttaattatgatgataaatttttaaaaaacaaggttgatgatagctataaaaatataatgccttattctattgctgaagaaaaaggaaattatttttacaaaaaaaataaaattttttcaaatgacctaagtatttcgtttgatacaaactctatttcattacgaggaattcataatgtatcaaatattattatcgcttctgagatagctagtatgatcggagtcagtaatgataacattcataaagctatttgtgaatttgagagcttagagcatagatttgaacactttaattcatatcaaggtattgattttataaatgattccaaatcaacaaatattgattctgtaattaaagcacttgaatctatttcgaaaaaagtgattttgattctgggtggtattccaaaagaggatgactt

SEQ ID NO: 313634 - DNA, 772 bp, Unknown
  Bacterial polypeptide expressing nucleotide sequence isolated from the Sargasso Sea
catgtatataaacttaacgccagatcatttagatcgtcacattacaatgcataagtatgctacagctaagtgcaatatatttcagaatataagtgcaaggaatgtttgttattatgactccaataaaaatataaaaaaaattgctactacaaatttagatatgaaaaaacttaaactgctaattcctgtaaaaaaaattagtagcagttttaaaaataataaaaaaattagcttgatatcaaaaaaacacaatatgcagaacttatatttttcttttttaatattaaaaaaattaggtataaagacgtcagatatttataaatctttctcttcatttagtggactgcctcacagacaagaaatacttttaaaaagaaagaattttattgtaataaatgattctaaatcaacaaattttgaatctttagtgccagcattaaataactacaagaatataattttgatttgtggaggacaaattaaaagtaataaaatcaatatattaaataaaaatcgacacaatgttattaaggccattgtaataggtgagactaaaaatatttttttcaattattttaataagtatgtggatacctcatatgtaaaaaacctaaataaggcagttaaaatgtcattatcaatagcaaatattgtgaacgagcattgcaccattttatttagtcctggagccgcatcgtttgatcaatacaataattttgaagaaagaggagatgattttagaagaaaagttaaggccgagattttaaaatga

SEQ ID NO: 313635 - DNA, 1387 bp, Unknown
  Bacterial polypeptide expressing nucleotide sequence isolated from the Sargasso Sea
atgattgatataaaaattagagaaaatattaatttaagagacaaaagggtcactgttatagggctaggtataagcggagtggaggcagcgaagcttgccaactatcatggtgcacgagttttcgccagtgatttgaattcaaatgagatggtaaatgcccacgctatggatttgatgcatacctatcatattgcgagcgaaacaggtcttcaaagtgaaaaggtctatgattcagatctatgggtcttatctcccggtgtatctaaaaataatgaaattgttttaaaagcaattgaaaaaggtattccaattgtaggagaaatagagtttgctagttggtttactgaatctccaattatagcaatcacagggtctaatggtaaaacaacaacatcatatattttatctgcaatgtgccaagctgaaaatattaatggtataatggctggaaatatgggtctccctttttctgaaagagtgttaaatgaaatccttaacccagatgaaaacaggatttacatattggaagtgtctagcttccaaatggaatttactaaacatttttcaccggccttttctatatacactaatatttctcccgatcatttagaccgccataattctatgaaagagtacattgatatgaaactgatgctagctaataatcttaaaaaagatggctctattattttcaatgatgatgattctattctacaaaagtcattaagtaagattaataaaaaaacaaaagcattcagtatcactagaaaagatgtattattccatttagacaatgaaaaaattgttggtccatcaaaaaaatcacttttagatataaatgaacttaggattcaaggtaaacataatattgccaatctatttgcagcagcgacttgtagtcacttaatcggtattactgaagaacaaataagtaatgttatgaaagatttcaaaggtgtagaacaccgtttggaacatgtagagttcatcaataatgtagaatatataaatgattcaaaggctacaaatattcaatcagtaattgttgcaattgaatctttcagaaaacctatagttttaatccttggtggttataacaagggtgcagattttcggctactccttccacatatcaagtcaagtcatgtaagagatataatatcttatggagatgccggcgggcaaatcaacactgaattaggggatgcggtgagatcggtgcaagttaccaatcttagctctgcagtgaagaaagcccattcactggctgctcccggagatattgtacttttatctccgggctgcgccagttatgacgaatttgaaaattttgaagtacggggagttttttttaaatcaattgtgaaagagcttgtcaagttatgat

SEQ ID NO: 313636 - DNA, 1036 bp, Unknown
  Bacterial polypeptide expressing nucleotide sequence isolated from the Sargasso Sea
catgccatctttgatatatggcttcggtgtaactggaaagtcatttcaaagatatcttgatatcaaaggtgaagagtttgaaatatatgacactttgcataatgattcattaataattgcttcaaagattgaggatggtttttataaaaatatctatgtaagtccttcagtgcctaaagagaagtttagaaatttaaagaaatattcaacagttattactgatatggatatctttttcaatgaagatggttctataaaaataggaataactggtacgaacaaaaaaagcaccacctgctaccatttaatgcaactattagaggaagattattcaacaaacctagttggaaatattggcaagccagtcctagatgttttgaataatggaaaaaagtattcaattattgaactttctagttttcaattagataaggtttcaaatattaatcttgattatgggattcttcttaatatagatagtgatcaccttgattatcacaaaaatattgaagactatgctcaatcaaaaaaaagaatattagaggctaaaagaagtattcagaatgatgacataaacataatatataaatttattactgggtctatccctccaaagaaagaactaaaagatctaccatttaggtttcaaaaaataaatcagaatactatcaatgactctaaatcgactaactctcattccttaaaatttgctatgcacgaagcaagtaaggtatttaatgattttgctttgatcctaataggcaaccctgaaaaagaaggatataaagaaattgagatttcaaatgcatcattagtggctatatgcggtaagcacgcaaatgaaatcttcccatgtgtaaaacatgagaataaagttttatgtgaaaatctaagtttagcaatcaaagagattgaaaaagctaacattaaaaatattcttttttcccctgggtatcctagcggaaatgattatattaattttgaagaaagggggaaggcattcaataaacttatagaggaaaagggtggaacttaa

SEQ ID NO: 313637 - DNA, 1438 bp, Unknown
  Bacterial polypeptide expressing nucleotide sequence isolated from the Sargasso Sea
aatgatagataatcatcattcaagtaaaagaaaaaatatcaatcttgtaattggattaggtaaatctggattttgggctgccaagtatttgagaagcatcaataagagagtaattgtttgggaaagtaaagatggaatagaagtcttagaaagaaaaacagcattagaagagcttaatataatagtttctctaaataaagaatttgtatttgaagaaattcaaccttttgtgaaagagatcgaatctgttgttataagtccatcaataccttatgaccatataactattattgaattaaaaaaaaagggaattaaagtaattggagaaattaatgttgcatgggaaattttaaaagacacaaattggataggtattactggcactaatggcaagactactgttactcatctactaagccatatactctgtgatactggattatatgctccttttgctggaaatattggtacacctttatgtaagtatgctcactccaaaaaacatgaaaaaattgattgggttgtagctgaattaagcagttatcaaatagaaatatctccagaagtaaaacctaatattggaatatggacaaccttcacagaagatcatcttgaaagacataaaacacttgaaaactatttcaacataaaaaaaagcttgttagaaaaatctgattttagaatttataattatgacgataaaaacctaagaaatcactacagttcgctatcaagaggggtttggataacaactagtttcgataaatcaaattttattcattgcgattattggatagatgaacaagcgtacattgttgagagagggaagaaattattcaaacttgaacatttttctttaaaaggaatgcataatcttcaaaatcttttattggtaattgcagcagcaagaaaagttggattatctggcaagaagattaaagattctttatctaattacaaacaattaccccataggatggaaacaatttataaaaataatgatctggaaatcattaatgatagtaaagctacaaattttgactcatctattgcgggaataagttcaattgaaggtcaaataataatcattgctgggggtagattaaaaggtaatgaatatagtgagtggataaaagttttaaagaaaaaagttaaatgtgttttcctttttggagaaagctcaaaagtcctaaaaatggcgcttattaatgaaggatttaaaaaaaatatttttgaattttcagaactaaaagagcttttaaattttgtttttcattatttacaaaataatagggttggaacattattattctcaccttcatgctctagttttgatcaatttaaaaattatgaagagcgtggagattatttcaagaaactaataagtgaaaaattaaagattaataaatccattttctggtcaaatatcatttcgtaa

SEQ ID NO: 313638 - DNA, 1318 bp, Unknown
  Bacterial polypeptide expressing nucleotide sequence isolated from the Sargasso Sea
atgtatttaatttatggaattcaaaaatcaggactttctatagtaaattattttgaaaataaaaaaataaaatttaagatgtgggatgataatccaatagtaagaaaggctataaaaaaaaattacaataaagattatttttttaatataaaaaaagataatttgaatgattttaaaaaaatttttgttagcccaggaatatctttaagacaaaaaaaatttaaaagaaaaaatatatctaaaaaagtaaatagagatttaaatttatatatttcgaatttaacaaatcaaaagattgtagctattactggcacaaatgggaaatcaacaacaaccaaattaataggagacattttaaaaaaaaataatattaaaacatttgttgggggcaatattggagaatcattatgcaatgcttttcttcttaaaaaaaaatataaagttcatgttatcgaattaagttcttttcaattagaaacagttaagtcacttgatagtagaatatcagtaataacaaatttatctggtgatcatttagataggtacaaaggtattagtgattatgttagtcagaagaaaaatattattactaaaaatggaattaatttgttatcaattgatgatatttattcaagaaagatatttaatcaaaaaaaaattaaaaataaaattagtttttctttagtcgataaatcagctgattgtttcgctaacaatgattatattctagataattacttcaaaaaaaacaaaaaattatttataaaaaaaatctcaaaagatttagaaggtaattttaatattcaaaatattttaatagcatacatatgtagcaaaatattaaaaattccagaatctaattttcttaaggttattaaaacatttaagggtctgccatttagatcatctacaatttttacaaataataaattaaaaatagtaaataatagtaaatctactaatttaaattcaacaataaattcagttgtaaattataataatatttacctaatcttaggaggcatagctaaagaaaaaaattttgaaattcttctaaaatataaaaataaaattagctgtgtatatacttacggaaaatcaggaaatttcattgaaaaaaaattaaaaaaagaattagttgtaaaaaaattggcaaatttaaaatcagttatcaaagaaaccttcaaggatattaaaaaaaattcaaatcaatcaactatattgttcgctcctgcatgtgcctcttatgatcaatacaaaaattttgaagaaagaggcatacattttaataaattaattaaaaattatataaattaac

SEQ ID NO: 313639 - DNA, 1306 bp, Unknown
  Bacterial polypeptide expressing nucleotide sequence isolated from the Sargasso Sea
aatgaatgaaagaaagattaattttaaaaacaaaaaaattttaatttatggttttggaaaatctggtatttcttgttttaattttttaaaaggcaataatacctgtacaatatatgacgataacacaaaaaatattccaactaagtttaaaaaaaaattaattaatattaagaaattatttaatataagctttgatttcattgttttaagtccaggaatagatatcaataaatgtagaatttctgcttatttgagcagaaataggcctaaaattatcacagaacttgatatatttgaaatcagttatccaaaaataaataaaataacaatcactggaacaaatggtaaatcgaccacttcaaaacttttacatgatcttctaaaaaataataaaatggatgtaagattaaccggcaatattggctatccaattttaatggaaaaaaaaataaaaaaaaatacaatatttgtaattgaggcgtcttcatatcaacttgattatagtcagtattttaagtcaaaatattctgttatacttaacctaaatccagatcatctagaaagacatggaaccttcaaaaattatgtaaatgcaaaatttaaaatagtaaaattgcaaactaaaaatgactacacttttatagacagcgaaaataaaattcttaatgaattagtaaaaaaacgaaaaataaaatctaaagttataaaaatagattactttaaatataaaaaatattttagactaatagacaatatttattttaaaaattctagtaatagaaaaaatcttagtttcattttcaatattgctaaggtcttaaagataaattttaaaacagtaataagtaccgctaataaatttaaaggattagattttagacaacaaataatatatcaatcgagaaaattattaatcattaacgactcaaaatctacaagtttttcttcttcggtaccattgttggaaagttataaaaatatttactggattttgggaggacttgcaaaaaaaggtgataaatttaaattaaataaaaagtactcctcaaatattaaagcttttgtttatggtaaagatagaaatcttttgatcaattgtttaccaagtaaaattttttgtcaaagctctctaacacttaaaaaaattttaaaaaatttaaaaaataatattaaaaatgatgatagaaaaaaagtaatcctttttagtccctccgctgcctcttttgatcaatttaaaaactttgaggaaagaggaaaattttttaataaaaatattaaatatataataaaagaagtaagaacatga

SEQ ID NO: 313640 - DNA, 535 bp, Unknown
  Bacterial polypeptide expressing nucleotide sequence isolated from the Sargasso Sea
gatgaagatcgtcggtgcccacaaccaggccaacgcgctggccgccatggccctgtgcgatgcggtcggcatcccgcgcgagccgcagttgcgagtactgcgccgtttcgaggggctgccccaccgtgcccgcttcgtgcgggaggtgaacggggtgcgctggatcaacgactccaaggccaccaacgtgggggcgaccctggctgccgtggccggggtgcgcgagtcggtgaagggccgtctgctgctgctggccggtggccagggcaagggccaggatttcggcccggtgcaggcgctgctcggcagccagatcgatcacatgtactgtttcggccaggatgccgaggtgctgctggcgctgggcgagcagaccgagcgggtggcggatctggatgccgcggtcgccaaggcggccgccgatgccagacccggcgactgggtgctgctggcgccggcctgcgccagcctcgatcagttcaagtctttcgaagcgcgcggtgatcgtttcaccgagctggtacaaaagttatga

SEQ ID NO: 313641 - DNA, 1111 bp, Unknown
  Bacterial polypeptide expressing nucleotide sequence isolated from the Sargasso Sea
attattagagctaaagaaaagagaataccaattattagcgaaatagagtttgctagttggtatacagattcaccaattatagctattactggtagcaatggaaaaactacaactgctcatattttagaaaaaatggtacaaacagatcaaattcatggacttttagcaggaaatgtaggcgtccccttctcagatatggtactaaatgatttaaataacccaaatccaaaaagggtttgggttctagaaatttctagcttccaaatggaatttattattcacttcaaaccttttatttcaatttttttaaatataactccagatcacttaaacagatattcatctatgaaagaatatatttcagcaaaaatgaatatgtggtcaaatcaaacaaaggaagattttattgtatataatgtagatgacgatatattggtagaggaaattgcggagtccacctctagaaaagtcgccttcggattaaattatcatccggaggcgatttttcaaccaaatcgtacaaaaatttatactcaagagcacgccacgcttattcagatgaaagatatatctttgcctggtaaacacaatttatctaatgcattagcagctgctacagcagctaacataattgggattccaaataaaaaaatatctacagttttatcttctttttcaggtgtgccacatagattagaaaaagtagctgaaataaataacattatatacatcaatgattctaaggctacaaacttagatgcagtaaatgtagcattacaaagcttatcacaacctattatccttctcttaggaggtctggataagggtagtgattttcgatcactccttcctcatacccacaagtacctcaaaacagtgatcgcgttcgggcaagctaaggagttaatactcttagcaataagggatgcggtaagatctacctcggcaatggatcttaaagaagccctcagtcttgcccaaaactacagccaacctggagatataattttattgtctccaggttgcgcgagttttgatcagtttgacaattttgaacatcgtggtgattattttaaagacttagtgaatactatggaaataagtgaatgaa

SEQ ID NO: 313642 - DNA, 622 bp, Unknown
  Bacterial polypeptide expressing nucleotide sequence isolated from the Sargasso Sea
aatgtctgattttatatatggattaaataaaagtggaatttcagttgcaaagtttttgctaaaaaaacaaattaaatttgatttatgggatgatgatatatcaaaaagaaaaaaattaaaaaaaatatttaaaaaccataattttttaaaactaagtaataaaaatttttataaatataataatatatatgtgtcaccgggcatatcatttaaagattctaaatttaaaaaaataaataaaaataaaatattaaaaagagatttaaatttatattggaattacacaaaaaaacaaaaaataatagctataactggcactaatggtaaatcaacttcaacaaaattaattggagatatattaaataaaaataattttaaaacttttattggaggtaatattgggatacctttgtgtgataattttttatcaaaaaaaaaatatgattatcatgttattgaattaagttcatttcaattagaaaagataaataattttaatccaaaaatatctataattttaaatttatcaaaagatcatatggatagatataataatattactgagtatattaatcaaaaaaagaaaattttaaataagtctttaaatggatataatttgatt

SEQ ID NO: 313643 - DNA, 523 bp, Unknown
  Bacterial polypeptide expressing nucleotide sequence isolated from the Sargasso Sea
aatggaggggaaaaaacttgttataatgggtgctggtaaaagtggatatggcgctgctcttttaggaaagaaagagggttataatgtgttggtttctgacaataattctataagcgatagtgttaagaaatctctaaacaaaattagagttgaatgggaagaaaatggccacagtcaagatagaattttggcgtcagatttggtagttaaaagcccaggtatttctgatgaacaagctataataaaatcattggataaaaacaaaattccagttatcagtgaaatcgaatttgctggaaggtactgtaacggttttaaaatctgtataactgggagcaacggtaaaacaactactactttaatgcttcatcatattttatctaatgcagggttagatgtagctgcagtaggcaatgttggttatagttatgctcaatcagttgcagaaaaccctaaagattactatgtgattgagttaagtagttttcaattggatagaatgtatgaatttaaagcagatata

SEQ ID NO: 313644 - DNA, 916 bp, Unknown
  Bacterial polypeptide expressing nucleotide sequence isolated from the Sargasso Sea
ggacatattttaaatttaaatggattaaagactaaagtaggaggaaatattggagaagctgccacctcaatcgatgatcctggggaagacggttttataatattagagctttcctcttttcaacttcaaacttgcaatgatttaaagttagatggtgcaatattacttaatataactccagatcatctagactggcatggaaacttagacaactatttcaattcaaaattaaaaataggaacttttctaaaagaaggtgcgcctatagttgtatcgaatacaaataatctaaccaaaaaagcttgtgaatttttttataaaaataaaatcaaagttattgaagttttgaaaaatgatatttcgcatcttcagataatacttgaaaacaaattttataatgaaaaccatttaacaataatacaattattaaaagaatttggagttaaaaaagataaatctattgaagcaataaaattatttaatgagttacctcacagattagagttttgctatcaaaaaaacaatataacatttataaacgattcaaaagctacaaatgctgaagcaactatcaatgctttagaaaaatatagaaatatttattggattgctggtggtatagggaaaacagacggtgttaaggcaactttaaagcatcttaaaaatgtcaataaatgttatttaattggtaaaagtaaaaaagatttttttgaaacattaaattccaaaatagattgcaccatctcagagaatttgtctaaggctttaaaagaaatttttaaagaaacattgaacaaaagtaatgaaattactgttcttttatctccagctgcatcaagttttgatcaatttctaaattttgaaagtagaggtaatgcatttaaatcccttatatcagagatatgggagctttaat

SEQ ID NO: 313645 - DNA, 1021 bp, Unknown
  Bacterial polypeptide expressing nucleotide sequence isolated from the Sargasso Sea
ttgacaggttcaaacggtaaaaccaccactgtaaatatgctttatgaaatgctaaagggtgataattattcacccatacttgctggaaatatgggatttgccttttctagagcaatattaaatgatttaaataaaaaaacagatgatagaatttatattttagagctttcaagttttcaattagagaatatcatccattttaaaccattcatatcaattattttgaatataactccagaccatcaagatagatatatagatatgaatgcttatgttgaggcaaaattaaatataatagcaaatcaagatagtaacgatttcttgatttataactctgatgatccaatattaaataaacgatgtaaaaatgctgtacctaaaattctaagttttagcataaataataattctgaaaatctattcaaaataagagattctaaaattattgaaggggattctcatattttagatctaagtaagattgcgttagctggaaagcataatctttcaaattttttagcagcttctactgccgcaaaaattctaaatattagtaaccgacaaatttcagaaacaatttctaatttttcagggatagagcacaggttagaaaaagtagtaatcaataacggtgttgcttactacaatgattcaaaagcgacaaatattgaatcagtaattgccgcaattcagtctttttcaaattcagttattttaatcctcggcggaaaagataaagacagcaattttgttgaattaataccatttattaagcataatgtaaaaaaaataatttcctatggacaggctagcaaaaaaatagctattgcactcagggatgcggtagaactggatcaagtatccagtctcagggatgcggtagaggtctgtcataaaagcgcagttcctggagatattgtacttctatctccaggctgcgctagttttgatcaatttaacaattatgaggagcgcggaaatgaattcaaaaaaatagttaatgaaatggcacaagcatgag

SEQ ID NO: 313646 - DNA, 1036 bp, Unknown
  Bacterial polypeptide expressing nucleotide sequence isolated from the Sargasso Sea
atgccatctttgatatatggcttcggtgttactggaaagtcattccaaagatatcttgacatcaaaggcgaagagtttgaaatatatgacactttgcatagtgattcattaaaaattgcttcaaagattgaggatggtttttataaaaatatctatgtaagtccttcagtgcctaaagagaattttaaaaacctaaagaaatattcaacagtttttactgatatggatatctttttcaatgaagatgactctataaaaataggaataaccggtacaaataaaaaaagcaccacctgctatcatttaatgcaactattagaagaaaaatactctacaaacttagttggaaatattggtaagccagtcctagatgttttgaataatggaaaaaaatattcaattattgaactttctagtttccaattagataaggtttcaaatattgatcttgattatgggatacttctcaatatagatagtgatcatcttgattatcacgaaaatattgaagactatgttcaatcaaaaaaaagaatattggaggctaaaaaaagtattcagagtgatgatataaagactatatataaatttattactggatctatgcctccgaagaaagaactaaaagatctcccgtttaggtttcaaaaaataaatcaaaatacaatcaatgactctaaatctactaactctcattccttaaaatttgcaatatgtgaagcaagtaagatatttaatgattttgctttgatcctaataggtaatcctgaaaaagaaggatataaagaagttgagatttcaaatccatcattagtagttatatgcggtaaacatgcaaatgaaatcttctcatgtgtaaaacatgagaataaagttttatgtgaaaatctaagtttagcagtcaaagagattgaaaaagctaatattaaaaatattctcttttccccagggtatcccagtggcgatgactatattaattttgaagaaagggggaaggcattcaataaactaatagaggaaaatagtggaacttaaa

SEQ ID NO: 313647 - DNA, 1036 bp, Unknown
  Bacterial polypeptide expressing nucleotide sequence isolated from the Sargasso Sea
aatgaaatcgcttatttatggttatggtaaaactggaaaatcatttgcaagatttctagaatctaaaaaacacaagtttgatatttacgatgataatttgccaaaatactctaaaaaaattgatttacaaaaatataatcaaattttgtgcagtccaggtcttccaaaaaatatctttgaaaaaataagaaatattaataaaaacgttttaactgatcttgatattttttttcatgaagattcttcaataaaaattggcattacaggaactaatagaaaaagtacaacagcatttcacctatatcaactttttgaaaagtttgacccagctaacctcataggaaacataggaaatccaatgcttgattgtataaataaaaaaaaatattcaattatcgagctctcaagcttccaattagacaagatgactaccaataaacttgattttgggatacttttaaatattcagactgatcatcttgactaccatggcaattttgagtcttataaattagctaaggagagaattcttgatgcaaaaaaaagtatctcttttgaagataacccttatgatttatttgagtggataacaggccaaaaatcatcacatattaattttaaaaatcttccattcagattccagcatatttcaaaaaacattattaatgactcaaaatctacaaactatcattctttaagttatgctgtgaaaagggcaaatgaaatcttcttaaataatggatatgttcttattgtttgcggttctccgaaaaaggaggaatttagaaagattgacattaaaggaccagaccaaatttatatttttggaaaacatgctaaagagataaataaatgcgttaacaacaagaacaaaaaagttttcaacgaactttccgatgtcgcagaccatttaaacaaacataaccaaaaaaatgttttattttcacctggctatcctagtggagatgacttttcaaattttgaagaaagaggagtcgcatttaacaaaatttttggaaatttaaatgaaaattga

SEQ ID NO: 313648 - DNA, 1075 bp, Unknown
  Bacterial polypeptide expressing nucleotide sequence isolated from the Sargasso Sea
atgaaaaaatcattgattctaggttatggcatcaccgggaaatcttttgcaaattatctatctaaaaaaaaattaaattttgaaatttatgataaaaaccttgaaggaaaaaacttcatagcatttccagaatataaatatttaaaaaaatatgaaaatatttatatatctcctggcttcaaattaaaagaatatctttcagagacagagataagcagtttaaagtttcaaactgatttagatatattttttaagcataataattcatataagattggtgttacgggaacaaacggtaaaagttcatttgcttattatttagagcaaattttaaatcaagtctctagtggaatcattgttggaaattttgggaatcctgtcttagacttccttcatcataaaaaaaaatactcaataattgagctttcaagcttccagctcgaaaaactgaataaatcattgctagacttgtcagtagttacaaatatttctccagatcatcttgattttcacggtaatttcgaaaattacaaaaaagcaaagcttaaaatttgtaacaacagagcaaaaactttttttgcaaatactaatatgagtcttaaagattttgcctttgaaatcgcatcaagtttagaaaaaatagattctaatacttccagacctctaaatgatcttccacacagacttgaggaggttattccaggaataattaatgattcaaaatcaactaattcagcttctctgctatatgcaataaagaaattaaattttgatggcaatctaataatttgtggtgatcctagaaaagagccaaaatcctatgaagtttatggacctcagcaagtctatatttttggtatgcatagaaatgagctcatggaaaaagttaaaagcagaagaagtaatatcaaaactttttcaaatttagatttagttttacaagatataaagaaagcagattcaaagccaaacattcttttttcaccaggcaactcaagtggtaaggatttcaaaaattttgaagatagaggtaatttcttcaaagataaagtattagaatattttagtgattgaa

SEQ ID NO: 313649 - DNA, 1336 bp, Unknown
  Bacterial polypeptide expressing nucleotide sequence isolated from the Sargasso Sea
aatgaaatttgaaggaaaaaatataggtatagtaggtttaggtaaaagtggttattgggcatctaaattagcaaaaaacttatactataatgtttttgtatctgatacaaattctaaaatcgatacatctatgattggtgatttagaaaatttaggtgttgaaatagagcttggtaaacatactaataagattttgaattcagatataattattaaatcgcccggtatttcaaatgatattgaaatattaaaaaaaataaaagaatctgatattcctattattagcgagatagagtttgccggaatgatatcaaatgttaaaaatatttgtattactggaacaaatggtaaaacaactacagtttcattgattgatcaaattttaaaagaagatttaaatgttttaaaatctggaaatattggaatacctttctctcaaattgttcttgaacatagactatatgataaaaatgatattgattattgtattttagagttatcaagttttcagcttgaacattgttctcatttaaaaaaagagatttcagcctttattaatatttcaaatgatcatttggatagatatgaatcttttaatgattacttcaatacaaaattaaaaatttttgaaaattcaaaatattgtttttttaataatgaagataaaattttaaaagaaaaaattaaaaatgacaatatcgataaagaaccattttcaactcaagaagataaaggaaatttcttttttgataataataaaatcttttctaatgatagaagtatatcaataaacatagatgagatttcaataaaaggtattcataatatttctaatataatgattgcagctgaaatagctcataaggttggtattaagaaagaaaatattttcaaagctataaagaattttaaaggattagaacatcgatttgaatttcttaaatcatttaatagcatagattatataaatgactcaaagtcgacaaatgttgactcaacagttaaagccttaaaatcaatcacgaaaaaagtagttttaatacttggtggtattcctaaagaaaatgattttaatgagattcttttatataaaagtaaattcttaaaaatagttgtatatggtgaagcaaaggacctgatttatgattccctatctcaagaggttgaagttctaaaaattcattcatttgatgatgcagttcatatagccataaagaatgcaattaaagatagcgttgttttactttcccctggctgtgccagctttgatcaatttaataattatgaagagagaggaattaagtataaaaatattattgaaaggttttatgcatga

SEQ ID NO: 313650 - DNA, 1000 bp, Unknown
  Bacterial polypeptide expressing nucleotide sequence isolated from the Sargasso Sea
cggccttgccagcgtaaaggcattgatcaattccggtgccgtcgtctgggcgtgggatgacaatcccgcaggccgcgaacagatcgaaccactgggccttgccccgatcaatctggcggaatgtgactggaccgaacccgatatgctggtgatcagcccgggcatcccatccaccttcccgaccccgcatccggccgcggaaaaggcacgtcgggcgggcaagccgatcatttgcgatgtcgaacttctgtgcaccgcacagccagacgttccgacactggcaatcaccggcaccaatggcaagtcaacgacgaccgccctgaccgcccatatcatttcgcaggccgggatcaaaacccaggcgggcggcaatcttggcaatgcggcccttggccttgaaccgtcaacagccgatgattgccttgttcttgaactgtcatcctatcagcttgatcttcttgaacatgcggcctttgatgcctgtgcgctgttgaacatcaccccggatcatcttgaccgtcatggcggaatggatggctatatcggggccaaacgccagatctttgcgcgtaacaagggtccgaaatgggcgatcatttcggttgatgatgaaccttgtgccaagatggcggttgaactggcccgcgaaggcggacgtcacattatcgaagtatcggtcaaatccccggtcgatcacggcatttatgtcgatgaaaagggttggctgattgatgaccttacgggtgccaaaacgccgatccttgatcttgcgaccgtaacccacatgccgggcaaacataactggcaaaacatcgcctttgcctatggcctgtgtcgggcgcgcggtgttgatgccacccgtatcattgacgggatcatgacatttccgggccttgcccaccggcaggaacgtctgggtacgattgataatgtcattttcgtcaacgacagcaaggccaccaatgccgaggcatcggcaaaggcgctttcggcctatcag

SEQ ID NO: 313651 - DNA, 955 bp, Unknown
  Bacterial polypeptide expressing nucleotide sequence isolated from the Sargasso Sea
cgagatcgcggttgccgggtggtgggcgaggtcgagctggcctgggaggccatgtcgggcatcccctggatcggcatcactggcaccaacggcaagaccaccgtcacctcattggtggcccacctactgcaacaaggagggctcgatgcaccggcctgcggcaacatcggcgcgtcagcggctgaattagcactcgcctgcctggagggggagcggcctgaacgggttgtcgtggaactcagcagctatcaaatcgaagccgcgccatccgtacggccaagcattggcgtctggacaacgctgacgcctgatcatctcgatcgccacggcacgctggagcgctaccgcagcatcaaggctgggctcttgcaccaatgccagcggcagttcctcaatgccgacgacagcgatctgcatgcccatgcagccgagtggccccaggctctttgggtcagcggaggtgacaaaagcagctttatcggtggcatgcgtccccatctgtgggtcagcgaagggcatctctgctctacccaaggaccactctttccctgtgcagccttggccatgccaggggcacacaaccggcaaaacctcgccctagccactgcagtagcgctcgagtgcggtcttaatgccgctcaaattgaagcgggctgccgcagcttcccaggtgtgccccaccgcttggaacgcatccgtgaactcggcggcattgcttattacaacgacagcaaagccacgaattacgacgcttccctcgttgctctccagtcacttgagcgcccccttgtggtgcttgccggaggacgcgccaaacggggggagcccggcgcttggctcgaggccctctcgcaaaaggcagctgcagtggtgctgtttggtgaagcgcgtcccacattccaagagttgctgggcagcactggctaccccggcgtgatcgagcagcaggagcacc

SEQ ID NO: 313652 - DNA, 793 bp, Unknown
  Bacterial polypeptide expressing nucleotide sequence isolated from the Sargasso Sea
cgctggtgcgcgcggcacggctgtcggctgcgtgtggccgatacgcgtgaggtaccgccgaacctgtccgcgctggaagcgcacagcgtcgacgctgaattcgtcggcggcccgttctcgctgtcattgctcgaaggcgtcgaacttgtggcgatcagcccgggtttgtcgccgctcgccgccgatttgctgccgctgatctcggccgcgcgtgagcaggacatccccgtatggggcgaactcgaattcttcgcgcaagcgctgaagacgctcggcgaaagcggttacgcgccgaaggtgattgcgatcaccggtacgaacggcaagaccacgacgacgagcctcaccggcctgctgtgcgagcgcgccggcaagaaggtggcggtggcgggcaacatcagcccggctgcactggacaaactcagcgaagcaatcgacaacacggcgctgcccgacgtgtgggtgctggaactgtcgagcttccagctggaaaccgcgcacaccttttctccggacgcagccgtcgtgctgaacatcacgcaggatcacctggattggcacggcggcctcgacgcgtacgccgccgcgaaggggcgcattttcggaccgcaaaccgtgcgtgtgctgaaccgcgacgactcgcgcgtgatggcgctggcgcctgcggccgactccgacgcagcgatgatcactttcggcgtcaccgaaccaaagaacgacggtgactacggtctgttgcgcgagaacggcatgatctggctggtcgaagcgcacgatctcgacgccagcgacg

SEQ ID NO: 313653 - DNA, 517 bp, Unknown
  Bacterial polypeptide expressing nucleotide sequence isolated from the Sargasso Sea
gttggccgacgatgtcgaactgtacgtgctggaactgtccagtttccagctggaaaccaccgatcagctcaatgccgaagtggccacctgcctgaacatcagcgaagaccacatggaccgatacagcggtctaccggcctatcacctggccaagcatcggatcttccgtggcgcccgtcaggtggtgatcaaccgcgacgacgcgctgtcgcgcccgctgatcgccgaccaggtgagctgctgggaattcggtctgggcaagccggacttcaagcgctttggcctgctcgacgagaatggcgaaaaatccctggcgtttcgcttcgaagcgctgctgccggtgagtgagctgaagattcgtggcgcgcataaccagtccaacgccctggcggcgctggcgctcggtcatgccgtgggcctgccgatggacgccatgctcgccaccctgcgccagttcgccggtttgccgcatcgctgccagtgggttggcgagcgtgccggggtgagttattacgac

SEQ ID NO: 313654 - DNA, 496 bp, Unknown
  Bacterial polypeptide expressing nucleotide sequence isolated from the Sargasso Sea
ttggctctcgcggttgatatcgatttagacgtaattagatcggcacttacagatttttctggcctgccgcatcggtgccaatgggttcgtgacatctccggaataggtttttataacgactcaaaaggaactaatgttggtgcaacgatggccgctatcgaaggcttaggtcagcgcattactggtcatgttgttttgattgcaggaggtgttgcaaaaggagctgacttcagttcactggtgcccgttttaaatagatgggctaaaggattggtgttaattgggcaagatgctgaagcggtagcgtcaagttttcatcgggatatctcaactaattttgcgattgatatgcaagatgctgttgctatagcaaagaaaaaggcgtcgccgggagacgtagtcttgctttcacccgcatgtgcgagctttgatatgttcagagattttcaacatagagggcaagaattcatcgattcagtggaaaatttgtcatgac

SEQ ID NO: 313655 - DNA, 852 bp, Unknown
  Bacterial polypeptide expressing nucleotide sequence isolated from the Sargasso Sea
tgatgctgttatcgttggtcttggtaaaacaggattatcgtgttttcgatacttatttaatcagggcttgaacatcgccatcacagattctcgcctagaaccacccgaattatcaaaattaaagaaagaattcaaaacagcttcgatttatttgggcgagattagtgagaaagtcttacttgcatccgatcagataattttgagcccaggtgtttctctaaataataaaagcattagattgccgattaaaaaaagtataccggtaatcggagatatagaattattttgtcaaaaagcacaggctccaataatagctgtaacgggttcaaatggtaaaagtacagttacaactatagttgctgaaatgacgcgtttagctgggctgaaaactctcattggtgggaatattggagtacctgctcttgatttgttgagtaagaatattccagatttatatgtactagaattatctagttttcaattagaaacaactttttcattagatgcgcatgcaagtgtgctcttgaatatatcgccagatcatatggatcgttattctagtctaaaggaatatgtaaatataaagaaaagaatttattcaggacaagggttaatgatattaaacaaagatgatgaatatattaattcaatgattgataaaaaaagaaaaaatatttttttcacacttggatctccagatggagataattttggattagttaactatgaaaatgaaatttggttaagccgtggaagtgaaaaaattattgagagaaatgagctaggcataaaaggtgaacataatatcagtaatgcattagctgcaatggcattggctcatacggtaaatgt

SEQ ID NO: 313656 - DNA, 796 bp, Unknown
  Bacterial polypeptide expressing nucleotide sequence isolated from the Sargasso Sea
ctttcaaattggaataactggaactaatggaaaaagtacttgctgctatcacttgcatcagcttttagaagaatctcaattagttgggaatattggcgcaccagttttagataatattaattcctgtcgatattcaatagttgagctttctagctttcagcttgagaagatgaaagagattcagctagatttaggagttctcttaaatatttctcctgatcatattgaccatcatgcaagttttgaagagtacaagaaagttaaaaatagaattaaagaatcaaaaaaaacaacagaagagtctaatccaaaaaaattatggtcgatgattactggtagacctcgaagattagtgcaagatattgagttaaaagatttgcctcataggcatcagctcatacccacgaatgatcatatggtatttatcaatgactctaaggctactaatttgaatgcacttcagtttgcattaaataaaatgtctaatccttatgtgttgatcctttgcggagatccagataaagaacgatatgaaagctatgaaattgaaggtccaacaagggtatacatttttggtaatcatgcagaagaaatatcaaagaaaatatttcacccaaaaaaaatcttgttccataatcaaggtctttcatctgtaatgagatcaatacttaaagaaaaatatgattttcaaactcacatacttttttcacccggacatccaagcggtcaagattataaaaactttgaagagcgaggggatcattttataaagcttgcaatgagttcaaatgattga

SEQ ID NO: 313657 - DNA, 806 bp, Unknown
  Bacterial polypeptide expressing nucleotide sequence isolated from the Sargasso Sea
agatcatctggataggtataataataaattggaaaattatgttgatgcaaaatttaagataataagcaatcagaaaagctcagattactttatttacagtggagattgtagcattactacaaacaaaattaacaatataaacagcatagcttcagctatttccttacatactagtaacaacaaaaatcaacagaacaactatttaattcataacaaaaataaaattaaatcatccataaataacaatgaaaatatgatagatattactaaaagctcattacttgggctacacaatgttaaaaattcaatggcagctattgctgtttcagaaattttaaatatttcaaataaaaaaatcattgaaagtcttaaaacttttcagaacgtagaacatagattggaacattttttaaccataaataaagtgaaatatgtaaatgattcaaaagcaacaaatgttaacgcaacattttatgctttaaattcatttaaaaaaccaatagtttggattgttggtggtgtagataaaggcaatgattatagtcaactagttcccttagttaagagtaatgttacagcaattatttgcctgggcagtgataatgacaaaataatttcaacattttcaaaacactgcagtcttattgtttctacaaacaaaatggttgatgcagttaaaagcgcatatgatatctcaaaacaaggtgatatcgttttattatcaccagcatgtgcaagttttgacttatttgaaaattttgagcaaaggggaaatttatttaaggatcaagtaagaaaattatgag

SEQ ID NO: 313658 - DNA, 1492 bp, Unknown
  Bacterial polypeptide expressing nucleotide sequence isolated from the Sargasso Sea
gatggtgctcgtactggggctcggggaatcgggtctcgcgatcgcgcgatggtgcgcgaggcacgggtgccggctgcgtattgccgatacccgcgaggcgccgccgaaccttgccgcgctgcaggccgaaggcatcgatgcggaattcgtcggcggggcattcacgcctgcgctgctcgacggcggcgtcgagctcgtcggtctgagccccgggctgtcgccgctcgaaccggcgctcgcggcgctggtcgcggccgcgaacgagcgcggcatcgcggtgtggggcgagctggaattcttcgcgcaggcgctgcgtgcgctcggcacgagcggctaccagccgaaggtgctcgcaatcacgggcaccaacggcaagaccacgacgacgagcctcaccggcctgctgtgccagcgctcgggcaagaaggtcgctgtcgcgggcaacatcagccccgcgatgctcgaccggctcgccggtgcgatcgacgaaaccgcgctgcccgacgtgtgggtgctcgaactgtcgagctttcagctcgagaccgcgcgcacgttcgcgcccgatgcggccgcgatcctcaacatcacgcaggaccacctcgactggcacggcagcttcgacgcgtacgcgcaggcaaagggccggatcttcggcgcaacgaccacgcgcgtgctgaaccgcgacgatgcggccgtgatgaagttcgcgccggcagccggcgcggccgatgcgccgcgcacggtcacgttcggcctgaacgaaccggtgcaggacggcgactacggcctgtcgcgcgacaacggcatcgcatggctcgtcgaagcggtcgatcgcgacgcaccggatgaaaccgcgacgacgacccgtcggcgcaagcgcgatgccgcgcatacgcccgacatcgcgcagaagcgcctgatgccggccgatgcgctgcgtatccgcgggctgcacaacgccgcgaacgcgctggccgcgttcgcgctcgcacgcgcgatcgacctgccggccgcgccgctgctgcacgcgctgcgcgagtatcgcggcgaggcgcatcgcgtcgaagtgatcgcgacgatcgacgacgtcgactacgtcgacgacagcaagggcacgaacgtcggcgcgacggttgccgcgctcgacgggcttgcgcagaagatcgtgctgatcgccggcggcgacggcaaggggcaggatttcgcaccgctggtcgcgccggtcgcgcgctggtgccgtgcggtgatgctgatcggccgcgatgcgccggcgatccgcgacacgctcgccgaaacgggcgtgccgctcgccgaccacgcgacgctcgaaggcgcggtgcacgcggcggccgagctggccgagccgggcgatgcggtgctgctgtcgcccgcatgcgcgagtctcgacatgttcaggaactacgcccatcgcgcggatgtgttccgcgcggcggtcgacgaaatcgccatcgacaaaggagcgacgccatga

SEQ ID NO: 313659 - DNA, 574 bp, Unknown
  Bacterial polypeptide expressing nucleotide sequence isolated from the Sargasso Sea
gatgccggccgacgcgctgcgcatccgcggcttgcacaacgcggccaacgcgttggccgcctacgctttggcgcgcgcgatcggtttgcctggcgcgccgcttttgcacggcctgcgcgaataccgcggcgagccgcatcgcgtggaattgatcgcgtcgatcgaaggtatcgattatgtcgacgacagcaaaggcaccaacgttggcgcgacagttgccgcgctcgatggtctcgcgcaacgcgcggtgctgatcgccggcggcgacggcaagggtcaggatttcgaaccgctcgcggcaccggtaatgcgttggtgccgcgccgtgatgctgatcggccgagacgcaccgcagattcgcgccgcgctggaagacaccggcattgcaatgaccgaccacgcgacgctcgaagaagcgacgcgggccgccaccgcattggcgcagcccggcgacgccgtgctgctgtcgccggcttgcgcgagcttcgacatgttcaagggttacgcgcatcgcgcagcggtgttccgcagcacggtggaagagatcgcggctgaacgggggacgatgatatga

SEQ ID NO: 313660 - DNA, 1321 bp, Unknown
  Bacterial polypeptide expressing nucleotide sequence isolated from the Sargasso Sea
atgcaaagtcagtattcacacatagtgttaggtttgggtgccaccgggctctcggtagtgcgctatttgtgtggaaaagggatcacacccttggtgatggatagtcgtcgccaacctcccggtgcggacacccttgccagcgcattccctgaggtgcagctgattgccggcggattcgattgccgttacttagtgcaagcgacgcaaatcattatcagccctggcattgcgattgatacacccgaggtgcgcgctgcactggatatggggattgaagtcattggcgatgtggagctatttgcccgtgagattgccgaccgtaaaccttgtgtgattgggattactggctcaaacggcaagtcgaccgtcaccaccttagtgggtgaaatgctgcgtgaagccggcatggcagtggccgtggggggcaacattggcattccggcgctcgatctgctgacggaaaatgccgatatttttgtgcttgagttatcgagcttccagctcgaaaccacccacagcttgaactgcgtggcgtcgacctgcttgaacgtgaccgaagatcatatggacagatacagcgatatggatgcctatcgcaaggccaagctgcgtctgtaccatcaaagccgctccatcatctttaaccgtgatgatgcgctgactatcccgactgagccgatgaaccaaaacagctttggtttagcgccgccagagggcgacgagtggggcatttgtgatagcaagatttaccacggtcacagtgaaattatgccgatcaccgaagtatcgctgattggtagtcataaccatgccaacttactcgctgccatggcgctggtgtatgccgtgggcgtagataagcaagtcatggctaaagtggctcgtacctttactggcctttctcatcgctgtgaagtggtcggtgtgaaagcgggcgtgacctatgtgaacgattcgaaggcgaccaatgttggcgccaccgtcgcggcgctcgatgggttaagtgatcacttaggtgacattattttaattgccggtggtgatggtaagggcgcggatttcagtccgctagtcgagccgttaacgaaagtgacgcacctcatcaccttaggtcgcgatggtaataagatagccgcattgaaggaaggggccattaaggtggactctatggctgctgcagtggctaaggccgccgagttagccacctcgggcgatattgtactcctatcgccagcctgtgcgagcctagatatgtacagcaattttatggctcgtggggatgattttagaagccaagtggagcaacttgatggcgagtgat

SEQ ID NO: 313661 - DNA, 1333 bp, Unknown
  Bacterial polypeptide expressing nucleotide sequence isolated from the Sargasso Sea
atgataaagaacgtaacaatacttggtgctggagaaagtggatttggggcagcaatgttagcttcaaaaaaaggttttaatgtttttgtgtcagattttaattatatagatgataatataaaattactttttgaagatcactcaattaaatatgaagagaataaacattctattgataaaatacagtcttcagatttaataattaaaagtcctggaataccaaattcctctgatataataattaaaatcaaatccttagaaattcctataatctctgaaattgaatttgcaagttctaactcaaattcatttaaaatatgtataactggtacaaatggaaaaacaacaactactaatttaatttataatattctagaagctgcaggtcttagtgtaggcattgcaggtaatgttggagatagtttctccaaaatgttgctttcaggagataaagatatatatgtattagagataagtagttttcaattagacgatatcaaagattttaaaccaaatatatcagtgattactaatgtgttggaagaccatctagataggtatgattttgattttagtaaatacatagatgcaaaaatgaaaatcatatcaaatcaagataactctgactatttgatctataactctgatgataaacaattagttgaggcattagatagagataattcaacagttaaaagaatttcatatggtattcaaaatcaaaacaaaaacgtaataagtaataaaaaaaatattctgtcaaacaaaaaaaaaacaattatgataaatacagaagaacttgcattaaaaggaagacacaatttgcttaatgctatggctgcattaacagtctcagatttattaaaaattgaaaatgaaattataagagaaagcttaatgagtttttcgggacttcctcacagattagagaattttttaaaaatacaaggggttaattacattaatgactcaaaagcaactaatgtaaatgcagcatattttgctctagattccatgacctcaccaaccgtatggattgcaggaggagtagataaaggaaatgactattctgaattattaccaattgttagagaaaaagtgaaagcaataatttgtttagggattgataacacaaaattgttagagacatttaagccaatatctgaaataattgtagagactgagtcaatagacgaggcagttaagattgctagtaaaattgcggaaaaaaaggataatgtacttctatctcctgcatgtgcaagttttgatttatttgagaactatgaagataggggaaatcaatttaagcaagcagtaagaaatttataaa

SEQ ID NO: 313662 - DNA, 1041 bp, Unknown
  Bacterial polypeptide expressing nucleotide sequence isolated from the Sargasso Sea
ttactaaggcagttacaattggaatcaccggaagtaatggtaaaaccaccacaacaatgttaacataccatttgcttaaacaaggtggattaaatgtagggttagcaggaaatattggaaaaagttttgcttggcaagtagccgaagataaagtagatgtctatgttttagaattgagtagttttcagttagatggtattcaaacatttaaaccacatattgctgtaattacaaacataagtccagatcatttagacagatataattatgattatggtctttacattgaagcaaaatttagaattacaatgaaccaaaatgaagatgattatttaatatatgacaatgaagatgaagctatttctttttggttaaaaaataataaaacaaaagcaaaaaaaatacctttttcattaacaactaagttggaagaaggaagttacttagaaaacaaaacccttataaatataacaaacaacaaacaaattaatatgccaacatcgaacttatcactagacggaatgcataatgtgaaaaatgcaatggctgcaacaactgtagctcagcttatgaacattagaaaacaaacaatcagagagagtttgtcaaatttccaaggagtagaacatcgtttagaaaaagtattgaaaattgaaaatgttcagtacatcaacgattcaaaagctactaacgttaatgccaccttttttgccctagaaagtatggaaaccccaacagtatggattgttggtggtgtagataaaggaaacgattacactgaactaatgtcattagtcaatgaaaaagttaaagcaattgtttgtttaggagtggataataaaaaaatcatagattcattcaataatattgttgatatcatggttgaaacatcttcaatggaacaagctgttaaagtagctcaaaaattagcagaaaaaggagataccgttttgttatcaccagcttgtgctagttttgatttgtttgaaaattatgaagatagaggtaataaatttaaaagtgcagtaagaggtttataat

SEQ ID NO: 313663 - DNA, 1036 bp, Unknown
  Bacterial polypeptide expressing nucleotide sequence isolated from the Sargasso Sea
catgaaatcccttatttatggttatggtaaaactggaaaatcatttgcaagatttctagaatctaaaaaatacaagtttgatatatacgatgataatttgccaaaatactctaaaaaaattgatttaaaaaaatataatcaaattttgtgcagcccaggtgttccaaaaaatatctttgaaaaaataagaaatattaataaaaacgttttaactgatcttgatattttttttcaagaagatacttcaataaaaattggtattacaggaactaatagaaaaagtacaacagcatttcatctataccaactttttgaaaagtttgagccagctaatctcataggaaacattggaaatccaatgcttgattgtataaatacaaaaaaatattcgattatcgagctctcaagcttccaattggacaagatgattaccaataaacttgattttgggatacttctaaatattcagactgatcatcttgactatcatggcagttttgagtcttataaaatagccaaggagagaattcttgatgcaaaaaaaagtatctcttttgaagataacccttatgatttatttgagtggataacaggccaaaaatcatcagaaattaatttaaaaaatcttccatacagactccaacatatttcaaaaaacattattaatgactcaaaatctacaaactatcactctttatattatgcagtgaaaagagcaaatgaaatctttttaaataatggatatgttcttattgtttgcggttctccaaaaaaggaagaatttagaaagattaacattaaaggaccagatcaaatttatatttttggaaaacatgctaaagagataaataaatgtattaaaaataataacaaaaaagttttcatcgaactctccgatgtcgttaaccatttaaacaaacataaccaaaaaaatattttattttcacctggctatcctagtggagacgacttttcaaattttgaagaaagaggagtcgcatttaacaaaattattggaaatttaaatgaaaattga

SEQ ID NO: 313664 - DNA, 1321 bp, Unknown
  Bacterial polypeptide expressing nucleotide sequence isolated from the Sargasso Sea
catgcaaagtcattattcacacatagtattaggtttgggtgccacagggctctcggtagtgcgctatttgtgtggaaaaggcattacgccgttggtgatggatagccgtcgccagcctccaggtgccgaaacactggcaagttcattccctgaggtgcaattaattgctggcggatttgattgccgttatctagtgcaggcgacgcaaatcattatcagtcctgggattgcgattgatactcccgaagtgcgcgcggcactggatatggggattgaagtcattggtgatattgagttatttgcccgtgaaattgctgaccgtaaaccatgcgtgattgggattacgggctcaaatggcaaaacgacagtcaccaccttagtgggcgaaatgctgcgagaagcaggcattgctgttgctgtgggaggcaatattggtactccggcgctggatttgctgcaagagaatgcggatatttttgtgcttgagttatcgagtttccagctggaaaccacccatagcttgaattgtgtggcctcaacctgtttaaacgtgacggaagatcatatggacaggtacagcgatatggatgcctatcggaaggccaaactacgtttgtatcatcaaagtcgttccatcatttttaaccgtgatgatgcgctgactatcccaactgaacccatgaaccaaaacagctttggtttagcgccgcctgaaggcgacgagtggggcatttgcgacagcaagatttatcacggccacagtgaaatcatgccaatcaccgaagtgtcgctgattggcagtcataaccatgccaacctacttgctgcaatggctttggtctacgcggtgggtgtggataagcaagtgatggccaaagtggctcgcacctttactggcctttctcaccgttgcgaagtggtaggggtcaaaggtggtgtgacctatgtgaatgactctaaagcaaccaatgtgggggctactgttgcggcccttgatggtttaagcgatcacctcggcgacattattttgattgctggcggcgatggtaaaggtgcggatttcagtccactggccgagccgttaacaaaagtgactcacctcattaccttaggtagagatggcaataagattgccgcgctgaaagaaggcgctattaaggttgattcaatggctgccgctgttgctaaggccgctcaattagcgacttcgggtgatattgtgttgttgtcgcccgcctgtgcaagtctggatatgtacagcaactttatggcccgtggtgatgattttagaagccaagtggagcaactcgatggcgagtga

SEQ ID NO: 313665 - DNA, 751 bp, Unknown
  Bacterial polypeptide expressing nucleotide sequence isolated from the Sargasso Sea
cgctggggcttcgcagtatcgcgccgccaactgcgcgtttatgagaacgcccgggcctgtatcgtcaatgccgacgatgcgttaaccatgccggtacgcggcgctgacgatcgctgcatcagcttcggcgttgacgttggcgactatcacctgaaccgccagcagggagaaacctggctgcgcgtcaaaggcgagaaagtgctcaacgtcaaagagatgaagattagcggccagcataactacagtaacgcgcttgcggccctggctctggcggacgcggcgggtctgccgcgcgccagtagcctgaaagcgctgaccacattcaccgggctggcgcatcgtttccaactggtgctggagcacaacggcgtgcgctggatcaacgattctaaagccaccaacgtcggcagtactgaagcggcgctcaatggactgcatcttgatggaacgctctatctgctgctgggcggcgatgggaaatccgctgatttcacgccgttaagccgttacctgaccggcgacaacgttcgcctgtactgcttcggccgcgacggcgcgcagctggcggcccttcgcccggacgtcgccgtgcaaacggaaaccatggagcaggcgatgcgccagattgcgccgcaggttgtcgcgggtgatatggtgctgctgtctcccgcgtgcgccagcctcgatcagtttaaaaactttgaacaacgcggcgacatctttgctcgcctggcgaaggagttaggttgat

SEQ ID NO: 313666 - DNA, 1327 bp, Unknown
  Bacterial polypeptide expressing nucleotide sequence isolated from the Sargasso Sea
catgaacgctaagttgttccagggaaaacgtgttgctgtgataggactaggcctttcaggtctggccacagtacgctttttgctgaaacaaggtgtaaaacctgtactgatggatacccgtttaaaggtatctgaattggagcagatcccagtcgacaaagtggacggtatttatttaggtgaactggacgccaaccgtttagctcatatggatgtgttggtggtcagcccaggcttagatcctaaacatccggctatacgttttgctttagcacaaggtgctcatctgattggcgatgtcgagctgtttgcactgcaaaaccagaaacctgtgctggctattaccggtgccaatggcaagtcgaccgtcaccagcttaactgctcatatgctgcaatgttccggcttacatgctattgcagccggcaatattggtttgcctattctggatgcgctgcaaagcgatgctgatgtatttgtactggagctatcgagcttccagttggataccactcattctttaaaaagcaaagcggcctgtattttaaatgtgactgaagatcatatggacagatacggcactatggccgcttatgctgcgtccaaacaacgggtgtatcagggcacagatctggcgatttacaataaagccgatggcttaactacaccaaaaactccggtgcctgctctggctttagatttagcaggttctgactacggcgtggttcagtatcagggcgaaagctggttgttagtgcagggcgagcctttgatgccagtgcgcgatatgaccatagtgggtttgcataatcagtttaatgccctggcaagctgcgctttagctttagcggctggtgcaagccgcgaaggcttagtcaaagcgctgcagacctttacctcattaccgcaccgttgccagttagtgctggaccataaagctgtgcgttgggtcaacgactccaaagccaccaacgtaggcgctactcttgccgctattgcagggttacgtcctgaagtttcaggcaaactgattttaatagcaggtggtgatggcaagggcgctgatttcagcgaattggccacagtgctgaataatgatgtcgatcatttaattactttaggccaggacggtcctgctatagctgcgctcaaagccggtagctttgaagtgaaagatttaatggcagcagtcaaaactgcggctcaactggccacagccaatgatctggtattgctgtcaccagcctgtgccagcctagatatgtttaaaaattacgaagaccgcggccagcagtttgccgcagctgtgcagaaggtgtggttatga

SEQ ID NO: 313667 - DNA, 1063 bp, Unknown
  Bacterial polypeptide expressing nucleotide sequence isolated from the Sargasso Sea
atgaaagcccttatttttggttatggagttacaggccaatccatagaaaggtatttgaaaaaaaaaggtaaagcttacgaaatctatgatcaaaatgtgaaaggacctaatatctttaataaattgcccaatcaaaaaaaattagattcatatgagacagtttatttgagccccggaatcaatataaagaaaatttatgcaaatggagaatttaataaaattccatatttaactgatatagatattttttttaaagaggataattcatacaaaattggaattactggcactaatggaaaaagtacttgctgttatcacctgcatcagcttttagaagaatctcaattagttggtaatattggcgcgccagtactggataatattaattcttgtcgatattcaataattgagctttctagctttcagcttgagaagataaaagagattcatctagatttcggagttctcttaaatatttctcctgatcatattgatcatcatgtaaattttgaagagtataagaaagtaaaaaataaaatcaaagaatcaaaaaaaacaacggaagagtctgatccaagaaaattatggtccatgattactggcagacctcaaagattagtgcaagatatccagttaaaagatttgccccacagacatcaatacatagttacgcgtgatcaaatggtatttatcaatgattctaaggcaactaatttgagcgcactaaaatttgcattaaataaaatgtctaacccttatgtattgatcctttgcggagatccatataaagaacaatatgaaagctatgaaattgatggcccaacaaaggtttatattttcggtaatcatgcagaagagatatcaaggaaaatatttcatccagaaaaaatattgttccataatcaaggtctttcatctgtaatgagatctatatttaaagaacattatgattctcaaacccatatacttttttcacctggtcatccaagcggtcaagattatcaaaactttgaggaaagaggagatcattttataaagcttgcaatgagttcaaatgattgat

SEQ ID NO: 313668 - DNA, 531 bp, Unknown
  Bacterial polypeptide expressing nucleotide sequence isolated from the Sargasso Sea
catggtcatcatcatcggactcggcaaaaccggactctcctgcgtcgactatttcctcggccgtggcgtgacgccgctggtgatggacacccgcgccaacccgcccggcagggatcaactgcctgccgaggtggaactcatccacgggctggatggcgagctgctcaagcaggcgcacatgatagtggcgagcccgggcattgccctggcaacgcccgaactgcaagcggccgccgagttcggggtgcgcatcgtcggcgacatcgagctgttcgtgcgcgagacccaggtaccggtgattgccatcaccggctccaacggcaagagcactgtcaccaccctggtgggcgagatgatcgccgaagccggcctcaaggtcggggtaggcggcaacatcggcacgccggcgctggagctgctcaagcagccgatggatctctgcgtgctggagctctccagcttccagctggagaccacccacagcctgcgcgctgccgcctccgtggtattgaacctctccgaagatcatat

SEQ ID NO: 313669 - DNA, 1297 bp, Unknown
  Bacterial polypeptide expressing nucleotide sequence isolated from the Sargasso Sea
gttgaataaaatccccgctatcataggacttggcaagacaggaatttccctagccaaatatctatctaaatctaataacactttattcatatacgagtcttcactaaatagtcaatccttaaaagaattaaaaggtatagatatagatttcgtgcttaatcctgaattgtcagacaatatctttaactcgatatcagtcatctatccaagcccaggcattagtaaggatcacgaaatattcaaatatgcaaaggacttcaatatacccgtgcagactgatatggatatatatttaaatagtagttcaagcttcaagattttaataactggaactaatggcaaaactaccactgcatgtatgttggaacatctattgaaagaacatttaaaagatatgtcagtagaggtaatgggcaatataggtaagccagttttagattttttagataaaaaaattgatgttgccataattgaaatttcaagctttcagattgaatcatgctcaaagctaaattcagatataggaattttgttaaatatagaagaagatcatatggatagacataaatcctttaaaatttatagatctataaagagacgtgttcttgctgaatctaatataaatatttcttacaaagaacagcaaataaaaggcaataaattttatgattttgaagatttcttttcagaatttgacttctcaaataactccgctttaaagaattggccaacacatgatatttctaatctaaaagctgcattattagctagtgctttaaccattaagcatatagaagagaatgaagtacctgacttaaacaattttttaagtaagtcccttgaaagaatgtcttcttttaataaaaaagcacataggtttgaaatgattgaggatgaagaaggagttcttcatattaatgattctaaagcaactaattttagtgcaactgtgcaatctattgaatccagtagtaacttaaataaagaaggagacatctatttgttgtgtggtggagattttaaaagtcaaagcattgataaagttaaagctactatttttaacgacataaaaaaatgttttatctttggaaaggacaaaaaaatcctcgaagaattgctatcagatttcaccgactgtatttgttgtgacagcttagatgatggatatttcttagctaagcaggaatcaacaaacggagatattattttactttctcctgcttgcgctagcatagatatgtttaaagattatcaggatagaggaaatagattcaaagaattaatgaaactaaattaa

SEQ ID NO: 313670 - DNA, 310 bp, Unknown
  Bacterial polypeptide expressing nucleotide sequence isolated from the Sargasso Sea
ggctcacatcaccggtggtggacttccggaaaacctcccccgctgcctgccggcgggatgccgcgcccaggtgaatccatccagctgggctcccccctccctgttcgattggcttcaacacgctggtgacattccagagcgagccctctggcacaccttcaatcttggagttggattctgtcttgtagtgccggaggaccaaaccaacctggcgattgaaacctgtcgtgcccaacagctgcaggcctggccgatcggcagcatcgtgaagggcaaccctgaagacggagtgatcggcctcccggactag

SEQ ID NO: 313671 - DNA, 361 bp, Unknown
  Bacterial polypeptide expressing nucleotide sequence isolated from the Sargasso Sea
aatgaataaaaaaaaatttacctataaaaaaagtggagttaatatcaaagctgcagacaagtttgtgaatttcatttctacaatttcatcaaaaaaaagaggcaaaaaaaagttttctaatataggtgggtttggctctataacaaatataccaagtaatattaaacaacctaaaatcgtagcttgcacagatggtgtgggaaccaaaattgaaattgctaatacattaaataaatttgataccattggaattgacttggttgctatgagtgtaaatgatttaatcgtgcaaggagctaagcctttactttttttagattatatatcaataaacaaaattgatcttaaaaaacttaaagca

SEQ ID NO: 313672 - DNA, 397 bp, Unknown
  Bacterial polypeptide expressing nucleotide sequence isolated from the Sargasso Sea
atgaataaaaaaaaatttacctataaaaaaagtggagttaatatcaaagctgcagacaagtttgttgatttcatttctacagtttcagcaaaaaaaagaggcaaaaaaaagttctttaatataggagggtttggctcaattacaaatataccaagcaatattaaacaacctagaatcgtagcttgtactgatggtgtaggtactaaaattgaaattgctaatacattaaataaatttgatactattggtattgatctagttgctatgagtgtaaatgatttaattgttcaaggagctaagcctttactttttttggattacatttcaattaataaaattgataataaaaaacttaaagcaataataaaagggattaacaaaggctgccgtcaatcag

SEQ ID NO: 313673 - DNA, 316 bp, Unknown
  Bacterial polypeptide expressing nucleotide sequence isolated from the Sargasso Sea
atgaaaaaaacaaagaatagttataaaaaaagcggtgtaaatattgaaactgctgataaatttacaaaatatatagccagattttcaaaacaagcttttaaaaagaaaaaaaaatttataggtcaggatatcgggggatttggatctgtgtataatttcttgaaactaaaaattaaagatccacttctggtttcaacaactgacggtgttggtactaaacttgaaattgcaaataaatttaataaatttaattcgattggtattgatcttgtagcaatgtgcataaatgatttaatagttcagggagcaaaacctt

SEQ ID NO: 313674 - DNA, 267 bp, Unknown
  Bacterial polypeptide expressing nucleotide sequence isolated from the Sargasso Sea
attggctggtgttgatattgatcaagggaataagttagtagagcaaattaagagtgatgttgcctcaactcacaatgtcaatgtacttggaaacattggagggtttgctggaatgtataagcttagcaatgaatttaagaatcctattttagtggcgtgtacagacggagtcgggaccaaagttgctcttgctcaacaatatcaaaatcttaaaggcattggtcaagatctagtagcaatgtgtgttaatgaccttattgtgtgtgg

SEQ ID NO: 313675 - DNA, 379 bp, Unknown
  Bacterial polypeptide expressing nucleotide sequence isolated from the Sargasso Sea
acgaattataaagcccacgatcatatacagtaaatcagttctaagctgtcttgaaaaatatgaagtcaattcaatggcacacattacaggtggcggattcaaagaaaatattatccggtcaatcccagatggttttcaggcaataattgataaaaaatcatggaacttaccgtctgtctttcattggattcagggagaggctcatattgattctgatgaaatgcttaaaacattcaattgtggcattggatacgtgattgttgtaaaaaaggatattagagattctgtaatcaaccacttccaagatgaaggaatcgaagcttatgaaatcggatccatcaagagtggtgagaaatctgtgatcatcaatcatggttga

SEQ ID NO: 313676 - DNA, 519 bp, Unknown
  Bacterial polypeptide expressing nucleotide sequence isolated from the Sargasso Sea
catgaagctaacatttaatgctccatttacaatatcatacaccattatttcatgttttgtatatttcattttattagaaaacaacctttatgaaaacgcgttttttttaaatggaacctcaaactttaacaattgggaatggtacgctggaacaattggatacatcgttggacacgcaaatttcaatcatttagctagtaatttcatgtttatactcctattgggaccgatagttgaaaatcattatggttccttaaaactaactttaatggtattagcaacagctttgctaacctcagccattcatatttttttttgggatcacagaattattggtgctagtggaattgtttttatgttaataattcttgccgcccttataccttctaaggttaaagaaattccctttacctttttaattataatatgcttatacattgggaaagaaataataggctctttttctgaagactccgtatcgcattttgctcatataactggtggtattctaggcggtat

SEQ ID NO: 313677 - DNA, 337 bp, Unknown
  Bacterial polypeptide expressing nucleotide sequence isolated from the Sargasso Sea
tatgtaaatgagattttatctcttaaagaggtttgcagcatcaacggaatggctcatataactggcggaggcttaaatgaaaacctatcaagaattgctaatggaatgaccttgtgtgttgataaatcaaaatggtcagtgccagaaatttttgaagaaatcaaagcgcttggaaacataccagaagaagaaatgtttaacgttttcaattgtggaattggtttctgcttagttcttgataaagaaaatgctaaaaaagctattgaagaaaattcagaattaatagaaattgggtttgtctctgatagagatgaagttgactttaaatttatatgaa

SEQ ID NO: 313678 - DNA, 352 bp, Unknown
  Bacterial polypeptide expressing nucleotide sequence isolated from the Sargasso Sea
atgaataaaaacttatttacctataaaaaaagtggtgttgacattccagctgctgaaaaatttgtaaaatttataacaaatatatcgaaaaaaaataaagttaattcaagttttaacaaaattggaggttttggttcaataaatgaaatcccaaataaatttaaaaatccaaaaatagtcgcgtgtacagatggagttggtacaaaagttgagatcgcaaaccttttgaacaaatttgatacaataggtattgacttagttgctatgagtgtaaacgacctaattgtgcaaggagctgaacctatattctttttagactacatatcgatcaataagatgactaaaaaagtaa

SEQ ID NO: 313679 - DNA, 664 bp, Unknown
  Bacterial polypeptide expressing nucleotide sequence isolated from the Sargasso Sea
aaaaggtatatctaaaggttgtgagctagcagattgtaaattagtgggaggtgaaacggctgaaatgcctggcacttatgcaaaaggtaaatttgatttagcaggattttctgtaggttttgtaaataaaaaaaatatttttaaaaaagaaaatattagagataatgacttgattttagctattccatctagtggtcttcactcaaatggatattctttaataagatatataattaaaaaacataaaattaatattaacaaaaataattttttaaaaaaggaactaatcaagcctactaaaatttatacaaaagaaatacttgaattaaataaaaaaaaacttgtaaagagttgtgcgaatattactggtggtggtttaaaagataatcttaaaagaattattcccaaaggattaaaagcagaaataaatttaagtaatattaaaatattaaaaatatttaaatggattaaaaaatttgaaattgaggatatagaaatgttaaaaacttttaattgtggtgtaggtttttgcataataattaaaaaagaaaatctacataaggtaaaaaaacaatttagtaaaaagtataagccatacattataggaaaaatttctaaaggtaaaaaatcagtaattttaaatgaaaaaattaattggaaatag

SEQ ID NO: 313680 - DNA, 356 bp, Unknown
  Bacterial polypeptide expressing nucleotide sequence isolated from the Sargasso Sea
taactatagctctttaatcgggcaaattcttaataagggaattaatattaaaagtatttctcatattacaggcggtggcttggttgataatgttcctcgcgttattcctgaagatgtttctttggaggtcgatattaaatcttggaataaaataccaatatttgatttcttaaaaaataacctagatattgagacaaaagacttatatcaaacttttaatatgggggttggccttgtgtttattgtagaacaatcggagaaagacaggttaatttcgttaataggtaaagatagttgtagtaaaattggtgttgttgttaacgacagtgttaatgcggtgcatctttatggctaaa

SEQ ID NO: 313681 - DNA, 514 bp, Unknown
  Bacterial polypeptide expressing nucleotide sequence isolated from the Sargasso Sea
cgcattaaaaagtaacggaattcatagtaacggatttagtttagttagaaaaataattgaaaatactaaccaaattgagaagcaatttgaaaaaaagtaccacttagatttttatgatcaattattaaaacctacaaaaatttattttaaaattgtaaatcaaattttatctcagaatattcaaataaagggcatgtctcatatcactggagggggaattcctgaaaatttaccaaggtgtatgccctctgattttattccttacatagacacaaaatcttgggaaataccggctttatttgagtttttaaaggatgttggtcagattcctgatcaagacttttggaatacctttaatcttggggttgggttttgtttaataattgataagaaatataaggatgagattttaaatatttgtgatgctcatgaaatatcaagttgggtcttagggaaggttctcaagaaagataattcaaatgagaattattttttgcctgaaataataatttaa

SEQ ID NO: 313682 - DNA, 313 bp, Unknown
  Bacterial polypeptide expressing nucleotide sequence isolated from the Sargasso Sea
aatgaataaaaaaaaatatacctataaaaaaagtggagttaatattggtgctgctgataagtttgttaatttcatttctacagtttcagcaaaaaaaagaggcaaaaaaaagttttctaatataggggggtttggctctatcacaaatataccaagtaatattaaacaacctagaatcgtagcttgtactgatggtgtgggaactaaaattgaaattgctaatacattaaataaatttgacactattggaattgacttggtcgctatgagtgtaaacgatttaatcgttcagggagctaagcctttatttttt

SEQ ID NO: 313683 - DNA, 347 bp, Unknown
  Bacterial polypeptide expressing nucleotide sequence isolated from the Sargasso Sea
tttagcattgaaaaaaattgtctcaataaatgcaatttctcatataactggaggagggtttatagaaaatatcccaaggatgttaagtgaccatcaaaaggccattatcgaacatgaattcagtgactggccagcaggaaaatacttcgaatggcttatgcaaacagcagatatccctaaagaaaatatgcttgatacctttaattgcggagttgggctagtcttatctgttaatgaagccgatgaggaaaatgtattgggcgctctgaatcagagatattttgcgaaacgtatcggtagaattgaagataaagaagagaacgaagagcctattaattttgtctaac

SEQ ID NO: 313684 - DNA, 760 bp, Unknown
  Bacterial polypeptide expressing nucleotide sequence isolated from the Sargasso Sea
gatggtatggaatgaaaatcaaagtaatagatttgtctcgatagataaaagtgttgtaagaatagatgtcgtactcaatacaaatccatactcacagcaagcaattgacactatacctattctacgtaatcaagccaaaattgctgcatcaaatgtgggcatagctagtgaaagtatactgataggaggtgaaactgctgaaatacatgatacgcgcaatgcaaataatcgtgattcgatagttgttctcccattgatattacttgccataggtttcattttatcaatactacttcgatcgcttatagcaccaatctacctaatcgctacaattgcaattacctactttgcgaccttaggtctatctatgacaatctttaaattcatactagatcatgaaggtattggtacaggtgtagccttttatttgtttgtttttcttaatgcattgagtgtagattacaacatttatctgatgtcaagagtcaaagaggaagctaagagatctacactcaatgatgcgatacgtgaagctttgagtcgaacaggaggggtaattacttcggctggattaattcttgctggaactttctcagcactaatgttattacccctccaagatttgttccaattaggatttgccgtagcaattggcgtcctaatggatacttttattacacgtacgttaattgtgcctgctttaatttcacaattcggaaaatggaactggtggccaacaaaaataaaccagtcacaatag

SEQ ID NO: 313685 - DNA, 604 bp, Unknown
  Bacterial polypeptide expressing nucleotide sequence isolated from the Sargasso Sea
gaaatgccaggaacatatgaaaaaggaaaatttgatatcgcaggattttctataggtatagttgaccaaaataaaattttacacaaaaacaaaattaaaaaaaataatttaatattagcaattccatccaatggaattcattcaaacggatactcgttaatcagacatattttagctaaaaaaaaaattaatttaaaaaataattcatttcttaaaaatgatttaataaaaccaacaaaaatttatgtaagagaagttttaaaattaataaataaaaaatatattaatgggtgtgctaatattactggtggaggactaggagataatattaaaagagtcattcctcatggcttaactgcaaaaataaacctaaataatattaaagtattaaaaatatttaaatggttgaaaaataataatttaagtgaaaatgaaatgttaaaaacatttaattgtggagttggattttgtttaattataaattcaaaaaatttaaaaaaagtacaaaatactttttctaaaaattttaaaccgtatgttattggaaaaatagtttctggaaaaaataaagttaaatttaatgacaaaattaactggctttaaa

SEQ ID NO: 313686 - DNA, 310 bp, Unknown
  Bacterial polypeptide expressing nucleotide sequence isolated from the Sargasso Sea
tatgaaatcgcaaaaattcacatatagaaatagtggagtaaacataaagaatgcggataaatttatagatttcatttctaatttaaccaaaagaacaaagaaaagtggtgattttaagaatattgggggatttggagcaatatcaagcataccaaaaaactttaaaaatcctcacattgtaacaagcacagatggggtaggaacaaaactagaggtagcaaatgaaattaaaaaatttaacactattggcgtagatctcgttgcaatgtgtgtaaatgatttgattgttcaaggtgcaaaacctttttta

SEQ ID NO: 313687 - DNA, 616 bp, Unknown
  Bacterial polypeptide expressing nucleotide sequence isolated from the Sargasso Sea
gaacatccaggaagtttcccagacgatagctttgatttagctggattttctctaggagtggttgatgaagaagaaatgataggaacggatggtcctaaaaatggggatgtgcttattggtgtgtcttcctcaggcttccatgcaaatggattttctctaattagaaaagttcttgaaaactataaaatctctttagacgatgatattgagggtgaaagattagggacaatcttgcttaaaccaacaaatatatacgttcaagaagttctaaatttaagtaaattattaaagattagctctatagcccatataacaggaggtggtttttttgaaaatattcctcgaatgttaaataaaaatcagaaaaccgatataacgtttaactttagtgactggcctgcttataaatacttcaaatggattcaagatacagccaaaatatctgaagagaatatgttaaagacttttaattgtggaattggattagttattgccatctctcctgaagatgtagaaatggcactaggcactctcaatcaaagctcttttaatgcaaaaaccattggttctgtctatgaaaaacaagggaacgaacctgaattaaactttgtctaaa

SEQ ID NO: 313688 - DNA, 391 bp, Unknown
  Bacterial polypeptide expressing nucleotide sequence isolated from the Sargasso Sea
aatgaacaataaaaaaacagactataaatctgcaggtgtagatatcgaagcaggcaatgcagcagtagacttaattaaagaaaaagttaaaagtacgcacacaaaagaagtgcttactggtattggtagtttcggatcattatatagtatcaaagaaatattatcagattatgtaaaccctgtcttagtccaaagcattgatggtgtagggaccaaaacaatcattgccagaaaaatgaaaaaatttaatacaatcggcatagatcttttaagcgcatgcgctaatgatattttggtgatgggcgcaaaaccattaacgtttttagattacattgcaaatgatagactaaaccctatgattgttgatgaaatcgttgaggggatgacaaag

SEQ ID NO: 313689 - DNA, 466 bp, Unknown
  Bacterial polypeptide expressing nucleotide sequence isolated from the Sargasso Sea
atctggtcttcattcaaatggattttcgttagtaagaaagatattaaagaaaaaaaataaaatattatctacttttttaaaaaaagaaataattaaaccaactaaaatttacgtaaaagaattaaatcaaattaataaaaaaaaattaattcatggctgtgcaaacataacgggaggtggattattagataatttacaaagaataattcctaaaaacttatgtttaaatataaatttttctaaaattaaaactaaaccaatttttaaatggttaaaaaaaaataatattacagattctgaaatggtaaaaacgtttaattgtggagttggtttttgtcttatttctaaacgaaaaaatttaaatcaaattaaaagattatttgaaaaaaattatcaaccatatgaaattggttttgtgtcaagagataaaaaaaacattaaaatatcaggaaaaattatatggtaa

SEQ ID NO: 313690 - DNA, 934 bp, Unknown
  Bacterial polypeptide expressing nucleotide sequence isolated from the Sargasso Sea
gataaaggtcctaatactggaggtatgggctgtataattgagtggtataatatgcttccatttatgtcattaaatgatttaaaagaatcagaaatgataaatgaaaccgttttaaaagaattaaacagtctaggaaagaaaaataaatgtctagataactatactggtattctttatggcagttttataaaaacacaaaatggaataaaaattattgagtataactcacgttttggagacccagaatgtattgtggcactaaaaattttaaaaagtaacttttttgacatatgccagaatatcgtcaagggaacactcaccagtgacattcagtttatcagaaaggcgtgtatctgtgtatatctaacaccaaaaaactattgtaaaaaatcagagcttgacaaattcgatgtatatctaaatgatgtagacaaaaatgatatcactttttcaaatatagaagttaaagataaccatatttacagccttggttctagaacaatggcactgtgtgaaacacatgaaacactttattcatgttttcatttaatttacagcaaaataaaaaaaataggaggaaatctacattacagaaccgatataggaagtgattttttaagttcatatgaaaaatatggtgtttctattaaaaatggagaaaaatctttgaaaagtataaaaaaatcaattctttcaacatataatgaaaatataataagtgattttggatcctttggaggagaatataaaatagataataatattctggttgctagtattgacggtgtgggaacaaaaacgctgctttcaaaaaagtttaaacaaaaacaaggtatgagtgatctaggaagggatatagtagcacattcgataaatgatatccttgtccagggtgcctttcctctttttttcttggattattatggcacacaat

SEQ ID NO: 313691 - DNA, 307 bp, Unknown
  Bacterial polypeptide expressing nucleotide sequence isolated from the Sargasso Sea
atgaaaaaaaatctctttacctataaaaaaagtggcgtgaatatcgatgcagcagacaaatttgttaatttcatagctaatatttcatcaaaaaaaagaggcaataaaaagttcaataatattggaggatttggatcagtatcaaatttacctaagaatataaaaaatccaaaaatagtggcgtgcacagatggtgttggaacgaaaattgaaatagctaacacattaaacaaatacgatacgataggaatagatttggtggcaatgagtgtgaatgatctaatagtgcaaggagcaaaacctttat

SEQ ID NO: 313692 - DNA, 136 bp, Unknown
  Bacterial polypeptide expressing nucleotide sequence isolated from the Sargasso Sea
caccgacggtgttggaacaaagattgagatagcaaaggaattaaataactttgatactattgggatcgttcttgttgccatgtgtgtcaatgatttaatagtttgtggagctgagcccctagtatttttagattac

SEQ ID NO: 313693 - DNA, 208 bp, Unknown
  Bacterial polypeptide expressing nucleotide sequence isolated from the Sargasso Sea
gatggatgtaaaattagcaattgtgaattggttggcggtgagactgctgaaatgcctggcacttacaccaaaggtaaatttgatttcgccggtttttgtgtaggattagttgaaaaaaataaaattcttaaacaaaaaaatataaaaaaaggtgatataatcattggaatcccttcttcaggtttgccttcaaatggattttcacttg

SEQ ID NO: 313694 - DNA, 287 bp, Unknown
  Bacterial polypeptide expressing nucleotide sequence isolated from the Sargasso Sea
aatgaataaaaaaaaatttacctataaaaaaagtggagttaatatcaatgcagcagataattttgttaatttcatttctaatgtttcatcaaagaaaaaaggcaaaaaaaagttttcaaatataggtggatttgggtctataactagtattcctggtaaaataaaccaacctaaaattgtagcatgtacagatggtgttggtactaaaattgagatagcaaatattctaaatacgtatgacacaattggtatagatttagttgcaatgagtgttaacgatttaattg

SEQ ID NO: 313695 - DNA, 535 bp, Unknown
  Bacterial polypeptide expressing nucleotide sequence isolated from the Sargasso Sea
aaaagaaatattaaaaaaaaacaatatcaaaaaaaataatttagtaattgctataccatcaaatgggattcactcaaatggttactcacttataaggtatgttttagaaaaaaaaagaattaatttaaagaaaaataaatttcttgctaatgaatttatacgtccaactaagatatatgttaatgagattatgactttgactgaaaaaaatttaataaacagttgtgctaatattacagggggtggaattggagaaaatttaagaagaataattccaaacaatttagtggctaatatagatttaagaaaaattaaaactcaaaaaattttcaaatggttaaaaagtaataatatttctgactctgaaatgttaaaaacatttaattgtggagttggattttgtttaattataaaaccagaaaacttaattaaaataaaaagattatttgaaaaaaaatttcaaccttatgtcataggtaaaataacgtcaggtaaaaataaaataagactatataataagattaattggtcgtga

SEQ ID NO: 313696 - DNA, 307 bp, Unknown
  Bacterial polypeptide expressing nucleotide sequence isolated from the Sargasso Sea
gccgcgtgtcctgccgccgaatgcgcgcgtcacgatcaacggcggtgcgtggacgccgccgcccgtcttccagtggctcgccaagtcgtcgcaggcgggcgaggccgagatgttacgcaccttcaactgcggcatcggcatggtgctcgtcgtcggcgcctcggaggcgcagagcgtctgcgcgatgctccaggcggagggcgaggcgcccgtcatcatgggagaggtcgaggcgagcgtcaagggcgaccgggtcatgggcggcgagcaggtgagcgtcgtcggcacgggggcgtgggggtggtga

SEQ ID NO: 313697 - DNA, 523 bp, Unknown
  Bacterial polypeptide expressing nucleotide sequence isolated from the Sargasso Sea
aatgaataaaaaaaaatttacctataaaaaaagtggagttaatatcaaagccgcagacaaatttgttgatttcatttctacagtttcagcaaaaaaaagaggcaaaaaaaagttttcaaatataggtgggtttggctctataacaaatataccaaataatattaaacaacctaaaatcgtagcttgtacagatggtgtgggaaccaaaattgaaattgctaatacgttaaataaatttgataccattggaattgacttggttgcaatgagtgtaaatgatttaatcgtacaaggggctaagcctttactttttttagattatatatcaataaataaaattgatcttaaaaaacttaaagcaataataaaagggattaacaaaggctgtaatcaatcagaatgtgagctcgtcggaagagaaactgctgaaatgccaggtacgtatgaaaaaggtaaatttgatatcgcaggttttgctgtaggagtttgtagcaagaataaatttttaattaaaattaaataa

SEQ ID NO: 313698 - DNA, 385 bp, Unknown
  Bacterial polypeptide expressing nucleotide sequence isolated from the Sargasso Sea
attgagcaaactatacaaaaaatcaggtgttgatgtaataaaaactgacagacttattggacaggctttaaaatttattaaaagttctcacaatgataaggttttaggaaataaactaggttttagtgcagaatatagagtaaataaagaagttacattgtgtgcagcaacagatggtgttggtactaaggcaatattagcagctgaacttaatgaatacaaggggataggccaagatttagttgcaatgtgttcaaatgacttgttgtgtaacaaagcaaaacctcttttttttttagactattttgcttgtaattcagttaaaccaaaacaatacactgaaattctgaaaagcattactagtgcatgtaaaaaaatcaattgc

SEQ ID NO: 313699 - DNA, 172 bp, Unknown
  Bacterial polypeptide expressing nucleotide sequence isolated from the Sargasso Sea
cgccacgaaatgtaccgcacgtttaactgtggtgttggccttgtaatcgttgttgacgaaagcgataccgatgctgcgctgaacattcttaaacaacacggtgaaaatgcttgggttattggtgatatcgcagcaaaagatggcgaagagcaagtagagatcaacgcgtgag

SEQ ID NO: 313700 - DNA, 414 bp, Unknown
  Bacterial polypeptide expressing nucleotide sequence isolated from the Sargasso Sea
gggctaaaccattatttttttttggattacatggctatcggtaaaattgatctttccaaaatgaaaaagataataaagggaattatagatggatgcaaaatatctgattgtattttagttggtggagaaacagcagagatgccaggcacttatacaaaaaataaatttgatttagcaggatttacagtgggattggtatcaaaaaagaaacttatctcagaaaaaaaagttaaaaaaaattatattattttagcaataccttcctcaggattacactcaaatggtttctcacttgtaagaagcgttattaaaaatatgaaagtcgataataaaatcaaaaatgaactaatcaagcctacaaaaatttacactaatgaggttttaaaattagttaaaaaagacttaattgcatca

SEQ ID NO: 313701 - DNA, 320 bp, Unknown
  Bacterial polypeptide expressing nucleotide sequence isolated from the Sargasso Sea
tatgaaaaaaaataaaaatagattaacttataaaaaatctggagtagatatagcaaaggctagtagcctaatatcggtgcttaaagataagcgaaagaggtctggtgtcctctctggaattggtggatttgcaagtctctttgctatagataacaaaaaatataaaaatcccgttattgtatgcggaacagatggtgtgggaacaaaactcaagttagccactcttttgaatcaacataattctattggtcaggatttattggctatgtgtgtgaatgatgtgattactacaggagccgaacctatattatttttagatt

SEQ ID NO: 313702 - DNA, 379 bp, Unknown
  Bacterial polypeptide expressing nucleotide sequence isolated from the Sargasso Sea
atgaataaaaaactcttcacctataaaaaaagtggcgttaatattaatgcagctgacaaatttgttaatttcatatcaaatatttcatcaaaaaaacaaggcaataaaaagttcaataatataggtggatttggttcaatttccaatattccctcaaatataaagagacctaaaattgtagcttgtactgatggtgtaggaacaaaaattgaaatagccaatttactaaaaaaatatgacactattggaattgatctagttgcaatgagcgtaaatgatttaatcgttcaaggtgcaaagccgattttatttttagactatatttcaatcaataagattgatctaaaaaaactcaaatcaattctcaaaggcatttaaa

SEQ ID NO: 313703 - DNA, 394 bp, Unknown
  Bacterial polypeptide expressing nucleotide sequence isolated from the Sargasso Sea
aacatatcaattgaagactgtttattagctccacacacaaattatagttctttaatcacacgaattattaatgcgggaattaatattaagagcatttctcatattactgggggtggtttagttgataatataccacgagttattccaagagaattttctttagaaatagacaccacgtcttggaaaaaaataccaatatttaattttttacaaaacaatttggatattgatacaaaagatttgtaccaaacttttaatatgggcattggtcttgtgcttatcgtagatgagacaaaaaaagaaaagttaatttcttttataggcagggaaaattgtaatagtattggtgttgttgtaaatgataaagataatatagtacacctttatggataaa

SEQ ID NO: 313704 - DNA, 280 bp, Unknown
  Bacterial polypeptide expressing nucleotide sequence isolated from the Sargasso Sea
atgacaaaagaaattatagaaaatgatccatacaaattagctggagttgatattgatgctggtaacagcttagttgataaaattaagaagagtgttgccgcctctcataataagaatgtcttagataatattggaggctttgcaggaatgtacgagctagataaagatacctacccccccccccccccccgggcccccgggcacgcagccgcacccgccccccctgtgtcccgcttccaaagcttccaaaatatgccgccgtcccccggtcgagcttagc

SEQ ID NO: 313705 - DNA, 301 bp, Unknown
  Bacterial polypeptide expressing nucleotide sequence isolated from the Sargasso Sea
atgagaagaagtaatctaacatatagaaaaagcggagttaatataaaagctgcagacaaatttattaattatatttcatctttggctaaaaaacgcgataataacaaagaatctaaaaatattggaggatttggatcaatttctaagataccaaaatattactcgaacggttatttggttgcaagcacagatggtgttggaactaaaatagaaattgcaaatgatttaagtaaatttgataccataggaatagatttagttgccatgagtgttaatgataaaaatagttcaaggagctaaa

SEQ ID NO: 313706 - DNA, 483 bp, Unknown
  Bacterial polypeptide expressing nucleotide sequence isolated from the Sargasso Sea
ttgtccgtaaaatcattgaagttaccggcgcggaccttgctgcaacagcacctggcgagactggccaaaccctcggcgaggctttgctcgaaccaacgcgcctgtataagaaagctgtcagctgcgcattggcaacaggcggcgttcatgggatcgtgcatgtcaccggcggcggtctgatcaaaaacccaccgcgtgtctacgatgatgatgtcagtcttgtgctggaccttaccacaaaatcactgccaccacttttttcctggttaaaggcagccggcaatattgagacatatgagctcgccagaacctttaactgtggtattggcatgctgttttttgctgcacctgacagcgcagatgcccttttggctgctttggtggagggacccgaacccgatgcctatgttgcaggtagcttgatagagcggaagtcgcaaccagcagtcattttacagaacattgagagctgggcctcttgat

SEQ ID NO: 313707 - DNA, 415 bp, Unknown
  Bacterial polypeptide expressing nucleotide sequence isolated from the Sargasso Sea
catggacgctcgtgtttcttctggtcaaaaaacccttggagaggttttgctggaacccaccaggatctacgtcagaccattattaaaattgatgcaaaccattccgataaaggggatggttcatgtaaccggagggggactgccaggaaaccttcctcggatgttgcctgagggtgccgcggttgagttggattctggaagttgggaaagtcttcctgtttttgattggcttcaagaaaaagggaatctcagtcaagaggagatgcttccggttttcaacatgggcatcggttttgtgatttgcctttccccggaaaaccgtgatcaagttttttcaattttacatcaagaaggtgaacaaccggtgaccatcggaaaagtgatttccggaaaccgtaatgtgatcatccattaa

SEQ ID NO: 313708 - DNA, 289 bp, Unknown
  Bacterial polypeptide expressing nucleotide sequence isolated from the Sargasso Sea
agaaaaaatcctgccgggcgaccagctgattggacttccttccagtggtatccacagcaatgggttctccctggttcgaaaaattctgcggagatacctccacgcatctgaatcagagcatggacgctcgtgtttcttctggtcaaaaaacccttggagaggttttgctggaacccaccaggatctacgtcagaccattattaaaattgatgcaaaccattccgataaaggggatggttcatgtaaccggagggggactgccaggaaaccttcctcggatgttgcctga

SEQ ID NO: 313709 - DNA, 403 bp, Unknown
  Bacterial polypeptide expressing nucleotide sequence isolated from the Sargasso Sea
atgagattgaaaaatttcacatatgagaaaagtggcgtaagcataaaaaaagcagataaatttattaaatttatatcctcaagatcaaaaaaatcaaaaaaaagtggtaattttaagaatattggaggttttggagcaattacaaaactgccgaataatttaaagaatccatatcttgtaactagcacagatggagttggcacaaaaattgaggttgctaatcttctagataaatttgatacaattggagtagatcttgtggctatgtgcgtaaatgatattatagttcaaggagccaaacctttactttttttagattatatatcagtcgaaaaaataaatacaaaaaaactagaaaacataattagaggaattattaaaggctgtaaattagctgactgtg

SEQ ID NO: 313710 - DNA, 742 bp, Unknown
  Bacterial polypeptide expressing nucleotide sequence isolated from the Sargasso Sea
catgaacaccatgcaaattattttccctggttaaaacttcggaagaagattgatgtaagaagtttgccagttgatgaaaatggtgggtttgaattttcagatttgaagaaagtattagataaaaaaaccaaattggtggcattaagtcacggtttgtacaattcaggtttaatcttaccagtaaaagaaatcggaaatgaattgcaaaaagagaatataccatattttttggatacagctcaaactgtaggatgtattggtgaatttgattttgcagatacgggatgtgattttatgtcatttaatggttccaaatggctgtgtggcccaatgggtacaggagttttctactgtaaacgagaatcaagtgatcttctagaaccatccaacattggaggagaaactgcagaaaccaatgaaaatggtgaattaacatacaaagaattacctgacagatttcaggccggatttagaaattatgtaggattagcaggaatggaatcctcagttacatttttgcaaaatataggatggaacaatattagaaatcacatcataagtttgtcaaacttgttcatagatgagatagggaaaatttctgaatcaaaagttttttgcccaaaagatgaatctgaacgaacaagcatagtttcgtttgagattgaaaaacaggatcctgaaaagattgtttcagaattatctcaaaaaggaataatcattgcaaaaagagaaatttatgaaa

SEQ ID NO: 313711 - DNA, 343 bp, Unknown
  Bacterial polypeptide expressing nucleotide sequence isolated from the Sargasso Sea
tatggtaaaaaaaacaaaaaatacaaataaatcagaacttacttataaagattcaggtgttgatattgatggaggtaataagcttataacagatattgctcaaattacagagacaacttcaaataaaggttcaattggtgagttaggcggatttggtggattgtttgatctaaaaaaacatgattttcaggaccctatacttgtttcaagtactgatggtgttggtaccaaattacaattagcagttagaacaaaatcatattttaatgtaggtatagatttagttgctatgtgtgccaatgaatattttagcacaaaggagcacaacccctttattttttat

SEQ ID NO: 313712 - DNA, 256 bp, Unknown
  Bacterial polypeptide expressing nucleotide sequence isolated from the Sargasso Sea
atggattacaaaacatcaggtgttgatatagaagctgggcgagaatttgtttccgaaattaaacaggcagttgaaggaactcatacatctaatgtgattgagggtattggcggtttcggaggtttgtttagaattcctatcgatagttttaaaaaaccagttcttgtttcaggaactgatggtgttggaacaaaattagaattagcccaaagtaaaaactttcactttgaggttggtattgatttagttgctatgt

SEQ ID NO: 313713 - DNA, 712 bp, Unknown
  Bacterial polypeptide expressing nucleotide sequence isolated from the Sargasso Sea
attttttctttgactaccatcgcggtaccaaaaattaatttaaaaaaaatgaagtctattattaaaggtgtagtaacaggatgcaaaatttcagactgtatgttagtgggcggtgaaactgctgaaatgcctggcacctacacttataataaatttgatttagcaggttttgctgtaggcgtagtttctaaaaataaacttctacataagggtagagttaaaaataatgatgtaatattagctgtaccgtccagcggattacattcaaatggtttttcgttagtaaggcatattcttaaaaaacaaaagataaataattttttaaaaagagaattaatagaaccaacaaaaatttacgcaaatagtattgttaaactttctaacaaaaatttattgcatgctgctgtaaatatcaccggtggtggtcttatagaaaatataccaagatcaataccaaatggttataccgctaatatagatttgtctaagataaaagttttaaatatatttaaatggattaaaagtaaaaacgttagtgatcttgaaatgttaaaaacttttaatttgggagtaggattctgtataataactgataaacaaaaagtaaaaaaagtaaaaaaattttttagcaaaaaatttgaaccttatcaaattggctatataaataaatcctcaagtaaaatcaattttataaaaaaaataaaatggtaaa

SEQ ID NO: 313714 - DNA, 829 bp, Unknown
  Bacterial polypeptide expressing nucleotide sequence isolated from the Sargasso Sea
cctggcggccccggagattttggtcctggggactttggtcctggcggccctggagattttggtcctggggactttggtcctggcggccctggagattttggtcctggcggccttggagactttggtcctggcggccctggggactttggtcctggaggtcttggaggttttggtcctggtggccctggagattttggtcctggtggacctggcggtcctggaggtcttggaggttttggtcctggtggccctggagattttggtccaactggaattgctggcggtcctctaattcctggcggtcctggagattttggacctggcggtcctggagattttggacctggcggtcctggagattttggacctggcggtcctggcggtcctggagattttggacctggcggtcctggcggtcctggagattttggtcctggcggtcctggcggtcctggagattttggtcctggaggttcttcgtcttcacttcccggaacatttctaccacctggaagttttcaaccacctggtacaattcaacaaccaggagcatataatcctggtttacagggcttcgcacccataatggtcgttacaacggcgcctgttccaggatcagaaactggtggattcaatcaacctggtgaatctggcggcgcctttcatggtggcagtcatggcaatgaacaagtatcagacggtccaggaggaggacctagcggtgttggtgatacaggatttgctataggaggtccaatggatccatcttttggaggtgggccaatgggttttggtgatccaatgatggggcggcggtttcggaggacca

SEQ ID NO: 313715 - DNA, 301 bp, Unknown
  Bacterial polypeptide expressing nucleotide sequence isolated from the Sargasso Sea
atgaacaaaaatatattaacatataaaaaaagtggagttgatattaaagctgcagataagtttataaagttcatatcttcgatttcatcaaaaaaaaagggcaaaaaaaagtttaataatataggtggttttggttctataacaaatatacctgataatttaaaaaatcccaaaattgtagcatgcactgatggggttggtactaaaatagaaatagcaaatcttttaaaaaagtttgatactatcggcatcgatttagttgcgatgagtgtaaatgatttaatagtccaaggtgcaaacc

SEQ ID NO: 313716 - DNA, 415 bp, Unknown
  Bacterial polypeptide expressing nucleotide sequence isolated from the Sargasso Sea
aaagctaataaagaagaaataagtgctataaaagaaatggtcttaaagccaacaattctatatcctaaattgataatgaatttaattaataattttaaaattaactctatctcacatataactggcggcgggttaacagaaaatttaccaaggtcgatttcaaaaaatttatgcgtggagattaaaactgattcatgggacatgccaaaagtatttaaatggttaaaagaagaaggtgatatatcaaataaggatatgtttagaatatttaactgtggtattggtatggttcttatagttgataaaaaagatgtaaaagatatatcaaataagatatctggaatgaatttaaaaaattatgtgattggagctgtgaaagaaaaaaatcaagagcaatcagtaatatattcataat

SEQ ID NO: 313717 - DNA, 271 bp, Unknown
  Bacterial polypeptide expressing nucleotide sequence isolated from the Sargasso Sea
ttaaagtatataaagacactttcccatattactggaggtggtgtttattcaaattttaaacgtagtatacctaagggtacaaaatttgatttaaatataatgaagctacctaaagagtacgattttattaaaaataatataaatatttctaaccttgaattaatggaaatatttaattgtggaataggtatgatatttgtaattaacaaaaagcattataagagatttattaaaaggaacttgtttagtctaattggtgaaattaaataat

SEQ ID NO: 313718 - DNA, 177 bp, Unknown
  Bacterial polypeptide expressing nucleotide sequence isolated from the Sargasso Sea
ttgcagaatatgaaatgtaccgcacctttaactgtggtgtcggcatgatcgttgcgctgccagccgataaagtcgatgccgcactggcactactcgccgccgaaggcgaacaagcttggctaatcggtgctatcgctgctcgcgaaggcaatgaagagcaagtggagatcctgtaat

SEQ ID NO: 313719 - DNA, 307 bp, Unknown
  Bacterial polypeptide expressing nucleotide sequence isolated from the Sargasso Sea
ttgttaaaacctacaaaaatatatatggaatgttttaatattattgaaaaatataaagatattttgttaggaatggcacatattactggtggtggattaattgataatataaaaagaataatacctaaaaaattaaatataaaattagatattaaaatagaaaatgagtttaaatggataatggaaaaaagtaaaatcaatgagaatgatatgatgaatacgtttaattgtggatatggaatggtgttaatatttaaaaaagattttataaataaagaatttgaagaaattggttatttagattgaa

SEQ ID NO: 313720 - DNA, 532 bp, Unknown
  Bacterial polypeptide expressing nucleotide sequence isolated from the Sargasso Sea
agagatgtcatgaaagaagatgatcttctttatgggattagatcttcgggctttcattcaaatggatattctctcattcgaaaagttttaaaagacaaaaatatagatctacatggaaaaacagattttaaatcatcttatgaaacaaatgcagctgccttaatggctccaacaaaattatattttccttttttaaaaaaaattttaacaacaaatcttatcaatggtatttcgcatataacaggcggaggcattattggtaatgcaccaagaatgctctctgaaaatttatcagcaaggattgataaaaaatttatttgtgatgaagaaattttccaatggtttcaaagtttagctaacatttcagatgaagaaatgttgaagacctttaattgtggattaggtttgattatgactatttcaaaaaataattacaaagaatttgagcaattaataaaagatgaaaatttagatatttttgaaattgggaaaatagaagttaacaaatcatcaaggtgtacaattagttgaa

SEQ ID NO: 313721 - DNA, 1087 bp, Unknown
  Bacterial polypeptide expressing nucleotide sequence isolated from the Sargasso Sea
gctgggccgccaggatctgctggtggccgatggccgcatcgcctggatgggtcggggcttgtcagtccctgccgactggccgctgacgcgggtggatgcccgcggccgctatctggtgcctgggctggtggatccgctggcccacatcaccggcggtggcggcgaggggggctttggttttcgcacgccggagctggcggcaagggaggcgctgagcgcaggggtcactactctggtggcggcgcttggtaccgacagcctgacccgcagcccggcccaggtgctcggcaaggtgcgcgagtttcgcgccgccggggtgagcgccttcatgtataccggctcctaccatctgccggtcaagaccctcaccggcacggtggagtccgacatcatgcttattcccgaggtgctgggggtgggggaggtggccatcagcgatcacagatccagtgcgccgacctacgacgagctggcccgtctggtgagcgaggcgcgggtggccgggctgcttgccggcaagagcggggtcagcttctttcatctgggggacgggcgcggggcgctggcgccgctgcgggctttgcgcgatggcaccgacatcccgctgcgccagctctatcccactcactgcaaccgcaacccctggctgtttgccgaggccatcgagtggggccgggccggtggttgggtcgatctcaccacctcgagctttccggacttgctggacgatggcgagcggctggcggccgatgccctggtggagctgctggcggccggggtacccgccgattgcatcagcttcagctcggacgccaacgccagcttgccgcgcttcgatggcgaggggcgtctcatcgagctgcgctgcggccagatcggcagcctgtggcaggcgctggtggaggcttgtggcaagggggtggcgctggaggtggcgctggcagtagtgacggccaatccggccagggcactggggctggcgaccaagggcacgctggcggtggggcaggatgcggatctgctgctgatcgaccccgatacgcttaccatcgagcgggtgatgagcggcggccgctggcgcacctga

SEQ ID NO: 313722 - DNA, 538 bp, Unknown
  Bacterial polypeptide expressing nucleotide sequence isolated from the Sargasso Sea
tattgttgaaaaaaaacttattattgactcctcaaaagttagaaaaaataacatcattatagggattgaatctagcggagctcattctaatggctactctttgatcaataaattaattagggaatcaaaattaactaagagtgaaaaagagaaattaactaagcttgctttaaagcctactcatttatatacaaatgtcattttggatttagtgaagaaagttaaagtgaagtcaattgctaatattactggaggcggtctgttggaaaatattcctagatcaattcctaatactttatcgtctgaaatatatttgaaaaattggaaaatgccacaattctttgcaactcttcaaaaattgggaaaaattgaaatgagtgatatgttaagaatctttaattgtggaattggaatgactgttattattgaacctagggagttagattccactataaaagttctttctaagcataaatttaaaggcttcatgattgggaaagttataaaaaaatcctcatcagcaataacttttctttga

SEQ ID NO: 313723 - DNA, 526 bp, Unknown
  Bacterial polypeptide expressing nucleotide sequence isolated from the Sargasso Sea
tcgtttatggttccaatggctgtgtggcccaatgggtacaggagttttctactgtaaacgagaatcaagtgatcttctagaaccatccaatattggaggagaaactgcagaaacgaatgaaaatggcgaattaacatacaaagaattacctgacagatttcaggccggatttagaaattatgtaggattagcaggaatggaatcctcagttacatttttgcaaaatataggatggaacaatattagaaatcacatcataagtttgtcaaacttgttcatagatgagatagggaaaatttctgaatcaaaagttttttgcccaaaagatgaatctgaacgaacaagcatagtttcgtttgagattgaaaaacaggatcctgaaaagattgtttcagaattatctcaaaaaggaataatcattgcaaaaagagaaatttatgaaaaaccggttttgagaatttctcctcacatatacaatacaaaagatgagattttgagcctagtagaagaattaaagaaattatga

SEQ ID NO: 313724 - DNA, 510 bp, Unknown
  Bacterial polypeptide expressing nucleotide sequence isolated from the Sargasso Sea
atcttctatatgggattagatcttcgggctttcattcaaatggatattctctcattcgaaaagttttaaaagacaaaaatatagatctacataaagaaacagaatttaaatcatcttatgaaacaaatgcagcagccttaatggctccaacaaaattatattttccttttttaaaaaaaattttaacaacaaatcttatcaatggtatttcgcatataacaggcggaggcattattggtaatgcaccaagaatgctctctgaaaatttatcagcaaggattgataaaaaatttatttgtgatgaagaaattttccaatggtttcaaagtttagctaacatttcagatgaagaaatgttaaagacctttaattgtggattaggtttaataatgactatttcaaaaaataattacaaagaatttgagcaattaataaaagatgaaaatttagatatttttgaaattgggaaaatagaagttaacaaatcatcaaggtgcacaattagttgaa

SEQ ID NO: 313725 - DNA, 1147 bp, Unknown
  Bacterial polypeptide expressing nucleotide sequence isolated from the Sargasso Sea
atgaattttgattcaatttctgaagagtttcaaactgataagacctatctgaataatgcatcagtttcggtaatgcctaaaactagcatagaagcaatgaaacaatttctcatagattattcagaaatgggaccagattctccagaatcagagattttcataaaaggattatgggagaaaacacgaacatcaattgcaaaagtggtaaagtgcaatcctgatgaaattataattacacaaagtgtgactgatggaataaacattgtagccaatggaatgaagtttgaaaatgattccaatatcataattagaggaggagaacatgaacaccatgcaaattattttccatggttaaaacttcagaagaagattgatgtaagaagtttgccagttgatgaaaatggtgggtttgaatattcagatttgaagaaagtattagatgaaaaaaccaaattagtggcgttaagtcacggcttgtacaattcaggtttaatcttgccagtaaaagaaattggaaaagaattgcaaaaagagaatataccatactttttggatacagctcaaactgtaggatgtattggtgaatttgattttgcagatacgggatgtgattttatgtcgtttaatggttccaaatggctgtgtggcccaatgggtacaggagttttctactgtaaacgagaatcaagtgatcttctagaaccatccaacattggaggagaaactgcagaaacgaatgaaaatggcgaattaacatacaaagaattacctgacagatttcaggccggatttagaaattatgtaggattagcaggaatggaatcctcagttacatttttgcaaaatttaggatggaacaatattagaaatcacatcataagtttgtcaaatttgttcatagatgagataggaaagattcctgaatcaaaagttttttgcccagaaaatgaatctgaacgaacaagcatagtttcgtttgagattgaaaaacaggatcctgaaaagattgtttcagaattagctcaaaaaggaataatcattgcaaaaagagaaatttatgaaaagccagttttgagaatttctcctcacatatacaatacaaaagatgagattttgagcctagtagaagaattaaagaaattatgat

SEQ ID NO: 313726 - DNA, 312 bp, Unknown
  Bacterial polypeptide expressing nucleotide sequence isolated from the Sargasso Sea
aatgaataaaaaaaaatttacctataaaaaaagtggtgttaatatcaatgctgcagataatttcgttaacttcatttctaatgtttcatcaaagaaaaaaggcaaaaaaaagttttcaaatattggtggatttgggtctataactagtattcctcatggaataaatcagcccaaaatagtagcatgcacagatggtgttggtacaaaagttgaaatagcaaatacactaaataagtatgatacaattggtatagacctagttgcaatgagtgtaaacgatttaatcgttcaaggtgccaaacctcttttgtt

SEQ ID NO: 313727 - DNA, 187 bp, Unknown
  Bacterial polypeptide expressing nucleotide sequence isolated from the Sargasso Sea
cctggtttttaacgcaatacagtctattggcagcatagatgaatcagaaatgtttcgaacgtttaatatgggtattggaatgatatgtatagtctcaagtgatgatgtctctagtataaaacaattgattagcgttcgtgaagttggggaaattgtaagtggcgcaggcggggtaaaagtagtttaa

SEQ ID NO: 313728 - DNA, 340 bp, Unknown
  Bacterial polypeptide expressing nucleotide sequence isolated from the Sargasso Sea
aatgaataaaaatctattaacatacaaaaaaagcggtgttgacataaaggctgcggataagtttataaagttcatatcttctatttcatcaaaaaaaaggggcaaaaaaaagttcaataatataggtggctttggttctataacaaacattcccaacaatttaaaaaatccaaaaatagtagcatgcactgatggggttggtactaaaatagaaatagcaaatcttttaaaaaaatttgatactattggtatcgacttagtcgcgatgagtgtaaatgatttgatagttcaaggtgcaactcccttttttttcttagattatatttcgataaacaaaatt

SEQ ID NO: 313729 - DNA, 397 bp, Unknown
  Bacterial polypeptide expressing nucleotide sequence isolated from the Sargasso Sea
aaaaatataatagctaaaagatgtcttgagccaaccttgctttatcccaaattgattatggagttaatttcaaattataagattaattctctttcacatattacgggaggtgggctcacagaaaatctaccaagatccatatcagataatctctgcgtagaaatagacactgactcgtgggaaatgccaaatatttttaaatggttacaagaaaatggaaatatttctgatgatgatatgtatagaatatttaattgtggaataggcatggtgctttttgttgatgaagacgaagagttaaatatttcttcgagaataaaagcattaaaaatgaatagtttcgtcattggaagagtcaaaaataaaaaggaagaatcttctgtaatatttgtctaaa

SEQ ID NO: 313730 - DNA, 513 bp, Unknown
  Bacterial polypeptide expressing nucleotide sequence isolated from the Sargasso Sea
acacctcaaaagttaaaaaaaataatatcattatcgggattgaatctagcggagctcattctaacggttactctttgatcaataaattaattaaggaatcaaaattaagtaagagtgaaaaagagaaattaattaagcttgctttaaagcctactcatttatatacaaatgtaattttggatttagtgaagaaagttaaagtgaagtcgattgctaatattactggaggcggtctcacggaaaatattcctagatcaattcctaatactctatcgtctgaaatatatctgaaaaattggaaaatgccaaaattctttgcaactcttcagaaattgggaaaaattgaaatgagtgatatgttaagaatttttaattgtggaattggaatgactgttgttattgaacctaaggagttagattccactataaaagtactttccaaacataaatttaaaggcttcatgattgggaaagttataaaaaaatcctcatcagcaataacttttctctaat

SEQ ID NO: 313731 - DNA, 436 bp, Unknown
  Bacterial polypeptide expressing nucleotide sequence isolated from the Sargasso Sea
tccctgcatctgaatcagagcatggacgctcatgttacttctggtcaaaaaacccttggagaggtgttgcttgaacccaccagaatctacgtcagaccattattaaaactgatgcaaaccattccgataaaagggatggttcatgtaactggagggggactgccaggaaaccttcctcggatgttgcctgagggtgccgcggttgagttggattccggaagttgggaaaaccttcctgtttttgattttcttctagaaaaagggaatctcagtcaagaggagatgcttccggttttcaacatgggcatcggttttgtgatttgcctttccccggaacaccttgatcaagttttttcaattttacatcaagaaggagaacaaccgctgaccatcggaaaagtggtttcaggaaaccgtaatgtgatcatccattaaa

SEQ ID NO: 313732 - DNA, 681 bp, Unknown
  Bacterial polypeptide expressing nucleotide sequence isolated from the Sargasso Sea
aatgagtgcatcttattcctctgcaggaattaatctaaatcaaatggagatccttaaagatacctttaaggccttcggcaatctcactaacaccgaacacgtgattaacaacgcaggaagttttgcagggttatataaattgccaagcttccaaaatccgatactcgttgcaggcacagacggagtaggaactaagttaaaaatatccgctgcaatgggacactacgaatctttgggtaaagacctagtcgtgctcaatgcaaacgatatattatgcaaaggggcccaaccccttttctttttaaattacattgcgttcagcaaattcaatcaacacatgttggaatccctcatgaaaggcatggtatgggcatgcaaaagtctagactgtagcctgataagcggggagactgcaaacatgcctggagtctacgaggacaatgaatttgatctagcaggattcatagtgggagctgtggaagaaaacgaattaattcacgcccaagatgtgacagcaggtgactccgtctacgcactctcttccaatggaattcataccaacggatacagcctggtacggcaggtatttgacctggattccgatactgcaccattattccaatacatggatgaactccaacatacgttaggggaggaattacttcagccgcatcgcaacta

SEQ ID NO: 313733 - DNA, 511 bp, Unknown
  Bacterial polypeptide expressing nucleotide sequence isolated from the Sargasso Sea
aataaaaaaagacaatcttatcttagctgtaccatcaagtggtttacattctaatggcttttcattagtaaggtatattttaaatcaaaaaaaaattgatataagaaaaaataaatttttaaaatctgaacttttaaaaccaacaaaaatatatgtaaatgaaatattaaaattaattaataaaaatttaattaatggttgtgcaaatattactggtggaggtttagcagataatatcaaaagagttattcctgatagaatggttgcgaatatttatttaaatcaaataaaaactttggaaattttcaaatggttaaaaaaaaatggaatatcagaaaaagagatgttgaaaacatttaattgtggtgttggattttgcttaataataaatcctaaagatttaaaaaaagttacaaaacatttttctagggactataaaccctatgtaattggtaaaatttctaaagatggaagtaaggttaaattcaatggttcaatcgactggtcttaa

SEQ ID NO: 313734 - DNA, 303 bp, Unknown
  Bacterial polypeptide expressing nucleotide sequence isolated from the Sargasso Sea
catgagcaaacaggttaacccaagaaggacttataagtctgctggtgtagatatagactccggcaacgcacttgttgaggatattaagccactagcagctagcacagctcgcgcgggtagctatggctcaataggttcttttggtgctttatttgatattgcagcagcaggctacaaagatcctattctcgtttcagggactgatggagttggaactaagctcctaatggcaatagaaactaatatctatgatacgatcgggatcgatttagttgcaatgtgtgctaacgatgtccttgctca

SEQ ID NO: 313735 - DNA, 340 bp, Unknown
  Bacterial polypeptide expressing nucleotide sequence isolated from the Sargasso Sea
aatgaatttaattaataattttaaaattaactctatctcacatataactggcggcgggttaacagaaaatttaccaaggtcgatttcaaaaaatttatgcgtggagattaaaactgattcatgggacatgccaaaagtatttaaatggttaaaagaagaaggtgatatatcaaataaggatatgtttagaatatttaactgtggtattggtatggttcttatagttgataaaaaagatgtaaaagatatatcaaataagatatctggaatgaatttaaaaaattatgtgattggagctgtgaaagaaaaaaatcaagagcaatcagtaatatattcataa

SEQ ID NO: 313736 - DNA, 2095 bp, Unknown
  Bacterial polypeptide expressing nucleotide sequence isolated from the Sargasso Sea
ctttgataaaacaaatccaggaataatcgcaacatcatttactaccaataatgtttatggtcctacacttgcaaaggttgatgacgttggtgagataagtatcgcattcgatgaaaatattagaagcatagccacatttctaaatgcctatgaaatttcccttagtggtaatggtcaaaattattcttataactatacattttctgattcaaataataatggaacagtatcactaaatatgctggcatcagactcagcaggaaatcagtcagataccttaattgatgcggtatatttcgataaaacatctccaaccgtgataagtgtgtatgaggggtctcttgcttcagatcaggtatatacaaaatattctgattctctgcagcttgcttggaccgttttagagtcagagtctggaagcaaaactgcttatatgggtcttggttctgactctggatcagtagatatactgaactggagcccggcatcagaaataacccaggcttcttttacttcaatgaatcttagcaataattcgaaatattttggcgccgtatttgtagaggataatgtgggtaatatatcagattcagtatggggaaatggaatcactgtcgatattgaggctccgaatcctggcattatctgggatggatttttgagtgatgatattgattacactgcggactcaacggagctatatgttcgctggagcgactttacagataatcagtcaattgactactacgaggcatctgtcggcagtcaggaagacactacgaatatttcagactggcagcaatctacagatctagataatatacaattcacgggattgagcttagaaaaatcggtacaatactttgcttacttacgtgctgttgattcggcaacgaatatttcatctgtaatacgcagtgatggtgttgaatttgacaatacacctcctgatataaaatcgatatatcctttgtttgactcgctagaggttttgtctgttttagataatgacgagattcaaattacttttaacaagccaatattaaaattcggtttgaatgtttctgtaggacaagatacagcagttaattacacgctgacagagcaagattctggcatcactatttcaatactcgatacgctgccaagttatgaaataataactgtggcccttgatactgcgatcgctttcaatctactaaactatactgatacaatcatttttcgaagcaaactatggggtgatctaaataatgattatcaaatttccgttgaggatgttctcgcatttaatcagtcctggcctcactctagtacagaccttggtccggtaagtggtagtcctccatatttatttccatcgcctgatggcgagttaaatcttacagatctttcagcatttggtaagatgtggatatggtattatcatgagtatagtacagattcattatctacacttgtctcagcatttgataatggtctgaatgcaactgtatcaaaaaacaagatagaactttcaattcctgatcaaacatatggcgcagaggtagtattttttaattccaatgagtcacttgatggtcttatcatcaataatcttaatgtaggtgctttcaattattctatatctgactctgatcaaaactctatcagctttattgttgcagataaaaatggcctagactctttattgttcttttctctgccatatgatctgccagataattttatttccaatgtgaaatataaatttattgatgaaatatcaaatcagatcgatgaaggagcaggtcctctcaagttgacaattctgccagataaattcgacgtatatcaaaattatccaaatccatttaatgcagaaacaatcgtccgctatgagcttcctcaaattgaagatgttacaataaaaatatatgatgtgataggcagagaaatattttcagtatatcataaaaaacagcgtccaggtaaaaatacattcatctggaaggggaatagcgacctgggtggcttagctagttcaggaatgtattttttacagatatcagcaggaaaagaaataagaagaatgaaaatgattttgcttaagtag

SEQ ID NO: 313737 - DNA, 544 bp, Unknown
  Bacterial polypeptide expressing nucleotide sequence isolated from the Sargasso Sea
ccaacccgatgacgtcgccattggtattgcatcgtcggggtttcactccaatgggtacagcttgatacggaaggttgttttcgagattgccgggctcaagaaagacgatagggtttccgaatgtgatgagaaaacagtaggagagctgctgctcgaaccaacacaactttatgcacggccaattcgttctgtcttacggcattatcgtgtcaaacaggtagtccacggcattgcccacattacaggcggtggccttgaagaaaatctggcccgaatcgtaccaccatcaatccaaattcaaattgaacgtggtagttgggaaatcccatctgttttcggctggcttcaaaagcttggaagtattgaacaggcagagatggaccgggtgttcaatatgggggttggtatggtgttggttgtctccccacatttcgttgatagcattatgcaccagttacgagagcacggcatgcaatcctggaaaattggctacgccactgctgctgacgatggaagtgatcgagtcgtcgtcagtaaagcgtaa

SEQ ID NO: 313738 - DNA, 432 bp, Unknown
  Bacterial polypeptide expressing nucleotide sequence isolated from the Sargasso Sea
aatgacaaaagaaattttagaaaatgatccctacaaattggccggtgtagacattgaagctggagaagatttaattaaaaaaattaaaaatgatgttgcatcaactcatggcgaaaatgttatcgggaatattggtggatttgcaggaatgttcaagttacctaaagaatttcaaaatccaatacttgtagcctgcaccgatggcgttggtacaaaagttgcactcgcacaggaatttggtgatctgcatggtattggtcaagatctggtcgcaatgtgtgtaaatgacttgattgtttgcggagctaaacctttgttttttttagactattatgcaacttctaagcttaatgttagagaagcatccattgtaatcaaaagtattgctgatgcatgtattgattcgggctgttcattgcttggtggagaaac

SEQ ID NO: 313739 - DNA, 453 bp, Unknown
  Bacterial polypeptide expressing nucleotide sequence isolated from the Sargasso Sea
aatgaataaaaaaaaatttacctataaaaaaagtggagttaatatcagggctgctgacaagtttattaatttcatttctactgtttcatcaaaaaaaagaggcaaaaaaaagttttctaatatagggggttttggttcaattactaacatacctaataacattaaagagccaaaaattgtagcttgtactgatggtgtgggaaccaaaattgaaatcgcaaataccttaaataaattcgatacaattggaattgacttagttgctatgagtgtaaatgatttaattgttcaaggagcaaagcctttactttttttagattatatatctataaataaaatttatcttaaaaaacttaaagcaattataaaaggtattaatgaaggctgtaatcaatcagaatgtgaacttgttggtggagaaactgctgaaatgcctgacacttatggaaaaag

SEQ ID NO: 313740 - DNA, 349 bp, Unknown
  Bacterial polypeptide expressing nucleotide sequence isolated from the Sargasso Sea
atgacaaaagaaattatagaaaatgatccttacaagtctgcgggtgttgatattgacgcaggcaatgaacttattgaaaaaattaaagcagatgtagcatctacacaaaatgtgaatgttcttggaaatattggtgggtttgcaggaatgtacgaaattggtaaagaatttgaagagccaatcctggtagcttgtacagatggtgttggaacaaaagtttctcttgcaatggaatacaactacattgacggtattggacaagatttagtggctatgtgcgtaaatgatctaattgttacaggtgccaagccgttatttttttctgattactatgctgcatcaaaataga

SEQ ID NO: 313741 - DNA, 403 bp, Unknown
  Bacterial polypeptide expressing nucleotide sequence isolated from the Sargasso Sea
aatgaaaaagttaaactataaatcagccggtgttgatattgatgcggggaatgaagctgttgataggattaaggatggtgtaaaatcaactttctcatcaaatgtgcttacggggttaggtggttttggatccctttataatctaactcctatttttaaaacatacacaaacccagttatggtgcaaagtattgacggcgtaggaacaaaaacaattattgctagaaagcttaaaaagttcgataccattgggattgatcttttaagcgcatgtgctaatgatatattggtcatgggagccaggcccttaacgtttttagattatattgctaatgataagttaaacccaaaaataattgatgaaattgtttctggtatggtacaagcatgtcgtgatactggc

SEQ ID NO: 313742 - DNA, 328 bp, Unknown
  Bacterial polypeptide expressing nucleotide sequence isolated from the Sargasso Sea
atgactacagacgataaagaacaaaatcataaagaattgagctacagacaatctggtgttgatgttgaagctggttatgctcttgtagacaaaataaagccttttgtagaaaaaacaaaaagaccagaaatcttaagtggacttggttcattttcagctctaagcagaataccaaaacatataaagaatcccatcttagttacctgtacagacggtgtaggaacaaagattgagatagcaaaggaattaaataactttgatactattgggattgatcttgtggcaatgtgtgtcaatgatttaatagtttgcggtgccgagccactag

SEQ ID NO: 313743 - DNA, 701 bp, Unknown
  Bacterial polypeptide expressing nucleotide sequence isolated from the Sargasso Sea
cggcatcgccgatggctgtgtcgagtgcgaggccgccttgatcggcggcgagacggccgagatgccgggcgtctatccggatggcgggttcgaccttgccggctttgccgtcggcgccgccgaacgtggcacgctgctgtcgcgcgggatgccacaggaaggcgatgttgccatcgcgcttccctcgtccggggttcacgctaacggcttctcgctggttcgcaaaatcatcgatgtcaccggcacatgcctcgacgaccgcattgacgggctcgatcttccgcttggcgaagcgcttctggagccgacacgcatctatcaccacggcacgcgggcagcccatacggccggacatgtaaccggtatctgccatgtgaccggtggcggccttgtcgagaacccgccacgggttttcggcgaagacctgtcactcgccatagactgcacaagctggaaattgccgtcgattttcagctggctgtcacgcaagggcgggattgaggccggcgaaatggcacgtacgttcaattgcggcatcggcctgctgattttcacttcggaagacagcgccggctcctgcctgtcggcgattcgcgacggtccggagcctgatgcctggattgccggccgcctgagcgcccgaggtgacggcccggccgtcgtcttcagcggtcaggaaagctggtcagcggcctcctgat

SEQ ID NO: 313744 - DNA, 737 bp, Unknown
  Bacterial polypeptide expressing nucleotide sequence isolated from the Sargasso Sea
gcaaaaccctatgatttttttggattatatttcaataaataaaataaatttaaaaaaaatgaaagaaattgttcaaggtataattcttggatgtaaagtttctggatgccagctagcaggaggagaaacagctgaaatgccggacacatattctaaaggaaaatttgatatcgcaggttttgcagtaggactagttgataaaaaaaatatccttaaaaaaaataaaataaaaaaaaataatattattttaggaatcccttcaagtggtatacattcaaatggcttttcattaattagacatttactcaaagttaaaaaaataaatttaaataaaaataattttctaaaaaaacaatttttaatacctacaaaaatatatgtaaaagaaattcttaaacttatagaaaaaaaatatataaacggatgtgcaaatataactggcggaggtatagaagataatataaaaagagtaattcctgaaaaattaactgcagtaatagatcttaataaaatcaaaacttttaaaatattttcttggcttaagtcaagaggtataaatgataaagaaatgttgaaaacttttaattgtggtattggattttgtttaattgtagataaaaaaaatgtttctaaaataaaaaaaattttttctaaaaattataaaccttatgaaataggaaaaattattaaaggcaataataaagtaaagttaaatggtaaaattaattggctataaa

SEQ ID NO: 313745 - DNA, 664 bp, Unknown
  Bacterial polypeptide expressing nucleotide sequence isolated from the Sargasso Sea
aatgaaaaaaataataaaaggcattattaatggttgtaaaatttctgattgtattttagctggtggtgagacagcagaaatgccggggacatatgaaaaaaataaatttgatttagctggatttactgtaggcatagttaccaggaataaacttgttacagaaaaaaaagttaaaagtaataatattattttagcaataccctcttctgggttacattcaaatggtttttcacttgtaagaaatgtaataaaaaattccaaaattgataaaaaaattaaaattgaactattgaagcctacaaaaatttatacgaaagaaattttaaaactgatagataaaaatttaatttcatctgctgcaaatattactggtggaggtattattgaaaatattatcaggtcagtaccgaagaaattaactgtcaatatagatttatcaaaaataaaaattccttttatttttaaatggttgaaaaataaaaatataagtgatcacgaaatgctcagaacatttaattgtggagttggtttttgtttgatagtaaaaaggaaaaatattaaacaaattcaggctcattttaaaaaagattatatgccttacgaaattggatttatttcaaactccaaaaaaagattaaatcttattaataaagttgaatggtaa

SEQ ID NO: 313746 - DNA, 442 bp, Unknown
  Bacterial polypeptide expressing nucleotide sequence isolated from the Sargasso Sea
aaattgattgaagataactcagtggatttagatgaaatgatcaatggtgagaagattggtgcacaaatcattaagcccacaattatatatagtcgttcagtactaagttgtattgaaaaatatgaagtgagctcaatggctcacattactggcggaggatttcaagagaatattattcgagtcatacctgagggctgccaggcaatcatcgataaaaattcatggagcttgccacctgtctttgaatggattcaagaacaggctggcatcgattcaaatgaaatgctgagaacttttaattgtggcataggttatgttctgatcgttaaagcggatgttaaaaattctgtgatcaagcatttccaaaacgaagagttagaagcttatgagatcggttccataacaagtggtgagaaatctgtcatcatcaatcatggctgat

SEQ ID NO: 313747 - DNA, 487 bp, Unknown
  Bacterial polypeptide expressing nucleotide sequence isolated from the Sargasso Sea
atgaataaaaaagcctttacctataaaaaaagtggtgtcaatattggtgcagcagataaatttgtaagtttcatatcacacatatcatcaaaaaaaagaggcaacaaaaagtttaataatattggtggatttggctccatttctaaccttcccaaaaacattaaaagacctaaaatagttgcttgcactgatggagttggaactaagattgaaatagcaaatttattaaataaatttgacactattggaattgatttagtcgcaatgagtgtaaacgacttaattgtgcaaggtgcaaaaccaattctatttttagactatatttctattaataagatagatttaaaaaaacttaaatcaatacttaaaggaatagtcaaaggttgtgaaatagcaaaatgtgaacttgttggcggtgaaactgctgaaatgccaggcacttatgaaaaagggaaatttgatattgctggatttgcagtaggagtgt

SEQ ID NO: 313748 - DNA, 289 bp, Unknown
  Bacterial polypeptide expressing nucleotide sequence isolated from the Sargasso Sea
aatgacaaaagatagtttaacatacgaaaaaagtggagttaacattaaagaagctgataaatttgtaaaatttatatcctcattatcaaaaaaaagaacaaaaagtaagaattatgaaaatattggtggatttggatcagttacaaatatatcaaaaaaatttaaaaatccccaattagtagccagcactgatggagtaggaactaaaatagaaatcgcaaatctcttaaacaaatatgacactataggaatagatttagtagcaatgtgcgttaatgatttaattgtt

SEQ ID NO: 313749 - DNA, 427 bp, Unknown
  Bacterial polypeptide expressing nucleotide sequence isolated from the Sargasso Sea
ggaacaaaaatcgaaatcgcaaacttactaaataagtatgacactattggaatagacctagttgctatgagcgtaaatgatttgatagtgcaaggagcaaagcctctattttttttggactatatttcaattaataaaattgatttagataaattgaagtcaattattcgagggatagtcaaaggatgtaatatttcacaatgtagtttagttggtggtgaaactgcagaaatgccagatacttatgcaaaaggtaaatttgatatagctggttttgctgtaggtgttacagataaaaagaaaatactttacaaaaataaaattaaaaaaggagatttaatcctggctgtaccatccagtggcttacattctaatggattttcattagtcagacatttattaaaaataaaaaaaatagatataaaaa

SEQ ID NO: 313750 - DNA, 670 bp, Unknown
  Bacterial polypeptide expressing nucleotide sequence isolated from the Sargasso Sea
tatgaaatcgcaaaaattcacatataaaaatagcggagtaaacataaagaatgcagataaatttatagatttcatctctaatttaacaaaaaaaacaaagaaaagtggtgattttaagaatattgggagatttggagcaatttcaagcataccaaaaaactttaaataccctcacattgtaacaagcacagatggggtgggaacaaaattggagatagcaaatgaaattaaaaaatttaacactattggcatagatcttgttgcgatgtgtgtaaatgatttaattgttcaaggtgcaaaaccttttttatttctggattatatttcaatagacaaaattaatttaaaaaaaatgaaagaaattattaaaggtattgttaaaggatgtgaattatcgagttgtaatcttgtagggggagaaacagcagaaatgccaggtacatattcaccaggtaaatttgatcttgcaggtttttctgttggtttggttgaaaaaaaaaatatactaattaataaaataaaaaataatgatttaattttagccattccatcaaatggtatacatgctaatggcttttcacttgtcagaaaagttttaaaagataaaaaaattaaaataaataaaaataaatatctgaaaaaagaattaataaaaccaactaaaatttat

SEQ ID NO: 313751 - DNA, 694 bp, Unknown
  Bacterial polypeptide expressing nucleotide sequence isolated from the Sargasso Sea
attgatttatccaaactaaaatcaatattaaaaggaataataaaaggttgtaaaatttccaattgtgaattagttggtggagaaactgcagaaatgccaggcacttatgaaaaaggtaaatttgatattgctggatttgcagttggagtcgtagatcaaaaaaaaattttaaataaaaataaaataaaaataaatgatctcatattagctataccatctaatggcatacattctaatggttattctctaattagacatattttaaaaaaaaaaagaatcgatattaaaaaaaattcttttttaaaaaaagaacttatcaggccaaccaaaatctacgttagagaaatattaaatttaaataaatcgaaattattaaatggttgtgccaatattactggtggaggtttggaagacaatataaaacgcattataccacaaaatctttgtgctaaaattaatttaagtaaaattaaaacgttaaaaatttttaagtggcttagacaaaataatattcaagataaagaaatgttaaaaacttttaattgtggtgtgggattttgtttagtgattaatccagaaaatctgcataaaataaatagatatttctcgaaagaatttaaaccttatgtgattggtaatatcattaagggacctataaaagtaaaattaaatgataaaatcaagtggacttaaa

SEQ ID NO: 313752 - DNA, 736 bp, Unknown
  Bacterial polypeptide expressing nucleotide sequence isolated from the Sargasso Sea
ctgtacaaatgatatccttgcggttggagctaggccactattcttccttgattactttgcaacaggaaaactctctgttgaaacaatagaagaagtcgtatctgggctatctaaggcatgcaaggaaaattcttgctctcttattggtggtgaaactgcagagatgccagatttttaccaggaaggggagtatgatataagcgggactattgttggcgtggtagataagaaatatatgatgccaatgagaaagacaaatccaggtgatttgcttattggtcttccctctacgggtcttcatacaaatggatattctcttgcaagaagagctttacttgagagatatcatgtagatagatattttgatgagcttggcatgacccttggaatgtctcttctatctatacataaatcatatcttccggtattagattctattttagagtgtgattggctccatggaatctctcatgttacaggtggaggtcttgttgagaatacgcatagagtcattgaagatggtcaggatattgaagtagattgggattcatggacatggcctgagatatttaatatgattcaaaagaatggagatgttcctcttgatgatatgaggagatcctttaatcttggaattgggatggtgttgattgtttctcctgatggttttgagcagttagagactcatctaaaatcaattaatgaagagtatacattaatcggaaaggttatttag

SEQ ID NO: 313753 - DNA, 520 bp, Unknown
  Bacterial polypeptide expressing nucleotide sequence isolated from the Sargasso Sea
tatggcatcaaataaattaacatacagtaagagtggagttaatattccaaaagcggatagttttgttaagttcataagttcactggtaagaaaatcaagcaaaagtggtgattttaagaatataggaggctttggagcaatctctccaatacctagacaactaaaagaccctcatattgttactagcactgatggagttggaacaaaaattgagattgcaaatgatataaataaatttgatacaattggaatagatcttgttgcgatgtgtgtaaatgatttggtcgttcaaggagcgaagccttatttattcttagactacatttctataagcaaaattaatttgaaaaaattaaaacatttagttagaggaattgttaagggatgtgatatcgctggttgcaaattagttggtggcgaaactgctgaaatgccaggaacgtacagtaaagggaaatttgatatagcaggttttgctgttggtcttgttgaaaagaaaaaatacttaataaaaaattag

SEQ ID NO: 313754 - DNA, 373 bp, Unknown
  Bacterial polypeptide expressing nucleotide sequence isolated from the Sargasso Sea
aaatcgtgcctggctgcgttaaagactgggggcatccatgctctagcgcatatcacgggaggcggcctagtggagaacttgccgcgtgtgctaccccacgacctgtgcgccaacatcaacggcgctgcttggactccgccagcaattttccaatggttgtccgcgaccggcggtattgatgacggagaaatgcttcggacatttaattgcggcattggtatggctgtagtctgcgccgccgattacaccaactcagtggtgcataccctcgaagacgccggcgagacagtgatcaacattggacggattagtcgccgctcgggcgatgcagccatcagcatccagtctcaagctgaactgtggaaaaactaaa

SEQ ID NO: 313755 - DNA, 415 bp, Unknown
  Bacterial polypeptide expressing nucleotide sequence isolated from the Sargasso Sea
attgggttgtactgtgggtgaagaattattaaaggttcatcgtagttacggacctttggtgcagtctttggtcaggacttacaacaaggcaggaagagcgcgtgtcatcaaagggcttgcacatataacgggaggtggttttatcgataacatacctcgtgttttacccgataaatgtggtgtgaaaatagaacgtggaagctggcctgttttgccggtttttgagtttatccaaaaacatgggaaggtggacaatgctgaaatgcatcaagtctttaacatgggaattggtatgacagctattgtaaatgcagcgaaggctgatagtgttttacgaagtatccgacgtttaaatcatggagcttggattataggttcgattactcgaggtaggcggagagtgaaattagcctga

SEQ ID NO: 313756 - DNA, 478 bp, Unknown
  Bacterial polypeptide expressing nucleotide sequence isolated from the Sargasso Sea
tatgaattatgatacttataaaacgacatatgatatagatattgatgagagcaatgaatttgtggatgatttaaagaattcgggattaattaaaaataatttttgtgctatgtatgaacacaatggaatacagtttggtgcgagcactgatggatgtggtactaaattggatatggcgaatgaacacgggttattaggtcagataggtatagatttggtggcgatgaatgtgaatgatttgttagcaggtggatgcaagccaatgttttttatggattacatagcaatcgataaaatggataagaataagtgtaagcaaatagtaaagggtattattaaaggatgtgaaaaatgcgattgtaaattgataggtggagaaacggcggagatgaaggggatttatttaaagaataaattggatttggctggatttgcggtaggtgaaaaggtatatgatttgccgaaatttaatcaatga

SEQ ID NO: 313757 - DNA, 811 bp, Unknown
  Bacterial polypeptide expressing nucleotide sequence isolated from the Sargasso Sea
agtagatatagtaatattatcaggatatatgcaaatagtgccagatatcttatacaatgatttttatactataaatatacacccgagtttgctaccaaaatataaaggaatgaagggtggtgatattcataagttgaagttaatgaatgatgaaaaattcataggatgtacattacatgaagttacaggggacgtggatggtggtaggatcttatcgcagaggcaggcaatactagataaaacaaaattcaatcttcaaattcgcaacatgcaattgtatgaagtgaaaaaacagatacaatcattggagaaaagttgtatttatgattttattatgaattatgatacttataaaacgacatatgatatagatattgatgagagcaatgaatttgtggatgatttaaagaattcgggattaattaaaaataatttttgtgctatgtatgaacacaatggaatacagtttggtgcgagcactgatggatgtggtactaaattggatatggcgaatgaacacgggttattaggtcagataggtatagatttggtggcgatgaatgtgaatgatttgttagcaggtggatgcaagccaatgttttttatggattacatagcaatcgataaaatggataagaataagtgtaagcaaatagtaaagggtattattaaaggatgtgaaaaatgcgattgtaaattgataggtggagaaacggcggagatgaaggggatttatttaaagaataaattggatttggctggatttgcggtaggtgaaaaggtatatgatttgccgaaatttaatcaatga

SEQ ID NO: 313758 - DNA, 620 bp, Unknown
  Bacterial polypeptide expressing nucleotide sequence isolated from the Sargasso Sea
catgaaaaaaataaatctatcatatgcaaaaagcggtgttaacataaaagcagctgacaaatttgtaaaatatatttcatctagaacaagcaaaataaaaaaaaatgttaaatctaagaacataggcggttttggggcaatatcaaaaataccaaataatttaaaaagtccttatctagtaaccagcacagatggtgtgggaactaaattagaaatagcaaataatttaaagaaatttgatacaattggaattgatcttgttgctatgtcagttaacgatttgattgtacaaggggctaagccattattatttttagactacatttcaattagcaaaatagatctaaaaaaacttcaatctattctaaatggaataattaaaggatgcatgattgctgattgcgaacttgcaggaggtgaaacagcggaaatgccaggtacttatactcaaggtaaatttgatctagctggttttgcggttggtttagttgagaaaaaaaatattctaaaaaaggaaaagattaaaaatggaaatattgttttaggtgttccatcaagtggacttcactcaaatggattttctttgataagaaatattttaaagagaaaaaaaataatct

SEQ ID NO: 313759 - DNA, 334 bp, Unknown
  Bacterial polypeptide expressing nucleotide sequence isolated from the Sargasso Sea
tatgagtaaaaataagttaacatatgctaaaagtggagttaatattaagaaagcagacaaatttgtaaatttcataacttcattatcaaaaagaacaaataaaaatggtgattttaaggatattggtggatttggtgcaatatcaaaggtgccaaaaaactttaaaaatccatatattgttacaagcactgatggagtgggtaccaaactagaaatagctaataaactcaataagtataatacgattggtattgatttagtagcaatgtgtgtaaacgacttaatagttccagggagcaaaccttttttatttcttgattatatttcgatttga

SEQ ID NO: 313760 - DNA, 438 bp, Unknown
  Bacterial polypeptide expressing nucleotide sequence isolated from the Sargasso Sea
catgagagcgaaaaattttacatatgagaaaagtggtgtaagcataaaaaaagcagataaatttattaaatttatatccgcaagtacaaaaaaatcaaaaaaaagtggtcattttgagaatattggaggatttggagcacttacaaaactgccaagtaatttaaaaaaaccatatcttgtaaccagcacagatggagttggaacaaaaattgaaattgcaaatctactaggtaaatttgatacaattggtgtggaccttgtggcaatgtgtgtaaatgacattatagttcaaggagcaaaacctttgctatttttagattatatatcagttgaaaaaatcgatacaaaaaaactaaaaaatataattagtggaattattaaaggctgcaaattggctgattgtgaattagttggtggagaaactgcagaaatgcctgg

SEQ ID NO: 313761 - DNA, 389 bp, Unknown
  Bacterial polypeptide expressing nucleotide sequence isolated from the Sargasso Sea
tatgttaaaaaataaaagaaacacaagtaaatccaaaataacttatagagcttcaggtgttgatattgatgaaggtaacaaaattattaaagatatttctcaaattactgaagctacgtcaaataaaggttcaataggtaagttaggtggatttggtggattgtttgatttgaaaaaatgtggttttaaagatcctatacttgtttcaagtactgatggggttggtactaaattacaattagcaattaaaactaaatcatattttaacgtaggaatagatttagtagctatgtgtgttaatgatgttttagcacaaggcgcacagcctttatttttcatggattattatgctactggaaaattaaataaatccgtggctattgaagtaa

SEQ ID NO: 313762 - DNA, 529 bp, Unknown
  Bacterial polypeptide expressing nucleotide sequence isolated from the Sargasso Sea
catgagaaaaagtaatctaacatatagaaaaagcggagttaatataaaagctgcagacaaatttgttaattatatttcatctttggctaaaaaacgcagtaatagtagagaaaataaaaatattgggagttttggatctatttcaaaaataccaaaatcttattcagacggttatttagtagcaagcacagatggtgttggaactaaaatagaaattgcaaatgatttaaggaaatttgacactattggaatagatttagttgccatgagtgtaaatgatcttatagttcaaggtgctaaaccatttatatttcttgattatatttcgatagacaagattattttaaacaaacttaaaatgataattaaaggtatatcaaaaggatgtgagttatctgaatgtatgttggtaggtggtgaaacggctgaaatgcctggcacgtacacaaaaggtaaatttgatcttgcaggttttgcagttggatttgttaaaaaaaaaaatattttaaaaaaaaaaaatttaaaaagt

SEQ ID NO: 313763 - DNA, 502 bp, Unknown
  Bacterial polypeptide expressing nucleotide sequence isolated from the Sargasso Sea
tatggactctcatcaactggggttacattcaaatggattctcattaataagaaagctcttacaatcaaaaaagataaatttgaaagctcgaatggggaaaactactttaggcaaagtacttcttaaaccaacgaaaatttatgtaaaagttgtccgcgagttatccaaatctattcctctgaaacaaatttgtcatattaccggaggcggcatcgtagaaaatttaccaagagttattccaaatggtaaatgtgctcatatagatttttcaaggggatacccttttcacaaagatctttttcatctaatttcttcaaaagcaaacctaacaattgaggaaatgactcaagtatttaattgtggagttggtttgatagtaattattcatcccgctgacaaagctaatttagaacaaaaactgaaaaaaatcaggcagccctttgtcagactaggaaaagtagtaaacgataaatcaaagaaattagagatacaatttgggtga

SEQ ID NO: 313764 - DNA, 472 bp, Unknown
  Bacterial polypeptide expressing nucleotide sequence isolated from the Sargasso Sea
atgaataaaaaaaaatttacctataaaaaaagtggagttaatataaaagctgcggacaaattcgttgatttcatttctacaatttcaacaaaaaaaagaggcaaaaaaaagttttcaaatataggtgggtttggctcaataacaaatataccaagtaatattaaacaacctaaaatcgtagcttgcacagatggtgtgggaaccaaaattgaaattgctaatacgttaaataaatttgataccatcggaattgacttggtagctatgagtgtaaatgatttaatcgtacaaggagctaagcctttgctttttttagattatatatcaataaatagaattgatcttaaaaaacttaaagcaataataaaagggattaacaaaggctgtaatcaatcagaatgtgaactcgtcggaggagaaactgctgaaatgccaggtacgtatgaaaaaggtaaatttgatatcgcaggtt

SEQ ID NO: 313765 - DNA, 406 bp, Unknown
  Bacterial polypeptide expressing nucleotide sequence isolated from the Sargasso Sea
atgaataaaaaaaaatttacctataaaaaaagtggtgttaatatcaatgcagcagacaattttgttaatttcatttctaatgtttcatcaaagaaaaaaggcaaaaaaaagttttcaaatattggtggatttgggtctataactagtattcctagtaaaataagccaacctaaaattgtagcatgtacagatggtgttggtactaaaattgagatagcaaacacactaaataagcatgacactattggtatagatttagttgcaatgagtgttaacgatctaattgttcaaggtgccaaacctcttttgtttttagactatatctcaatcaataaaattgatttaaaaaaacttaaatccataatcaaaggaattcttaaagggtgcaaattatctggctgtgaat

SEQ ID NO: 313766 - DNA, 377 bp, Unknown
  Bacterial polypeptide expressing nucleotide sequence isolated from the Sargasso Sea
tatgatatctagtaaactaacatacagaaagagtggcgttaatatttcaaaagctgacagttttgttaagttcataagttcattaacaagaaaatcaaacaaaagtggtgattttaagaatataggaggttttggagcaatttcaaaaattcctaaaggattaaaagatcctcatattgtaactagcactgatggtgttggaactaaaattgagatagcgaatgaactaaaaaaatttaatactattgggattgatcttgtagctatgtgtgtaaatgatttagtagttcaaggagcaaagccatacttatttttagattacatatcaataagtaaaataaatttgaacaaattaaaaaatttagccataggaatta

SEQ ID NO: 313767 - DNA, 498 bp, Unknown
  Bacterial polypeptide expressing nucleotide sequence isolated from the Sargasso Sea
aatgaataaaaaaaaatttacctataaaaaaagtggagttaatatcaaagctgcagacaagtttgttgatttcatttctacagtttcagcaaaaaaaagaggcaaaaaaaagttttcaaatataggtgggtttggctcaataacaaatatacctagtaatattaaacaacctaaaatcgtatcttgtacagatggtgtgggaactaaaattgaaattgctaatacattaaataaatttgataccattggaattgacctggttgctatgagtgtaaatgatttaatcgtacaaggagctaagcctttgctttttttagactatatatcaataaataaaattgatcttaaaaaacttaaagcaataataaaaggaattaatcatggctgtagacaatcagaatgtgaactcgtcggaggagaaactgcagaaatgcctggtacttatgaaaaagataaatttgatattgctggttttgctgtgggtgttgttggcaagaa

SEQ ID NO: 313768 - DNA, 679 bp, Unknown
  Bacterial polypeptide expressing nucleotide sequence isolated from the Sargasso Sea
aaaaaactaaaaaatataattagaggaatcatcaagggctgcaaattagctgactgtgaactagttggaggggaaactgccgaaatgcccggaacatattccaaaggaaaattcgatatcgcaggattttctttagggctagtagataaagataaaatattattaaataaaataaacgaaaaagatttagtcatagcaataccttccagtggtctccactctaatggattttctttagtaagacatattataaaaaagaaaaatattaatttaaaaaaaaatttatttttaaaaaaagaattactgataccaacaaaaatatatgtaatgcatatattagaattaattaaaaaaaagtatttaaatgcttgtgcaaatattacaggaggtggcttaaaagataatattaaaagaataattccagataattattgtgcagaaattcatttagaaaaaataaaaactttaaacatatttagatggcttaaaagtcaaggtattagcgatcaggaaatgttaaaaacttttaattgtggtgttggcttttgcttaattgtaaaacctacaaattacaaaaaaataataaaattttttccaaaaaaatataaaccttatattattggagaaattataaaaaattcaaaaaaagttaagttaagtggaaaagtcatctggtaaa

SEQ ID NO: 313769 - DNA, 555 bp, Unknown
  Bacterial polypeptide expressing nucleotide sequence isolated from the Sargasso Sea
ctattggaattgtagatcataataaaattctaaaaaaaaataagattaaaaaaaataatctcattttagctataccatcaagtggtattcattctaatggctattcactagtcagatatattattgataaaaaaaaaattaacattaaaaaaaataaatttcttagaaatgaattgctaaaaccaactaagatttatgttaatgaaatattatatttaataaaaaaaaaattaataaatggatgcgctaatataactgggggtggtctcgaggataatataaaaagaattatcccagatggactaactgctaatattaatttaaataaaattaaaacaaaaaaaatttttaattggcttaaaaaaaataatattaaagataatgaaatgttaaaaacatttaactgtggtgtaggattttgtataatagtaaatactaaaaatttgaaaaaaataaataaattttttaaaaatggatataaaccttatatcataggaaaaataattaagggcaaaagtaaagttaagttaaatgaaaaaatcaattggtcctaaa

SEQ ID NO: 313770 - DNA, 683 bp, Unknown
  Bacterial polypeptide expressing nucleotide sequence isolated from the Sargasso Sea
aaaacttcaaacaattttaaaaggaatagtcaaaggttgcaagatatccaaatgtgaattagttggtggtgaaactgctgaaatgcctggtacttatgagaaagggaagtttgatatcgctggatttgcagtcggtttagttgaacaaagaaaaattttaaataaaaaaaaaattaaaaagaatgatttaattttagcagttccatcaaacggtattcattctaatggatattctttggttcgaaaaattttagaaataaaaaaaatagatattaaaaaaaataaatttttaaaaagagaactaataaaacctacaaaaatttatgtagatgaaattttaagtttacacaaaaaaaatctcataaatggatgtgcaaatataactggtggaggattatctgataatattaagcgaattattcctgatgaattctgtgcagatattgatttaaataaaattaaaactttaaaaatttttcagtggttaaaacaaaataatatctcagataaagaaatgttaaaaacatttaattgtggagttggattttgtttaattattaatcctaaaaatttgagtaaaattaatagacattttgataaaaaatttgaaccatatgtaattggaagaattaccaaaaataataaaaaattaatattaaatgaaaaaattaattggacgtaaa

SEQ ID NO: 313771 - DNA, 499 bp, Unknown
  Bacterial polypeptide expressing nucleotide sequence isolated from the Sargasso Sea
aatgaaaaaaaaactctttacctataaaaaaagtggggtcaatattgatgctgctgataaatttgtaaaattcatagcaagtatttcatcgaaaaaaaaagacaataaaaagttcagtaatattggaggatttggttcaatatcaaatttacccaaaaatataaaaaatccaaaaattgtggcttgcacagatggtgtaggaacaaagattgagatagcaaatcttttaaaaaagtacgacacaataggaattgatttagttgctatgagtgtgaatgatctgattgtacaaggagctaaaccgttatttttcttagattacatttcaataaataaaattgatttaaaaaagatgaaatcaataattaaaggaattattaaaggatgcaacttatctgaatgtatacttgtaggaggtgagactgctgaaatgcctgatacttatgaaaaaggtaaatatgatatagctggttttgctgttggaattgttagtggtgaa

SEQ ID NO: 313772 - DNA, 195 bp, Unknown
  Bacterial polypeptide expressing nucleotide sequence isolated from the Sargasso Sea
tatttaataactgataagataaatttaaaaaaatctaaagagataatttctggcataccaaatggatgtaagaactctaattgttctctaattggaggagaaacagcagaacatccaaaaaactttcctaaaggtaaatacgatttagcaggcttttctgttggaattattgagaaagagaatttaaaaaaagaa

SEQ ID NO: 313773 - DNA, 466 bp, Unknown
  Bacterial polypeptide expressing nucleotide sequence isolated from the Sargasso Sea
aatgaataaaaaaaaatttacctataaaaaaagtggagttaatatcaaagctgcagacaagtttgttgatttcatttctacagtttcagcaaaaaaaagaggcaaaaaaaagttttcaaatataggtgggtttggctcaataacaaatatacctagtaatattaaacaacctaaaatcgtagcttgcacagatggtgtgggaaccaaaattgaaattgctaatacattaaataaatttgataccattggaattgacttggttgctatgagtgtaaatgatttaatcgtacaaggagctaagcctctactttttttagattatatatcaataaataaaattgatcttaaaaaacttaaagcaataataaaagggattaacaaaggctgtaatcaatcagaatgtgagctcgtcggtggagaaactgctgaaatgccaggtacgtatgaaaaaggtaaatttgatatc

SEQ ID NO: 313774 - DNA, 572 bp, Unknown
  Bacterial polypeptide expressing nucleotide sequence isolated from the Sargasso Sea
tatgacaacatataaagaagcaggtgtcgatattgaatccactgatgctctagtggaagatatatcatcattgagtcagacaacagcacgctctggtatttatgagggaattggtggctttggaggtatatttgatttaaaaaaatgtggttatgatgatccccttttagtttcaggcactgatggcataggtacaaaaattctcctaggaatagaaacagatattttagatggcttaggtcatgatcttgtaggtatgtgtttgaatgatgtgctttgtcacggagctgagcctttattttttttagattattatgcatcatcaaagattgataaaaaatcttttttaagaattatgaagagtattactgaggcgtgtaaaattaataattgcatgcttttaggtggtgaaactgctgagatgcctggcctgtacaaagaaaacgattttgattttgctggtttttgtgttggtgctgttgaaagaaaaaaaatacttccaaaaaaaaatgtaatgaaagagggagacttactctttggaattaaatcttctggctttcattcaaatggat

SEQ ID NO: 313775 - DNA, 598 bp, Unknown
  Bacterial polypeptide expressing nucleotide sequence isolated from the Sargasso Sea
aatgccaggaacttactcaaagggaaaatttgacatagcaggcttttctgtaggaatagttgaaaaaaaaaatattttagataaatcaaaaattaaattaaatgatttaattttagctataccatctaatggtgtacattcaaatggatactccttaattagaaatatattaaaaaaaaaaaatataaaattaaaaaaaaataaatttctaaaaaaagaattaattaagcctacaaaaatctatgtggaagaagttttaaatttaattaataaaaaactaattaatggatgtgccaatattactggtggaggaattgaagataacataaaaagaattttacctttaaatttatgtgcaagtatagatttaaaaaaaataaaaactaactcaatttttaaatggattcatgaccaaggagtaaatgaaaaagaaatgttgaaaacatttaattgtggggttggatttactataataattaatccaaaaaatttaaaaaaaattaataaatatttcaaaaaaaattatcaaccttatgtaatagggaaaattataagcggaaaaaaaaatgttgatttaaatggaaaaattaaatggtaa

SEQ ID NO: 313776 - DNA, 736 bp, Unknown
  Bacterial polypeptide expressing nucleotide sequence isolated from the Sargasso Sea
acatttttggactatgttgctggtagcagtcttgacaaaaatattgtttctcaggttattaaaagcgttgcccaagaatgtaaacaacatggggtttccttagtaggcggagaaactgctgaaatgcctggaacataccatgcaaacgaatatgacttggtgggggtagcaaccggcgttgttgaaaagaataaaataattgatggatctagcgtctgtgatggtgatgttgctattggcgttttttcaaacggtttacatacaaatggttactccttggcaagaaaattaatttttgaatctatggctcttaccacatcagacacattgcctggctataatatatcaataggcgacagcttattggcgcctcacacaaactatagttctttaattgaaaaaacggttggtgctggaatagcgcttaaaagcatttctcatattactggtggtggattagtggacaacgttccaagggttgttcctaaggatttttctttatctgttaatactaagtcttggggcaagattccaatatttaagtttttacaaaacaaccttgatattaaaaaagaagatttatatcaaacctttaacatgggaattgggttagtattaattatagataaaagtcaaaaagagcgcttgatttcgctggttggaaaagacaactgtagtgaaattggttttattataaaagacggtctaaactcggtgcacttaagtgggcagtaaa

SEQ ID NO: 313777 - DNA, 318 bp, Unknown
  Bacterial polypeptide expressing nucleotide sequence isolated from the Sargasso Sea
gatgaagaaaaacaatctaacatatgaaaagagtggagttaatattaaaggcgctgataattttgtaaaatttatatcttcattatcaaaaacaagagaaaatagtaagaattttcaaaatattggaggattcggctcaataaataggattcctagaaatttaaaaaatcctcaaattgttgcaagcacagatggagttggaacaaaaattgaaattgctaatgaattaaataaattcaatacaattggaatagatcttgttgcaatgtgcgtaaatgatttaattgttcagggggctaagcctcttattttttttag

SEQ ID NO: 313778 - DNA, 571 bp, Unknown
  Bacterial polypeptide expressing nucleotide sequence isolated from the Sargasso Sea
tatgcaaaaaataattttgatttagctggattttcagttggagttgttgagagatctgggctcattgatggaaaaagtataaagccagggaatattctcatcggtattgaatccagtggccctcactcaaatggttattcattgattcgctcaattataaaaaaacatcagcctccagactcaatactgcaggcattgctcaaaccaactcatttatatactgcggctattttagaactaatcaaaaaaattaatgtcaaaggtatggcgcatataactggaggcggcttgacagaaaatattcctcgtattcttaaaagtggattagtggcagatgtaaatttatcatcatggaaatttcctaaggctttcaaatggctgcaagtaaaaggaaaaatttctcaaacagacatgcttaggatatttaattgtggaatcggaatgatatgtattataaataaaacggatctagaaaaagcgcaaaacattttattaaatcataaatttcgtaccttccaaattggctcaattattaaaagcaatcttaaagagcaaattcgatactattaat

SEQ ID NO: 313779 - DNA, 424 bp, Unknown
  Bacterial polypeptide expressing nucleotide sequence isolated from the Sargasso Sea
atgaagaagctatcatactcaagttcaggcgtaagcataaataaaggaaataaatttgtatctgaaattaaaaatataattcgtaaagataaaaatcttaaaaaatccaatattggtggtttttcaggtcaatttgttcttgattcaaaaattaaaaaaccgattcttgttggtgcaaccgatggagttggaacaaaaattgagattgcccgtatgatgaaaaaccataagacaattggcattgacttagttgccatgtgcgtgaatgacttaatagttgatcaggctaaacctctttttttcttagactatatttcaactgggaaattagacatatctaaaggtaaagaaattatagggggtattattaagggatgtaaaatgtccaaatgttcactgctaggggagaaacagctgaacatcc

SEQ ID NO: 313780 - DNA, 503 bp, Unknown
  Bacterial polypeptide expressing nucleotide sequence isolated from the Sargasso Sea
aaatgatttaattcttgctgtaccatcaagtggaatgcactctaatggctattccttagtaagacatgtaattaataaaaaaaaaattaatataaaaaaaaataaatttttaaaaaaagaattattaaaaccgactaaaatttatgttagggaagtttcgaatttaattaaaaaaaatttaattagtggatgtgcaaatattactggtggaggaatcagggataatttaaaaagaattataccagataatctagtagcaaatataaatttaaataaaattaaaacaaaaaaaatttttagctggttaaaaaaaaataatattgaagataatgaaatgttaaaaacatttaattgcggtgtaggcttttgtttaatcgttaaaccaaaaaataaaaaaaaaataaaaaaattttttaagaaacaatataagccttatttaataggaaaaatagtttcaggtaaaaataaagtcaaattagatgagaaaatcaattggtcctaaa

SEQ ID NO: 313781 - DNA, 472 bp, Unknown
  Bacterial polypeptide expressing nucleotide sequence isolated from the Sargasso Sea
atgcccaacaaatcaccaaagaaaaatacctctttagactataaatcttctggggttgatgttgaagcaggatataaattagtaaattctataaaacctttcgtagaaaaaactaaaagaaaagagatcatgtcaggtctaggctctttttctgctatgagcaagttaccttctaatataaaagatcctgttttagtaacttgcacagatggagttggtacaaagatagaaatagctagaaagatgaataattttggatctgtaggtaaagacctggttgcaatgtgtgtaaatgatctagttacatgtggtgctgaaccatttttattccttgactactatgttactgactcgcttaaagtaaaaactgccgcaagtgttattgaaggaatagctaaaggctgtgaagaagctaattgttccttggttggtggggaaactgcagaacatcctaatagttttcctgaaaata

SEQ ID NO: 313782 - DNA, 391 bp, Unknown
  Bacterial polypeptide expressing nucleotide sequence isolated from the Sargasso Sea
atgccaactcgaatctatgctgcttctattcaaaaattattaggctcaatagaagttctgggaatggctcatataactgggggcggtctaactgaaaatttgccccgaatgttgaaaaacaatgaacactcaattttactagacttggtctcctgggaaatcccagaaatatttaattggcttcaagagaatggaaatatttcgcgccgagaaatgcttcgcaccttcaattgcggggtcggtttcgtcatttgtgtatcggccgaccaggctaaaaagacatgtgatctacttaactcggttaacgaaaaaccttggatcattggaaagatcgctaggcccgattatccagaacaagaaacgcaattgctaattcatggggctgaataaa

SEQ ID NO: 313783 - DNA, 433 bp, Unknown
  Bacterial polypeptide expressing nucleotide sequence isolated from the Sargasso Sea
cttgaataaaaaaaactctccaataacatattcttcttcaggagttgatattgaaaaaggcaatcaacttgtggaggaaattaaacctataatcaaagaaacaaaagtaccaggtgccgatattgaaataggaggttttggtggtttgtttgatataatgaaactaggatttaatgatcctctacttatatcatctactgatggagtcggaacaaagcttcttcttgcaatagaaagtaataatgttactggtgtaggaattgatctagtggcaatgtgtgttaacgatttaatagtccagggagctcaacctctttttttcttagattactttgcgacagggattctatcaaaaacaaccgctaaagaagttataaaaagtattgcagatgggtgtattcagtctaaatgtgcattaattggcggagaaaca

SEQ ID NO: 313784 - DNA, 463 bp, Unknown
  Bacterial polypeptide expressing nucleotide sequence isolated from the Sargasso Sea
aatgacaaaagaaattatagaaaatgatccatacaaattagctggtgtagacataacagcaggaaatgatttagttgataaaattaaaaatgacgtagctacgtctcataatcaaaatgttcttggaaacattggtggctttgctggaatgtatgaactcgacaaagattacattgaacctgtcatggtagcctgcacagacggtgttggtacaaaagttgctctagctcaagaaaataatcaaattgagttcattggacaagaccttgtagcaatgtgtgtgaatgatcttattgtttgtggtgcaaaacctctattttttcttgattattttgcttcatcaaaacttgaagttgaagaagcatctaagataattaaaaacatttcagaggcctgcaaaaattcaggatgcgctcttcttggtggtgagactgcagaaatgccaggtcattatgtcggtaaa

SEQ ID NO: 313785 - DNA, 739 bp, Unknown
  Bacterial polypeptide expressing nucleotide sequence isolated from the Sargasso Sea
agaaacatatgaatccgctggcgtcaatatagccgcaggagaagaagctgttcggcgaatcacaccactagtagaaacaacgctgcgtccagaagtcctaaccagtatcggagggtttggaggagcgttcgatataactcaaaccggcagaaagcacccagttctagtttcctcaaccgatggagtaggaacaaaggctcaagtagcggttatggcagatcaatatgaaactatcggtatagatctcgtcgctatgtgcgtcgatgacctcgtctgtgtaggagcagaaccactcttttttcttgactacatttctgtcggaacattgattccggaccaaatcgaatcaatcgtcaaaggaatcagtgcgggatgcaaagaagcaggctgtgcccttatcggtggcgaaatggctgagcatccaggcttgatggaatcaggagagtttgaactcgtaggcttcagcgcaggagtcgttgacaaagaggacatgatcaccggcgataatgttgctccaggtgacacgatcatcggattgcactccccgggacttcgaagtaacggatattcccttgcacgaaaagtattctttgatattgcgaagaaatcactgaatgaccctgcatgggacagcgcagacgtaacggtcgctcaagaacttctgcgcccatcagtgatatacacaccaacaattttaaaaatactggagcatcaccccatcaaatcaatagcgcatatc

SEQ ID NO: 313786 - DNA, 296 bp, Unknown
  Bacterial polypeptide expressing nucleotide sequence isolated from the Sargasso Sea
aatgaaaaaatctaaatttacatacgaaaagagtggtgtaagcataaatgctgcggatatttttgttaaatttatatcttctatttcagcaaaaaataaaggcaataaaaagtttaaaaatattggtggttttggctcagtttcagatattccgaaaaattttaaagagccaaaaattgtggctagtactgacggtgtaggtactaaaattgaaatagctaatatattaagaaaatatgacacaattggcattgatctggttgcaatgtgcgtaaatgatttaattgttcagggtg

SEQ ID NO: 313787 - DNA, 511 bp, Unknown
  Bacterial polypeptide expressing nucleotide sequence isolated from the Sargasso Sea
ttaaaaagtaatggagttcatagtaacggctttagtttagtaagaaaaattattcaaaacaataatcaaatagataaagaatttgaaaaagtttctcatttaaatttttatgatgagttattgaaacctacaaaaatttacaataatgtgattaaccaaatgttatctgaaaatatagaaattaaagcaatgtctcatattactggaggaggaattccagaaaatttaccaagatgtatgccttctgattttattccttatatcaataccggttcttgggaaatacctactttatttaaattccttaaagagaaaggatctattcctgaaaaagatttttggtatactttcaatcttggagtgggattttgtttaattattgataaacaatttaaggacgttatattaagtatctgtaaagagcacgaaatagatagttgggaaattggaaagatagttcaaaaaaatgattcaacaattagtaaatttttgccagaaattttaacttaaa

SEQ ID NO: 313788 - DNA, 643 bp, Unknown
  Bacterial polypeptide expressing nucleotide sequence isolated from the Sargasso Sea
tttaaaaattattaaaagtatcactgaagcttgtaagattaatagctgctcccttttaggtggtgagaccgctgaaatgccaggtctatataaagaaaatgattttgattttgcgggtttttgtgtaggtgcagtagaaagaaataaaattttacctaagaaagagctgatgaaggaaggcgatttactttatgggttaaagtcctcaggttttcattctaatggttattcactaattagaaaagtaatcaaagatagtaaattagatcttagtaagccaactgagtttcaatcaagttttaaaacaatttctgaagctttgatgactcccacattactatattatccaatgctaaaaaacatattaaaaaaaaattacataacaggcatatcccatataactggcggaggtttaacaggtaacgttccacgaatgcttcctgataatttgtctgctacaatagataaaaaatttgtgtgctgtgatgaaatctttaaatggtttcaagaattagcaaatatatctaatgaagaaatgctcaaaacttttaattgcggtctcggtttagttattactatttcaaagaaagattataaaaattttgaagatttaattaaaacagaaaatttggatatttttgaa

SEQ ID NO: 313789 - DNA, 496 bp, Unknown
  Bacterial polypeptide expressing nucleotide sequence isolated from the Sargasso Sea
tatgcccaacaaatcaccaaagaaaaatacttctttagactataaatcttctggggttgatgttgaagcaggatataaattaataaattctataaaacctttcgtagaaaaaactaaaagaaaagagatcatgtcaggtctaggctccttttctgcgatgagcaagttaccttctaatataaaaaatcctgttttagtaacttgtacggatggagttggtacaaagatagaaatagctagaaagatgaataattttggatctgtaggtaaagacctggttgcaatgtgtgtaaatgatctagttacatgtggtgctgaaccatttttattccttgactactatgttactgactcgcttaaagtaaaaactgccgcaagtgttattgaaggaatagctaaaggctgtgaagaggctaattgttccttggtaggcggggaaactgcagaacatcctaatagttttcctgaaaatagttttgaccttgctggttttgcc

SEQ ID NO: 313790 - DNA, 530 bp, Unknown
  Bacterial polypeptide expressing nucleotide sequence isolated from the Sargasso Sea
gatgggaagaacaataaagccaaatgatatcattattggtttaccatcaagtggtttgcacacaaacggatactccttagctagaaaactgtttttcaatactgcgaaatataatgtagatcaatacatcgagaccttaggagcaactgtaggagaagcgctgcttgagcctcatataaactacacaaaccacataggaaaaatactggagcttgatgtcgaaataaaaggggttgctcatatcactggaggtggattggttgaaaacttgcccagaatattgccatcgaattgcagcgtgaatataaataagggtagttggccgatattaccaatcttctcacttatgcaggatataggatctattgatgagggtgaaatgtttcgtgcgttcaatatgggaatagggatgacgattgtgattgatagtcattcaaaagaacaagtttttgacgccctgtcagattttaccaccccctacgaaataggatcagtatgctcaggtagatgtgaggtagcaattgtataat

SEQ ID NO: 313791 - DNA, 531 bp, Unknown
  Bacterial polypeptide expressing nucleotide sequence isolated from the Sargasso Sea
ataaaattctaactaaaaaaaaaattaaaaaaaacaatataattctagctataccatcaagcggcgttcactccaatggattttctttaataaggtacattttaaaaaaaaaaaaaataactttaaaaaagaataattttctaaaatcagaacttttaaaacctacaaaaatttacgtcaaagaaattttaaaattaattaaaaaaaattttattaatggatgcgcaaatataactggaggtggtataacagataatattaaaagaattatacctaatggtttgtgtgcagaaataaaactttcaaaaataaaaacaaaaaaaatattcaaatggataaaaaatcaaaatgtaagtgataaagaaatgttaaaaacgtttaattgcggagtgggattttgtttagtagttgataaaaaaaatttaaataaaataggtaaattttttaataatgattataaaccttatgtaataggtaaaattatttctggaaaaaaaaaaattaaattaaatgaaaatattaagtggtaat

SEQ ID NO: 313792 - DNA, 661 bp, Unknown
  Bacterial polypeptide expressing nucleotide sequence isolated from the Sargasso Sea
tggaataattaaaggatgtgatatttcacaatgtattttagttggtggtgaaaccgctgaaatgccagatacttatgagagaggtaaatttgatatagctggttttgcagttggaatcgctgataaaaaaaaaatacttaataaaaataaaataaaaaaaggggatttaattttagctgttccatctagtggtttacattcaaatggtttttcactggttagacatctattgaaggtaaaaaaaatagatataaaaaaaaatccctttcttaaaaaagaactaataagaccaactaaaatctatgtgaaagaaatttttaaccttgtgaaaaaaaatttattaaatggttgtgctaatattactggtggtggattagctgataatattagtagagttattccaaataatttatgtgcagaaatagatctgaataaaattaaacctctcaaaatttttaaatggcttaaaaagaataatatcagcgatagagaaatgcttaaaacatttaattgtggggttggtttttgtttaataattaatcccaaaaatataaaaagaattaacaaattttttttaaaggaatataaaccttatgttattggaaaaatttcaaaaaaaaaaaataaagtaattcttaatggtaaagttaactggatataa

SEQ ID NO: 313793 - DNA, 405 bp, Unknown
  Bacterial polypeptide expressing nucleotide sequence isolated from the Sargasso Sea
tcctagatagtctgggttgtactattggagaatcactcttaaaaccgcatatcaattatacaaatcatgtgctttgtgctttaaatacgaatgaacaaattaaaggggttgcacacataactggtggaggattaactgagaatattccaagaattctcccaaaagggtgttccgcaaatattaagcgaggaacatggcccagcataccggtttttgataccatcaaagaattgggtaatattgagactgaagaaatgtacagagcatttaacatgggcattggaatggtctttgttatagaaagaaaatcagtggatactattacggactcattaaaaacaattacgccagtttataatataggtatcatcgatgaaggcgaaggtcataccaattatgtatgag

SEQ ID NO: 313794 - DNA, 778 bp, Unknown
  Bacterial polypeptide expressing nucleotide sequence isolated from the Sargasso Sea
aaagaaaattaaggagcgaccaattaaaataacatataaatcttctggtgttgatactaacaaaacatcaaaattagtaaataatattgaaaatataacctctacaaatattaggagagaagttattaaaaatacaggtggattttgttctctgtttgacttaaaaaaactaaggtataaagatccaattttacttagtagtacagacggtgtagggacaaaactatgcgtagcaataaattataataaactagattatctaggatttgatttagtagctatgtgtgttaatgatattttagcaagtggaggtgaacccctattttttttggattatatttcttcttcaagaatagaaaaaaaagattttttaaaacttgttaaaagcatcaataaggcatgtaaagtatcaaattgctcattagttggaggagaaaccgctgaaatgccaggattatataaaaataatgattttgatatagctggattctcggttggtgtggttgaaagaaaaaatttacttaaaaagggaaatgtaaaaaaaggagatttaataattggtttagagtctaatggtatccattcaaatggattttcaatggtaagaaaaatactggaaattaataaaatatcacttgatgaaaagttatctttcaattctaaaaaaaaagttggagatgaacttattaaaccaacaaaaatatacattgattacatattacctactaataaaaaaaagaatgatcaaatcaattgctcatattactggtggagggat

SEQ ID NO: 313795 - DNA, 457 bp, Unknown
  Bacterial polypeptide expressing nucleotide sequence isolated from the Sargasso Sea
aatgaataaaaatctattaacatacaaaaaaagtggagttgatattaaagctgcagataagtttatagagttcatatcttccatttcatcaaaaaaaaagggcaaaaaaaagtttaataatataggtggttttggttctataacaaatatacctaataatttaaaaaatccaaaaattgtagcatgcacagatggggttggtactaaaatagaaatagcaaatcttttaaaaaggtttgatactattggcatcgatttagttgcgatgagtgtaaatgatttaatagtccaaggtgcaacccccctttttttcttagattatatttcgataaacaaaattaacttaccaaaactaaaatctataattaaaggaattgttaaagggtgtaatatatctggttgtgatttagttggtggtgaaacagctgaaatgcctggtacttatgaaaaaaacaaa

SEQ ID NO: 313796 - DNA, 661 bp, Unknown
  Bacterial polypeptide expressing nucleotide sequence isolated from the Sargasso Sea
tatgaaaggaataataaaaggatgtacgttagcagattgcaaacttgttggaggagaaactgcagagatgccaggaacttatacaagtggaaaatttgatattgcagggttttcagttggattagtagaaaaacataaaattcttaaaggaaaaataaaaaaaaatgatttaattttagcaataccttcaaacggtattcattcaaatggatattctttaataagagaattaataaaaagaaaaaaaattgacataaataaaaataaatttttaaaaactgaattaattaaaccaacaaaaatttatgttaaagaagtgttaaatttaattaataataatattttaaatggatgtgccaatatcacaggtggtggtttaaaagaaaatattaaaagaataattccagaccatctttgcgctgaaatagatttaaataaaattaatacattaaaaatttttaaatggttaaaaaattcaggaattgaagaaaatgaaatgttaaaaacatttaattgtggagttggattttgtttaatcattaacaaaaaaaatttgaaaaaagtaaaaaaatatttttctaaaaaatttcaaccttatgttgtaggaaaaatttctaataataaaaaaagagtgaaaattgatggaaaaattaaatggtaa

SEQ ID NO: 313797 - DNA, 287 bp, Unknown
  Bacterial polypeptide expressing nucleotide sequence isolated from the Sargasso Sea
aatgaaaaaattatcatactcaagttctggtgtaagtatcaacaaaggaaatgagtttgtgagcaaaattagcaacttaatcaaaaaagataaaggtcttattacgactgaaatcggaggattttcaggtcaattccccttaagcactaaaattaaaaagcctatactcgttggagcaacagatggtgtagggacaaaaattcaaattgcagagaaaatgaatgaccataaaacaattggtatagatttagttgccatgtgtgtgaatgacctgattgttgataaag

SEQ ID NO: 313798 - DNA, 481 bp, Unknown
  Bacterial polypeptide expressing nucleotide sequence isolated from the Sargasso Sea
aatgaccacttataaggaagcaggcgttgatattgatttagctaatcaagcagttgttaaaattaaagatctagttaaaggaacttttaacgaaaataccttaacagatattggtggctttggaggctgctatttattcccaaaagataaatatgagaaccctgtgctagtatcaagtacagatggggtaggtacaaagcttaaaattgcctttttatcagatacacataatacagtgggtcagtgccttgtaaatcactgtgttgatgatatacttgctgtaggtgccaggccattattttttcttgattattttgcaacaggaaagctatcagttgagaaaattgaacaagtaatgtatggcttttcaaaagcttgtaaagaaaattcaacagtccttattggtggggaaactgctgaaatgccagatttttatcaacaaggagagtatgatatcagtggaacagttgtcggcgttgtt

SEQ ID NO: 313799 - DNA, 545 bp, Unknown
  Bacterial polypeptide expressing nucleotide sequence isolated from the Sargasso Sea
aatgaataaaaaaattacctataaagatgccggtgttgatataaagaaagctgatgaagcgattgaaatgtcaaagaaggagatcagcagcacttttagtaaacatgttttgtctacgattggaggttttggttccatgtattcgctgaaagatatattcaataattatcgtgatccagttctggttcaaagcattgatggtgttggaaccaaaatgtctgttgctatggcggcaaacaactttcagtttattggtcatgacctagtaaatgcgtgttgtaatgatgttgcgtctaccggagctgtgcctttgacttttttagattatgtggcaggtagtgatcttgataaaagcattatttcagacataataaaaagtgttgcacaagagtgcaaggaacatggtgtttctttggttggtggcgaaactgctgaaatgcctgggacctatcacaaaaatgagtatgatttagttggggtggctactggcattattgaaaaaaataacattattgatggaacaagcgtacaggcaggagatgtgg

SEQ ID NO: 313800 - DNA, 301 bp, Unknown
  Bacterial polypeptide expressing nucleotide sequence isolated from the Sargasso Sea
atggcttatagcaaattaacatatgcagatagtggagttaatattaagaaagctgataaatttgtaaatttcatatcttctttatcaaaaaaaacaaataaaagtggtgattttaagaatattggtggttttggtgcgatttcaaaagtaccaaaaaatctaaataatccacacatagttacaagtacagatggtgtgggaactaaaattgaaatagctaatgaattaaaactatttaacacaatcggtatcgatttggttgccatgtgtgttaacgatttaattgtacaaggagctaagc

SEQ ID NO: 313801 - DNA, 355 bp, Unknown
  Bacterial polypeptide expressing nucleotide sequence isolated from the Sargasso Sea
gatgacttcagataataaagattcaaaattagactataagaaatcaggtgtagatgtagatgccggttacgagctagtagaaagaattaagccctttgtaaaaaagactaaaagacctgaaataatgtctgggttaggttcattctcggcaataagcaggattccttcgcatattaagaaccctcttctagttacctgtactgatggcgttggaacaaagattgaaatagcgaaagcagaaaataaatttgaaaatttagggatagatttagtagcaatgtgtgttaacgatctagtcgtttgcggtgcagaacctttattgtttttagactactacgtaacagataaattacag

SEQ ID NO: 313802 - DNA, 433 bp, Unknown
  Bacterial polypeptide expressing nucleotide sequence isolated from the Sargasso Sea
atgagtaaatcatctaaaaatagtgacccgtattcaaaagctggtgttaacatcgatattgggaataagctcataagtcaaattaaaaagtctgttgtatcctcgcacaacgcaaatgtcattgatggtattggaggatttgctggtctttatgaaataaatcagaagtttaagaatccagttattgttgcatgcactgatggagttggcacaaagctaaacttatgtctgcaatatcaaaaattcaatacaattggacaagatttggttgcgatgtgtgtaaatgatcttgttgcttgtggtgcaaagccactattttttctagattactatgcaacttcaaaattagaattacatcaatcatccaaaattataaaaggtgtagcaaaagcttgcagagagttctcttgtccacttctgggtggtgagacag

SEQ ID NO: 313803 - DNA, 739 bp, Unknown
  Bacterial polypeptide expressing nucleotide sequence isolated from the Sargasso Sea
tcctttgacttttttagattatgtagcgggtagcgatcttaataaaaatattatttcagatataataaaaagcgttgcacaagagtgcaaagaacatggagtttctttggttggtggcgaaactgctgaaatgcctgggacttatcacaaaaatgagtatgacttggttggggtagctactggcattattgaaaaaaacaacattattgatgggtcaagcgtacaggcaggagatgtggcgattggagttttttcaaacgggcttcataccaacgggtactctttggctagaaagcttatttttgatacgtttggactttcaacgtctgactccctgccagggtacaacgtatcagtaggaggctgcttgttggctccacacacaaactacagctctttaatcgggcaagttctaaataagggaattaatattaaaagcatttctcatattacgggcggcggcttggttgataatgttcctcgcgttattcctggagatgtctctttagaggtaaatattaactcttgggaaaaaataccaatatttgatttcttaaaaaacaacctagatattgaaacaaaagacctatatcaaacttttaacatgggaattggccttgtgtttattgtagaacaatcggaaaaaaacaggttaatttcatcaataggtaaagatagttgtagtgaaattggtgttgttattaacgacagtgttaatgcggtgcatctttatggctaa

SEQ ID NO: 313804 - DNA, 412 bp, Unknown
  Bacterial polypeptide expressing nucleotide sequence isolated from the Sargasso Sea
aattataaaaaaaataaaaatttaaagaaatggttgttagaacctacaaaaatatacgtcaaagaaatatctaaattaattgatttaaagttaattaatggatgtgcacacataacaggtgggggaataagggataacttatcaagaataattcctaaaggtaaatgtgcaaaaataaatttaagcaaaataagagtgaaaaaagtattttcatggttaaaaaataataatatttcggacagtgaaatgttgaaaacattcaattgtggagttggatttattttgattataaatcaaaacaatttaaataaagtaaaaaaatattttaaaaaggattatgctccttatgtaattggaaaaattactgatggaaactctaaagttatgttaaatggtaaagttaactggtaaa

SEQ ID NO: 313805 - DNA, 445 bp, Unknown
  Bacterial polypeptide expressing nucleotide sequence isolated from the Sargasso Sea
atgaataaaaaaattacttacaaagatgccggtgttgatattaaaaaagctgacgaagcaattgaaatgtcaaaaaaagaaattagtagcacgtttaacaaaaatgttttgtcttcgattggtggctttggctcgatgtattctctgaaagacattttaaacaattttgaggatccggttttggttcaaagcattgatggcgttggaacaaaaatgtctgttgctatggctgcaaagaactttcaattcattggccatgacctggtaaatgcgtgctgtaatgatgtggcggcaactggggctgaacctttaacttttttagattacgtggcgggcagcaaccttgataaaaacattatttcagatgtaattaaaagcgttgcacatgaatgcaaggagcatggtgtttctttggtcggcggcgaaactgctgaaatgcccggaa

SEQ ID NO: 313806 - DNA, 583 bp, Unknown
  Bacterial polypeptide expressing nucleotide sequence isolated from the Sargasso Sea
ttacgaccttgctggttttgctgtaggcgttgtagaaagatcaaatattttaccgagtgctataaaggaaaattatttcttgttggggctgcaatcaagtggtctacattcaaatggcttctcattaattcgggatattgtctctactttcaatatagatatccacgacaaagctcctttctcgcgaaaaaaacttggagatatattgcttacacccaccagaatatacattaataaccttctgcaacttattgaaaaaaaatatgtatatggaatatctcatatcactggcgggggacttgtagaaaatattatgagagtgatcccaagaaatctaacaattcaaattgacctatcaaccattaaacctcaaaagatttattcatggataagagatatatctaatatttcggacaatgaaatgctaaaaacatttaactgcggtttgggtatggttttagtggtcgacgaagggaatgttaagaattcgttaaaattattaaagagcctgggagaaaatccacgtgtcattggaagtgtgatcaaggggaaatcgccttcacttaaaggtagccttttttga

SEQ ID NO: 313807 - DNA, 709 bp, Unknown
  Bacterial polypeptide expressing nucleotide sequence isolated from the Sargasso Sea
attctttcttgactatatagccgtacagaaaattaaattaaaaaaagtaaagtcaattataaaaggtattgttaaaggttgtaagatgtctggttgcatacttgctggtggagaaactgccgagatgcctggaacatatgagtctaataaatttgatttagctggctttgcggtaggcgtggtatcaaaaaaaaaattgatacataaaggtagggtcaaaaatagaaatattatattggctataccatctagcggtctccactcaaatggtttttccttagtgaggcaaattttaaaaaaacaaaaaataaataattttttaaaaaaagaacttttaaaacctacaaaaatctatgtagatcctgtattaaaactttcagagaagaatttattaaattcttcagccaatattaccggtggaggaataattggaaatattactagatctattccatcagaattaactgcgaatattgatttatcaaaaattaaagtaactaaaatatttaaatggattaaaaataaaaatttatcagacaaagagatgctagaaacatttaattgtggtgtgggtttttgtttaatagtagaaaaaaataaaattaataaaataaaaaaattttttcaaaaaaaatttaaaccttacgaaataggttttatttcaagatcatctaaaaaaattaaattattgaaccggataaaatggtaa

SEQ ID NO: 313808 - DNA, 742 bp, Unknown
  Bacterial polypeptide expressing nucleotide sequence isolated from the Sargasso Sea
ttgagcaaactatacaaaaaatcaggtgttgatgtaataaaaactgacaaacttattggtcaggctttgaaatttattaaaagttcacacagtgataaagttttaggaaacaaactaggttttagtgcagaatataaagttaataaagacgttacattatgtgcagcaacagatggtgtaggttctaaagcgattttagcagctgagcttaaagaatataaaggattaggccaagatttagttgcaatgtgttcaaatgacttgttgtgcaataaagcaaaaccactcttttttttagattattttgcttgcagttcagttaaatcgaaacaatacactgaaatattaaaaagcattactagcgcatgtaaaaaaattaattgttctcttataggaggtgaaactgccgaaatgccctcattatatagagggaatcattttgatattgcaggatttttagtaggtattaaagaaaatcataaaaatttaaaaatttcaaaaggtgatctaatatttggaattaaatcaaatggttttcattccaatggatattcattcattagagatattattaaaaaaaataaaattgatataaaaagagcaatatttaataaacaaaagctatctaaacttataatgaaacctacgcgcttatatcaccaattaataagtaataatgatttaagatacataaaaacactctctcatataacaggaggtggtatttactcaaaattttaaa

SEQ ID NO: 313809 - DNA, 331 bp, Unknown
  Bacterial polypeptide expressing nucleotide sequence isolated from the Sargasso Sea
aatgtctactataaaaagtaaaaaaacaaaaacatatattgatgctggagtaaatattgatataggcgataaatttatagatcaaattaaacctttagttcaagaaacaaatacttctggtacaaaatcatcgctaggtggttttgggggtgtttttgatttgtcaaaactattgttaaaagaacctcttttaatttcatcaactgatggagttggaactaagcttgaaattgcaattaaaatgcaaagacacgatacaataggcattgatttagtagcgatgtgtgtgaatgatattctagctgaaggtgctcaacctctttttttctag

SEQ ID NO: 313810 - DNA, 499 bp, Unknown
  Bacterial polypeptide expressing nucleotide sequence isolated from the Sargasso Sea
atgaataaaaatttatttacatataaaaaaagtggtgtcgatattaaagctgcagataaatttataaatttcatatctaatataacaacaaaaaaaggaggcagaaaaaagttaaataatattggtggatttggttctataaacaaaataccaaaaaatattaaaaacccaagaattgtagcatgtactgatggtgtaggaactaaaattgagattgcaaatttaattaaaaattatgatactattggtattgatcttgtagcaatgagcgttaacgatttgattgttcaaggtgcaaaacctctaatttttttagattacatttctataaacaagataaacataaaaaaactcaaatcaatcataaaaggaatttttcaaggatgtaaaatttctgagtgtgctttagttggtggtgaaactgcagaaatgccgggaacatatgaaaaaggtaaatttgatattgctggttttgctgttggaatagtgatgaaaaaaa

SEQ ID NO: 313811 - DNA, 677 bp, Unknown
  Bacterial polypeptide expressing nucleotide sequence isolated from the Sargasso Sea
aaagtcaatcattaaaggtatattaaaaggatgtaaacaatcaggatgccagttggttggtggtgaaacagcagaaatgccaggtacatatgagaaaggtaaatttgatattgcaggttttgcagttggtgttgttgatggaaaaaaagttttaagtaaaaataaaattaaagttaatgatttagtgatagcaattccttctagtggacttcattctaatggatattctcttattagatacttgattaaaaaaaaaaaaattaatattaaaagaaataattttttaaaaaatgagttgttaaaaccaactaaaatttatgtgaaagaattacttaaattaattaatagaaatttaattaacggatgtgcaaatatcacaggtggtggcatatccgataatgttaaaagaatagtgccaaataatttaattgcagaaatcaatttgaataaaattaaaactctaaaaatatttaaatggttaaaaaaaaacggtatatcagataaagaaatgcttcaaaccttcaattgtggtgttggtttttgtttaataataaatcctagaaattataaaaaaattgcgaggtatttcacaagaggatttaaaccatatataataggaaaaattacaagaggtaaagataaagtaaaattaaatggctctatcaactggatctaaa

SEQ ID NO: 313812 - DNA, 655 bp, Unknown
  Bacterial polypeptide expressing nucleotide sequence isolated from the Sargasso Sea
aggcattgctgaagcctgcattgattcaggttgctcattgcttggaggagaaactgcagaaatgcctggacattacattgataataattttgatttagctggtttcgctgtgggatgtgttgaaaaagataaaattatttcatctgaaaaagtttcggccggtaatatacttattggtattgagtctagtggtcctcattcaaatggattttcattaattagaaaggtattaactaattatgctggtcctataaatattaaaaagaaaatgatagaagaggctcttgtgccaacaactctttatccaaaacttatttcaaatattctagagaagtatcaagttaattcaatgtctcatataacaggcgggggtttgttggaaaatttacctaggtcaattcctaagaatttatctgcagagattaactctaagtcatggcaaatgccttctatttttgattggctcaaaaatgaaggaaatattttacaacaagacatgtatagaatatttaattgcggtattggattagttctcattgtaaatgaggaggatgttgattctatatcgaaagaaataaagtcaaataattttaatagttttgttattggtaaggtgatagaaaaaaatcaaaaagaatctgtaatatttaaataa

SEQ ID NO: 313813 - DNA, 574 bp, Unknown
  Bacterial polypeptide expressing nucleotide sequence isolated from the Sargasso Sea
ttgggtggtgagactgctgaaatgccactagtttataaggagcaaatgacagatttagttggttgtatagttggattaaaaaatacaaacttttttaaaaataaaattgttaataatagtaaaattattggattttcatctaatggaccacatacaaatggattttcattaataaataaaatagacaatattgataactcaatagcaaatactctattaaatccacatacatgttatctaagtttagtgaaagaattggtagaaaaatatggatatgatttcattttaggaatggctcatattacgggaggtggattaattgaaaatatatcaagagttatacctgataatttaaatttaaaaataacaaatacattaccattaccagaatggtgtcaatatttaagtaaaaaattatctttatcaaaacaagaaatgttaaatgtttataattgtggaatcggatttgttttaattatagaaccacaatttatacataaaattaataaaacagaatttaattacatcgatttaggaattatagttgaaaatcagcaggtaattcttcaataat

SEQ ID NO: 313814 - DNA, 406 bp, Unknown
  Bacterial polypeptide expressing nucleotide sequence isolated from the Sargasso Sea
aatgaaaaaaacaaaaaatagttataaaaaaagtggcgtagatattaagactgctgacaaatttgcaaaatatattggaaaatactcaaaacaggtctttaaaaaaaaagttaataaatttaacaaaaataatataggaaattttgcttcagtgtttgacttaagtaaactaaaaattaagaatcccttgctggtagcaagcactgatggagtaggtacaaaaattgagatagcaaattattttaataaatttgatacaattggtgtagatctagttgctatgtgtgtgaatgatttaattgttcaaggtgcaaagccattattttttttagactacatcgctgtaggaaaaattaacttaaagaaaatgaaaaaaattattaaaggtatagtacatggtgcaaaa

SEQ ID NO: 313815 - DNA, 316 bp, Unknown
  Bacterial polypeptide expressing nucleotide sequence isolated from the Sargasso Sea
atgaaaaaaacaaaaaatagttataaaaagagcggtgttaatattgaaaccgctgataaatttacaaaatatattggaaaatactcacaacaagtctttaaaaaaaaattaaataaatttaataaaaataatattggtaaatttgcttctgtttttgatcccggaaaatttaaactgaaaaattctcttctagtagcaagtacagatggtgtgggtactaaactagaattagcaaataaatttaacaagtttgataccattggaatagatttggtagctatgtgcgttaacgatttaattgtacaaggagcaaagc

SEQ ID NO: 313816 - DNA, 214 bp, Unknown
  Bacterial polypeptide expressing nucleotide sequence isolated from the Sargasso Sea
atgtataagctcaaaaaagaatatgaagacccgattttggttgcttgcacagatggtgtgggcacaaaagtatcattagctcaagattttaataacttaagcggtattggccaagatcttgttgcgatgtgcgtaaatgacttaatagtttgtggtgcaaagcctttgttctttttagattattatgcttcttcggagctaaatattaaggaag

SEQ ID NO: 313817 - DNA, 688 bp, Unknown
  Bacterial polypeptide expressing nucleotide sequence isolated from the Sargasso Sea
aatttaacaaaattaaaaaatattatcaaaggtatacatgaaggatgcaaaatgagtgactgtcaattagtgggtggagaaacagctgaaatgccaggaacctactctaaaaataaatttgatttggctggattttctgtaggacttgtaaataagaataatgtgttaaagaagaaaaagataaaaaaaaataatttgattttagcaataccttctagcggactccattcaaatggatattccttattaagagaagttttaaaaaaaaagagaatcaatattaaaaaaaataaatttttgcggaatgaaatattaaaacccactaaaatttatgtaaaagaaattatgaatttgcttgatagaaaactaattaatggatgtgcaaatataacaggtggaggtattggtgacaatattgaaagagttataccaaaaaatctttgtgcaagaatagatttagataaaataaaaacccataaaatttttagttggatcaaaaaaaatggtgtttctcaaaaggaaatgcttaaaacttttaattgtggtgtaggtttttgtttgatcattaaaaaaaataattttcataaaattttaaagttttttcccaagcaataccgtccctacataattggagaaataattaaaaacaaaagtaaagtaaaatttactaataatatatgctggtaat

SEQ ID NO: 313818 - DNA, 673 bp, Unknown
  Bacterial polypeptide expressing nucleotide sequence isolated from the Sargasso Sea
attaaagaatatagtaagaggaattatcaaagggtgcaatatagctaattgtaaattagttgggggagaaactgcagagatgcctggaacatatgcaaaaggcaaatttgatattgcaggttttgctgttggtatagttgaaaaaaaaaaaatattaaataataagattaaagataaggacctaattttagcagtgccatctaatggactacattcaaatggtttttcattagtaagatttttaattaaaaaaaaaaaaattaatttaaaaacaaataaatttctcaaaaaagaattaattaaaccaactaagatttatgtaaaagaattatcaattataaatgaaaaagaattgattaatggttgtgcgaatataactggaggtggtttagcagataatataaaaagggtaatccccaaaaaattaggtgcagaaataaatctaagtagtattaaaacattaaatatttttaagtggttacaccagatgggcataagtgaaaatgagatgttaaaaacttttaattgtggtgtaggtttttgtttaattgtaaatccaaaaaatttaaattctgtaattaaatattttggaaaaaattttaaaccctatataattggaaagatagttaaaaattcaaataaagtaaaattaagtggaaaaataccttggtaa

SEQ ID NO: 313819 - DNA, 505 bp, Unknown
  Bacterial polypeptide expressing nucleotide sequence isolated from the Sargasso Sea
atgaaatcgcaaaaactctcatataaaaatagcggagtaaacataaagagtgcagataaatttatagattttatatccaatttaacaaaaaaaacaaagaaaagtggtaattttaagaacattgggggatttggagcaatttcaagcataccaaaaaactttaaaaatcctcacattgtaactagcacagacggggtaggaacaaaattagagatagcaaatgaaattaaaaaatttgacacaattggcatagatcttgttgcgatgtgtgtaaatgatttgattgttcaaggtgcaaaaccttttttatttctggattatatttcagtagacaaaattaatttaaataaaatgaaagaaattattaaaggcattgttaagggatgtgaattatcaagttgtaatctggtaggaggagaaacagcagaaatgccaggtacatattcgccaggtaaatttgatcttgcaggtttttctgttggtttagttgaaaaaaaaaatattc

SEQ ID NO: 313820 - DNA, 523 bp, Unknown
  Bacterial polypeptide expressing nucleotide sequence isolated from the Sargasso Sea
atgacatcaaataagttaacatacagtaagagtggagttaatattccaaaagctgatagttttgttaagttcataagttctataactagaaaatcaagtaaaagtggtgattttaagaacataggaggttttggtgcaatctctccaattcctaaaaagttgatagaacctcaaattgttactagtactgatggagttggaacaaaaattgaaatagcaaatgatcttaataaatttgacacaatcggaattgaccttgttgcaatgtgtgtcaatgatttagtggttcaaggagcaaagccatacttatttttagattatatatcgataagtaaaataaacttaaagaaactaaaaaatttagttaaaggtatcgttaagggatgtgaaatagctgattgtaagttagttggtggagaaacagcagaaatgccaggaacatactcaaaagataagtttgatattgcaggttttgctgttggtcttgttgaaaaaaaaaaaaatactcaacaaaaaaattaga

SEQ ID NO: 313821 - DNA, 421 bp, Unknown
  Bacterial polypeptide expressing nucleotide sequence isolated from the Sargasso Sea
agtaaatacctccgtcaaagacaaaattaaaggagttgggaatttaggagatgcactgttacgtcctacagaaatttacgttaaaccagttttagaatctttgaaaaaatgtaagatcaacggattagcccacattacaggaggctcatttacaaaattacttagattaaaacaaataggctatcatttggataacatgccaaagaccccaccacttatgcaactcatagaagatacaggagtaaaaaatgaagaaatgtacaagacattcaacatgggagttggattttgtattatcgcacctgagaatcaagtgaagggaattcacaagatttttgccaaatataagatgaaatcttatgaaattggcagaattagtaagaacaagggagtttttattaataaattaaaaattgcatag

SEQ ID NO: 313822 - DNA, 633 bp, Unknown
  Bacterial polypeptide expressing nucleotide sequence isolated from the Sargasso Sea
attgcagtttagttggtggtgaaaccgcagaaatgccaggaacgtatgataaagggaagtttgatattgctggttttgcagttggtatagttgatgaaaataaaattttagttaaatcaaaaataaaaaataatgacttgatattagccatcccatctagcgggttgcattcaaatggatactcgcttgtaagaaatatactaaaaaaaaaaaagattaatttaaaaaaaaaaacttttttaaaaaaagaattaattcgtccaactaaaatttatgttaaggaaattataagcttaattgataaaaacttaattaatggttgtgcaaatataacaggaggtggtttagcggataatatcaaaagagtaattccggataagctttctgcaaacatctatttaaataaaatcaaacccttaaaaatatttcaatggttaaaaagaaatcaaattgaagacaatgaaatgttaaaaacatttaattgtggagttggtttttgtttaataattaatccaagtaaatttaataaagttaaaagaatattttcttataaatataaaccatatgttataggaaaaatttcaagagacaccaagaaagtaaaattgaatgaaaaaattaactggttttaac

SEQ ID NO: 313823 - DNA, 467 bp, Unknown
  Bacterial polypeptide expressing nucleotide sequence isolated from the Sargasso Sea
aatgaataaaaaaaaaattacctataaaaaaagtggagttaatattaaggctgctgataaattcgttaatttcatttctacagtatcagcaaaaaaaaaaggcaaaaagaagttttctaacataggtggttttggctcaattagcagtattccaagtaatattaaacagcctaaaattgtagcttgcacagatggtgtgggaactaaaattgaaattgctaattctttaaataaatttgatacgataggaattgatttagttgctatgagtgtaaatgatttaattgttcaaggcgcgaaacctttcctttttcttgattatatctcaatcaataaaatagatttaacaaaactcaaatcaatcataagaggcattataaaagggtgtgcacaatcaaattgtgaacttgtaggaggtgaaactgctgaaatgccaggtacttatgaaaaaggaaaatttgatatag

SEQ ID NO: 313824 - DNA, 535 bp, Unknown
  Bacterial polypeptide expressing nucleotide sequence isolated from the Sargasso Sea
attgagtaaacaccctgtagataaatataaacttgctggagtagatcgtaactccgctgaacaaataaaagattctcttgctaatatagcaaaatcatcacatggaaaggaagttttatctgggataggaggttttggcggtttatataaactagctagttatacaaatcctgtcctggtatcaagtactgacggcgttggtacaaaattacttctagggaaattaactggcaattataagaatttaggaattgaccttgtaaatgcatgtcttaatgatgtaattgtcagtggtgcgacgccgatattctttttagactatattgcaattggaaaaatcgatcagaccatcatcaaccagctggtatccggaatgaatcttgcatgtgaagacgctggttgcgctctaatcggcggtgaaacagctgaaatgcctggaatatacgatgatgatgattttgatatggcgggattcgtcgtaggggtcgcagaagaagatgaattactgaactcaaatgcaattaatgctggcgat

SEQ ID NO: 313825 - DNA, 551 bp, Unknown
  Bacterial polypeptide expressing nucleotide sequence isolated from the Sargasso Sea
tgaggaagccgaaattctaggtatagaaggccctaaaaatgatgacatcttaattgggatagaatcttctggttttcactctaatgggttttccttaatccgtaaggttatagatgactttgatattgatctagaaaaaaaaattggtggtgaaaaactagggaacatacttctaaaaccaactcatgtgtatgtaaatgaaatcttagctttaaaaaaaataacaagcatcaatgccatcgctcatataacaggaggtggattcgatgagaatattccacggatgcttggagaaaatcaaaaggctatcattgaacatgactttgatgattggccttcagggaaatatttcaaatggctaatggaaacgaccggtatacctaaagaaaatctagttaatacatttaattgcggtgtaggtttggtaatctctgtaaataaatcaaatgaagaggatgttttaggtgccttgaatcaatctttgtttgcaaaaaccataggaaaagttcaagaaaaagaaccgaacgaatcgcaagtctcatatgtctaaa

SEQ ID NO: 313826 - DNA, 304 bp, Unknown
  Bacterial polypeptide expressing nucleotide sequence isolated from the Sargasso Sea
ggctcacatcactggtggaggatttcaagagaatattattcgagcaatacctgagggctgccaggcaatcatcgataaaaattcatggaacttgcctcctgtctttcaatggatccaaaatcaggctggcatcgattcaaatgaaatgctgagaacttttaattgtggcataggttatgttctgatcgttaaagcggatgttaaaaattctgtgatcaagcatttccaagatgaggagttagaagcttatgagatcggttctataacaagtggtgagaaatctgtcatcatcaatcatggctga

SEQ ID NO: 313827 - DNA, 799 bp, Unknown
  Bacterial polypeptide expressing nucleotide sequence isolated from the Sargasso Sea
atgaataaaaaaataacctataaagatgcgggagtagatattaaaaaagctgatgaggctattgaaatgtcaaaaaaagatattagcagtacatatagcaaaaacgtcctgtcttcgattggtggctttggttcaatgtattctttaaaagatgttttaagcgagtttaaagaccctgttttagttcaaagtattgatggggttggaaccaaaatgtctgttgctatggccgcaaacaactttaaatatatagggcacgatttggttagtgcgtgttgtaatgatgttgctgctacgggcgccgttcccttaacatttttggactatgttgctggtagcagtcttgacaaaaatattgtttctgaggttattaaaagtgttgcccatgaatgtaaacaacatggggtttccttagtaggcggagaaactgctgaaatgcctggaacataccgtgcaaacgaatatgacttggtgggggtagcaaccggcgttgttgaaaagaataaaataattgatggatctagcgtctgtgatggtgatattgctattggcgttttttcaaacggtttacatacaaatggttactccttggcaagaaaattaatttttgaatctatgggtcttaccacatcagacacattgcctggctataatatatcaataggcgacagcttattggcgcctcacacaaactatagttctctaatcgaaaaaacggttggtgctggaatagcgcttaaaagcatttctcatattactggcggtggattggtggacaacgttccaagggttttcctaa

SEQ ID NO: 313828 - DNA, 544 bp, Unknown
  Bacterial polypeptide expressing nucleotide sequence isolated from the Sargasso Sea
gttggtcttgttgaaaaaaaaaatacttaataaaaaaattaaaaataatgatcttattttagctgtaccttctaatggacttcactctaacggttactccttggtgagatatgtcttaaaaaagaaaaaaataaatttaaaaacaatcaaatttctcaaagacgaattaattagaccaactaaaatttatgtaaaagaattatcacttattaatgaaaaaaatttaataaatggatgcgcaaacataactggtggaggtcttgtagataatattcaaagaataataccaaaaaatttatgtgctgaaatagatttaaatagagtcaaaacattaaaaatttttaaatggttatataaaatgggtgtaagtgagaaagaaatgttaaagacctttaattgtggtataggtttttgtttagtgataaatcctagaaatttaaattcagtaagtaaatattttggaaaaaaatttaaaccctatacaattggaaaaatagttaaaaattcaaaaaaagtaaaattaagtggaaaaatatcttggtaa

SEQ ID NO: 313829 - DNA, 514 bp, Unknown
  Bacterial polypeptide expressing nucleotide sequence isolated from the Sargasso Sea
aaaaaaattaaaaaaaataatataattttagctataccatcctctggggttcactctaatggtttttcccttataagatatattttaaaaaagaaaaaaataaatttaaaaaaaaataattttttaaaatctgaactcttaaaacctacaaaaatttatgttaaagaagttttaaaattaattaaagaaaatttaataaatggatgtgccaatataacaggtgggggtatcccagataatttgaaaagaattatacctaacggcctatgtgctgaaatagatctttcaaaaataaaagcaaaaaaaatatttaaatggataaaaaatcaaaacgtaagtgataaagaaatgttaaaaactttaaattgtggagttggattttgtttaataattaatgctaaaaaattaaataaaataggtaaattttttaataaagattttaaaccttatataataggtaaaattatttctggaaaaaataaaattaaattaaatgaaaaaattaagtggtaat

SEQ ID NO: 313830 - DNA, 480 bp, Unknown
  Bacterial polypeptide expressing nucleotide sequence isolated from the Sargasso Sea
aatgaataaaagaacttttacatataaaaaaagtggtgttgacattaattcttctgataaatttataaaatatatatcaaacatttcatcaaagaaaaaaggcaaaaaaaagtttaataatattggtggatttggatcaattacaaatttaccaaacaatctgaaaaatcctaagatagtagcttgcaccgatggtgttgggactaaaattgaaattgcgaataccttaaataaatttgacacaataggaattgatttagttgcaatgagtgtgaacgatcttattgtgcaaggcgcaaagcctttaatctttttagattatatttcaataaacaagattaatttaaaaaaacttaagctaatcattaaaggaatcttaaaaggttgcaaacaatctgggtgtgaattagttggaggagaaacggcagagatgcctggtacttatgaaaaaggtaaatttgatattgcaggtttcgcagt

SEQ ID NO: 313831 - DNA, 403 bp, Unknown
  Bacterial polypeptide expressing nucleotide sequence isolated from the Sargasso Sea
atgaattcgaataagttaacatatgctaaaagtggagttaacatcaagaaagcagataaatttataaacttcataacttcattatcaaaaaaaacaaacaaaagtggtgattttaagaatattggtagctttggtgctatttcaaaagttccaaataatctgaaaaatccacatatagtgacaagtactgatggagttggaacaaaaatcgagatagccaatgaattaaaaaagttcgacacaattggtattgatttggtagctatgtgcgtaaatgatttgattgttcaaggtgcaaaaccttacatatttcttgattatatttcgatagataaaattaacctaacaaagcttaagaatattttaaaaggaataatgaaagggtgcgaaatagcagatttaa

SEQ ID NO: 313832 - DNA, 253 bp, Unknown
  Bacterial polypeptide expressing nucleotide sequence isolated from the Sargasso Sea
aatgacaaaagaaattatagaaaatgatccatacaaattagctggagttgatatcgatgctggcaacaatcttattgataaaataaagaaaagtgttgcagcatctcataatcaaaatgttttaaataatattggaggctttgcaggtatgtatgagcttgataaagatattgataatcctgttttggttgcatgtacagatggagttggaactaaagtgtcgcttgctcaggagttcaatgtctttctggca

SEQ ID NO: 313833 - DNA, 295 bp, Unknown
  Bacterial polypeptide expressing nucleotide sequence isolated from the Sargasso Sea
gcacatataactggaggcggactcgttgagaatattcctaggattttgccaaagggcatgggtatagagatttatcattctagaatcccaaagaataaactttttaaaaatatacaagactattcaggtctaaattttgaagaaatgattaaagtttttaatatggggattggttttgtcatttgtataaatgaaaaagacttgggggttttatcaaaaattttaaactctaaaaatgaaaaattttatgtattaggtaacgttgtcaaaggaagcgaatttaaaattatctaat

SEQ ID NO: 313834 - DNA, 514 bp, Unknown
  Bacterial polypeptide expressing nucleotide sequence isolated from the Sargasso Sea
tttataataggattaaaatcatcaggcgttcattcgaatgtattttcactagtaagaaaaattctagatgtttctaaaactcaattagattctaatactccatttaatgagtttacttttagtgaagaactcttaaagccaacgagaatttatgtaaaaaccattatttctttgcttaataaaactaacgctattaatgcaattgcccatataaccggcggaggaattacagaaaatttaccaagagtttttggttcaggaaaagttcaggcagaaatttataaagatagctgggaaaaaccagaaatttttcactggcttcaaaatgctggaaatatagaagaatctgaaatgctaaagacatttaattgtgggattggaatgatcctagttgttaatccgaaagaaactaataatttactaaataaacttaaagaactaggagaagaacctgcattaattggaaaaataattcataatgaaaacccagaaactcttgtattatataaataaa

SEQ ID NO: 313835 - DNA, 598 bp, Unknown
  Bacterial polypeptide expressing nucleotide sequence isolated from the Sargasso Sea
aatgccgggaacctattctaagaataaatttgatgttgcaggttttgctgtaggaattgttgaccaaaaaaaaattattaaaaaaaaaaatataaaaaaaaataatttaatattagctgtaccatcaagtggtatacattcaaatggatattctttaataagacatattttaaaaaaaaagaaaattaaaataaaaaaaaatatttttttaaaaaaagaattactaaaaccaacaaaaatttatgtgagagaaattttacgtttaaatgataaaaaacttattaatggatgtgctaatataactggtggtgggattattgataatattaaaaggattattccaaatggattaagtgcagatattgatctctctaaaataaaagtaaaaaaaatatttaaatggattaaaaatcaaaacattgatgatcttgaaatgttaaaaacttttaattgtggtgttggtttctgcttaataatcgataaaaaaaatttaaaaaaaattaataaattttttacacatgaattcaagccatatataataggtaaaataattaagggtaaaaataaaacaaaattcaatgaaaaaattagctggtag

SEQ ID NO: 313836 - DNA, 650 bp, Unknown
  Bacterial polypeptide expressing nucleotide sequence isolated from the Sargasso Sea
aatgaccaataaatctaatcctaatgatccctacgcaaaagctggggtaaatatcgatgatggaaacgccctgatcaagctcataaaatcaagtgttaacgcaactcataataagtcagtaatgggtggcattggaggctttgctggattgtatgaattaaatcatcagcttaaaaaacctacgttggttgcctgcactgatggtgttggcactaaagttgctcttagcaaaaaatataatactcttggaagcgttgggcaggaccttgtggctatgtgcgttaacgatatggcagcttgcggagcttcacctctattttttttagattattttgccagctcaaaacttgaactaaaggagactgcaacaatcattaaggggattgcaaaagcttgtaagaaaacaaatatggctctcttgggaggtgaaaccgctgaaatgccaggacactacaccaaaggtaattttgatttagcaggatttgcagtgggtgttgttgataaatcaaaaattattagtggtaaaaaaataaaaactaaccatgtgattttaggcattgaatccagtggaccgcattcaaatggctattcttttattagaaaaatactctcgcgacataagcccccgttatctgtattaaagacactat

SEQ ID NO: 313837 - DNA, 615 bp, Unknown
  Bacterial polypeptide expressing nucleotide sequence isolated from the Sargasso Sea
aatgataaaaaaaaaatttacctataaaaaaagtggagttaatatcggtgctgctgacaagtttgttgatttcatttctgcgatttcatcaaaaaaaagaggcaaaaaaaagttttctaatataggtggatttggctcaatcacaaatataccgagtaatataaaacaacccagaatcgtagcttgtactgatggtgtggggactaaaattgaaatagctaatacattaaataaatttgataccattggaattgacttggtagctatgagtgtaaatgatttaatcgttcaaggtgctaagcctttaatttttctagattatatatcaataaataaaattgatctaaaaaaacttaaagcaataattaaaggaatcaatcatggctgtaatcaatcagaatgtgagctcgttggaggagaaactgctgaaatgcctggtacctacgaaaaagggaaatttgatattgctggttttgcagttggagttgttaataagaataaaattttaaataaaaaaaaaataaaaaaaaataatttaatattagccgtgccgtctagtggtttacattctaatggttattctcttataagatatttaataaaacaaaaaaaaat

SEQ ID NO: 313838 - DNA, 515 bp, Unknown
  Bacterial polypeptide expressing nucleotide sequence isolated from the Sargasso Sea
gaaagatgatgtgctgattggtattgagtcgtcaggttttcattcaaatggttattcattactgagaaaaataattgctgattttcaactagatctaggatctaaaatacaaaaagaggagataggcaaaattttgttagagcctactaatatttatgtctctgcaatattggctcttaaaaaagttctagaaattaatgcaatagcacacataactggaggaggtttttttgaaaatattcctagaatgttaaatgaaaatcagaaagcaatcataaatcataacttcaatgactggccagctggacactactttgaatggttaatgcaactaacaaatatgcctaaagagaacttattaaacacctttaattgtggtgttggtatggtcattgctgttagccaagctgatgaggaagatgccttagggatgttgaatcaatcctattttgctaaaacaattggtaaagttgaagaaagaaaagtgaacgaagaagagatttcttttgtctaat

SEQ ID NO: 313839 - DNA, 358 bp, Unknown
  Bacterial polypeptide expressing nucleotide sequence isolated from the Sargasso Sea
atgaataaaaatctctttacctataaaaaaagtggggtcaacattgatgctgcagacaaatttgttaagttcataactaatatttcatcaaaaaaaaggggcaataaaaagattaaagatataggaggctttgggtctatatcaaatttaccaaaaaacataaaaaatccaaaaattgtagcttgtacagatggagttggtacaaaaattgaaatcgcaaatttattaaaaaaatatgacacgatcggaattgatttagtagcaatgagtgtaaatgatttaattgttcaaggagcaaagcctttgtttttcttagattacatatccattaataagattgatttaaaaaaaatgaaat

SEQ ID NO: 313840 - DNA, 538 bp, Unknown
  Bacterial polypeptide expressing nucleotide sequence isolated from the Sargasso Sea
atggcatcaaataaattaacatacagtaagagcggagttaatattccaaaagcagatagttttgttaagttcataagttcactaacaagaaaatcaagcaaaagtggtgattttaagaatataggaggttttggggcaatctctccaatacctagacaactaaaagaccctcacattgttactagcactgatggagttggaacaaaaattgagattgcaaatgatctaaataaatttgatacaattggaatagatcttgttgctatgtgtgtaaatgatttggtcgttcaaggagcgaagccttatttgttcttggactacatttcgattagcaaaattaatttgagtaaattaaaacacttagttaaaggaattgttaagggatgtgatattgcgggttgcaaattagttggtggcgaaactgctgaaatgccagggacatatactaaagggaaatttgatatagcaggttttgctgttggtcttgttgaaaagaaaaaaatactcaataaaaaaattagaaataatgatcttattt

SEQ ID NO: 313841 - DNA, 463 bp, Unknown
  Bacterial polypeptide expressing nucleotide sequence isolated from the Sargasso Sea
atgaaaaacaataacttaacatacgaaaagagtggcgttaatattaaagctgctgataatttcgtaaaatttatatcttcattatcaaaaaaaagtagaaatagtaagaattttcaaaatattggtggatttggctcaattactaatatccctaaaaatataaaaaacccccagttggtaacaagcacagatggtgttggaacaaaaattgaaattgctaatgaactaaacaaatttgacactataggcattgatcttgttgcaatgtgtgtaaatgacttaatcgttcaaggggctaaaccactaatttttttagattatatttcaataaataaaattgatttaagaaaattaaatcaaattattaaaggtataaataaaggatgtaaaatttcaaactgtgaactagttggtggcgaaaccgcagaaatgcctggaacttattcaaaaggaaaatttgata

SEQ ID NO: 313842 - DNA, 443 bp, Unknown
  Bacterial polypeptide expressing nucleotide sequence isolated from the Sargasso Sea
tatgaaaaaaaataaaaatagattaacttataaaaaatctggagtagatatagcaaaggctagtagcctaatatcggtgcttaaagataagcgaaagaggtctggtgtcctctctggaattggtggatttgcaagtctctttgctatagataacaaaaaatataaaaatcccgttattgtatgcggaacagatggtgtgggaacaaaactcaagttagccactcttttgaatcaacataattctattggtcaggatttattggctatgtgtgtgaatgatgtgattactacaggagccgaacctatattatttttagattatcttgcaactggttctataaatttgaaaatacataaaacagtcttgaaggggattaaatcagcatgtgacaaacataatattattctgataggaggcgagacagctgaaatgccaggaatgt

SEQ ID NO: 313843 - DNA, 769 bp, Unknown
  Bacterial polypeptide expressing nucleotide sequence isolated from the Sargasso Sea
gttgctatgtgtgtaaacgatttaatcgttcaaggagcaaagccacttatttttttagattatatttcaattaacaaattagaattaaaaaaacttaaatctgttatgaagggaattattaaaggttgtaaaatttctggaagtagcttggttggtggtgaaactgcagaaatgccaggaacttacgataaaggaaaatttgatattgctggcttttcggtaggagtggtagatgaaaataaaattttaaaaaaaaaaaaaattaaaaaaaataatataattttagctataccatcaaatggtattcattctaatgggttttcactagtaagatatattttaaaaaaaaaaaaaataaatttaaaaaaaaataattttcttaaatctgaacttttaaaaccaacaaaaatttatgtaacagagattttaaaattaattaaaaaaaattttattaatggatgtgcaaatataacggggggtggtatcacagataatataaaaagaattatacctgatggtttgtgtgcagaaataaaactttcaaaaataaaaacaaaaaaaatattcaaatggataaaaaatcaaaatgtaagtgataaagaaatgttaaaaacttttaattgtggagttggattttgcttaataatcgataaaaaaaatttaaataaaataggtaaattttttaagaaagattataaaccttatgtaataggtaaaattatttcaggaaaaaacaaaaaaaagttaaatgaaaatattaagtggtaat

SEQ ID NO: 313844 - DNA, 638 bp, Unknown
  Bacterial polypeptide expressing nucleotide sequence isolated from the Sargasso Sea
ttctaattgtgaattagtaggtggtgaaaccgccgagatgccagacacatttgaacaagataaattcgatatcgctggatttgcagtcggactagttgatgaaaaaaaaattttgaataaaaatagaattaagaaaaatgatttagttttagcaataccctctagtggccttcattcaaatggttattcacttgtaagatacatattaaaaaaaaataaaataaacttaaaaaaaaatattagattaaaaaaacatttgcttgaaccaacaaaaatttatgtaaaagaagttctgaaacttaataataaaggtttgataaacgggtgtgcaaatattacaggaggtggcctggtcgataatttaatgagagttattcctaataaccgaaatattgaaattgatttaagtaaaataacaacacatgaaatttttaaatggataaaaaaaaataatgtttctaataaagaaatgcttaaaacatttaattgcggtgttggcttttgtttaataatcaatccaaaaaacttagaaaaagttaaaagtttttttacaaaaaaatataaaccatacgttatagggtcggtcacaaaaggacttaataaagtaaaactaaatggctctattaactggaaataaa

SEQ ID NO: 313845 - DNA, 517 bp, Unknown
  Bacterial polypeptide expressing nucleotide sequence isolated from the Sargasso Sea
aatgacaaaagaaattatagaaaatgatccgtataaattagctggtgttgatataaatgctggtaatgaactagttgaaaaaataaaaaaggacgtctccaaaacccataatagtaatgtgcttggaaatattggcggttttgctgggatgtataagctcaaaaaagaatatcaagacccgattttggttgcttgcacagatggtgtgggcacaaaagtatcattagctcaagactttaatgacttaagcggtattggccaagatcttgttgcgatgtgcgtaaatgacttaatagtttgtggtgcaaagcctttattctttttagattattatgcttcttcaaagctaaatattaaggaagcttctgttgtgattaagagtattgctaatgcttgcaatgattctggttgtgcattgttgggaggcgagacagctgaaatgcctgggcattacattgataataattttgacctagctggttttgctgttggttgtgttgatgagaaaaaaataata

SEQ ID NO: 313846 - DNA, 1039 bp, Unknown
  Bacterial polypeptide expressing nucleotide sequence isolated from the Sargasso Sea
gatgaaaaaagtagactacaagtcagcaggtgtaaatatcgatgctgggaataaagcggttgatcttattaaggacggggttaaatccactttcacaaaaaacgtgctaaccggaataggtagctttggttccttgtatgatttaaaacctattcttgatgaatatcaaaatcctgtcatggttcagagcatagatggggttggcaccaagacgatcattgcgagaaagctcaataaatttgataccgtaggtatcgatctattgagcgcgtgcgcaaacgacatactggtaatgggagccaagcctctgacctttcttgactatgttgcaaatgacaagttaaggccaggtgtggtaaaggagatagtctctggaatggttagtgcgtgcaaagaaactggtgtatctcttgttggtggagaaaccgcagagatgccagacacatatcttcctggtgagcacgatttggttggagtcataaccggtgttgttgaaaaagaaaaaatcattaccggagagcgtatagcaataggtgattgcatagttggccttccatcaagcggcctacatactaatggatactcattggccagaaaagtgttttttgacattggaggctatagtgtcaaagacaagatctcggaacttcagagctcgattgggttaactcttttagagccacatataaactatacaaaccaccttttttccactctagatgcggggattgatatacacggcattgcacatgttacaggaggcgggattattgaaaacctccctagggtattacctgatgggtgtgcagcatcgatacaaaaagattcttggccagtcttggatgtgtttaatgcaatacaatctattggtggtgtctcagaagatgaaatgttcagagcatttaatatgggtataggcatgattttcattattaacaaggaggacgttagcgctgtttcaagtgctcttagtgacacatcacctatctttaaaataggagagatagtagctggaaatagagaggtaaaaataagataa

SEQ ID NO: 313847 - DNA, 690 bp, Unknown
  Bacterial polypeptide expressing nucleotide sequence isolated from the Sargasso Sea
aaatcgattataaaaaactaaaaagtataattagtgggattattaaaggctgcaaattagctgactgtgagttagttggtggagaaactgcagaaatgcccggaacatattctaaagggaaatttgatattgcaggattttctttaggcctggtagataaagataaaatattattaaataaaataaaagaaaaagatttagtgctagcaataccttccagtggtctacactcaaatggatattccttagtaagacatattataaaaaaaaagaaaattaatttaaaaaaaaactcatttttaaaaaaagaattattggtaccaacaaaaatatatgtaatgcatatactagaattaattaaaaaaaagtatttgaatgcttgcgcaaatattacaggaggtggcttaaatgacaatattaaaagaataataccagataattattgtgctgaaataaatttagaaaaaataaaaacattaaaaatatttagatggctaaaaagtcaaggagttagcgatcaagaaatgttaaaaacttttaattgtggtgtaggtttttgtttaatagtaaaacgctcaaactacaaaaaaataataagattttttccaaaaaaatataaaccatatgttattggaaaaattacaaaaaattcagaaaaagtaaaattgagtggaaaagtcatctggtaaa

SEQ ID NO: 313848 - DNA, 518 bp, Unknown
  Bacterial polypeptide expressing nucleotide sequence isolated from the Sargasso Sea
aatgaacaaaaaaataacctataaagatgcgggtgtagatattaaaaaagctgatgaggctattgaaatgtcaaaaaaagatattagcagcacttttagtaaaaacgttttgtctgctattggcggttttggatcaatgtattctttaaaagatgttttaagtgagtttgaagagcctgttttggttcaaagtattgatggggttggaactaaaatgtctgttgccatggcggcaaacaattttaaatatataggacatgacctggtcaatgcgtgctgcaatgatgtcgccgcaacaggcgctgtccctttaacctttttagactatgttgctggtagcagtttaaataaaaacattatttctgatgttattaaaagcgttgcccgcgaatgcaaacaacgcggggtttccttggtgggcggagaaactgctgaaatgcccggaacatatcatgccaatgaatatgatttggtgggggttgcaactggcgttgttgaaaaaagtaaaataattgatg

SEQ ID NO: 313849 - DNA, 277 bp, Unknown
  Bacterial polypeptide expressing nucleotide sequence isolated from the Sargasso Sea
tatgagttcaggtaagttaacatatgccaaaagtggggttaacattaagaaagctgataagtttgtaaagcatatttctaaaaaaacaaataaaagtggtaattttaagaacattggaggatttggagcaatatcaaatatccccaaaaatctaaacaatccacatattgttactagtacagatggtgttgggactaaaatagaaatagcaaatgatataaaaaaatttaatacaataggaatagatcttgtggcaatgtgtgttaatgatctgatc

SEQ ID NO: 313850 - DNA, 901 bp, Unknown
  Bacterial polypeptide expressing nucleotide sequence isolated from the Sargasso Sea
atttggaggactattttctactgataatcttcctaaagattctattttagtatctacaactgattctgtaggaacaaaagttaaaatatctggaagaattggactccataaaaacttaggcatagatattgtaaatcattgtataaatgacttgattccacaaggtgcccatccattatattttcttgattatttagcttttggaaaactcgatgaaaaaacagttttgcaagttgtggaaggtatatctgaagcttgtaagaaagttaattgtgcaattattggaggtgagacggcaactttaccaggagtttactatgagaatgattatgatgtagtagggtttatggttgggtctgtaaccaagagtaatttaaagactaaagacaatgttaaggaaggatacaagctagttgcacttccctcaagcgggcttcatactaatggattttctttagtaagatctatctttgatattgataataatgtaaaaaatttatctttaagtgttccaaatgaagataaaaatttaggagaattattagctgaacctcatagagagtatttgacaacaataaaacctttttttgaagatgtaaaagctatatctcacgtaacaggaggaggactatataaaaacttaccgcgagtttttaatagtaatcttcaggctagaattaataaaaaatcatgggaaatccctaacctttttaagtttatctatcagaaaggtaatatagacgaaaaagaaatgtttgacgtttttaatatgggggttggattagttatgattgtagattcatctaaatctgaagatatattagaaaaatgtcctgaagcttggttattaggtgaaattgtttcaaaaccttctaatcaggagagtgtagttatagagtaa

SEQ ID NO: 313851 - DNA, 492 bp, Unknown
  Bacterial polypeptide expressing nucleotide sequence isolated from the Sargasso Sea
ttattttagctgtaccatctaatggacttcactctaacggttattccttagtgagatatcttttaaaaaaaaaaaaaataaatttaaaaaaaagcaaattcctcaaagacgaattgattaggccaactaaaatttatgttaaagaattatctcttattaatgagaaaaatttaataaatggatgtgcaaacataactggtggaggtttagtggataatattcaaagaataataccaaaaaatttatgtgctgaaatagatctaaatagagtcaaaacattaaaaatttttacatggttacatgaaatgggtgtgagtgagaaagaaatgttaaagacctttaactgtggcgtaggtttttgtttaatgacaaatcctagaaacttaaactcgttaagtaaatattttggaaaaaaatttaaaccctatataattggaaaaatagttaaaaattcaaaaaaagtaaaattaagtggaaaaatatcctggtaaa

SEQ ID NO: 313852 - DNA, 688 bp, Unknown
  Bacterial polypeptide expressing nucleotide sequence isolated from the Sargasso Sea
aatgaataaaaaaataacctataaagatgcgggagtagatattaaaaaagctgatgaggctattgaaatgtcaaaaaaagatattagcagtacatatagcaaaaacgtcctgtcttcgattggcggctttggttcaatgtattctttaaaagatgttttaagcgagtttaaagaccctgttttagttcaaagtattgatggggttggaaccaaaatgtctgttgctatggccgcaaacaactttaaatatatagggcacgatttggttagtgcgtgttgtaatgatgttgctgctacgggcgccgttcccttaacatttttggactatgttgctggtagcagtcttgacaaaaatattgtttctgaggttattaaaagtgttgcccaagaatgtaaacaacatggggtttccttagtaggcggagaaactgctgaaatgcctggaacataccgtgcaaacgaatatgacttggtgggggtagcaaccggcgttgttgaaaagaataaaataattgatggatctagcgtctgtgatggtgatattgctattggcgttttttcaaacggtttacatacaaatggttactccttggcaagaaaattaatttttgaatctatgggtcttaccacatcagacacattgcctggctataatatatcaataggcgacagcttattggcgcctcac

SEQ ID NO: 313853 - DNA, 359 bp, Unknown
  Bacterial polypeptide expressing nucleotide sequence isolated from the Sargasso Sea
tatgacaaaaaataaaaataaagataaatataaagatgcaggcgtaaatattgatgaaggtcaaaaatttattgacgacattaaaaacttaacctcagcattaaatacaaaatattcattaagcagcataggcggattttcgggatatgtagaaatccctaaaaatatctcaaatcctgtttatgcattggcatgcgacggagtaggaactaaaatgcgagttgctttgagactcaatgatttatcaacaatagggatagatcttgttgcaatgtgtgtaaatgatttaattgtgagtggtgacaagcctgtcgcttttttggactattacggttgcgcaactttagatcggaaaaagg

SEQ ID NO: 313854 - DNA, 1123 bp, Unknown
  Bacterial polypeptide expressing nucleotide sequence isolated from the Sargasso Sea
atgggcgagccgatggactacgcgtctagcggggtcgatatagatctagaagccaaggcagtggctagtctgatcggttcattggcctcttctagcagagctccaggtgagtttggcgctccggtgcacctcccagggggattcggggggattatcgaattcggtgactcttgtcttgcactagcgaccgatggcgttggttccaaattgcaaatcgcgagcaaagtaggacaattgggtggtgtgggctttgactgcgttgctatgaacgtgaacgatctaatctgtgttggggctgagccccttgcgttcgtagattacatcgcagtcccagaggcagacccagaggttcactcgtctttgggcgagtcgctttctcaagcatgcaatatagcaagggtcacattggcgggaggggagacagctacgcttccagggatcgtgaaggaactagacctttctggaaccgcactagggtggttccctaagggaggggggatcacaggagagaaccttgaggaaggggatgtactgattggccttcccagcagtgggattcactccaatggattcacccttgtcagagcagtgattgagaggtctggctactcattagaagactcttgtccgttcgatccaagccacgattacagagaagtcagaagattctcagagaaggagggagccacaactctggctgaggtgattttgaaccctacaaggatctacgttgatccggtagttgagctggtgctggagtcaaggaaaggagggggggtggttggtccagattgcataaaggccatcgcgcacatcacgggaggtggtttgtcgaacttacttcgtctccatagtactctgggttgggaaatacagatgccactagacccccatccagagtttcagtggatatctgaaatcggatccgttagcacactggagatgcataggaccttcaatatggggatggggatggtggtggctgtatcagaagattgtgctgattcggctgagagatggcttagtgaacgacttccaggaagtagaattgtaggacgagtagtttcgaatggtagaagagttacacattctgacccagaagttgtattctctcactactaat

SEQ ID NO: 313855 - DNA, 374 bp, Unknown
  Bacterial polypeptide expressing nucleotide sequence isolated from the Sargasso Sea
tatgacatcaaataagttaacatacagtaagagtggcgttaatatttctaaagcagataattttgttaagttcataagttcattaaccagaaaatcaagcaaaagtggtgattttaagaatattggtggttttggagcaatatcaaaaatacctagaaaaatgaatgatcctcacatcgtaactagtaccgatggtgttggaacaaaaattgagatcgcaaacgatcttgctaaatttgatacaattggaatagatcttgtcgctatgtgtgtaaatgatttaatcgttcaaggagctaagccatatttatttttagattatatctcgataagtaagataaatttaaacaaattaaaaaatttagtcagaggta

SEQ ID NO: 313856 - DNA, 649 bp, Unknown
  Bacterial polypeptide expressing nucleotide sequence isolated from the Sargasso Sea
catggggtttccttagtaggcggagaaactgctgaaatgcctggaacataccgtgcaaacgaatatgacttggtgggggtagcaaccggcgttgttgaaaagaataaaataattgatggatctagcgtctgtgatggtgatgttgctattggcgttttttcaaacggtttacatacaaatggttactccttggcaagaaaattaatttttgaatctatgggtcttaccacatcagacacattgcctggctataatatatcaataggcgacagcttattggcgcctcacacaaactatagttctctaatcgaaaaaacggttggtgctggaatagcgcttaaaagcatttctcatattactggcggtggattggtggacaacgttccaagggttgttcctaaggatttttctttatctgttaatactaagtcttggggcaagattccaatatttaagtttttacaaaacaaccttgatattaaaaaagaagatttatatcaaacctttaacatgggaattgggttagtattaattatagataaaagtcaaaaagagcgcttggtttcactggttggaaaagacaactgtagtgaaattggttttattataaaagacggtctaaactcggtgcacttaagtgagcagtaaa

SEQ ID NO: 313857 - DNA, 241 bp, Unknown
  Bacterial polypeptide expressing nucleotide sequence isolated from the Sargasso Sea
aatgacaaaagacattatagaaaatgatccatacaaattagctggtgtggatattgatgcaggagaagatttagtgcaaaagattaaagctgacgttgcttcaactcataataaaaatgtaattggaaatataggtgggtttgctggaatgtttaaacttccagaagaatttaaaaaacctattctggttgcatgcacagatggagttggaacaaaagtagctcttgcacaagagtgtgga

SEQ ID NO: 313858 - DNA, 310 bp, Unknown
  Bacterial polypeptide expressing nucleotide sequence isolated from the Sargasso Sea
tatgaccgataacacaaacaaagagacgagctacaaggacgccggagtcagtattgagaaaggagacgagttagtgtcaaggctgaaaaaaatagtaaacaataatcaaaaaggtgcaattggcaaacttggtggttttggaggattatttgacctcagcgagttgggctataaaaaacctgtgcttgtatctggaaccgatggagttggcacaaaaatcaaagtagcgattgaaaatgatgtgcatgagacagtcggtatagatcttgttgccatgtgcgtaaacgacataattgtacaaggcgcaaaa

SEQ ID NO: 313859 - DNA, 1039 bp, Unknown
  Bacterial polypeptide expressing nucleotide sequence isolated from the Sargasso Sea
atgaaacccgaaatcagttatgcagattcaggagtagacatagacgcagctgatgacgcagtaaggagattaacgcctcacgctcaatcgactttccgacctgaggtcctaagcgaagttggaggattcggttctgttgtagcgataccggcaggctacaaagaaccggttctagtttcgggtaacgacggagtggggacaaagcttttggtggcccaaaagttaggtaaattagacaccattgggatcgatctcgtcgcaatgtgtgtggacgatatcgtcacttcagccgctgagccgttgttcttcctagatcagataacagtgggtgcagttaatgctgcagttatcgagcaattggtcatcgggatggcggcgggttgcagtgaggcagggtgctctttaactggtggtgagatagcagaacatccaggatcgatggctgcggatgatatcgatatctccggttttgcagtgggtgttgcggaacgatctgaaatacccagccgtgacgctgtagtggcaggcgatgtgctggtcggcatagcttcccctggcatacgttgcaatggttacagtttggctcgacaggtccttatggatgaccgttcaatggatgatccagcctggattggagcggatcgttctattggggacgaactgttgcgtccctctgttatctacgctccgactgtgttgcaagcctttaaaggctttggtgttcgcgccgccgcgcacataacgggaggtggtcttgccggaaacttgcgaagggttatcaacgataatgtttcgatcgaattagacctaaaccgatggccgcgtccacgcatctttgaagagattgctagccgtggcccggtatccgaggctgaaatgcgcaaagtgtttaatttaggagtgggcatggtcttggtcagcccccctgaacaagcaaagcccattatcgaattggcaaatcgtaatggccacgacgcatggcttattgggcagatagcccggggtaacggcgatgtaaggtggtcggaagatggttgag

SEQ ID NO: 313860 - DNA, 343 bp, Unknown
  Bacterial polypeptide expressing nucleotide sequence isolated from the Sargasso Sea
ttgcttaataaaactaacgctattaatgcaattgctcatataaccggcggaggaattacagaaaatttaccacgggtttttagttcaggcaaagttcgggcagaaatttataaagatagctgggaaaaaccagaaatttttcactggcttcaaaatgctggaaatattgaagaatctgaaatgctaaagacatttaattgtgggattggaatgatcctaattgttaatccgaaagaaactaataatttactaaataaacttaaagaactaggagaagaaccttcattaattggaaaaataattcataatgaaaacccagaaacccttgtagtatataaataaa

SEQ ID NO: 313861 - DNA, 845 bp, Unknown
  Bacterial polypeptide expressing nucleotide sequence isolated from the Sargasso Sea
tctaatctgtgtgggggctgagccccttgcgttcgtagattacatcgcagtcccagaggcagacccagaggttcactcgtctttgggcgagtctctttctcgagcatgcaatatagcaagggtcacattggcgggaggggagacagctacgcttccagggatcgtgaaggaactagacctgtctggaaccgcactagggtggttccctaagggagaggggatcacaggagagaatcttgaggaaggggatgtactgattggccttcccagcagtgggattcactccaatggattcacccttgtcagagcagtgattgagaggtctggctgctcactagaggactcttgtccgttcgatccaagccatgattacagagaagtcagaaggttcgccgggaaggaaggagccaccactctggctgaggtgattttgaaccctacaaggatctacgttgatccggtagttgagctggtgctggagtcaaggagaacgggaggggtggttggtccagattgcattaaggccatcgcgcacatcacgggaggtggtttgtcgaacttgcttcgtctccatagtactctgggttgggaaatacagatgccgctagacccccatccagagtttcagtggatatctgaaatcggatccgttagcacactggagatgcataggaccttcaatatggggatggggatggtggtggctgtatcagaagaatgggctgattcggctgagagatggcttagtgaacgacttccaggaagtagaattgtaggacgagtagtttcgaatggtagaagagttacgcattctgacccagaagttgtattctctcactactaat

SEQ ID NO: 313862 - DNA, 553 bp, Unknown
  Bacterial polypeptide expressing nucleotide sequence isolated from the Sargasso Sea
ttttgctgttggtcttgtagaaaagaaaaaaatacttaataaaaaaattagaaataatgatgttattttagctataccttctaatggacttcactctaacggctattccttagtgagatatcttttaaaaaaaaaaaaattaaatttcaaaaaaagcaaatttctcaaagacgaattaattagaccaactaaaatttatgtaaaagaattatctcttatcaatgaaaaaaatttaataaatggatgtgccaacataactggtggaggtttagtggaaaatattcaaagaataataccaaaaaatttatgtgctaaaatagatctgaatagagtcaaaacattaaaaatttttaaatggttacataaaatgggtgtaagtgagagagaaatgttaaagacctttaactgtggtgtaggtttttgtttagtgacaaatcctagaaacttaaactcattaagtaaatattttggaaaaaaatttaaaccctatataattggaaaaatagttaaaaattcaaaaaaagtaaaattaagtggaaaaatatcctggtaa

SEQ ID NO: 313863 - DNA, 481 bp, Unknown
  Bacterial polypeptide expressing nucleotide sequence isolated from the Sargasso Sea
atgacaaaagaaattatagaaaatgatccgtataaattagcaggtgttgatataaatgctggtaatgaacttattgaaaaaataaaaaaagacgtctctaaaacccataatattaatgtgctaggaaatataggtggttttgccgggatgtataaacttaataaagattatgataatcctatcctggttgcatgcacagatggagttggtacaaaagtatcattaggccaagaatttaatgatttaagcggtattggacaagaccttgttgcaatgtgtgtaaatgaccttattgtatgtggggcaaatcctttattttttttagattactatgcatcttctaagcttgatattgatgaggcatctataattattaaaagtattgctaatgcatgtattaaatcagattgtgctttattaggtggagaaactgctgagatgcctggacattatattgataacaattttgatttagctggtt

SEQ ID NO: 313864 - DNA, 539 bp, Unknown
  Bacterial polypeptide expressing nucleotide sequence isolated from the Sargasso Sea
cgttagcaaagataagataattaaaaatgataatgtcatatgcggtaatgtcttgataggaatagaatcaagtggtccacattcaaatggattttctttaataagaaagatcattaaagaatctaaggtaaatgaagaagaaaaaaatataatagctaaaagatgtcttgagccaaccttgctttatcccaaattgattatggagttaatttcaaattataagattaattctctttcacatattacgggaggtggtctcacagaaaatctaccaagatccataccagataatctcatcgtagaaatagatactgactcttgggaaatgccaaatatttttaaatggttacaagaaaatggaaatatttcagatgatgatatgtatagaatatttaattgtggaataggcatggtgctttttgttgatgaagacgaagagttaaaaatttctaggagaataaaagaattaaaaatgaatagtttcgtcattggaaaagtcaaaaataaaaaagaagaatcttctgtaatatttgtctaaa

SEQ ID NO: 313865 - DNA, 913 bp, Unknown
  Bacterial polypeptide expressing nucleotide sequence isolated from the Sargasso Sea
tatggctagtgaatataaacagtcaggagtagacctagaaaaatctgacctgataaaagataaactcattaataatattcttcgaactcataatgatcaagttattaataatggagatggatttggaggacttttttcaggtagaaatattaataaaaattctgttttagtttcaacaactgattctgtgggtactaaagtaaagatatccgcaaaacttggattgcataaaaatttagggatggatattgtaaatcactgcataaatgatctgatacctcaaggtgcaagacctatgttttttttagactacttagcatttgcttctttagatgagaagatagttttggatgttattgagggagttagcgaggcttgttctaaagtagggtgtgcagtaattggaggagagacagctactcttccaggtgtttataatgagggtgattacgatgttgttggctttatggtgggatctgttgataagaataagttaaaaactagagaaaattctaaagaaggtgacatactaattgcattgccttctagcggacttcatacaaatggatattctttagtaagaaatattttcaattcagatgaaaacatttcaaatttatcaaagaaagtcgaaggcgaagagaaaaatctaggcgaactacttgctgaaccgcataaagaatatttgactaccttagacccagttttggatgatattaacgctatttctcatataactggaggtgggctgaggaagaatttacctagagtctttgataaaaaattaacagctaaaattaataaaaactcttggtctattcctcctctctttagaagcataatgaaacaaggaaatgtatctgagaatgagatgtttgatgtatttaatatgggtgtaggaataattttgata

SEQ ID NO: 313866 - DNA, 562 bp, Unknown
  Bacterial polypeptide expressing nucleotide sequence isolated from the Sargasso Sea
aataattttgacttagctggattttcagttggcgttgttgaaaaaaataatgtaattgatggcagaaaaataaaacctggtcacattttattgggtgtggagtccagcggacctcattcaaatgggtactcattaatacgctctatacttaaaaaacacaaagctcctgagaaaatattgcaggttttactcaagccaacacatttatatcctgcgtctgttttagaactaatcaaaaaaaccaatgtcaaaggtatggcacatattactggaggcggtttgacagaaaatattcctcgtattctaaaaaaaggtttagttgcaaatgtggatcttactgcatggaaatttcctaaagcttttttatggttgcaagaaaaaggaaaaatttccacattagatatgctaagaatttttaattgtgggattgggatggtttgtattttagacaaagaagaaatttcaaaagcgcaaaaaattttttccgctcataaacttcggacctttgaaattggcacaataacaaaaggcagtcttcaagaacaaattcaatacagttagt

SEQ ID NO: 313867 - DNA, 325 bp, Unknown
  Bacterial polypeptide expressing nucleotide sequence isolated from the Sargasso Sea
aatgacaaaagaaattatagaaaatgatccatacaaatcagctggagttgatattgatgctggcaacagcttagttgataaaattaaaaagagtgttgccgcctctcataataaaaatgtcttagataatattggaggctttgcaggaatgtacgagctagataaagatattgagaatccagttttagttgcatgtacagatggagttggaacaaaagtttcgcttgctcagcagtacaatgatttatcaggcattggtcaagatcttgtggctatgtgtgttaatgatttaattgtgtgcggtgcaaaacctctattttttttt

SEQ ID NO: 313868 - DNA, 313 bp, Unknown
  Bacterial polypeptide expressing nucleotide sequence isolated from the Sargasso Sea
actgccctcttctgggtttcactcaaatggatattctctaattaacaaaataataaatagcaaaaaaactgatagaaaattacaaaaaaaactactaacaccaacaaaaatttatgttaaagaagtgcttgaactcacaaaaaaactaaaaatcaatggaatggcacatattactggaggtgggcttgaagaaaatctttcacgaattaattctagctacacaatgattattgacagagacaagtgcaaattaaaagggtatttttttagaaattatgaaactcggcaacatcacaagaaacgagatgtataa

SEQ ID NO: 313869 - DNA, 451 bp, Unknown
  Bacterial polypeptide expressing nucleotide sequence isolated from the Sargasso Sea
ggatattcgttagcacgtaaagcacttttgagtaaatattcagttaaagataaaatcaaaggagttggaaacttgggcgatgcattgatacgtcctacagaaatttacgtcaaaccagttttagaagcattgaaaaaatgtaagataaatggacttgcacatatcaccggaggatcatttacaaaattattgagattaaagcagattggctatcacctagataatatgccaaagactccacctctaatgcaattaatagaagatacaggcgtcaaaaatgaagaaatgtacaagactttcaatatgggagtgggattttgtatagtagcaccagaaaatcaagtcagaggaattcagaaaattttcaccaaacataagatgaaatcttacgaaattggcagaattagtaaaaacaaaggtgtttttattaataaattaaaaattgcataga

SEQ ID NO: 313870 - DNA, 438 bp, Unknown
  Bacterial polypeptide expressing nucleotide sequence isolated from the Sargasso Sea
aaacgcaattagattccaatactccatttaatgagtttacttttggtgaagaactcttaaagccaacaaaaatatatgtgaaaactattatttctttacttaataaaactaaggctattaatgcaattgctcatataaccggcggaggaattacagaaaatttaccgagagtttttggttcaaacaaagttcaggcagaaatttataaagatagctggaaaaaaccagaaatttttcactggcttcaagaggctggaaatatagaagaatctgaaatgctaaagacatttaattgtggaataggaatgatcctagttgttaacccgaaagaaactaataatctgctaaatgaacttaaagaactaggagaagaacctttattaatcggaaaaataactcataatgaaaacccagaaactcttgtagcatataaataaa

SEQ ID NO: 313871 - DNA, 334 bp, Unknown
  Bacterial polypeptide expressing nucleotide sequence isolated from the Sargasso Sea
attaataaaaatttaattaactctgcagctcatatcacagggggcggtttaatcgaaaatataactagatctataccaagtaatttgtctataaatatagatctatcaaagattaaaaccaaaagaatatttaaatggttaaaatcaaaaaatatatcagaccttgaaatgttgagaacatttaattgtggggttgggttttgtataatagttaataaaaaaaatataaaaaaaattaaaaaatattttaccaaagattatatgccttatgaaattggttatgtgtcaaagaatattaaaaagttaaatctgtataattctataatatggtaaa

SEQ ID NO: 313872 - DNA, 685 bp, Unknown
  Bacterial polypeptide expressing nucleotide sequence isolated from the Sargasso Sea
aaagcacatgaaattattaaaggaatctataagggctgcaaaaactcaaatattgctctcattggtggcgaaacagccgagatgccaattctttacaaaaaaggcgattttgacttagctggtttttcggtaggtctagttgataaacataaaattctcccaaaaaaggtatcaccaggtgacattttaattggggtgaaatcagatggtttacactcaaatggatattcacttataaaccttttaataaaagaaaagaaaattaaacttaatgataaaataggtaataaatacctaaaagatttattaattaaaccaacaaaaatttatacaaatttaattaatcttaaaaatttaaaagatattaaatcaatggctaatattacaggtggcggtctttctgaaaatatacctagagtattgagtaacaaaacatctgcaatcattaataaaaatcttttatgtcggtcttctctatataattatatagttgaaaagaaaattatttctcaaaatgaaatgtataaaacttttaactgtggtataggaatggttttaatagtaagcaacagtaaagctaatcttacagtcaaaaatttaaaaaaaattggattttcatcctcaataattggtcacgtacaaaaatctaagtttaaaaaagttttctatgagaacaatctatgag

SEQ ID NO: 313873 - DNA, 562 bp, Unknown
  Bacterial polypeptide expressing nucleotide sequence isolated from the Sargasso Sea
atgaaaaaattgtcatattcaggttcaggggtaagtataaataaaggtaaccagtttgtatctcaaattaaaaaatttataaaaaaagataaatatttaaaaaaatcaaatattggtggattttcaggtcaatttgtacttgatccaaaaataaaaaaaccaattcttgttggagcggctgatggggttggaacaaaaatagaaatagctaatatgatgaataaccataggactataggaattgatttagtcgctatgtgcgttaatgatctaatcgttgatcaagcaaaacctcttttttttcttgattatatatcaacgggaagacttgatttgaaaaaaggatctcaaattataaaaggcatcatagaaggctgcaaaaaatcaaactgctctctcttaggtggcgaaactgctgaacacccagggattgagtcaaatgatagatatgatcttgcaggtttttgtgtaggggtaaaaagtggtttaaaaaattttaactctaaattgaaacaaaatgatatcattataggaattaagtcttcaggattacattcaatgg

SEQ ID NO: 313874 - DNA, 838 bp, Unknown
  Bacterial polypeptide expressing nucleotide sequence isolated from the Sargasso Sea
tacagatggtgttggtacaaaaatcgaaatagcaaatcagttaaataaatttaatacaattggtattgatcttgtggcgatgtgtgtaaatgatcttatagtccaaggagcaaagccattactatttttggactatatttcggttgaaagaataaattcaataaaattaaaaaatataattaaaggtataattaaaggttgtaaattagctgattgtgaattagttggtggtgaaactgctgaaatgcctgggacatattcaaaaggtaaatttgatattgctggcttttcgttaggtttagtagaaaaagataaaatattaataaataaaataaaagagaaggatttagtcgtagccgtaccctctagtggacttcattctaatggtttctctttaataaggcatattataaaaaaaaataaaattaatttaaaaaaaaattcttttttaaaaaaagaattgctagtgccaacaaaaatttatgtaatgcacattttggaattaattaatcgtaaatacttaaatgcatgtgcaaacataactggaggcggattagaagataatataaaaagaataattccaaataaactatgtgcagaaattaatttagaaaaaataaaaatactaaatatttttagatggcttaaaaacgagggtataaaagaaaaagaaatgttaaaaacttttaattgtggtgttggcttttgtctaataataaaacccaatcaatacaataagattattaaattttttccacaaaaatataagccgtacgttattggaaaaataattaaaaattcaaaaaaagtaaagtttaatggaagaatatcctggtaa

SEQ ID NO: 313875 - DNA, 806 bp, Unknown
  Bacterial polypeptide expressing nucleotide sequence isolated from the Sargasso Sea
attgccaaacgagaatttcggaaaacaagggggtatctcgtatagagatgccggcgtggacataaatgctggctcaaaacttgtagaccggataggaccgatagtaaaggctactcagaatactgatcttcaattaagcagcataggtggtttcgccgctctcacacagctccccgcgcattataaacaaccagtcttagtgtctggcacagacggagttggcactaaactggaattagcagaaaagtttggccggcacgaaaccatcggtcaggacctagttgcaatgtgtgtgaacgatgttttagtttgcggaggtgagcctttaatttttctggactacttcgccactggcaaactcgatattgaccttgccgccgaggtcatcaaaggcatagcaaagggttgtcaaatggcattgtgctctctcgttggcggagaaaccgctgagatgcccggtttttaccagggttcacaatacgatctagctggattttgtgtgggaatcgtagaaaaagacaaaatcattaatggagctgaaataacaaaaggcgacaaaatcatcggtctgccaagcagcggtcctcatagcaatggattttccttaatccggaaaatcctggagctgaaagaaatcgaaagttcagatctcattgatgagatgatgaaccccacaaaaatctacgtgcgcagcgtgcttgctcttttacagaaaataaaggttaaagggatggttcatattacaggtgggggtttttatgaaaatatccgaagaatactacccagcccacatctatcagcaaaca

SEQ ID NO: 313876 - DNA, 669 bp, Unknown
  Bacterial polypeptide expressing nucleotide sequence isolated from the Sargasso Sea
tatggcatcaaataagttaacatacagtaagagtggcgttaatatttcaaaagctgatagttttgttaagttcataagttctctaaccagaaaatcagttaaaagtggtgattttaagaacataggaggttttggtgcaatctctccgattcctagaaatttgagagatcctcaaattgtaactagcaccgatggagttggaacaaaaattgaaatagcaaacgatcttaataaatttgacacaattggaattgaccttgttgcaatgtgtgtcaacgatttagtggtgcaaggagcaaagccttacctatttttagattatatatcgataagtaaaataaacctaaataaactaaaaaatttagttaaaggtattattaaaggatgtgaaatagctgattgtaagttagttggtggagaaacagcagaaatgcctggaacgtactcaaaagataaatttgatattgcaggttttgctgttggtcttgttgaaaaaaaaaaaatactcaacaaaaaaattagaaataacgatttaattttagcagtaccttctaatggacttcactcaaatggtttttctttagtaagataccttttaaaaaaaaaaaaaataaatttaaaaggtagtaaatttcttaaagatgaattgattagaccaactaaaattta

SEQ ID NO: 313877 - DNA, 475 bp, Unknown
  Bacterial polypeptide expressing nucleotide sequence isolated from the Sargasso Sea
atgacaaaaaacaaaaataaatataaagacataggcgttgatattgaagaaggccaaaaatttattgaagacataaaggatctgactaaagaacctattacatcttattctttaagtaacattggaagtttttctggttatattgaaacaccatctgaattttcagaccctgtttatgctttggcctgtgatggagttggcacaaaaataaaaataggtttaaagcttaataacttaaaaacaataggtatcgatcttgttgctatgtgtgttaatgatctaatctcaagtggtgcaaaaccaactgccttcttagattattatggctgttcaaagttagatagatcaaagggtaaagaaattatttcaggcatcttagaaggttgtaagttagcaggttgcgaactaattggtggggagactgctgaaatgcctaatcactataccgataataattttgatttagttggtttct

SEQ ID NO: 313878 - DNA, 985 bp, Unknown
  Bacterial polypeptide expressing nucleotide sequence isolated from the Sargasso Sea
gcgggaaatgaagctgttgatctaattaaagatagtgtgaaatcaaccttttcaaaaaatgttcttattggattgggtgggtttggcgcactgtatgatttaaaatcaattataaagaaatatgaacaccctgtgctcgtacaaagtattgatggtgttggaacaaaaactataatagcaagaaagcttaacaagtatgatacaataggtattgacctattaagcgcagctgctaatgatataattgttatgggggcaaggccggttacttttcttgattatattgccaatgacaaattaaaaccatcagttattaaagaaataatttcggggatggttatggcatgtaaaaattctaatgtttctttgattggtggtgaaacagctgaaatgccagacacttatttgcctggagagcatgatttagttggggtaataacaggcttagttgaaaaagataaaattattagtgggggcttaatttcagcgggcgacgttcttttgggtttgccatccagcgggcttcacacaaacggatactcactagctagaaaagtgttttttgatattgggggttatagagttaacgattgccttgacggtttaaacagctctattgggttaacccttttggaaccacacatcaattacacaaacgatgtgtttaaactattagatagagatataaatattaaaggcatggcgcatattactggcggcggtcttgtagaaaacatccctcgcattttacctaaaaattgtatggcaattataaataaagacgcgtggagcgttctgcctgtttttaacgcaatacagtctattggcagcatagatgaatcagaaatgtttcgaacgtttaatatgggtattggaatgatatgtatagtctcaagtgatgatgtctctagtataaaacaattgattagcgttcgtgaagttggggaaattgtaagtggcgcaggcggggtaaaagtagtttaat

SEQ ID NO: 313879 - DNA, 424 bp, Unknown
  Bacterial polypeptide expressing nucleotide sequence isolated from the Sargasso Sea
atggaaaaaacaaaaaatagttacaaaaaaagcggagtaaacattgcgcttgcaaataaatttgtgaaacatatagccaaaatctcaacaaaaaatgtcagaaaaaagaataaaattaataatcgagataatattggtgcatttggttcagtttttgatttaactaaaattaaaatcaaagatcccttaatagtttcgtgcacagatggagtgggtacgaaaatagaattagcaaacaaatttaataaatttgatactataggaattgatttagttgctatgtgcgtaaatgatttaatagttcaaggcgctaaacctctattttttttagattacatagccgtagggaaactaaatttaaaaaaaattaaattaatattaaaaggtattctcaaaggatgtaaacagtctaattgtgagctta

SEQ ID NO: 313880 - DNA, 609 bp, Unknown
  Bacterial polypeptide expressing nucleotide sequence isolated from the Sargasso Sea
aatgaataaaggtaaatttacatataaaaaaagtggcgttaatattgcggctgccgacaattttattaaatttatatctaaaatttcaaaaaaaaataaagaaaataaaaaatttaataatattggtagttttggttcaatctcaaacattcctagcaaatttaaaaaccctaggattgttgctagtactgatggtgttggtacaaaaattgaaatagcgaatatattaaataaatatgacactataggaatagatcttgtagcaatgtgtgtaaacgatttaatagtacagggtgctaagcctttactatttctagactacatatcaataaataaaatagattctaaaaaacttaaagcaataattaaaggtattttgaaaggttgcaatatatccgattgcgaattagttggaggtgaaactgcagaaatgccgggaacttatgaaaaagggaaatttgatgtagcaggtttttctgtgggaattgtcgatcaaaaaaaaattttaaataaaaaaaaaataaaaaaaaataatttagttttggcaattccttcaagtggagttcattctaatggctattctttaattagacacatattaaataaaaa

SEQ ID NO: 313881 - DNA, 891 bp, Unknown
  Bacterial polypeptide expressing nucleotide sequence isolated from the Sargasso Sea
aatgaaaaagaataaagtttattataagtttgctggggttgatataagcgccggaaatgaggctgtaaacctaattaaagatagcgttaagtcaacattttcaaaaaacgtgttaactggtttaggtagctttggggcattatacgatttaaaagcaattgcaaaagaatataaacaccctgttttggttcaaagcattgatggggttggtacaaaaacaatcattgcgagaaaattgaacaagtttgacaccattggtatagacctgttaagtgcgacagcaaatgatattattgttatgggtgcaagaccaattacttttcttgattatatcgccaacgacaaattaaaccctacaattataaaagaaattgttagcggcatggttaaggcttgtaacgataataatgtatccttggttggtggagagacggcagagatgcctgatacttatttacaaggagagcacgatttggttggcgttattaccggtgttgtagaaaaaaataaaataatcaatggggaattaatttctccgggagacgttgttttaggacttccatctagcgggttacatacaaatggctattccttggctagaaaaatattttttgatattggaaactatgatgttaaagatcgtccgaatggtttggcgagttcggttggtttaacgcttttagagcctcacataaattatactaatgatatttttacgttactagatcaaggtgttaatgttaagggtttagcacatataacaggtggtggtcttctagaaaatattccacgtatcttaccaaaaaactgtgaagcgaaaatcaaactaggaacatgggatatccttcctgttttccatgctatgcaatctattggcaacatcgagcaaaa

SEQ ID NO: 313882 - DNA, 343 bp, Unknown
  Bacterial polypeptide expressing nucleotide sequence isolated from the Sargasso Sea
atgcaaaatagttacaaaaaaagtggtgttaatatttcattagctaataagtttgttcaacatattaatagattatctaaaaaagttggcaaaaaaacgaaaaattcaatttacaaagacaatattggaggctttggatctttgtttgatatcagcaatattaagattaaggatccagtaattgtctcttgcactgacggagttggtacaaagttggatttagcaaataaatataaaaagtatgatactattggaattgatcttgtagcgatgtgtgtaaatgatctaattgttcaaggagctaaaccactattttttttagattatatcgcaactgggtaaa

SEQ ID NO: 313883 - DNA, 682 bp, Unknown
  Bacterial polypeptide expressing nucleotide sequence isolated from the Sargasso Sea
aatgaaaaaaatacaaaataattataaaaaaagtggtgtaaacatttcgcttgccaataaatttgttaatcacattgcgaaagtatcaaaaaaaaatgaccaaaaaacgaacaaattatttgacttaggtaatatcggagcttttggttcagttttcgatataagtaatatcaaaattaaagaccctgttatagtctcatgtaccgacggtgtaggtacaaaattagacttagccaacaaatttaaaaaatttgatactattggtatcgatttagtagctatgtgcgtaaatgatttaattgttcaaggagcgaaaccactattttttttagattatatggctcttggaaagttagagcttaagaaaacaaagagtattttaaaaggtatattgcacggatgtaaaatttcaaattgtaaactaattggtggtgaaactgcagaaatgcctggtatatattctaaagataaatttgatttggctggtttcagtgtgggcattgtatcaaaaaagaaaattttaagtaaaaataatgtcaaaaaaaataatttaattttcgctattccctcaagtggtattcattcaaatggttattcattggtaagatcaattttaaaaaattataaaataaataaaaatttaaaaaaagaactattaaaaccaacaaaaatttatacaaat

SEQ ID NO: 313884 - DNA, 649 bp, Unknown
  Bacterial polypeptide expressing nucleotide sequence isolated from the Sargasso Sea
aatgaaaaaaatacaaaatagttataaaaaaagcggtgtaaatatttcattagctaataaattagttagatacatatcaaatctatcaaaaaaaaatgtcaaaaaaacgaaaagttattatgagaaagaagtaattggaggttttggatctctttttgatctaagtaaatataagattaaagaacctgtacttgtatcatgcactgatggggttggtactaaaatagatttagcaaataaatttaagaaattcgatactattggaattgatttagttgcaatgtgcattaatgatttgatagtacaaggtgctaaaccattattttttttagactacattgctgttgggaaattaaatctcaacaaatcaaaaaatattatcaaaggaattttcaaaggatgtgaaatagctaattgtaaactcataggtggagaaactgcagagatgccaggaatttattctaaggataatttcgatttagctggttttagtgttggaatagtatctaaaagaaaaattttaagtaaaaataaagttaaaaaagataatgttattttggcaatcccttcaagtggcttacattctaatggtttttctttagtaagaactattatcaaaaataaaaaaatatcaaataatttgaaaaaa

SEQ ID NO: 313885 - DNA, 658 bp, Unknown
  Bacterial polypeptide expressing nucleotide sequence isolated from the Sargasso Sea
atgcaaagaacaaaaaatagttacaaaaaaagtggtgtaaatattgatcttgcaaatagtcttgtaaaacacatagccaaaatctcaaaaaaaaatgtcagaaaaaagaataatacaggaaattcaaacaatattggtgcatttggttctttgtttgatatcagtaaaataaatataaaagatcccttaattgtatcctcaacagatggagttggaactaagttagatctagcaaatcgtttccacaaatttgatactattggaatagatttagtagctatgtgtgtaaacgatctaatagttcaaggcgcaaaacctttattctttcttgactacattgctataggaaaactagatttaaaaaaagttaaacaaattctaaaagggattataaaaggttgcaaacttgctgactgtgatcttgtaggtggagaaacagcagaaatgccaggaatttataaaaaaaataagtttgatttagcaggattttctgtaggaattgtatcaaaaaaaaaattaatagataaaaagaatgttaaaaataacgatataattttggctataccttcaagcggaattcattctaatggttattctctagttaggtcaattttaaataaaaaaaaaatttctaaaaaattaaaattagaattactta

SEQ ID NO: 313886 - DNA, 788 bp, Unknown
  Bacterial polypeptide expressing nucleotide sequence isolated from the Sargasso Sea
gatggacttattaagcgcttgcgcaaatgacattctagttatgggagcaaaacctcttacttttctagattatattgctaatgaaaaactacatcctaatattgttgaagaaatagtatcaggaatggtaaagggatgtagagaaacaggcgtctctcttgttggaggggaaacggctgaaatgcctgacacctatctaaaaggcgaacacgatcttgttggtataattacaggagttgtcgaaaaagacaaaatcattaccggcgaaaaaattcaacccggaaacattgttttgggtttaccttccaatggtttacatacaaatggatattctttagcccgaaaggtgttttttgatattggtaattacaatgtcaatgatgaaatacctgggctgaataaatctattggacttactcttttagagccccatatcaattatactaaacacgtttttgaacttttaaattctaaaattcctataaaagggatcgcacatattactggaggaggactactagaaaacattccaagagtacttcctgatgggctaagtattagtattaagaaaaggtcttggccttctctgcccgtgttttcttgtattcaatctattggagaaatagaacaaaaagaaatgtttagaactttcaatatgggaattggaatggtctttattttagataaagaacatgctgacatggcgaaaaccgcccttggaaagcattctaaggtctatgaaattggtcatgttcagtttggggataaaactgtacggttaagataat

SEQ ID NO: 313887 - DNA, 593 bp, Unknown
  Bacterial polypeptide expressing nucleotide sequence isolated from the Sargasso Sea
atatcagtctggtgaatttgatcttgctggattctctgtgggtattgttgactacaaaaaaatcattgatggatcaaaaatctcagaaggtgattcaatcattggtctcgcttcatccgggcctcattccaatggatattccttgataagaaaattgattgaagataactcagttgatttagatgaaatgatcaatggtgagaagattggcgcacaaatcattaagcccacaattatatatagtcgttcagtactgagttgtattgaaaaatatgaagtgaactcaatggctcacattactggcggaggatttcaagagaatattattcgagccatacctgagggctaccaggcaatcatcgataaaaattcatggagcttgcctcctgtctttcaatggattcaagatcaggctggcatcgattcaaatgaaatgctgagaacttttaattgtggcataggttatgttctgatcgttaaagcggatgttaaaaattctgtgatcaagcatttccaagacgaagagttagaagcttatgagatcggttctataacaagtggtgagaaatctgtcatcatcaatcatggctgat

SEQ ID NO: 313888 - DNA, 712 bp, Unknown
  Bacterial polypeptide expressing nucleotide sequence isolated from the Sargasso Sea
atgaaaaaaataaaaaatagttataaaaaaagtggtgtagatatttcattagcaaataagcttgtaaaacatatatcaaaaatatcaaaaaaaaatgtccaaaaaacgaatgccttattcgataaggatttaattggaggttttgggtcattttacgatataagtaaaattaaaataaaagatcccgtgattgtatcttgcacagacggtgtaggtaccaagattgaactagcaaataaatttaaaaaattcgatactatagggatagacttagtagctatgtgcgtgaatgacttaatagttcaaggtgcaaaaccacttttttttctagattacatagcggtcggaaagttaaatttggttaaagtaaaaaaaataatcaatggtatttttaatggttgtagactttctgattgtaagcttgtaggtggagaaactgctgagatgccaggggtatattcaaaagaaaaatttgatttagcaggttttagcgtaggtatagtctctaaaaaaaaaattttaaaaaaagaaaatgtagaaaaaggtgatatcatactggctattccctcaagtggtattcattctaatgggtattcattaataagatcaattattaaagatataaaattaacaaaagaattaaaatcagagcttattaagccaacaaaaatttatgtaaaggaaatattagaacttacgaacaaaagattaa

SEQ ID NO: 313889 - DNA, 382 bp, Unknown
  Bacterial polypeptide expressing nucleotide sequence isolated from the Sargasso Sea
atgaaaaaaatacaaaatagttataaaaaaagtggtgttaatatttctatagctaataaattcgttaatcacattgcaaaaatatccaaaaaaaatgtcaaaaaaacggatatgtcatttaatgcagataatataggtgcttttggatctgcttttgacataagtaatattaagattaaagatcctgttatcgtttcttgcacagatggtgtaggcactaaaattgatttagctaataaatttaaaaaatttgatacaattggaatagatttagtcgcaatgtgtgttaatgacttgattgtccaaggtgctaaacctttattttttttagactatatagctgtaggaaaactaaatttaaatagaacaaaaaatatttaaa

SEQ ID NO: 313890 - DNA, 508 bp, Unknown
  Bacterial polypeptide expressing nucleotide sequence isolated from the Sargasso Sea
atgacaaaaaacaaaaataaatacaaagacattggcgtagatattgatgaaggtcaaaaatttattgaggatataaagaatctcactaaaaaacctatcacatcttattccctaagtgatattggggggttttctggatatgtagaaacgccttctgaattttcagatcctgtttatgctttagcatgtgatggagttggtacaaaaataaaaattgggttaatgcttgataatttaaaaacaataggcatcgatcttgttgctatgtgtgttaatgatttgatttcaagtggcgcaaaaccagtcgcctttctagattattatggttgctcaaaactcgatagatcgaaggggaaagaaattatttcaggaatagtagaaggttgtaagttagcgggctgtgaattaattggtggagagactgctgaaatgcctaaccactataacgaaaataattttgatcttgttggtttctctatgggcgttaataatagaaataaaataattg

SEQ ID NO: 313891 - DNA, 861 bp, Unknown
  Bacterial polypeptide expressing nucleotide sequence isolated from the Sargasso Sea
attttgttatttcatatcaaaaatatcaccaaaaaaaaatggcaataaaaagtttaaaaatataggtggatttggctcaattactaatctgcctaaaaacatcaaaagaccaaagattgttgcctgtactgatggagttggaactaaagtcgaaatagcaaatattttaaataaatatgataccataggaattgatttagtggcaatgagcgtaaatgatctaattgtacaaggagcaaaaccaataatatttttagattatatctccattaataaaattaatttaaaaaagatgaaatctattcttaaaggtatagttaagggatgcaatatagccaaatgtgatcttgttggtggagaaactgctgaaatgccaggaacttatgaaaaaggtaaatttgatattgctggttttgcagttggtatagttgatgagaaaaaaatattatataaaaataaaattaaaaatggaaacttaattcttgctgtaccttcctcaggaattcattcgaatggatactcattaataagaaatattttagataaaaaaaagattaacataaaaaaaaattcatttttaaaaaaagaattaattaagccaactaaaatttatgtaagagaaattttaaaactgattaataaagatttattaaatggttgttcaaatataactggtgggggtttagtagataacataaaaagaataatccctgataaattatgtgccgaaattaatctagataaaattaaagttttaaaaatatttagctggttgaaacaaaatagtatttcaaataaagaaatgttaaaaacttttaattgtggagttggattttgtttaattgttaattataaagatgt

SEQ ID NO: 313892 - DNA, 825 bp, Unknown
  Bacterial polypeptide expressing nucleotide sequence isolated from the Sargasso Sea
ttgaaacagatattttagaaggattaggtcatgatcttgttggaatgtgtttgaatgatattttatgccacggtgctgaacctcttttctttcttgattactacgcatcttcaaaagttgataaaaattcttttttaaaaattattaaaagtatcactgaagcttgtaagattaatagttgctcccttttaggtggcgagactgctgaaatgccaggtctatataaagaaaacgattttgattttgcgggtttttgtgtaggtgcagtagaaagaaataaaattttacctaagaaagagctgatgaaggaaggcgatttactttatgggttaaaatcatcaggttttcattctaatggttattcactaattagaaaagtaatcaaagatagtaaattagatcttagtaagccaactgagtttcaatcaagttttaaaacaatttctgaagctttgatgacgcccacattactttattatccaatgctaaaaaacatattaaaaaaaaattacataacaggcatatcccatataactggcggaggtttaataggtaacgttccacgaatgcttcctgataatttgtctgctacaatagataaaaaatttgtgtgctgtgatgaaatttttaaatggtttcaagaattagcaaatatgtctaatgaagaaatgctcaaaacttttaattgtggtctcggtttagttattactatttcaaagaaagattataaaaattttgaagatttaattaaaacagaaaatttggatatttttgaaataggcagactagaagttaatgaaaattcaaggtgttctattagttgaa

SEQ ID NO: 313893 - DNA, 765 bp, Unknown
  Bacterial polypeptide expressing nucleotide sequence isolated from the Sargasso Sea
ttgcgatgtgtgtaaatgatttgttcgttcaaggagcaaagccttatttattcttagactacatttctattagcgaaattaatttgaaaaaattaaaacatatagttagaggaattgttaagggatgtgatattgctggttgtaaattagttggtggagaaactgctgaaatgccgggaacttatactaaagggaaatttgatatagcaggttttgctgtgggtcttgttgaaaagaaaaaaatacttaataaaaaaattagaaataatgatcttattttatctgtaccttctaatggacttcattctaacggttattccttggtgagatatctattaaaaaagaaaaaaataaatttgaaaacaagcaaatttctcaaaaacgaattaattagaccaactaaaatttatgtaaaagaattatctcttattaatgagaagaatttaataaatggatgtgcaaacataactggtggaggtctagtggataatattcaaagaataataccaaaaaatttatgcgctgaaatagatctaaatagggttaaaacattaaaaatttttagatggttatataaaatgggtgtaagtgagaaagaaatgttaaagacttttaattgtggtataggtttttgtttagtaacaaatcctaaaaatttaaattcagtaagtaaatattttggaaaaaaatttaaaccctatataattggaaaaatagttaaaaattcaaaaaaaataaaattaagtggaaaaatatcctggtaaa

SEQ ID NO: 313894 - DNA, 790 bp, Unknown
  Bacterial polypeptide expressing nucleotide sequence isolated from the Sargasso Sea
atttaacacaattggcattgatcttgttgcgatgtgtgtaaatgatttgattgttcaaggtgcaaaaccttttttatttctagattatatttcaatagacaaaattaatttgaaaaaaatgaaggaaattattagaggtattgttaaaggttgtgagttatcaagttgtaatcttgtagggggagaaacagctgaaatgcctggaacatattctccaggtaaatttgatcttgcaggtttttctgttggtttagtcgaagaaaaaaatatcttaattaacaaaataaaagaaaatgatttaattttagccattccatcaaatggcatacactctaatggcttttcacttgtaagggctattttaaaaacaaataaaataaatataaatagaaataaatatcttaaaaaagaattaataaaaccaactaaaatttatgttaaggaaattatcaatttaataaacaaaaatcttataaatggttgtgcaaatataactggaggtggtttagagagtaacattaaaagaattattccaaaaaatttatgtgcgaatatagatttaaataaaattaaaattcaaaaaatatttaaatggcttaaaaattcaggaataacagatattgaaatgttaaaaacatttaattgcggtgttggtttttgtataatcattaataaaaaaaatcttaataaggttaaattaaagtttgagaaaaagtataagccttatgtgattggtaaaatttcaaaaaataaaaaaaaagtaaatttaagtgggaaaattaattggtag

SEQ ID NO: 313895 - DNA, 784 bp, Unknown
  Bacterial polypeptide expressing nucleotide sequence isolated from the Sargasso Sea
aatgatttatattgttcaaggtgctgaaccactttattttttggattatttcgcgacaggtcaactttctaattcaattgctaaaaaaattattaaaagtatttctgacggatgtatagaatctaattgtgctcttattggaggtgaaacagcagaaatgcctggtttatatgaaaaagggcattttgacttagcggggttttcagtaggtgtagttgaaagaaataaattattaccaaaacaaaatattaaaaaaggtgatttgcttataggccttccttcaaacggtcttcattctaatggatattctctagtaagaaacataataaatcaaaaaaatataaatgtatctctacctatgtctgataaaagtggagaaacaattgtagagaatcttttaagaccaacaaaaatttatgtaaaacttatccttgagttactcaaaaattcaaatggaataaaagctatttctaatattaccggtgggggtattacagaaaatttaccaagaatttttcctaattcaaatattggagcaagaataaatttatcatcttggaaacgaccctcaatatttaattggctccaagaactaggaaacattgatgagcaggagatgttaaaaactttgaactgcggtataggtatgattttaatagccaacagaaatagtggtgaagagatatttgaaatcttggaaaagaaaaatgaggctttttatattattggcgaaattatagaaaccgactcagataattcaaaaattatttttcatagagattaa

SEQ ID NO: 313896 - DNA, 400 bp, Unknown
  Bacterial polypeptide expressing nucleotide sequence isolated from the Sargasso Sea
atgagcaataatcaagattcaaaacataataatgtatccgacgaactcaactatcgaacagccggggtagatatcgaagctggcaactcattagtatcggacatagcaaaaataaccaaaggaacttcaaggcccgaagtattatccaatcttggcggttttggagcactttgcgaaatacccaaaaactataagcatcctgtccttgtttcagccacagatggcgttggaacaaagctaaagcttgccacgactttaaataaacacgatagcatcgggatagatttagtagcaatgtgtgtgaatgacctaattgtctgcggcgccgagccgcttttttttcttgactattatgcctcaggaaaattggacattgtcgtagcaaaaaggtgtgattgaa

SEQ ID NO: 313897 - DNA, 811 bp, Unknown
  Bacterial polypeptide expressing nucleotide sequence isolated from the Sargasso Sea
aatgcaaaaacacaatacaatcggcattgatttagtagcaatgtgtgtgaatgatattcttgctgaaggcgctcagcctcttttttttctagattattacgctactggaaaattagatttaaaaatatcaaaagaaattttaaaaggaatcgtaaaaggctgtatacaagcagagatatcattaataggtggagaaactgctgaaatgccaggaatttatcaacaaaatatttatgatcttgctggcttttgtgtaggtgcaattgaaaagaaaaaatattatagcagggaattcataaaaaaaggtgatattgcaatagctttatcctcaagtgggattcattcaaatggattttccatggtaaggtcaattttgaaagataataatatcagtctttatgatgctgatccttttgaaaaatccaaaactattggtgagacacttttagaacctaccaaaatttatacaaagtttctaaacaagcttaacacatttaatttaattaaaagatccgtcaatgttacaggaggtggattaatcaaaaatcctccaagagtttttgatgataaccttacactaaaaattaatgttaataattggcacttaccgaaagagtttaaatggttaaagaaaaagggtaatttgagcacctttgaaatgctaaaggtatttaattgtggaattggaatgattttatttgtagaaaaagattatgtgaatgaagtaattcaatatgcaaataatgccaatgaaaattgctttgtaattggcaagatggttgagaaatgtgaaagttcagtatttttttga

SEQ ID NO: 313898 - DNA, 385 bp, Unknown
  Bacterial polypeptide expressing nucleotide sequence isolated from the Sargasso Sea
atggttaacaaaaaaaaaatcaatacttcaaagaatattacatataaggatgctggagtagatattgaaactgggaataagtttgttaaagagataataccactagttaaagatactaataggccaggagtaatgggttcaataggaggttttggaggtttatttgaccccaataaaagcggttataataaacccatattagtatcagcaactgatggtgttggtacgaaacttcttgtagcagacgcagtaaataagcatgacactataggaatagatttagtggcaatgagtgttaatgatattgtggtacaaggagcagaaccccttttctttcttgattattttgatacaggaaaattaaaaataaaaacagctaagcaga

SEQ ID NO: 313899 - DNA, 791 bp, Unknown
  Bacterial polypeptide expressing nucleotide sequence isolated from the Sargasso Sea
aatgaataagagcctttttacatataaaaaaagtggtgttgatatcagtgaggctgacaaatttattaagttcatatcgaatatttcaacaaaaaaaaagggcaaaaaaaagtttaataacatagggggttttggttcaatttctaactttcctaagaatttgaaagatccaaaaattgttgcttgtactgatggagtcggaacaaaaatagaaatcgcaaatttattacaaaaatataatacaatcggaatagatcttgttgctatgagtgtaaatgatttaattgttcaaggagccaaaccttggctatttttagattatatatcgatcaataaaataaatttaccgaaattaaaatcaattttgagaggtattattaaaggatgtaaaatttctaattgtgaattagtaggaggagaaactgctgaaatgccaggaacttacgagaaaggtaaatttgatattgctggtttcgcagtagggattgttgaaaataaaaatatacttaacaaaaaaaaaataaaaaaaaatgatttaatattaagcattccctcaaatggtttgcattcaaatggttattctttaatcagatttctgttgaacaaaaaaaaaattaatttaaaaaaaaataaattcttatctaaagaattgatacgtcctacaaaaatttatgtgcaagaaattctcaaattaatagacagaaaactaatacatggttgtgcaaatataactggtggtggtttagaggaaaatatttctagaataattccagataacttatgtgctaata

SEQ ID NO: 313900 - DNA, 886 bp, Unknown
  Bacterial polypeptide expressing nucleotide sequence isolated from the Sargasso Sea
aatgaaaaataataagttaacatatgaaaaaagcggtgttaacataaaagctgctgataaatttgttaaattcatatctttaaaatcaaataactcaaaaaatagtggtaaatttaagaacattggtggatttggttccataactcaaataccaaaaacatataaaaaccctcaaatagtctcagccactgatggtgttggaacgaaaattgaaattgcaaatatccttaacaaatttgatactattggaatcgatttagttgctatgtgcgtaaatgacttaattgtacaaggagcaaaacctataatatttttagattacatttcaataaataaggtagacttaaataaactcaaactaattataaaaggaatattaaaaggatgcaaaatatctggatgtgaacttgtgggtggagaaactgcagaaatgccagacacatatgaaaaaaataaatttgatatagcaggtttttcaattgggttagttgaaaaaaataaaatattaaacaagaaaattttcaagggtgacttaatactagcggttccttctaatggtttgcactcaaatggattttcattaataagatacattttaaaaaaaaaaaaaattgatttaaaaaaaaataaatatttaaaaaaagaattaataagaccaactaaaatttacactaaagaaattttaaaattggtaagtaaaaatctaattaagggttgtgcaaatattactgggggtggaattcctgataacttaaaaagaattttacctaataacatgtcagctgaaataaatttaaataatataaaatataaaaaaatttttaaatggataaaaagtcaaggagtaagcgataaggaaatgctaaaacatttaattgcggtgtag

SEQ ID NO: 313901 - DNA, 706 bp, Unknown
  Bacterial polypeptide expressing nucleotide sequence isolated from the Sargasso Sea
aatgaaaaaaattaaaaatagttataaaaaaagtggtgtaaacatttctattgctaataaatttatcagtcacattgctaaagtaacaaaagatagtgacaaaaaaacgaagagatcattaaatggcgaaaacattggagcttttggttctacttttgatataagtaaaattaaaattaaagatccattaatagtttcttgtaccgatggagtaggaacaaaaattgatctagctaataagtttaaaaaatttaatactattgggattgatctagttgcaatgtgtgtcaacgatttaatagtacagggagccagaccattattttttttagactatattgctgttggtaagttgaatttaattaaaactaaaaaaattttatctggaataattaaagggtgcaagctttcaaattgtaaacttattggaggcgagacagctgaaatgcctgggatttataccaaagataaatttgatctagctggttttagcgtaggaattgtttccaaaaaaaaattactaggcaaaaataaggtcaaaataaataatattattttggcgattccgtctaatggagtgcattcaaatggttattctttagtaagatcaatcttaaaaaaaaataaaattacaaaaaaattgaaggaggaattattaaaaccaaaaaagatttatacaaatgaaatattaaaattagcagacaga

SEQ ID NO: 313902 - DNA, 455 bp, Unknown
  Bacterial polypeptide expressing nucleotide sequence isolated from the Sargasso Sea
catggattacaaaacatcaggtgttgatatagaggctgggcgagaatttgtttccgaaattaaacaggcagttgaaggaactcatacatctaatgtgattgagggtattggcgggttcggaggtttatttagaattcctatcgatagttttaaaaaaccagttcttgtttcaggaactgatggtgtgggaacaaaattagaattagcccaaagtaaaaactttcactttgaggttggtattgatttagttgctatgtgcatgaacgatatcattactagtggtgctaaacctttattttttcttgattatattgctactggtaaacttgataagaaacaattattgagggttgttcagggaattgcaaaaggctgcggtgaaaataactgttcattactcggcggagaaactgctgaaatgcctggattttattcaaaaaataagtatgatcttg

SEQ ID NO: 313903 - DNA, 751 bp, Unknown
  Bacterial polypeptide expressing nucleotide sequence isolated from the Sargasso Sea
aatgaaggagaaaattaataaattcagttacagttcttccggagtagatattgataatgctgaaaaattactgtcaaaactccatccattaattaaagaaacttataacgaagctgttttacaaaatgtaggcggattttcaagtgttcttgatattaaaaaattaggatataaagatcctattttaatgtcaacaacggatggggttggaacaaaattacaattagctataaatacagacaaattatttaatataggaattgatttagttgctatgtgtgtgaacgatatagttgctcaaggtggaaaacctcatttttttatggattatattgccactggaaaattaaataataatcaaattttggagatattaaagggtataatttatggttgcaaacttgctgattgtgcattagttggaggtgaaactgctgaaatgcctggacattatacaaaagataattttgacttggctggtttctgtattggtgcatctgaaagagagaaagttttcagcaagaaaaatgtcaaagaaaataatagtgtaattgcaattgaaagtagcgggcttcattcaaatggttactcattaataagaaatttaattaaaataaaatcgattgatataaatgatcaagcaccctttgacaagacaaaatctttactagaaattcttcttgagcccacaatgatttacagtgagatgtttgaaaaaattaggtcaaaagttaagattaatagtataact

SEQ ID NO: 313904 - DNA, 865 bp, Unknown
  Bacterial polypeptide expressing nucleotide sequence isolated from the Sargasso Sea
tgtctggacagatggaataggtacaaaaatattactaggtattgaaactgatattttagatggtttgggacatgatcttgttggtatgtgtcttaatgatattctttgccatggtgcagagccattattttttttagattactacgcttcttccaaaattgacaaaaattcttttttaaagattatgaaaagcattactgaagcttgcaagataaataattgctctcttatcggtggtgaaactgcagagatgcccggactctataaaaaagatgattttgattttgctggattttgtgttggtgcagtggagagaaaaaaacttttaccaaaaagaaatgtaatgaaagaagatgatcttctatatgggattaggtcctcaggttttcattcaaatggatattctctaattagaaaagttttaaaagataaaaatatagatctaaataaaaaaactgaatttaaatcatcttacgaaacaaatgcagcagcttttatggctccaacaaaattatatttcccttttttaaaaaaaattttaacaacaaattttgtcaatggtatttcgcatataacaggtggaggtgttattggtaatacgcccagaatgctttctgaaaatttttcagcaagaattgataagaaatttatttgtgatgaagaaattttccaatggtttcaaagtttagctaacatttcagatgaagaaatgttgaggacttttaattgtggattaggtttgataatgacaatttcaaaaaataattacaaagagtttgagcaattaataaaagatgaaaatttagatatttttgaaattgggaaaatagaaattaacaaatcatcaaggtgcacaattagttga

SEQ ID NO: 313905 - DNA, 850 bp, Unknown
  Bacterial polypeptide expressing nucleotide sequence isolated from the Sargasso Sea
caaggaataaaccaaccaaaaattgtagcttgcacagatggtgttggtactaaaattgagatcgcaaacacgctaaataagtatgacacaattggtatagatttagtagctatgagtgttaatgatttaatcgttcaaggtgcaaagcctcttttatttttagactatatttcaattaataaaattgatttaaaaaaacttaaatcaataattaaaggaattcttaagggctgcagattgtctggctgtgaattagttggtggtgagacagctgaaatgcctggtacatatgaaaaaggtaagtttgatattgcagggtttgcagtaggtgtagtaagtaaaaataaaattttaaacaaaaatagaataaaaaataataaccttatcttagctgtaccatcgagtggattgcattctaatggtttctctttggtaaggtatcttataaatcaaaaaaaaattaatataaaaaataataaatttttaaagtctgaacttttaaggcctactaaaatatatgttgatgaagttttaaaattaattgatcagaatttaattaatggttgtgcaaatataacaggcggaggcttgtcagataatatcaaaagaattattccagatgaaatgattgctgatattaatttagatcaaataaaaactttgaatatttttaaatggcttaaaaaaaatggaatatcagaaaaggagatgataaaaacatttaattgtggagttggattttgcttaattataaatccaaaagatttaaaaaaagtcactaaatatttttcgaaagactatagaccctatgtaataggtaaaatttctataggtaataacaaagtaaaat

SEQ ID NO: 313906 - DNA, 576 bp, Unknown
  Bacterial polypeptide expressing nucleotide sequence isolated from the Sargasso Sea
aaaaaaataaatttgacttagctggtttttgcacaggcatagtatctaaaaaaaaattactaacaaaaaaaaatgttaaagaacatgatataattttagcaataccctctagtggaattcattcaaatggatattctttagtgaggcatataataaaaaaaaataaattaccaaattacttgaaatcagaaattttaaaaccaacaaaaatttatgtagaggattttttaaccttaagtaaaaaaaaacttgttaattctgctgctaacattacgggtggaggtttagttgataacgttattcgtgcagttcccaatggacttacagtaaatttagatctatctaaaataaaaattcttaaaatcttctcttggattaaatcaaaaaacatatctgattttgaaatgcttagaacttttaattgtggtgtggggttttgtttaattgttaaaaaaaataatgttaaaaaaattgaaaatattttaaaaggaaaatttaaaccttatgaaattggttttgtttcaaaagggaaagaaaggttaaaattcttgaataagttaaaatggcaaaaataaa

SEQ ID NO: 313907 - DNA, 793 bp, Unknown
  Bacterial polypeptide expressing nucleotide sequence isolated from the Sargasso Sea
gatcttgttggtatgtgtcttaatgacattctttgtcatggtgcagagccattattttttttagattactacgcttcttccaaaatcgacaaaaattcttttttaaaaattatgaaaagtatcactgaagcttgcaagataaataattgttctcttattgggggtgaaacagcagagatgcctggactttataaaaaagatgattttgattttgctggattttgtgtgggagcagtagagagaaaaaaaattttacctaaaagaaatgtaatgaaagaagacgatctactatatggtattagatcttcgggttttcattcaaatggatattctctgattagaaaagttttaagagataaaaatatagatctacataaaaaaacagaatttaaatcattttatgaaacaaatgcagcagccttaatggctccaacaaaattgtattttccttttttaaaaaaaattttaacaaaaaatcttattaatggtatttctcatataacaggtgggggtgttattgataatgtaccaagaatgctttctgaaaatttatcagcaaggattgataaaaaatttatttgtgatgaagaaattttccaatggtttcaaagtttagctaatatttcagataaagaaatgttgaatacatttaattgtggattaggtttgattatgactatttcaaaaaataattataaagaatttgaacaattaataaaaaatgaaagtttagatatttttgaaattggaaaaatagaagttaacgaatcatcaaggtgcataattagttgaa

SEQ ID NO: 313908 - DNA, 631 bp, Unknown
  Bacterial polypeptide expressing nucleotide sequence isolated from the Sargasso Sea
atgaagcaaaaaatatcatacaaagacgctggtgtagacattgaaaaagctgatcaagccattgattcttcaaaaaaagtaattaaagaaacctttagtggggatgtcctgtcttctattgggggttttggttcaatgtacagcctaaaaaatcttttgaaggactatgatgaacctataatggtgcaaagcatagatggggttggaactaaaatgtctgttgcacaaaagtgcggagatttccgttttattggcacagacctggtaagcgcatgctgcaatgatgtggcggcaaccggcgctaggccgcttacttttttggactacattgcaagcgactcattaaaccctaaaacggtttctgaaattataaaaagcgttgctgttgagtgtaaaaagcttggggtttctttggttggtggagaaaccgctgaaatgccgggcacttatcgcaaaaccgaatatgaccttgttggtgttgcaaccgggattatagacaagaaaaacattattgatgggtcaaaaatcaaaaacggcgatgcggttttaggtcttccttctaacggactacacaccaacggatattctctagcaagaaaactaatgtttgatactcttaaaatgaaggtaa

SEQ ID NO: 313909 - DNA, 639 bp, Unknown
  Bacterial polypeptide expressing nucleotide sequence isolated from the Sargasso Sea
atcaaaatatacctgaagtaacaaaagatatagtggccggcatggcaaaagcatgcaaagaaacgggttcggcgattattggtggcgaaatggctgagatgagtgatatgtatcaagcgggtgattttgaccttgcaggattctcagtaggtattgtcgaaaaagatgacattattgatggcagtaaaatcgctgaaggccaacacatttatgcactaagctcttctggtattcatagcaatgggtattctttagtacgaaagattttatctagctaccctaacgaaacaaaagatatttcaatagatgacttactagaacctacaaaactctatgtaaatgaagtactagagcttattgacgcacatacaattacaggagttgcccatatcactggcggaggcttaacagaaaatgttgagcgaatactcccctcctctcttagcttagatattaacagggataatatgcctatacctaaaatttttaacgatcttcaaaatgctgcaggaatatcggatgaagaaatggagcgtgtatttaatatgggcatcggcatggtgatcatcagtccagataagattagtgaaaccgaaagtcgtaaacatattggctctgtcatcaaaaaaagccaatgag

SEQ ID NO: 313910 - DNA, 390 bp, Unknown
  Bacterial polypeptide expressing nucleotide sequence isolated from the Sargasso Sea
catgaaaagcactgcctaccagcaggcaggtgtcagcctggatgctgctgatgaggtggtggacaaggtgaaaccattggctcaaaggactttcagacccggggtgattggaggactcgggggctttggagggttgtttcacctcgatccaaacaaatggaaaaacccggttctcgtttcaggtaccgacggggtcggaaccaaactcaaactggcttttgaactcgaaaagcacgacaccattggaatcgatctggtggcaatgtgtgttaatgacattctggtccagggtgcggaaccgctttattttctggattatctagcatgcggaaagcttcatccggataaagtagctaccatcgttagcggaatcagtgaaggctgcaggca

SEQ ID NO: 313911 - DNA, 793 bp, Unknown
  Bacterial polypeptide expressing nucleotide sequence isolated from the Sargasso Sea
aaatttaaaatatttgatactattggcatagatttagttgcgatgtgtgtaaatgatttgattgttcaaggtgctaaacctttatttttcttagactatattgctgtaggtaaattaaatctgaacaaaacaaaaaaaattttaaaaggtatattcaaaggatgtgaaatttcaaattgtaaacttattggtggcgaaactgcagaaatgccaggggtttattcaaaaaataaatttgacctcgcgggatttagcgttggcattgtatcaaaagaaaagattttagataaaagtaatgtaaaaaatggtgatatagttttagcaattccgtctagtggaatccactcaaacggattttcactagtaagatcgatattaaaaaaaattcatgtatcatcaagactcagaaaagagattttaagacctacgaaaatatatactgaagaaattttaatgttgacaaaaaaaaatctcataaattcagcagcacatattacaggtggcggattgattgaaaatttattaagatcagttccggaaaaccttaccttgaatattgatctttcaaaaattagaataataaaaatttttaaatggttaaaaagtaaaaatatttcagataaagagatgcttaaaacttttaattgtggagttggtttttgtattattgtttcaaaaaaaaatataaataaaattaaaaagatatttcctaaaaattataccccttacgaaattggttatatttcaaaaaataaaaaaaaaattaatttatccaattctttaaaatggtaaa

SEQ ID NO: 313912 - DNA, 877 bp, Unknown
  Bacterial polypeptide expressing nucleotide sequence isolated from the Sargasso Sea
atgaataaaaaaaaatttacctataaaaaaagtggagttaatatcaaggctgcagacaagtttgttgatttcatttctacagtttcagcaaaaaaaagaggcaaaaaaaagttttcgaatataggtgggtttggctcaataacaaatataccaaataatattaaacaacctaaaatcgtagcttgtacagatggtgtaggaaccaaaattgaaatagctaatacgttaaataaatttgataccattggaattgacttggttgctatgagtgtaaatgatttaatcgtacaaggagctaaacctttgctttttttagattatatatcaataaataaaattgatcttaaaaaacttaaagcaataataaaagggattaacaaaggttgtaatcaatcagaatgtgagctcgtcggaggtgaaactgctgaaatgccaggtacgtatgaaaaaggtaaatttgacatcgcaggttttgctgtaggagttgtaggaaagaatagaattttaaataaaaataaaataaaaaaaaataatcttatagttgcaattccttccagtggtttacattctaatgggtattctcttgtaagatatttattaaaactaaaaaaaataaatattaaaaaaaataaatttttaaaatctgagcttctaaaaccaactaaaatatatgttaaagaaataatgaatttgataaataacaacttaatcagtggctgtgcaaatataactgggggaggcttgtctgataatattaaaagaattataccagataagctttctgcacatataagtttagataaaattaaaacttctaaaatatttaattggcttaaaaataatggaatttctgataaagaaatgcttaaaacattta

SEQ ID NO: 313913 - DNA, 619 bp, Unknown
  Bacterial polypeptide expressing nucleotide sequence isolated from the Sargasso Sea
atgaaaaaaacaaaaaatagttataaaaaaagtggtgtaaacattgaaactgcagataaatttacaaaatatattggaaaatactcacaacaagcctttaaaaaaaaattaaacaaatttaacagaaccaatataggtagttttgcttctgcatttgatattaagccattaaaaataaaagatccaattttagttgctagcactgacggtgttggaacaaaactagaaattgcaaacagatttaataaatttgatactataggaatagatttggtggcaatgtgtgttaatgatttaatagttcagggagccaaaccattattctttcttgattatatagcgacaggcaaaataaatctcaaaaaaatgaaaaaaattgttagaggtataataaccgggtgtaaaatttcaaactgtatattggttggtggtgaaacagccgaaatgccaggaacatatgaaaaaaataaatttgatttagctggtttttcagttggaatagtttcaagaaaaaaaattttatcaaaaaataaagtaaaaaataaagatattatactagcagtaccatcaagtggcttacactctaaaggcttttccttggttagagaaattttaaaaa

SEQ ID NO: 313914 - DNA, 813 bp, Unknown
  Bacterial polypeptide expressing nucleotide sequence isolated from the Sargasso Sea
acttattgaacaaatatgatacgattggaatagatttagttgccatgagtgttaacgatctggttgtgcaaggagcaaaacctcttttttttttagactatatttcaattaataaaattaatttaaaaaaaatgaaatcattaattaaaggaattataaaaggatgtaatatttcacaatgcagtttagttgggggtgaaacggctgagatgccagatacctatgacaaaggtaagtttgacatggctggttttgcagttggtatcgttgatggaaaaaaattacttaccaaaaaaaggataaagaaaaatgatttaatattagctgtaccatcaagtggtttacactctaatggtttctcattgataagatacttaattaaaaagaaaaagattgatgttaaaaaaaattatttcttaaaaaaagaattaatcaaacctactaaaatttatgtcaaagaaatattaaacttaagcaaaagaaacttgttaaaaagttgcgctaatattactggaggaggattagttgataatataagcagaattattcctgataaattatcagcagagataagtttgaataagattaaaaccctaaaaatttttaagtggctgaaaaaaaacaatatctctgataaagagatgctaaaaacattcaattgtggggtgggtttttgtttaatagttaattctaaaaatatcaaaaaaatacaaaaatatttttcaaaagaacataaaccctatgttattggaaaaatcacgacgggtaaaaataaagtaaaattaaatggctacattgactggcttaaataaa

SEQ ID NO: 313915 - DNA, 760 bp, Unknown
  Bacterial polypeptide expressing nucleotide sequence isolated from the Sargasso Sea
tgcgtcaatgacctcgtagtacagggagccgaacctctattttttctagactacctctcggtgggcgcattacagcccgaggtggcgacctcaatcctaaaaggtattgccaatggatgccatatcgctggagccactcttttgggaggagaaacggcagagatgccaggactttatacgaaaggacactatgacctagccggattcgcggtcggggtagtggagaagagaaaaattatcgatggaaaggacatcaccaaaggagacgttgtccttggactggcctcgtcaggcattcattctaacggtttctcgttgtttcgaaaagttcgtgaactgaacttagatgctaaaagcaaaccgtccaacgaagaagcactgcgacccacaaaaatttacgtaaaatcaatccttgcagcaataaaagaatatcaagttaacggaatttcccacataacaggcggtggtctgaccaacaacatacctcggataatgccaaagggattatgtgcaaaaataaacctagactcttggctcgtcccagaaattttcacgtggttagcggaagcgggtcctataaaggaggccgaaatgcttcggacctttaattgtggtatcggtatggttttaattgtaccgccagatgaagcccaagggatatccaagaaactgacttatgagggagaaaaggtatttcaaatcggggaaattatcagtgagagcaaagccatcgtttacagtggtcgagccttttcttagc

SEQ ID NO: 313916 - DNA, 699 bp, Unknown
  Bacterial polypeptide expressing nucleotide sequence isolated from the Sargasso Sea
tatggcatcaaataaattaacatacagtaagagtggcgttaatatttcaaaagcagatagtttcgttaagttcataagttcactaacaagaaaatcagctaaaagtggtgattttaagaatataggagggtttggagcaatctctccaatacccaaaatgtttaaaaatccacatattgttactagcactgatggagttggaacaaagattgagattgcaaatgatctaaataaatttgattcaattggaatagatcttgtggcgatgtgtgtaaatgatttggtcgttcaaggagcgaagccttatttattcttagactacatttctatttgcaaaattaatttgaaaaaattaaaacatttagttagaggaattgttaagggatgtgatatcgctggttgcaaattagttggtggcgaaactgctgaaatgccaggaacgtatactaaagggaaatttgatatagcaggttttgctgttggtcttgttgaaaagaaaaaaatacttaataaaaaaatcagaaataatgatcttattttagctgtaccttctaatggacttcactctaacggttattccttggtgagatatctcttaaaaaagaaaaaaataaattttaaaactagcaaatttcttaaagacgaattaattagaccaactaaaatttatgtaaaagaattatcacttataaatgaaaa

SEQ ID NO: 313917 - DNA, 643 bp, Unknown
  Bacterial polypeptide expressing nucleotide sequence isolated from the Sargasso Sea
aaaaattttagaaaagaaattattttaaacccagggggcttttgctcaatcttcgatttaaaaaagcttaaatacaaagatccaattttattaagtagtacagatggagttggtactaaactaaaattggctttagaacaaaaaaatctaaaatttttaggctttgacttagttgcgatgtcagtaaatgatattttagccaatggaggagaaccacttttttttcttgattacatttcaacatcaaaaataaaggatgatatatttcttgatttaatcaaaagcattaaccaggcctgttctgaggccgggtgttcgctagtaggtggagaaacagcagaaatgcctggaatgtacaaaaatgaagaatttgatatagctggttttgccgtaggtgctgttgaaagaaaaaatcagattggaaaagaaaaagttaaaaaaaactcacttattttaggactagaatccagtggttttcattcgaatggattttcgcttataagaaaaattattagtgaaaaaaaaatatcacttaatactaagcctccttttaaatcagattttaaattattgggtgaagatttaatccaaccaacaaaaatttatgttaaatcacttcttccacttataaaaaaaaaaaaaa

SEQ ID NO: 313918 - DNA, 859 bp, Unknown
  Bacterial polypeptide expressing nucleotide sequence isolated from the Sargasso Sea
aaaataaaagatcccgttttggtatcttgcacagatggtgtgggcactaaaatagatttagcaaataaatttaataaatttgacacgattggtattgacctcgtggcgatgtgtgtaaatgatttaattgtacagggagcgaaaccactattttttttggattatattgcggtcggaaaattagatttgaaaaaaacaaaaaaaattattaatggaattattaaaggatgcaaattctctcaatgtagtttaataggaggcgaaacagcagaaatgccaggaatttattccaaagataaatttgacctggcaggatttagtgtaggtttggtctcaaaaaaaaaaatattaaataaaaaaaaagtcaaaaataatgatcttattttagctattccatctagtggtattcactcaaatggatactcgctagttagatctttaatcaaaaaacgtcatatttcaaaaaaaattcaaaaggaattaataatgccaacaaaaatatactccaaagaaattttaaaattagtagataaaggattaataaattctgcggctcatataacaggtggtggactaattgaaaatctatctaggtcaattcctgacaaattttctataaatattgatctgtctaaaatcaagattaaaagtatatttaaatggttaaaaaataagaacatatcgcaaagtgaaatgatgaaaacttttaattgtggagtaggattttgcattatcgcacctaaaaagaattttaaaaaaattaagagagtttttaataaaaaatactccccttactcaataggattcatttctaaaagctcaaaaaaaataaatttgaaaaattctcttaaatggtaaa

SEQ ID NO: 313919 - DNA, 820 bp, Unknown
  Bacterial polypeptide expressing nucleotide sequence isolated from the Sargasso Sea
tgtaggtacaaaaattgaagttgcaaatcaacttaatagatttgacacgattggtatagatttagtcgcgatgtgtgttaatgatttaattgttcaaggagccaaacctttgttttttttagactatattgctattggaaaaattaatttaaaaaaaatgaagaaaataattaagggaataataaatggatgtaaaatttctgattgtgtgcttgttggtggagaaacagcagaaatgccaggaacatatggaaaaaataaatttgatttagcagggtttacagttggaatagtttcaaaagaaaaagtaatttctcaaaataaggtaaaaaaaaataatataatattagcaataccatcttcaggattacactctaatggtttttcacttgtcaggaaagttattaaaaatataaaattaaataatagattaaagaaagaattattaaaacctacaaaaatttacaccaaagaaattttaaatttagttaaaaataatttggttaattctgcagctaatattactggtggcggaataactgaaaatataattagatctgtaccaaataatttaacggtaaacatagatttatcaaaaataaaaattccttttatatttaagtggcttaaaaataaaaatataaatgacatcgaaatgctcaaaacatttaattgtggtgttggtttttgtttaatcgttaataaaaaaaacataaaaaaaatcaaaactttttttaatagaaaatttatgccttacgaaattggttatatttcacaatcagaaaaaaggttaaattttacaaaaaatctaaaatggtaa

SEQ ID NO: 313920 - DNA, 871 bp, Unknown
  Bacterial polypeptide expressing nucleotide sequence isolated from the Sargasso Sea
aaaaaaaaaggcaaaaaaaagttttcaaatattggtggttttggttctatatcagatatacctaagaatataagacaaccaaaaattgttgcatgtactgatggtgttggtaccaaaattgaaattgcaaatattcttaataaatacgacaaaattggaattgatttggttgcaatgagtgtaaacgatttaattgttcagggtgcaagacctcttatttttttagactatatatctattaacaaaattgatttaatcaaacttaaatcaattattaaaggaattgtaaaaggatgtaggctatctggatgtgaattagttggtggtgaaacagccgaaatgccaggcacttacgaaaaaggtaaattagatatagcaggcttcgcagtcggaatagttagtaaaaataaaattttaaataaaaataaaattaaagaaaatgatttagtgttagctattccatcaaatggacttcattcaaatggttattcactagtaagatatcttattaaaataaaaaaaattaacataaaaaaaaataaatttttaaaaaatgaactactaaagccaaccaaaatttatgttaaggaagtgcttaatttgattgaaaataatttaattaatggatgtgcaaatataacgggtggtggcttagcagataatataaaaagaatcattccagataatttgattgcagaaataaatttagataaaattaaaacttctaaaatttttaaatggctaaaaaaaaataaaatacatgataaggaaatgcttaaaacatttaattgtggtgtgggattttgtttaataattagtccaaaaaatcttaataaaattaaaaaatatttttctaaagattataaacctt

SEQ ID NO: 313921 - DNA, 777 bp, Unknown
  Bacterial polypeptide expressing nucleotide sequence isolated from the Sargasso Sea
tatggcatcaaataaattaacatacagtaagagtggagttaatattccaaaagctgatagttttgtgaagttcataagttcgctctccagaaaatcaaataaaagtggtgattttaagaatataggtggttttggtgcaatctcccctattcccgcaaaacttaaagaacctcaaattgtaacaagcacagacggggtgggaactaaaattgagattgctaatgatctaaataaatttgatacaattggcattgatcttgttgcaatgtgcgtaaatgatttggtggtccagggtgccaaaccatatttatttttagactatatatcagtaagcaaaattaatttaaaaaaattaaaagatttggttaaaggaattttaaaaggatgtaaaatagctaactgtaaattagttggtggcgaaaccgcagaaatgccaggcacatactcaaaaggaaaatttgatattgcaggttttgcagttggtcttgttgaaaaaagaaaaatactaaataaaaaaattaaaaataaagatcttattctagcaatcccttctaatggacttcactcaaatggtttttcattagtaagatatctaataaaaaaaaaaaaaattaactttaaatcaagtaaatttctaaagaaggaattgattagacctacaaaaatctatgtgaaagaattattagatgtaaatgaaaaaaatttaattaatggatgtgcaaatataactggtggaggtttaatagacaatattcaaagaataataccaaataattt

SEQ ID NO: 313922 - DNA, 718 bp, Unknown
  Bacterial polypeptide expressing nucleotide sequence isolated from the Sargasso Sea
aatgaaaaacgatccctataagaaagctggcgttgatataaaagcaggaaatgatttagtagacaaaattagaaaagatgtagctagtactttcgataaaaatgtattgggtgggattggtagcttttcaggtttttattctcttcctaaaggttttaaaaatccggttcttgttgcttgcaccgatggagtgggcactaaagtcgccctagcccaaaagaattcttcattgggaactattgggcaagatttagttgcaatgtgtgtaaatgatatggtcacttctggagcatatccgctattttttctggattattttgcttcctcaaaacttaatgtcactgaaacagcaacagttataaagggcattgctaaagcatgcaaaaaaactaattgttcgcttattggtggcgagactgcagaaatgcccaatcactatatcggaaaaaattttgatttagctggattttcagtcggtattgttgaaaaaaaactaattattgactcctcaaaagttagaaaaaataacatcattatcgggattgaatctagcggagctcattctaacggttactctttgatcaacaaattaattaaggaatcaaaattaagtaagagtgaaaaagagaaattaattaagcttgctttaaagcctactcatttatatacaaatgtcattttggatttagtgaagaaagttaaagtgaagtcgattgct

SEQ ID NO: 313923 - DNA, 679 bp, Unknown
  Bacterial polypeptide expressing nucleotide sequence isolated from the Sargasso Sea
ctaaatctcagcaaaactaaaaaaattcttaaaggcatatttaaaggttgcaagctttcaggttgtaaattaattggcggtgaaacagctgagatgcctggaatttactcaaaagataaatttgatcttgcgggtttcagtgtaggtattgtctcaaaaagaaaaatcttggataaaaaaaatgttaaggagaaaaatattgttatggcaattccttctaatggaattcattctaatggatactcattagtaagatcgattttaaaaaaaaataaaatttcaaataatttaaaaaaagagattttaaaacccactaaaatatatactgaagaaattttaaaattaactaataaaaattttgttaatgcagctgcccatataacgggtggtggtttaattgaaaatttattgagatccgtgccagataatttaactcttaatattaatttatcaaatattaaaacaactaaaatttttaaatggttaaaaaccaaaaatatttctgaccaagaaatgattagaacatttaattgcggtattggattttgtgtaattgtaaataaaaaaaatgtaaagaaaattaaaaaaatttttactaaaaaattcaaaccttatgaaataggatttatttcaaaaagtaaaaataaagtaaatatatttgggtctttaaaatggtaaa

SEQ ID NO: 313924 - DNA, 499 bp, Unknown
  Bacterial polypeptide expressing nucleotide sequence isolated from the Sargasso Sea
cttgtacagacggtgtgtggtaccaaaattagagatagcaaatactatcaataaattcgatactattgggatcgatttagttgctatgagtgttaatgatttaattgttcaaggtgcaagacctcttatatttttagactacatatcaattaataaaataaatttaccaaagttaaaatcaattattaagggtattgtaaagggatgtaaaatttctgaatgtagtctagttggaggagaaactgcagaaatgcctggaacttatgaaagaaataaatttgacattgctggttttgctgtgggtgttgttgataaaaaaaaaattttgaataaaaaaaaaatcaaaaaaaatgatcttattttagctgttccttccagtggtcttcattcaaatggatattctcttgtaagagatattattaataaaagaaaaataaatattaaaaaaaatagttttttaaagaatgaattaattaagcccaccaaaatttatgttaaa

SEQ ID NO: 313925 - DNA, 460 bp, Unknown
  Bacterial polypeptide expressing nucleotide sequence isolated from the Sargasso Sea
atgacaaaaaaaactaataactacaaagattctggagtaaatgttcaagaaggacaagattttattaacgatattaaagatgagctcaatgatttacaaaataattttgctattggctctatagggggcttttctggatatattgatcctcccaaaaattataaagacccagtctatgctttggcgtgtgacggggttggcacaaagttaagaattgcatcttcattagagaattacgaatctattgggattgatttggtagcaatgtgcgtaaatgacttgattgtaagtggtgcaaagccaattgcatttctggattactatggggtttctaagttagatcgtcaaattggtaggcaagtaatttcaggaatattaaaaggttgccaactatcaggttgtgatctcattggtggagagacagctgaaatgccaaatcactacactaatgaaatttgat

SEQ ID NO: 313926 - DNA, 721 bp, Unknown
  Bacterial polypeptide expressing nucleotide sequence isolated from the Sargasso Sea
tccactattttttcttgattattttgcttcctcaaaactcaatgttacagaaacagcaacagttataaagggcattgccaaagcctgtaaaaaaactaattgttcacttattggcggcgagactgctgaaatgccaaatcactatatcggcaaaaattttgatttagctggattttcagttggtattgttgaaaaaaaactgattatcaactcctcaaaagttagaaaaaataacatcataatcgggattgaatctaacggagctcattctaatggttactcattaatcaataaattaattaaggaatcaaaattaagtaagagtgaaaaaatgaaattaattaagcttgctttgaagcctactcatttatatacaaatgtaattttagatttggtaaaaaaagttaaagttaagtcaattgcgaacattactgggggtggtcttacagaaaatattcctagatcaattcctaataatctatcctctgaaatatatctgaataactggaaaatgccggtactcttttcaactctccaagaattaggaaaaatccaaataagagatatgttgagaatatttaattgtggaattggaatgactttagttattgagcctaaggatttcgataccaccatgaaagtactttccaagcataaatttaaaggcttcatgattggaaaagttgtaaataaatcttcatcagaaataacttttctttaa

SEQ ID NO: 313927 - DNA, 595 bp, Unknown
  Bacterial polypeptide expressing nucleotide sequence isolated from the Sargasso Sea
aatgccaggtttttaccagggatcacaatacgatctggccggattttgcgtgggaatcgtagaaaaagacaaaatcattaatggcgctgaaataacaaaaggcgacaaaatcgtcggtctgccaagcagcggtcctcatagtaatggattttccttgatccggaaaatcctagagctgaaagaaatcgaaagttcagatctcattgatgagatgatgaatcccacaagaatctacgtgcgaagcgtgcttgctcttttagaaaaaataaaggttaaagggatggtccatattacaggtgggggtttttatgaaaatatccgaagaatcttaccgaaccaacatctatcagcaaatattgatctctcagcttgggagagacctcaaatttttaaatggcttcaagatacaggacgcgtagatgaacgcgagatgctaacaactttcaattgcggcataggttacctaatcatagtgagttcagaggacgctgaaaaaacaacagaaattttaacgctcgaacaagaagaacctttgttagttggggagatagtttcttctgactcgccggctaactctaaccaaatactcatttaa

SEQ ID NO: 313928 - DNA, 786 bp, Unknown
  Bacterial polypeptide expressing nucleotide sequence isolated from the Sargasso Sea
atacaatagggatagatcttgtagctatgtgtgtgaatgatttaatagttcagggtgctaaaccatatttatttttagattatatatcgataagtaagattgatctttccaaattaaaaaatttactaaaaggtatagttaaggggtgtaacatagctgattgtaaattggttggtggtgaaactgcagaaatgccaggcacatatacaaaaaataaatttgatattgctggatttgctgttggaattgtagataaagaaaaaatacttcataaaaaaattaaaaataatgacctaattttagcagtgccatccaatggactccattcaaatggtttctcgcttgtaagacatgttttgaaaaagaagagattaaattttaaacaaaataattttcttagaaaggaattaattagaccaacaaaaatttacgtaaaagaagtgtccttacttgttgaaagaaaattaataaatgcatgtgctaatataactggtggcggattagtagataatataaaaagagttattcctaaagatcttggattggagatcaacttaaataatattaaaatattaaaaatatttaattggttgcataacatgggtattgatgaaaaagaaatgttaaaaacttttaattgtggggtaggtttttgtttaatagttaatcctaaaaatttaaaaatggttagtaaatattttaacataaaatataaaccttatgttattggaaaaataacaaataattcaaaaaaagttaaattaagtggaaaaattaactggtaaa

SEQ ID NO: 313929 - DNA, 821 bp, Unknown
  Bacterial polypeptide expressing nucleotide sequence isolated from the Sargasso Sea
catgaaaaataaaaccaaaaacacttcaacagaatcactaagttataaaaaagcaggagtagatataaaagctggaaacaaattagtacaaaaaataaacccactcgctatttccacacaacggtcagggacatttgctggtctaggggggtttggcgcgttatttgatttaaaagcggcaggctttcatgaccctattttagtagccgcgaccgatggagttggaactaaactaagaatagcaattgaaactgcaaatttaaaaacaattggtattgaccttgttgcgatgtgtgtaaacgaccttatttgtcaaggagccgagcctttattcttcttagattattatgccaccgcaaaactaaatatagaagaagccgcagcggtcattgaaggtatagcgacgggatgtcgattatcaaatactgctttaatcggtggcgaaactgcagaaatgccggacatgtaccataacagtgattttgatttagccggttttgcagttggagccttaaacaggggagaaatacttccaaaaggcattagtgccggagacgtcctggtcggtctaaaatcgtcgggcgtccattcaaacggattctcacttgtaagaatgatagtgaaaaacttaggtttaaactgggaatcaccgatccctttctcagataaagatttaggcactgaacttctagaacccacaaaaatctatgttcatccaatattgagtttgaaacaaaagaaattactttctggagtagctcatattactggtggagggctaactgaaaacttaccaagaatacttgagcctttttatggtg

SEQ ID NO: 313930 - DNA, 821 bp, Unknown
  Bacterial polypeptide expressing nucleotide sequence isolated from the Sargasso Sea
tggctctataacaaatattcctaaaaatattaagaaccctcaattagtagcaagtacagatggggttggaactaagatagaaatagcaaatgaattaaataagtttgatacgataggaattgaccttgttgcaatgtgtgtaaatgacttaatagtgcagggtgctaaaccactcatttttttagactatatttcaataaacgaagtgagacaaaataaattaaaaaatattataaaaggaataattaaaggatgtgaaatttctaattgtgaattagttggtggtgagacagcagagatgccaggaacatattctaaaggaaaatttgatattgctggtttttcagtaggaattgttgataagaaaaagattttagacaaatcaaaaattaaagttaacgatttaattgttggaataccctcaaacggtattcactcgaatggatattctttaataagatatattttaaagaaaaaaaaaattaaattcaaaaaaaataaatttttaaaaaaagaattaatcaaaccaacaaaaatttatgttaaagaaattttaaatttagtaaataaaaaattaataaacggttgtgttaatattactggaggagggcttaaagataacataagtagggttcttccacaaaatttatctgcaaaaattgatctgggaaaaataaaaccaaataaaattttcaaatggatatattctaagggagttagtgaaaaagaaatgattaaaacttttaattgtggagttggtttttgtataataattaatcaaaaaaaatatgagaaagttaaaaaatatttttcaaacaatt

SEQ ID NO: 313931 - DNA, 820 bp, Unknown
  Bacterial polypeptide expressing nucleotide sequence isolated from the Sargasso Sea
atgagcgacgcaggcaagaacgggatcacctatgcggacgcgggtgtcgatattgacgccggcaatgcgctggtcgaacggatcaaaccggcggcaaagcgcaccaaccggcccggcgtcgccagcgggctgggcggtttcggggcgttgttcgacctgaaggccgcggggtttgacgacccggttctggttgcggcgaccgacggtgtgggcaccaagctgcgtatcgcgatcgacaccggccatgtcggcagcgtcggcatagatctggttgcgatgtgcgtcaacgatctggtctgtcagggggctgagcctctgttctttctggattatttcgcaaccggaaagctggacaccgaaaccgcggcacaggtggtcgaaggcattgcagccggctgcgaagggtcgggctgcgccctgatcggcggtgaaacggcggaaatgccggggatgtacccgccgggcgatttcgaccttgccgggttcgcggttggcgcgatggagcgtggccatgccctgccggcaggtgtgcaaccgggcgatgtcttgctggggctggccagcgacggcgtgcattcgaacggctattcgctggtgcgccggctggtcgaacgctcggggctggcctgggatgcgccgaacccgttcggcggcgggtcgctgggcgcggccctgctgacgccgacgcggctttatgtgcgcccggtcctgtcggcgatccggtccggtggcgtgcatgcgctggcgcatattaccggcggtggcctgaccgaaaacctgccgcgtgtccttcccgaagggctgggcgccggatatcgaa

SEQ ID NO: 313932 - DNA, 485 bp, Unknown
  Bacterial polypeptide expressing nucleotide sequence isolated from the Sargasso Sea
aatgaaaaacgatccctataagaaagctggcgttgatataaaagcaggaaatgatttagtagacaaaattagaaaagatgtagctagtactttcgataaaaatgtattgggtgggattggtagcttttcaggtttttattctcttcctaaaggttttaaaaatccggttcttgttgcttgcaccgatggagtgggcactaaagtcgccctagcccaaaagaattcttcattgggaactattgggcaagatttagttgcaatgtgtgtaaatgatatggtcacttctggagcatatccgctattttttctggattattttgcttcctcaaaacttaatgtcactgaaacagcaacagttataaagggtattgctaaagcatgcaaaaaaactaattgttcgcttattggtggcgaaactgcagaaatgcccaatcactatatcggaaaaaattttgatttagctggattttcagtcggtattgttg

SEQ ID NO: 313933 - DNA, 858 bp, Unknown
  Bacterial polypeptide expressing nucleotide sequence isolated from the Sargasso Sea
ccgtactggtctcaggcactgacggtgtcggcaccaagctcaagcttgccatcacactggactgtcacgacaccatcggtattgatctcgtcgccatgtgtgtcaacgatattctcgtggtgggcgcggaacccctgtacttcctggattatttcgccaccgccgcgctttccccttcgcaggcggaatcggtgatctccggtattgcgacaggatgcgagctggcgggagccgccttgatcgggggcgaaactgctgaaatgccggggatgtatcagtccggcgactacgatcttgcaggattctgcgttggcgttgtcgaaaagaaagacatcatcgatggccgggacattcgtgccggggatcaggtcatcggccttgcatccacggggctgcactcaaacggttactccctcgctcgggccattgtcgacagaagcaacgcttcactggatacgcctattgggaccagcacgcttgggcagacgctgctgacgccaacgcggatttatgtgcgaagcatcctcgatctgctgaaggcctgcccagtcaaaggaatcgcccacattaccggaggcggtttaccgggcaacattccacgcgtattgcccgatactcttgaatgccatatcgacccgaacgcctggcaccgcccggaaatattccaatggctgcaatccgaaggtcaggttgctgacgacgagatgtggcgaacctttaactgcggcattgggcttatcatcatcgtctccccggagaatgcggcaaaagcgaaagcttcacttgagcgatgcggtgagaccgcttttcatatcggccagattcaggccggtcgtgcaggtgttgtcttcaaataac

SEQ ID NO: 313934 - DNA, 850 bp, Unknown
  Bacterial polypeptide expressing nucleotide sequence isolated from the Sargasso Sea
aatgaataataaaaaatttacatatgaaaaaagtggcgtaaatataacagcagctgataaattcgtagaatttctatcaaataaagcaaaacaacgaagaaataaatcaaaatttaaaaatattgggggttttggctcgatatcagaaataccaaaaaaatttaaaaatccaaaaatagttgcttccacggacggggttggtacaaaaattgaaattgcaaatgaactagataagttcgatacaataggaattgatttggttgcaatgtgtgtcaatgatcttattgttcaaggtgcaaaacccttaatatttttagattatatatcaaccaataagatcgaattaaaaaaacttaaatctatagttaaaggtattattgctggatgtaaaatttcagattgcgaactcgtaggaggtgaaactgcagagatgccaggaacatatgggaaaaaaaaatttgatttagctggattttctgttggtgttgtagatgataaaagttttcttagtaaagataaaataaaaaaagacaatttaatacttgcagttccatcaagtggtattcattctaatggatattcattactgagatatattcttaaaagaaaaaaaattaattttaaaaaaaataattttttaaaaaaggaattaataaaaccaacaaaaatttacacaaaagagattcttttgctcaatgaaaaaaatttaataaatggatgtgcaaatattactggtggtggaataattgataatattaaaagggtaattccaaatggattgtgtgcgagtatcgatctctctaagataaaagttccaaagatttttaaatggataaaaaacaaaatgtag

SEQ ID NO: 313935 - DNA, 448 bp, Unknown
  Bacterial polypeptide expressing nucleotide sequence isolated from the Sargasso Sea
aatgaaaaacgatccctataagaaagctggcgttgatataaaagcaggaaatgatttagtagataaaattagaaaagatgtagctagtactttcgataaaaacgtattgggcgggattggaagcttttcaggtttttattctcttccaaaaggttttaaaaatccagttcttgttgcttgcacagatggagtgggcactaaagtcgccctagcccaaaagaattcttcattgggaactattgggcaagacttagttgcaatgtgtgtaaatgatatggttacttctggagcacatccactattttttcttgattattttgcttcctcaaaactcaatgttacagaaacagcaacagttataaagagcattgctaaagcatgtaaaaaaactaattgttcactaattggtggtgagactgctgaaatgccaaaccattatatcggcaaa

SEQ ID NO: 313936 - DNA, 363 bp, Unknown
  Bacterial polypeptide expressing nucleotide sequence isolated from the Sargasso Sea
aatgaaaaaagttgaaaatagttataaaaaaagtggtgttaacatttcgttagcaaataaattagttaaacatatatctaaattatccagaaaagatgtcaaaaaaaggaatggggtctccaaaccagatgtaatcggaggttttggttcattatttgatataagtaatcttaaaattaaagaacctgtaatagtttcatgcactgatggtgtcggaacaaaaattgatttagctaataaatataaaaaatttgatactattggaattgatttagttgctatgtgtgtaaatgatttaattgtacaaggtgctaagccattattctttttagactacattgctgtaggtaaattagatttaaa

SEQ ID NO: 313937 - DNA, 655 bp, Unknown
  Bacterial polypeptide expressing nucleotide sequence isolated from the Sargasso Sea
attttaaaaggaattcttaagggctgtgagctttcaaactgtaaactaatcggtggtgaaactgcagaaatgccaggaatttattcagaggataaatttgatttggcgggttttagcgtaggtattgtttctaaaaaaaaaattttaaataaaaaaaatgtaaaaaaaaacaatttaattttagccgttccctctagtggtattcattcaaatggttattccttggtaagatcaattttaaagaaaaataagatttcaaaaaaattaaaaaaagagttattaagaccaacaaaaatttatacaaaagaaatactaaagttagtaagtaaaaatttaatcaattcagcagcacatattacgggaggtgggttaattgaaaatattacaagatcaattcctaataatctatctattaatatagacctttcaaaaattaaaacaaaaaagatatttaaatggctgaaatcaaaaaatatatcaaattacgaaatgttaagaacttttaattgtggtgtcggtttttgtataataatggataaaaaaaatataaaaaaaattaaaagatatttttctaaagactatatgccttatgaaattggttacatttcttctaatggaaaaaaattaaatttatataattctattaaatggtaaa

SEQ ID NO: 313938 - DNA, 597 bp, Unknown
  Bacterial polypeptide expressing nucleotide sequence isolated from the Sargasso Sea
aatgagtaatcacactaatgaaaagattaattaccgcgatgcaggggttgatgtcgaaaaaggtaatgaattggttcagcgacttaaaagaatagtcaatgatactaatcaaaaaggtgttattggaggacttggtggctttggagggttatttgatcttagttctttgaattataaagaaccagtactcgtatcaggaacggatggcgttggaacaaagattaaacttgccatcgaaaacaatttacataacacaattggcatcgatttagttgctatgtgtgtaaatgatgtaattgtacaaggtgcaaaaccgttattttttctcgattattttgcttgctctagactcgatatcgatattgctgagacagttataagcggtataaatgtgggttgttcgcaggccggatgtagtctgatcggcggtgaaaccgctgaaatgcctggaatgtatggggagcaagattatgatctggctggattttgtgtgggtgttgttgagaaagatcagctgattacgggagagaatgtgaaagctggtgatgcattaattgctctcgcatctagtggctgccacgctaacggatattccct

SEQ ID NO: 313939 - DNA, 828 bp, Unknown
  Bacterial polypeptide expressing nucleotide sequence isolated from the Sargasso Sea
caatcattgccagaaaaatgaaaaaatataacacaatcggcatagatcttttgagcgcatgtgccaacgatattttagtaatgggcgctaaaccattaacgtttttagattacattgcaaatgatagcctaaaccctatgattgttgatgaaatcgtcaagggtatgacaaaagcatgcaaagaaactggcgtctcacttgttgggggagaaaccgctgaaatgccagacacatatttaccaggggaacatgatcttgttggcgttataacaggtatagttgacaaagataaaataataaatggcaaaaacatttcaccaggtgatgtattaataggcttgccatcaaatggcttacatacaaacgggtattccttagcgagaaaaattttcttcaaagatatgggttatgatgttgatacatatcttgagagtcttaaaaattcagttggagcagcgcttctagagccacacataaactatactaatcatgtctttatattgttaaatgaaaaaataaatataaatggaattgcacatattacgggaggtggattaacggagaacatacctcgcatattacctaatggatgctcagtaaaaattcaaaaagaaaattggccaaccctaccaatatttgataccctaaaagatcttggaaatattaaagaggacgaaatgtaccacgcatttaatatgggtattggtatggttttcgttgttgatagtgattatgttgatgctatagaaaaagcgttaaatggcattacaaatatttatactattggagaagtaattgagggtgaaaatatagttcattataattaaa

SEQ ID NO: 313940 - DNA, 849 bp, Unknown
  Bacterial polypeptide expressing nucleotide sequence isolated from the Sargasso Sea
aaaaaaagaaaaaaaataaaaacattggtggatttggatcaatttcaaatattccaaaatattttaaggaaccaaaaatagttgcaagcacagatggagtcggtaccaaagttgaaatagcaaattccttaaataaatttaatacaattggaattgacctagtcgctatgtgtgtaaacgacttaatagtgcagggcgcaagaccattaatttttcttgattatatttcaattaataaaataaatttgaaaaaattaaaatctcttttagtgggaataaataaagggtgcaacatttctaactgtgctttagttggtggagagactgctgaaatgccaggaacatattctaaaaataaatttgatattgcaggatttgcagttggaattgttgataaaaaaaaaattataaaaaaaaataaaataaagaaaaatgatttaattttggctgttcctgctagtggagttcattcaaatggtttttctttgattaggtatattttaaaaaaaaaaaaaattaatttaaaaaaaaataaatatttaaaaaaagaacttatcagaccaactaaaatttacgtaaaggaagttttaaatctttttcggttaaacttaattaaatcttgtgcaaatattactggaggtggattagaagacaatataaaaagagtaatacccgaaggtgtgactgctcatatagatttatcaaaaataaaacctaataaaatttttagttggatcaaagcacaaaatgtgagtgatgatgaaatgctgaaaacatttaattgtggagttggtttttgtttaatagctaaatctaataatattttaaaaatccaaaaagttatttaat

SEQ ID NO: 313941 - DNA, 880 bp, Unknown
  Bacterial polypeptide expressing nucleotide sequence isolated from the Sargasso Sea
aatgtcaaatattccaaataatttaaaaaatcccttaattgttacaagtacagatggggttggtactaagattgaaatagcaaatgaattaaaaaaatttaatacaattggaatagatttggtagccatgtgcgtaaatgatttaatcgtacaaggtgctaaaccatatctatttctcgattacatatctattaataaaattgatctaagaaaattaaaaaatattattaaaggaataattaaaggatgtaggttggcaaactgtaaacttgtaggaggggaaactgctgaaatgcctggaacttatgcaaaaggaaaatttgatattgcgggtttttcagttggattagttgaaaagcataaggttcttaatttaaacataaaaaaaaatgatataattttagctatcccatcaaacgggttacattctaatggctattctttagttagagaagttttaaaaaaaaaaaaaataaatttatctaaaaataaatttttaaaaaaagaattaataaaaccaacaaaaatatatgtcaacgaagtcttaaatttagtaaagaaaaatattttaaatggttgtgcgaatatcacaggcggtggccttgaagataatattgaaagagtcattcccaataatttgtgtgctgaaataaatttagataatattagaattcaaaaaatttttacttggttaaaaaattcaggtatagctgaaaacgaaatgttaaaaacttttaattgtggtgtaggtttttgcttaatcattaaaaaaaaaaatttagaaatagtaaaaaaatatttttcaaaaaaatttaaaccttatattattggaaaaattacaaaaaactcaacaaaagtaaaattaagtggaaaaattaaa

SEQ ID NO: 313942 - DNA, 787 bp, Unknown
  Bacterial polypeptide expressing nucleotide sequence isolated from the Sargasso Sea
atgcccaacaaatcaccaaagaaaaatacctctttagactataaatcttctggtgttgatgttgaagcaggatataaattagtaaattctataaaacctttcgtagaaaaaactaaaagaaaagagatcatgtcaggtctaggctctttttctgctatgagcaagttaccttctaatataaaagatcctgttttagtaacttgcacagatggagttggtacaaagatagaaatagctagaaagatgaataattttggatctgtaggtaaagacctggttgcaatgtgtgtaaatgatctagttacatgtggtgctgaaccatttttattccttgactactatgttactgactcgcttaaagtaaaaactgccgcaagtgttattgaaggaatagctaaaggctgtgaagaagctaattgttccttggttggtggggaaactgcagaacatcctaatagttttcctgaaaatagttttgaccttgctggttttgccgtaggagcagtggatgaaaaaaagattatagggaaaaatggatgtatagctggtgattatctaattggtatagagtcttctggtgttcactcaaatggtttttctttaatcagaaaattaattgaagataaaaacatacctttaagcgcttctttaggaaatatgagcttaggtgaagtattactcatcccaactaaaatttatgtaaaacaaatattagaattagcaaagaaaatagaaattcaatctataagtcatataactggaggaggttttttgagaatatcctaga

SEQ ID NO: 313943 - DNA, 901 bp, Unknown
  Bacterial polypeptide expressing nucleotide sequence isolated from the Sargasso Sea
aatgaataataaaaattttacctacaaaaaaagtggtgttaacattaaagctgctgataagtttgtaaatttcatttcatcagtatcatcaaaaaaaaggggcaaaaaaaagttttctaatatcgggggatttggttctatttcaaatattccaagcaacataaagcaacctcaaatagttgcttgtacagatggtgttgggactaaaattgaaatagctaattctttaaataaatttgatacaattggtattgatcttgtagcaatgagtgtgaacgatttaattgtccaaggtgcaaaaccgttgctttttttagattacatttcaataaacaagattaatttaattaaacttaaatcgatcattaaaggaatagttaagggctgtaaactatcagattgtgaacttgtgggtggcgaaacagcggaaatgcctggtacttattcaaaaggtaaatttgacatagcaggttttgctgttggtgttgttggtaaaaataaaatcttaaataaaaataaaatcaaaaaaaataatataatattagcaattccatctagtggattacattcaaatgggttctcacttataaggtatttaataaataaaaagaaaattaatataaataaaaataaatttttaaaatcagaacttttgaaaccaacaaaaatatatgtgaaagaaataatcaatctaatttcaaaaaatcttattaatggttgtgcgaatattacaggaggaggacttgctgataacataaaaagaattatacctgataatatggtggctgatattgacttaaatgaaatcaaaactttaaaaatttataattggcttagaaagaatggaatatcagaaactgaaatgttaaaacatttaactgtggtgttggtttttgcttaa

SEQ ID NO: 313944 - DNA, 616 bp, Unknown
  Bacterial polypeptide expressing nucleotide sequence isolated from the Sargasso Sea
cctgggtttctacccagtgggtcgctacgacctggccgggttctgcgtcgccgttgttgaagagagcgagctgattgatggacaacaggttcaaccgggtgatgccgtgatcggcgtggccagcagtggtgtccatagcaacggcttcagcctggtgcgccgggtgctggcccaggccaaagcgaatcgatccaccaaatacggacctgatcagcgcccccttattgacgatctgctgaagcccacccagctctacgcctcgctggtgcaacacctgctcagcggcagcattcccatccatgccatggcgcatatcacaggtggaggactgccggagaacctcccccgttgcctgccggctggatgtcgtgcccaggtgagcccaaccagctgggcacgcccgcccctgttcgactggctccagagcgctggcggcattccgggacgggacctctggcacaccttcaatctcgggatcggtttctgtgttgtggtgccgcaggatcacaccgatttaacggtcgcggtctgccgtgcccagcagctccaggcctggccgatcggcagcatcgtggaggggaaccctgaagagggggtgattggcctccccgactag

SEQ ID NO: 313945 - DNA, 540 bp, Unknown
  Bacterial polypeptide expressing nucleotide sequence isolated from the Sargasso Sea
gagggcgatataatttaggattagcctcaaatggccttcactctaatggcttttcgctagttcggaaaattatagaacaattagacattaaatatgaagatccttgtccttttattgagaaatgggatttgggtgcagcgttaatggaaccaacacgcatttacgtagaaccatgcctaagtgcactccgagaaggtggaattcgaggacttgctcatataactgggggaggattactggaaaacccgccacgctcatttaacgatacactatcagcacgtattgatgttttaaaatggtcacttccacccgtctacgaatggttaatggaaaccagattaatttcaccaaaggaactcgctaatacattcaactgcggcattggcatgattttgataactgatcctaaccttacgcataaggtagccgagaaactctctaaatttggcgaaaccgtttatgaattaggattcttagagaagcgcactgagaccatgtcagcagttacgatagaaaatattgaaagctgggtaagatgac

SEQ ID NO: 313946 - DNA, 820 bp, Unknown
  Bacterial polypeptide expressing nucleotide sequence isolated from the Sargasso Sea
cgaaattgacagaaaaacaaaaaacccacaattagtagctagcactgatggtgtcggaactaaaatcgaaatcgcaaatgaattgaataaatttgatactataggcatcgaccttgttgcaatgtgtgtaaatgatctaatcgttcaaggcgctaaaccagttatatttttagattatatttcaattaataaaattgatttaaaaaaattgaaacaaataattaagggaattgttaaaggatgtaaattatctaattgtgaattagttggaggtgaaactgcagaaatgccaggaacatattcaaaaggaaaatttgaccttgctggattttcagtcggcatagtagagaaaaaaaaaattttagacaaatcaaaaataaaattgaataatttaattttggctattccatctagtggggttcattctaatggatactcattaataagatatttattaaaaaagaaaaaaattaatttaaaaaaaaataagtttttaaaaaaagaattaattaaaccaactaaaatttatgtaaaagaaatattaaatttaattaataaaaaattggttaatggttgtgctaatattactggtggtggtcttagagataatattaaaagaattttacctgaaaacttcactgctaaaataaacctaaaaaaagtaaaaacaaaaaatatttttaaatggttgcacgcaaatggaattgataataatgaaatgttaaaaacttttaattgtggaataggtttttgcattataattaatccaaaaaatttgaaaaaaataaaaaaatattttccaaagaaatttgaaccttat

SEQ ID NO: 313947 - DNA, 967 bp, Unknown
  Bacterial polypeptide expressing nucleotide sequence isolated from the Sargasso Sea
aaaaaaaaaggcaacaaaaagtttaataatattgggggattcggctctatttcaaaccttccaaagaacattaaaagacctaaaattgtagcctgtactgatggagttggcactaaaattgaaatagcaaatttactaaataaatttgacactattggtattgatttagttgcaatgagtgtaaacgatttaattgtacagggtgcaaaaccaattttatttttagactatatttcaattaataagattgatctaaaaaaacttaaatctatcttgaaaggaattgttagaggttgtgaaatagctgaatgtgagttagttggtggtgaaacagcagagatgccaggcacttatgagaaaggaaaatttgatattgcaggatttgcaatgggagttgttgatgaaaaaaaaattcttaataaaaaaaagattaaaaaaggaaatttaattttagcagttccttcttctgggattcattcaaatggttattcattagtaaggcacatcttagataaaaaaaaaattgatattaaaaaaaattactttcttaaaaaaaatttaattaaacctacaaaaatttacgtgagagaaatcctaaatctaaatcaaaataatttattaaatggttgtgctaatataactggtggtggtttggcagataatataaaaagaataatacctgataaattatgtgctagtattgaattaaataaaatcaaaactttaaagatatttaattggctaaaaaaaaataatatttcagataaggaaatgttaaggacatttaattgtggagtgggtttctgtttaataattaattcaaaaaatcttaaaaaaataaagggatatttttcaaaagaatttgagccctacgtaattggaaaaataataaaaagtaaagataaagttaaacttaatgccaagattgatggaaataagaaaataaatgttgctgtttttatatcag

SEQ ID NO: 313948 - DNA, 841 bp, Unknown
  Bacterial polypeptide expressing nucleotide sequence isolated from the Sargasso Sea
gccgctacagatggggtcggcacaaaattaaaaatagccatagaaactaaacaactctctactataggtattgatttagttgcgatgtgcgtaaatgatttgatttgccagggcgctgagccattgttttttttggattattttgcaaccggaaatcttattcttgaagacgcagaacaaattattggtggaattgccactggttgtgaggaggctggttgtgcactaattggtggtgaaactgctgagatgccaggcatgtactccggagaagacttcgatcttgctgggttttctgtgggggcagtggaaagagggaatgagttccctagagcgacaaatgatggagatattataattggcttaagttctgatggaattcattcaaatgggtactcgttagtaagaaagatagtcgaaacttcaggcttgaaatgggctgataaggcgccattcgatgacctacctctcggcaaggcacttttaaaaccaacaaagttatatgttaagcagtgcttaatattaatgaatgtcagtggaattaaagcatttgcccatattactggcggagggcttacggaaaatattgttagaactttaacaaatggacagggacttgaaattaatctttcaagctggcagttggccccaatatttaaatggctatcagatacaggtggcgtggataaacttgaaatgctgaaaacttttaactgtggcataggaatgacaataatatgctcaccatcatctaaagataacgttttttctttgttggaaaaaattggagagcagccgattattattggtcgcgttacaaatagtggtacggtaaaatact

SEQ ID NO: 313949 - DNA, 514 bp, Unknown
  Bacterial polypeptide expressing nucleotide sequence isolated from the Sargasso Sea
aattataacaaaagataaagtaaaaaataaaaatattgtactagcagtaccgtcaagtggtttacattcaaacggttactcattagttagaaaaatattaaaaaatactaaaattgataagtttttaaaaaaagaattgttaataccaacaaaaatttacacaaaagaaattttaagtctagttaataagggtttgattaattcatcggctcatataactggaggtggccttatagagaatataactagatcagtacctaataatttaacagtaaatatagatctctcaaaaattaaagttcacagcatttttaagtggttaaaaaataaaaatatttcagatacagaaatgttaagaacttttaattgcggtgttggtttttgtttgataacggataaaaataaggtaccaaaattaaaaaaatactttaacaaaaaatttcaaccttacaaaattggttttatttctaaatcttcaaaaagaataaatttattaaaaaatattaaatggtaa

SEQ ID NO: 313950 - DNA, 589 bp, Unknown
  Bacterial polypeptide expressing nucleotide sequence isolated from the Sargasso Sea
tatgcatgctaaggatgaatatgacttagcaggattctgtgtgggtatcgtagaagcagatcgtcttctggatggaagctctataagtgcaggagacagaattattggaatagcctcatctggcccacactccaatggcttttcacttataagaaaagtattagaacaaagtcctctaggagcggatacattaatcaatggtcaaccaataatagatcagttactagccccaacacgtatctattcaaaatcaatcctccatctccttgaaagcattgaagtaaaaggtcttgcacacattactggagggggactgacagagaatattcctcgggtactaccaatggggcttggcgctcaactgaagcgctcagcttggccaactctaccggttttccaatggatagaggatatgggcgtagaaaccaaagaaatgcttcgcacatttaattgtggaattgggatggtagtgattgttaaaccagaaattacagaaaatgcggtatcaatactaaactcttgtggtgaagaagcttggattgttggcgaaatagtagaagataaaaacaatcaagcaaaagtcatttaa

SEQ ID NO: 313951 - DNA, 489 bp, Unknown
  Bacterial polypeptide expressing nucleotide sequence isolated from the Sargasso Sea
cttgaaaaaaggaagcctcatcaaaagcactgcctaccagcaggccggagtcagtctgggtgctgcggatgaggtggtggacaaggtgaaacccttggctcaaaggactttcagacctggggtgattggaggactcgggggctttggagggttgtttcacctcgatccaaacaaatggaaaaatccggttctcgtttcaggaaccgatggggtcggaaccaaactaaaactggcttttgaactggaaaagcatgacaccatcggaatcgatctggtggcaatgtgtgttaacgacattctggttcagggtgcggaaccgctttattttctggattatctagcatgcggaaagcttcatccggataaagtagctaccatcgttagcggaatcagtgaaggctgcaggcagtccaattgtgctttgatcgggggcgagactgcagaaatgcctggaatgtattcaggcgaggactacgatcttgctggatt

SEQ ID NO: 313952 - DNA, 877 bp, Unknown
  Bacterial polypeptide expressing nucleotide sequence isolated from the Sargasso Sea
ttcaggtcaatttgttcttgattcaaaaattaaaaaaccgattcttgttggtgcaaccgatggagttggaacaaaaattgagattgcccggatgatgagaaaccataagacaattggcattgacttagttgccatgtgcgtgaatgacttaatagttgaccaggctaaacctctttttttcttggactacatttcaacaggaaaattagacatatctaaaggcaaagaaattataaggggtattattaagggatgtaaaatgtctaattgttcactgctaggtggagaaacagcagaacatccagaagttgattcaaatgataagtatgatcttgctggattttgtgtaggagttaagagtggagaagttagagcaagtccaaaattaaaagaaaatgatcttattgtaggaatttcatcatcaggtcttcactctaatggatattctcttgttagaaagataatcaaagaaaacaaaataaaattaaacaagaagatagaaaaaaataaaactattggtgaactattactcaagcctacagagatatacgtaagtccaatacttgaaatgtacacaaaaaaaataataaaaacatgcgcccatattactggtggaggaataacagaaaatttaccaaggtcattaaataaaaatgtttcagcaaaaataaatctagaaacctttaatttgccaacaatatttaaatggatacaaagttttggggtaacgcaaaatgaaatgttaaaaacatttaattgcggatatggtatgatagtaatcttagatagaacaaagttaagtcaatttgaaaaatcaattaaagatcacaaacttaaatacagtattattggcagtttagtgaattcaaaaaaataa

SEQ ID NO: 313953 - DNA, 441 bp, Unknown
  Bacterial polypeptide expressing nucleotide sequence isolated from the Sargasso Sea
tatggattataaatcagctggtgtaaatattgatgcaggaaatgaagccgtagatcggatcaaacctcttgttaaaaagacctttaacgcaaacgttttaaattccctcggcggatttgcagggatgtacgaaattcctacaggatataaagaacccgtcttagtctcgtgtacggatggtgttggaacaaaaattaagtatgcgattgaagctcaaaaatatgactcgatcggaatcgacttagtggccatgtgtgtgaacgatttaatttgctgtggcgcaaaaccactttattttttagactatattgcttgtcatcaattaaacccagatcaaatggaatctctaataaagggtatgacagaagggtgcttacaatctgactgtgctctgatcggtggtgagatggccgaaatgaatgatttatataacccaaacga

SEQ ID NO: 313954 - DNA, 780 bp, Unknown
  Bacterial polypeptide expressing nucleotide sequence isolated from the Sargasso Sea
gatgaattaaaaaaaccatatgtagtaacgagcactgatggagttggaacaaaaattgaattagcaaatgaattaagaaaattcgacacaataggtattgatttagtagctatgtgtgtaaacgatataattgttcaaggtgccaaaccatattattttctagattatatttcaataaacaaagttaatttaaaaaaactcaaatcaattatgaaaggaattttagaaggatgtaaaatttcacaatgtgagttagttggaggagaaacagcagaaatgccaggcacgtattctaaagaaaaatttgatttagcaggttttgctgttggctttgtggaaaaaaataaaattttaaaaaaagaaaaaattaaaaaaaataatatcgttttagctgtaccatcaagtggtttacattcaaatggattttcattagcgagatatatattaaaaaaaaaacgtataaatattaaaaaaaatttatatctcaaaaaagaattacttactccaacaaaaatttacgttaatgaagtaacgaaacttcttaagaaaaatttaataaatgggtgcgcaaatattactgggggaggtcttaaagataatttatcaagagttttaccagaaaatttagatgcagaaattaacctaaataatattaaaataacaaaaatttttaaattttttaataatttaggtattaacgaaaaagaaatgctgaaaacctttaattgtggagtcggattttgtttaattgttaattctaaaaatttaaaaaaaataaaa

SEQ ID NO: 313955 - DNA, 663 bp, Unknown
  Bacterial polypeptide expressing nucleotide sequence isolated from the Sargasso Sea
taaaaggaattgttaaaggatgtaaaatttcagattgcgaactggttggaggtgaaacagctgaaatgccagggacttattcaaaaggaaaatttgatatagcaggctttgcagttggagtggtagataaaaataaaattttagataaatcaaaaattaaagttaatgacttaatcatggctattccttctagtggaatccattcaaatggatactcgctagtaagatatcttttaaaaaaaaaaaaaattaaattaaaaaaaaataaatttttaaaaaaaaaattaattaaacctacaaaaatttatgtgagagaaattttgaatttagtaaataaaaaattaattaatggatgtgctaatattacaggtggtggaattaaagacaatatcaaaagaattttaccatctcatttgtcagcaaatatagatttatataaaataaggccaatttctatttttaaatggattcataaccaaggtgtaattgaaaaagaaatgataaaaacatttaattgtggagttggcttctgtattattgttaatcctaaaaatttaataaaagttaaaaaatatttcacgaaagattttcaaccttatttaataggtaaaattataaaaggaaaaaaaaatattaatttaaatggaaaaattaaatggtaaa

SEQ ID NO: 313956 - DNA, 732 bp, Unknown
  Bacterial polypeptide expressing nucleotide sequence isolated from the Sargasso Sea
ttcaaggcgctaaaccattattttttttagattatatcgctttaggaaaattagagctcaaaaaaactaaaaatatcttaaaaggaatcttaaaaggttgtaaaatttctgattgcaaactgattggtggagaaacagctgaaatgcctggtatatatacaaaaaataaatttgatttagcgggttttagtgttggaattgtttcaaaaagaaaaattttaaataaaaaaaatgttaagaaaaatgatttaattttagctatcccatctagtgggattcattcaaacggatattcgttagtcagatcaattttaaaaaaaagtaaaataacaaaaaatttgaaaaaagaattattaaaaccaactaaaatttatactaaagaaatactacaattggtaaataaagatttgataaatgctgcagctcatatcaccggaggtggattaatagaaaatataattagatctataccaaataatttatcagttaatattgatttgtctaaaataaaaacaaaaaaaatttttaaatggttaaagtcaaaaagaatatctgatctagaaatgctaagaacttttaattgtggagttggtttctgtataattgtaaataaaaaaaatattaataagattaaaaaatattttagtagagaattcatgccctacgaaattgggtatgtttctagaagtggaataaaaaaaattaatttctcaaattctatttcatggtaaa

SEQ ID NO: 313957 - DNA, 788 bp, Unknown
  Bacterial polypeptide expressing nucleotide sequence isolated from the Sargasso Sea
ggaacaaaattagacttagctaacaaatacaaaaaatttgatactatcggaattgatttagtagctatgtgtgtaaatgatctaatagttcaaggagcaaaaccattattttttttagattatatagcgttaggaaaattagaacttaaaaaaacaaaaaatattttaaaaggtattttaaaaggctgtaaaatttcaaattgtagacttataggtggagaaactgcagagatgcctggcatatattcaaaaaataaatttgatttagctggttttagcgtgggaattgtatctaagaaaaaaattttaaataaaaaaaatgttaaaaaagatgatttaatttttgctattccttccagtggtattcactcaaatggatattcattagtaagatcgatattaaaaaataataaaattacaaaaaatttaaaaaaggaattattaagacccactaaaatttatgcaaaagaaatattacaattagtgaataaagatttaattaatgcagcagctcacattactggtggtggtttaatagaaaatataactagatctgtaccaaatcatttatcaattaatattgatctatctaaaataaaaacaaaaaaaatatttaagtggttaaagtcaaaaaatatctctgatcttgaaatgctaagaacttttaattgtggtgttggtttctgtataatgataaataaaaaaaatgtaaaaaaaattaaaaaatattttagtagaggcttcatgccttacgaaatagggtatatgtcgagtagttctaaaaaaaa

SEQ ID NO: 313958 - DNA, 706 bp, Unknown
  Bacterial polypeptide expressing nucleotide sequence isolated from the Sargasso Sea
caaaggtaaagaaattataatgggcattattgaaggatgtaagaagtctaattgttcacttctaggtggagaaacagcggaacatccaggaattgactcgcacgataagtatgatcttgctgggttttgtgtgggagttaaaagtggagttactaaaaccagtttaaagttgaaagaaaatgatcttgttgtaggaatttcatcttcgggcccccactctaatggctattctcttatcagaaaaattattagagaaaataaaataaaattaaacaaaaaaatagaaaaaaataaaactattggtgaactattactcaagcctacagagatatacgtaagtccaatacttgaaatgtattccaaaaaaataataaagacatgcgcccatattactggtggaggaataacagaaaatttacccagatcattaaatgataatatttcagcaaaaataaatctagaaacctttaatttgccaacaatatttaaatggataaaaagttttggggtaacgcaaaatgaaatgttaaaaacatttaattgtggatatggaatgatagttatcttagatagaacaaagttaaatcaatttgaaaaatcgattaagagacacaaaattaaatacagtattattggcaatttagtgaattcaaaaaaaataaataaaaaagttagttatattggcaaattaaattttaatgattaa

SEQ ID NO: 313959 - DNA, 904 bp, Unknown
  Bacterial polypeptide expressing nucleotide sequence isolated from the Sargasso Sea
tatgaagatcctttatttgtctctggtacagatggcatagggacaaaaatattactagggattgaaactgacattttagatggtttgggtcatgatcttgttggcatgtgccttaatgatattctttgccatggggcagagccattattttttttagattactatgcttcttccaagattgataaaaattcttttttaaaaattatgaaaagtatcactgaagcttgcaagataaataattgttctcttattggtggtgaaacagcagagatgcccgggctttataaaaaagatgattttgattttgctggattttgtgttggtgcagtagagagaaaaaaaattctacctaaaagagatgtcatgaaagaagatgatcttttatatgggattagatcttcgggctttcattcaaatggatattctctcattcgaaaagttttaaaagataaaaatatagatctacatagaaaaacagattttaaatcatcttatgaaacaaatgcagcagccttaatggcaccaacaaaattatattttccttttttaaaaaaaattttaacaacaaatcttatcaacggtatttcgcatataacaggcggaggtattgttggtaatgcaccaagaatgctctctgaaaatttatcagcaaggattgataaaaaatttatttgtgatgaagaaattttccaatggtttcaaagtttagctaacatttcagatgatgaaatgttgaagacctttaattgtggattaggtttgataatgactatttcaaaaaataattacaaagaatttgaccaattaataaaagatgaaaatttagatatttttgaaattgggaaaatagaagttaacaaatcatcaaggtgcacaattagtgaaaaaattacaagttgctatt

SEQ ID NO: 313960 - DNA, 484 bp, Unknown
  Bacterial polypeptide expressing nucleotide sequence isolated from the Sargasso Sea
gtgcgcaagatttttgagattaataagcttgactattctggttctgcaccattcgacccaaacaaacgtcttgatcatattcttttagctcccacccgtatatacgttaaaagttgcctggctgcagctcagtatggaggtgttcatgctctggcccatattactggtggtgggctaatcgagaatatcccaagaattttgccgttagatctcggagttgttattgacttaacagcttggcaattaccacccatttttaaatggctcgctgagataggaagaattcctgccaatgaaatgctcagaacctttaattgcggaataggaatggcggttatagttgatcccaccaaagcaaaagcattgagagaaatcatggagaaaaagggtgaaactgtctttgaaattggttccgttgtaaaggcaagtcgcatcaactcacaaataaaaataaaaaatattgaatcacaatggaaaaattaaa

SEQ ID NO: 313961 - DNA, 385 bp, Unknown
  Bacterial polypeptide expressing nucleotide sequence isolated from the Sargasso Sea
gatggattacaagagcgccggcgttgacgtcgaagccggacgccatttcgttgaacgcatccgcaccagcgtggaggccacccaccgcccagaagtccttggaggattgggcggctttggcgggctttgccgcttgccagccggacttgaaaagcccctgcttgtggctggcaccgatggcgtgggcaccaagctcgaactcgcccaggagtgcggccggcaccacggggtgggcatcgatctggtcgcgatgtgcgccaacgacgtgatcacctgcggcgctgagccgctgttcttcctcgactacatcgccaccggcaagctcagcccggccgccatggccgaagtggtggaaggaatcgccagtggctgcagccaaagcggc

SEQ ID NO: 313962 - DNA, 784 bp, Unknown
  Bacterial polypeptide expressing nucleotide sequence isolated from the Sargasso Sea
aattggaatagatttagttgcaatgtgtgtaaatgatattttggtacttggggcaaaaccactttttttcttggattacatttcaattgataaaataaatttaacaaaattaaaaaatattattaaaggtatacatcaaggctgtaaaatgagtgaatgtcaattagtgggtggagaaacggctgaaatgccaggaacctactctaaaaataaattcgatttagctggattttctgtaggacttgtaaaaaagaataacgtgttaacgaaggaaaagataaaggaaaaaaatttgattttagcaataccttctagtggactacattcaaatggatattctctattaagagaagttttaaaaaaaaagaaaattaatattaaaaaaaataaatttttgcggaatgaaatattaaaacccactaaaatttacgtaaaagaaattacgaatttgcttaatagaaaattagtaaatggatgtgcaaatataacaggtggaggtattggtgataatattgaaagagtaataccaaaaaatctttgtgcaagaatagatttagacaaaataaaaacttataagatttttagatggatcaacaaaaatggtgtttctcaaaaagaaatgctcaaaacttttaattgcggtgtaggtttttgcttgattattaaaaaaaataattttcataaaattttaaagttttttcctaagcaataccgtccctacataattggggaaatcattaaaaataaaagtaaagtaaaatatactaacaatatacgttggtag

SEQ ID NO: 313963 - DNA, 463 bp, Unknown
  Bacterial polypeptide expressing nucleotide sequence isolated from the Sargasso Sea
ttctagtggaccacactcaaacggctactctttaattagaaaacttttttttgaaaaaagaagtaagtttattcaagataaaagatttattaattccgtaatgaagccaactagaatttatgttgatataatttcgagtattttaacaaaaattaaggttaaagggatggcacatataactggaggcggactcgttgagaatatccctaggattttgccaaagggcatgggtatagagatttatcattctagaatcccaaagaataaactttttaaaaatatacaagactattcaggtctaaattttgaagaaatgattaaagtttttaatatggggattggttttgtcatttgtataaatgaaaaagacttgggggctttatcaaagattttaaactctaaaaatgaaaaattttatgtattaggtaatgttgtcaaagggaacgaatttaagattacttaa

SEQ ID NO: 313964 - DNA, 805 bp, Unknown
  Bacterial polypeptide expressing nucleotide sequence isolated from the Sargasso Sea
gattgcaaacaaatataaaaaatttgaaacaattggtattgatctggtagctatgtgtgtaaatgatttaattgttcaaggagcaaagcctctattttttttggattatattgcaataggtaaactcaaattaaataaaataaaaaaaatattaaaaggtattttaaaaggctgtaaaatttcagaaagtagtttaataggtggagaaactgcagaaatgccaggcgtatattcttacgataaatttgatcttgcaggtttttctgtaggaatcgtatctaaaaaaaaaatattaaaaaaaagtaatgttaaaaataaaaatgtaattttagcttttccttctaatgggcttcactcgaacggtttctccttagtaagattaatattaaaaaaaaataaaataccaaataatttaaagaaagaattattaaaaccaacaaaaatttatgtcaaggatgttctaaagctttataaaaaagatttaatcaattctgcagcccatataactggtggagggattttagaaaatattataagatcagtaccgaaaaaattaactgttaatttagatttgtctaaaattaaagttaataaaatcttttcttggattaaatcaaagaatatatctgatcacgaaatgttgaaaacatttaattgtggagttggtttttgcataattgttaacaaaaaaaatgttaaaaaaataattaaaatttttaaaaaaaaagaaagtcaaccctatgaaataggctatatatcaaatggcaataagagaattaatctattaaataaaattaaatggtaa

SEQ ID NO: 313965 - DNA, 583 bp, Unknown
  Bacterial polypeptide expressing nucleotide sequence isolated from the Sargasso Sea
gagcagtagaaaaaataatattttaccaaaagataatattaaagatggtgattatataataggtctaaaaagctccggcatacattcaaatggcttttctttagtaagaaagatcctaaaagataataatataaatatgaatgaaaaaataagtgattttccagaaaagtctataggtcttaatctacttactcctactaaaatttatgttaaaccaataattaacgaacacaaattaaataatattaaggcctgtgcacatattaccggaggtggcttaatagataatctacctagagtaattcctcataatttaacttccgttatatatggagataaaattaaacctaatgaaatctttaagtggcttaagaatatggggaatataaagagtagtgaaatgttaaaaacatttaattgtggtataggcatgtgcgttatagtagacccttctaaagctgatcaaatagtaaaaaactttaatactcaaggtgaagaggcttcaataattggtaagcttgaaaaaaatttaaaaaataaaaatattataatagaagacaaaaataaaatttggcataactaa

SEQ ID NO: 313966 - DNA, 665 bp, Unknown
  Bacterial polypeptide expressing nucleotide sequence isolated from the Sargasso Sea
aatgaataaaaatatctttacctacaaaaaaagtggcgtcaatattgatgcttcagataaatttgtaaatttcatatctaaaatttcagcaaaaaaaagaggcaaaaaaaagttcagtaatattggtggttttgggtccatctcaaatattccaaataatattaaggaaccaaaaattgtcgcttgtacagatggtgtaggtactaaaattgaaattgcaaatttaataaaaaaatatgacacaattggtattgatttagtagctatgagtgtaaatgatttaatagttcagggagctaaacccataatattcttagattacatttctattaataaaattgatttgaagaaacttaagtctattttaaaaggaattgttaagggatgcaaaatatctaattgtgaactggttgggggagagactgctgaaatgcctggaacttatgaaaaaggtaagttcgatattgcaggttttgcagtaggcattgttgctcaaaaaaatattttgaatataaataaaataaaaaaaaatgatttaatattagcaattccatcaagtggcattcactctaatgggtattccttaataagacatattttaaaaaaaaaaaaaattgatattaaaaaaaatactttcttaaaaaaagaacttataaaacctacta

SEQ ID NO: 313967 - DNA, 299 bp, Unknown
  Bacterial polypeptide expressing nucleotide sequence isolated from the Sargasso Sea
catggactacaagagtgctggtgttgacgtcgaggccgggcgcgcctttgttcaacggatcaaatcgtccgtcgaagcaacacaccgccaggaggtggtcggtggtctgggtggctttggcggcatgatgcgcctgccggctgacctgcgacagcccctgttggtttcagggactgatggtgttggcaccaaactcgaattagcgcaagaccatcaagcccaccacaacgttgggatcgacctggtggcgatgtgcgtgaacgacgtgatcacatccggcgcccagccgctgttttttc

SEQ ID NO: 313968 - DNA, 566 bp, Unknown
  Bacterial polypeptide expressing nucleotide sequence isolated from the Sargasso Sea
tttgatagccacggaggatatcataaaagaaaaacaaccattaccgaccctatcatataaggggtccggcgtcgatatcgagaccggcaaccaacttattgaattgataaaacctataacccgctctaccgcgagacctggagctgatggtaatattggaggttttggcggtatttttgatctaaaagctgcccattttcgcgaccctatactagtagctgcaaacgacggggtaggaaccaaattaaaactcgcaattgataccaataatcataatcaagttggtattgatttagtcgcaatgtgtgtgaatgacatagtagtccaaggtgctgagcctttattttttttagattactatgcaacgggaaaattatcattgagttccgcaaaggaagtaataaatggcatagccgaaggatgtctaactgcgggttgcgccttgataggaggcgaaacggctgaaatgccagggatgtataatggtaatgattatgacctagcagggtttgcagtaggggcagttgagcgtcaggatcttttaacaaatgccaacgctaaagaag

SEQ ID NO: 313969 - DNA, 796 bp, Unknown
  Bacterial polypeptide expressing nucleotide sequence isolated from the Sargasso Sea
aatgaaattaaaagatttaatacaataggtatagatcttgtagcaatgtgcgtaaatgatttgattgttcaaggtgcaaaaccttttttatttctggattatatttcaatagacaaaattaatttaaacaaaatgaaagaaattattaaaggtattgttaaaggatgtgaattatcaaattgtaacctagtgggaggagaaactgctgaaatgccaggaacatattctccaggtaaatttgatcttgcaggtttttctgttggtttggtagaaaaaaaaaaaattcttattaataaaataaaaaataatgatttaattttggccattccatcaaatggtatacattctaatggtttttcgcttgtaagaagagttttaaaagttaaaaaaattaaaataaataaaaataaatacctcaagaaagaattgataaaaccaactaaaatttatgtaaaagaaattatgaaattaatagacaaaaaccttatcaatggttgtgcaaatataactgggggtggaataggagataatattaaaagagtaattccaaataatttatgtgcgaatatagatttaaataaaattaaaactcaaaaaatttttagatggcttaaatattcaggagtatcaaatagtgaaatgctaaaaacatttaattgtggtgtcggtttctgtttaattataaataaaaaaaacttaaataaagttaaattgaatttcgatacgaattttaaaccttatgtaataggaaaaatttcgaaaaataaaaaaaaagtaaatttaagtggaaaaatta

SEQ ID NO: 313970 - DNA, 700 bp, Unknown
  Bacterial polypeptide expressing nucleotide sequence isolated from the Sargasso Sea
atgaaaaaatataaatttacatatcaaaaaagcggagtaaacataaatgcatctaatcaattcattaaatatatatctaaattaaccaaaaaaggaaattctaaaaataaatttaagaatataggtagttttggttcaataaatgaaattccaaaaaaatttagcaatcctctattagtaagtagtacagatggtgtcggaactaaacttgaaatagcaaatattttaaataagttcgatacaattggaatagatttggtcgcaatgtgcgtaaatgatattttggtgcttggtgcaaaaccacttttttttttagattacatttcaatcgataaaattaatttaaaaaaattaaaaaatattattaaagggatacatgaaggatgtaaaataagtgactgtcaattagtaggtggagagacagctgaaatgccagggacctactctgaaaataaatttgatttagctggattttctgtgggggttgtaaatagaaataacgttttaaagaaagaaaagataaaagaaggtaatttgattttagcagtaccttcgagtggactacattcaaatggatattccttattaagagaagttttaaaaaaaaaaagaatcaatattagaaaaaataaattcttgcggaatgaaatattaaaaccaactagaatttatgtgaaagaaaattatgaatttgcttgat

SEQ ID NO: 313971 - DNA, 510 bp, Unknown
  Bacterial polypeptide expressing nucleotide sequence isolated from the Sargasso Sea
aatgaaaaaaattaaaaatagttataaaaatagcggtgtagatatttctttggcaaataaattggtaaaacatatatctcaagtatcaaataaaaatgtcaaaaaaacgaaaaattcctttcaaaaagatgctatagggggatttggttctttatatgacataagtaaatataaaattaaagatccagtgattgtatcttgcactgatggggttggaactaaaattgaattagcaaataaatttaaaaagtacgatacgatcggtatagatttggttgctatgtgtgtaaatgacttaattgttcaaggagctaaaccattattttttttagattatattgctgttggtaaactagacttaactaaaacaaaaaaaatattaaaaggtatttttagtgggtgtgttcagtcaaattgtaaactcataggcggtgagacagctgaaatgccaggtgtatattccaaagataaatttgatttagcaggttttagtgttggtatagtttcaaa

SEQ ID NO: 313972 - DNA, 869 bp, Unknown
  Bacterial polypeptide expressing nucleotide sequence isolated from the Sargasso Sea
aacagatggagtgggaacaaaattaaaattagctcttaaaactaataacttatatggcataggtattgacctagttgcaatgtgtgtaaatgatataatcgctcagggtggtttaccacatttttttatggattatattgcaacaggaaaaatagaaacaaagcaattaactcaaataataaagggaattgttaaaggttgtcagttagctgattgtgctcttgtgggtggtgaaactgctgaaatgcccggccattattcagggggaagtttagatcttgctggattttgtattggtgcctctgaaagagaaaatgtatttaatattaataatgtcgttgaaaaaaatattgtaattgcagttgaaagtagtggtcttcactcaaatggttattccttaataagaagattaatgactaaaaaattaataaatttagaagacaaaacaccttttgatcagagtttaaagtttaaagaaattcttctcaaacctacttttatttacagtgctttatttaagaaaattaaatctaaaataaaaattaatggcattacacacattactggaggtggattaatagaaaatcctccaaggactttttctaaaaatttaaaaataataattgatttagaaactttccaaattagtgatatttataaatggataaaagaagaggcaaatttaaattggatagaattattaaaaacatttaattgtgggataggattgttaatttatttagataaaaacgatggtcaaaaaatgataaatttaataaatcaatttggttttaaagcttgggtcattggtgaaattaaaaaaaataaaaataaagaaaatgtagagtttttaggattaaaagattaaa

SEQ ID NO: 313973 - DNA, 793 bp, Unknown
  Bacterial polypeptide expressing nucleotide sequence isolated from the Sargasso Sea
catgagaaaagtatataatacgtataaaaaaagcggtgttaatatggcaaccgcagataaatttgtaaattacatatcgagaatatcaagaaaaacttaccataaaaatactgaattaaaatatttcaaaaatataggtagttttggatctatttttgatttgtctcaatcaaaaatgaaaaaacctatcattgtgtcttcaacggatggagttggtacaaaaattgaaatagctaataagtttaaaaaatataatacgataggcattgatttggtagctatgtccgttaatgatcttatagttcaaggagcaaagccaattttttttttagattacatagctacaaataaaattgagtctaataaatttaaaaaaattttagacggtattgtaaaaggttgtaaaaattcaggttgcgctttgttaggtggtgaaacagcagaaatgccaaaaacttatgaaaaaggaaaatttgatttagctggttttgctgttggattagttgaaaaaaaaaacttactaactaaaaataaaattaagaaaaatgatataatacttgctattccatcatccggcctacattcaaatggatattctctaattcatcacctactaaaaagaaaaaaaaattacaacataccaaacaaaataaaacaggagttaattagacctacaaaaatttatgtaaatgaattaaataaaattaatagtaaaaaattgattaatggatgcgcaaatataactggtggaggacttcttaataatttaattagagttataccaaaaaaatta

SEQ ID NO: 313974 - DNA, 343 bp, Unknown
  Bacterial polypeptide expressing nucleotide sequence isolated from the Sargasso Sea
atgaaaagcactgcctaccagcaggcaggtgtcagtctggatgctgctgatgaggtggtggacaaggtgaaacccttggctcaaaggactttcagacccggggtgattggaggactcggaggctttggagggttgtttcacctcgatccaaaaaaatggaaaaacccggttctcgtttcaggaaccgatggggtcggaaccaaactcaaactggcttttgaactggaaaagcacgacaccatcggaatcgatctggtggcaatgtgtgttaatgacattctggttcaaggtgcggaaccgctttattttctggattatctagcatgcggaaaactgcatccgg

SEQ ID NO: 313975 - DNA, 555 bp, Unknown
  Bacterial polypeptide expressing nucleotide sequence isolated from the Sargasso Sea
catggattacaaaacatcaggtgttgatatagaagctgggcgagaatttgtttccgagattaaacaggcagttgaagaaactcatacatctaatgtgattgagggtattggtgggttcggaggtttgtttagaattcctatagatagttttaaaaaaccagttcttgtttcaggtactgatggtgttggaacaaaattagaattagctcaaagtaaaaactttcactttgaggttggtattgatttagtcgctatgtgcatgaatgatatcattactagcggggcaaaacctttattttttcttgattatattgctactggtaaacttgataagaaacaattattgaaagttgttcagggtatttcatttggctgcggcgaaaataactgttcattactaggcggagaaactgctgaaatgcctggattttattcaaaaaataaatatgatcttgcaggattttgtgttggaatagttgatgaggataagcttattaatggtaaaaaagtctctgaaaatgatttaataattgctttaaaaagtaatggatttca

SEQ ID NO: 313976 - DNA, 798 bp, Unknown
  Bacterial polypeptide expressing nucleotide sequence isolated from the Sargasso Sea
gttgccaagcgcaccgcgcgtccggaagtcatgggtgggctgggtgctttcggcgccctgtgcgagatcccggcgggctacaagcaaccggtgctggtttccggtactgacggcgtcggcaccaagctgcgcctggcgctgaacctgaacaagcacgacagcatcggccaggacctggtcgccatgtgcgtcaacgacctggtggtgtgtggcgccgagccgctgttcttcctcgactactacgccaccggcaagcttaatgtcgatgtagcagccacagtagtcactggcattggcgccggctgcgaactggcgggctgctcgctggttggcggtgaaaccgctgaaatgccgggcatgtacgaaggtgaagactacgacctggccggcttctgcgtcggtgtggtggaaaaagccgaaatcatcgacggctcgaaagtcgccactggtgacgcgctgatcgccctgctgtcctccggcccgcactccaacggctactcgctgattcgcaagatcatcgaagtgtcgggcactgaaatcgaaaccacccaggtcgacggcaagccgctgaccgacctgctgatggcgccgacccgcatttacgtcaaaccgctgctcaaactgatcaaggacactggcgcagtcaaagccatggcccacatcacaggtggtggtctgctcgacaacatcccgcgcgtgctgccaaaaggcgcacaagccgtggtcgacgtggccagctggactcgcccagcggtcttcgactggctacaggaaaaaggcaatgggatgagcacgaga

SEQ ID NO: 313977 - DNA, 870 bp, Unknown
  Bacterial polypeptide expressing nucleotide sequence isolated from the Sargasso Sea
gatgaaaaaagtagactacaagtcagcaggtgtaaatatcgatgctgggaataaagcggttgatcttattaaggatggagttaaatccacttttacaaaaaatgtgctaaccggaataggtagctttggttccttgtatgatttaaaaccaattcttgataaatatcaaaatcctgtcatggtacaaagcatagatggggttgggaccaagacgatcattgcgagaaagctcaataagtttgataccgtaggtgtcgatctattgagcgcgtgcgcaaacgacatactggtaatgggagccaggcctttgacttttcttgattatattgcaaatgacaagttaaagccagacgtggtaaaagaaatagtctctggaatggttagggcgtgtaaagaaactggtgtatctcttgttggtggagaaaccgcagagatgccagacacatatcttcctggtgagcacgatttggttggagtcataaccggtgttgttgaaaaagaaaagatcattaccggagagcgcatagcaataggtgattccatagtcggccttccatcaagcggtctacatactaatggatactcattggccagaaaggttttttttgacatcggtggctatagtgtcaaagacaagatctcggaacttgaaagctcgattgggtcaactcttttagaaccacatataaactatacaaaccaccttttttccactttagacgcaggggttgacatacacggcattgcccatattacaggaggcgggattattgaaaacctccctaggatattgcctgatgggtgtgcagcatcgatacaaaaaggtacttggccagtcttagatgtgtttaatgcaatacaatctattgg

SEQ ID NO: 313978 - DNA, 856 bp, Unknown
  Bacterial polypeptide expressing nucleotide sequence isolated from the Sargasso Sea
ctttatgatcttaaatctattcttaatggttacaagaatcctgtcatggtgcaaagtattgacggtgtaggtactaagatcatcattgccagaaagctaggcaaattcgatacaattggcattgatctgttaagcgcctgcgccaatgatattttagtcatgggtgcccgaccactcacttttttggattatattgcaaacgacaaactaaatccgacaattattgaagagattgtatctggaatggtgaaagcctgtcaggatacaggtgtttctttggtgggtggagaaacagcagaaatgcctgacacatatctgcctggcgagcacgatttagtaggcgttattactggagttgttgaaaaagataacattattaacggcaaaaaaattgtgcctggtcattcggtcttggggttgccttctaatggattacacaccaatggatattcctttgcccgaaaactcttttttgaaattggcggatatgatgtgaatgaccccattcctggattggataagtctgttgggttgactttgcttgagccccatattaattatacaaagcatgtatttgcaacgcttgatgccggagttgatatcaaaggggttgcccacatcaccggcggcggattggtagaaaatatgccacgcattttaccggatggctgcggagtagaaattcaaaaaagatcttggccaatcctaccggtttttgatgtgatgcaaaccatcggtaatgtaaatgaagatgaaatgtttcgtacttttaatatgggtattggaatggtctttattgtggatgcaaacgatgtgaaattagtgaaagatgcgctgaaagaattaactcatattt

SEQ ID NO: 313979 - DNA, 700 bp, Unknown
  Bacterial polypeptide expressing nucleotide sequence isolated from the Sargasso Sea
atgtcaaaaaaaccaaataaattaattaatcactcaattacgtacatagattcaggtgtaaatatagatgagggaaataaacttatttctgaaatttctcatattacaaaatctacttcaatagaaggggcgacaggtgaattaggtggatttggtggattgtttgatttaaaaaaaactggtttaaaagatcctattcttgtttctagtactgatggtgttggtacaaaactaaaattagcaattcaaactaaatcatatttcaatattggaattgatttggtagcaatgtgcgcaaatgacgtattagctcaaggagcaaagccacttttttttatggattattatgctacaggaaaattaaataaagatgtagcaattgaagttattagaggaatagcagaaggatgcaaacagtcggggtgtgctcttattggtggtgagactgctgaaatgccgggacattatgaaaatgataattttgacttagccggcttttgtgttggtgctgtagaaagaaaaaatctttttaaaaaatgttctgttaaaagtggtgattatgttattggcttgtctagtagtggaattcattcaaatggttactcattagtaagaaaagtgttagagacccattcaattaatatttttcaaaaagctccatttgataatacaaaaatacttgctgaaatattgatggagc

SEQ ID NO: 313980 - DNA, 673 bp, Unknown
  Bacterial polypeptide expressing nucleotide sequence isolated from the Sargasso Sea
atgaataaaagaacttttacatacaaaaaaagtggtgttgacataaattcatctgacaaatttgtaaaatatatatcaaacatttcatcaaaaaaaaaaggcaaaaaaaagtttaataatattggtggatttggttcaattacaaatttaccaaacaatttgataaatccaaaaatagtagcttgtactgatggtgttggaactaaaatcgaaattgcgaatactttaaataaatttgacacaattggaattgatttagtggcaatgagtgtgaacgatttaattgtacagggtgcaaaacctctaatttttttagattatatttcaataaacaaaattgatcttaataaactaaaattaattattaaaggtattttaaaaggctgtaaacaatctgggtgtgaattagttggtggagaaactgcggagatgcctggaacttatgaaaaaggtaaatttgatattgcgggttttgctgtaggttcggtagataaaaataaaattcttagtaagaataagattaaaaaaaatgatttaattatatctattccctctagtggacttcattcaaatggttattcattagttcgatatttattaaataaaaaaaagattaatttaaaaaaaaataaatttttaaaacgagaattactgaaacctactaaaatttatg

SEQ ID NO: 313981 - DNA, 850 bp, Unknown
  Bacterial polypeptide expressing nucleotide sequence isolated from the Sargasso Sea
aaaaagtggtgtgaacattaatgctgctgatagatttgttaaatttatatccaatatttcaacaagaaataaaggcaataaaaagtttaaaaatattggtggttttggctctatttcaaacattcctaaaaatattagacaaccaaaaattgtggctagtactgatggagttggcacaaaaatagagatagctaatatgctaggaaaatataacacaatcggtattgatcttgtggctatgtgtgtaaacgatttaatagttcagggagcaaaacctatattatttctagattatatttctataaacaaaatagatttaaaaaaactaaaatcaattatcaaaggtatagttaaaggatgtaaaatttctgattgtgaattagttggtggcgaaactgctgaaatgccaggaacttacgaaaaaggaaaatttgatatagcagggttttcagtaggtgttgttgaagaaaaaaaaatcatacataaaaaaaaaattaaaaatggtaatttaattatagctattccttcatcaggcattcattcaaatggttattctttagtaagatatattttaaaaaaaaaaaaaattaatttaaaaaaaaataaatttataaaaaatgaattattaaaaccgaccaaaatttatgtaaaagaaatattaaatttaattaataaaaatttcataaatggttgtgctaatattactggtggtggacttaaagaaaatataaaaagagttattccagaaggcttagttgcaaatattgatttgagtaaaattaaagtccaaaaaatttttaagtggttaaaacaaaacaacatagaagaccaagaaatgttaagaacattt

SEQ ID NO: 313982 - DNA, 598 bp, Unknown
  Bacterial polypeptide expressing nucleotide sequence isolated from the Sargasso Sea
gatggattacaaaactgcgggagttgatgttactgctggaagagcctttgtggatagaattaaatcatgcgttgaaaaaactcataaaagtgaggtcatcggtgggttaggagggtttggaggatgtataagaattccaaaaggctatgaaagtcctgtcttggtatctgggacggatggtgttggtacaaaattagaattagcgcagcaatatggttgtcattttggagttggaatagatttggttgcaatgtgcgttaatgatgtaataactagtggggctcgacctttattttttcttgattacatagcaagcggaaacttgactcctgatgctttggctgaagtgatagagggaattgcagcgggctgtggtcaatcggattgttctctcttgggaggtgaaactgccgaaatgccaggtttttatcccagtggaagatatgatctagcaggcttttgtgttgggattgttgaaaatcatcaattaatagacggtacgaaaattaatgatgaagatcagattattgggataaaaagtaatggcgttcatagcaatggttttagtcttgttcgaaaagtactttccatggcaaat

SEQ ID NO: 313983 - DNA, 733 bp, Unknown
  Bacterial polypeptide expressing nucleotide sequence isolated from the Sargasso Sea
accacttttttttttagattatatatcaattaataaaattaattttacaaaattaaaatctataattaaaggaatagtcaaaggttgtttaatttcgaattgtaacttagtcggtggtgaaactgctgaaatgccaggaacttatgaaaaagataaatttgatatagctggttttgcagttggaattgttggaaaaaaaaatattttaaacaaaaaaaagataaaaaagaataatttaattttagctataccatctagtggcttacattctaacggttactctttagtaagatatttaattaaaaaaaaaaaaattaatctaaaaaaaaatatttttttaaaaaaacagctgttagaacctactaaaatttatgtcaaagaagtactaaaattaattgataaaaatttattgaatggttgtgcaaatataactggtggcggattagcggataatataaaaagaattattcccaaaaatctttgtgcagaaataaatttaaaacaaattagaacattggaaatatttagatggcttaaaaatgaaggtattagtgataaagaaatgttaaaaacttttaattgtggagttggtttttgtttaataataaattccaaaaatttaaaaaaaataaataagtatttttctaaaggtttcaaaccatacataattggtaaaattattagtggagaaaataaagtaaaattagatggtaaaattaattggtttagataa

SEQ ID NO: 313984 - DNA, 767 bp, Unknown
  Bacterial polypeptide expressing nucleotide sequence isolated from the Sargasso Sea
aatgaatagtaagcaaaaagctaaaataagttacaaagactctggagtcaatatagatagagcagagaaacttatagcttctctgaaaataccaaactcaaaaagagataagaacgttctgtcaacaatagggggtttctcaagcctatataaagtcagcaatgatattaaagatccagtaattgtatctggcacagatggtgttggaacaaaacttaggattgcaaaaaaacttaaaaatcataaatatataggccaagaccttgttgcgatgtgtgtaaatgacgtgatcacaagtggcgccaaacctatattcttcctggattatttagcgacgagtaaaatcaaacaagccgttcatgcagatgtcctcaaaagtattcaaaatgcctgcttcaaaagtggcatgagtctaataggaggtgaaacagcagagatgcctggtatgtataaggctgatgattatgatttagcagggttttgcgtgggtatagtatcacaaaaaaaaataatatgtcctagcagagtaaaaaatggaaacattattctaggaatttcctcaaacggctttcattcgaatggttattctctaattaataaactaattgagagaaaaagattaaatcttcaaactaagattggaacaacttcaattggtcaaatattaataaaaccaacaaagttatatacagatattgttgcgatgcttctgaaaaaagtaaaagttcatggattggctcatattactggtggaggattacagataa

SEQ ID NO: 313985 - DNA, 877 bp, Unknown
  Bacterial polypeptide expressing nucleotide sequence isolated from the Sargasso Sea
taactataaatatccacatctagttgcaagtacagatggagttggaacaaatttagaaattgcaaatcagcttaaaaaatttgatacaattggaattgatcttgtagcaatgtgcgtaaatgatttaattgttcaaggggcaaagccatttatatttttagattacatttcaatagataagatcaatttatataagttaaaaaatataattaaaggaattgctaaaggatgtaaaatttctgaatgtactttggtaggtggtgaaacagcagagatgcctggtacttatacaaaaaataaatttgatatagcaggttttgctgttggcttggttgataaaaagcaaatattaacaaataagaaaattaaaaataacaatttaattttgggtataccagcaagtggaatacattccaatgggtactctttagttagaaatataattaaaaaaaataaaattaatataaacaaaaacaaatttttaaaaaaaaatcttattgagccgactaaaatttatactaaagaatttcttaaagcccataataaaaatctgattaatggttgcgcaaatataactggtggtggattatgtgaaaatatcaaaagagtgatcccaaataatttgactgctattattaatctaagtaaaattaatacacttgatatttttaaatggataaaaaaaaaaggtgtttctgataaagaaatgttaaaaacttttaattgtggtgttggattttgtttaatagtagataaaaaaaaagttgaatctataaaaaaaaatttttcaaaaagatataaaccatatgtaattggaaaaattgtaaaagggaaaaaaagagttaaacttaatggaaaaattaattgggaaaaataa

SEQ ID NO: 313986 - DNA, 754 bp, Unknown
  Bacterial polypeptide expressing nucleotide sequence isolated from the Sargasso Sea
cagggggcggagccgctcttcttcctcgactacctcgggctgtcgtcgatggacacccaccgaacggtggagatcatcaagagcatcgccaagggttgtgagatcgccggttgctcgctgatcgggggcgagtgcgccgagatgcccgacatctatcgcgaaggcgacttcgacgttgccgggtttgcggttggagtggttgaactgaagcgggcgaccgatcccactcgaatggcgaagggggatgtgatcctcggcctcgcttccagcggtgtgcactccaacggctacacgctggttcgaaagatcatcgagtcccgcaagctcgacctcaacggggtgtacaccgagcttgacgacgaacgcacactcggcgaggcgctgcttgaacccacccgcatctacgcccgttcgattacccagttgctgtccgggtacacggtgaagaaggtggtgaccggcatggcccacatcaccggcggcggactgccgggcaacctcaaccgcgctctgccggaagatctcgatgcgaagatcgacctcggggcctgggaagtcccgccgatcttccgcttcctccaatcgcgaggcggtgtggatgaagaggagatgtaccgcgtcttcaacatgggcatcggctattgcctggtggtgcggccgacctttgccaaggcggtcgagcgcaaactgaccaggcttggtgagacggtgtaccggctaggcaccatcgtgaagggcaagggccgggtgcgga

SEQ ID NO: 313987 - DNA, 743 bp, Unknown
  Bacterial polypeptide expressing nucleotide sequence isolated from the Sargasso Sea
tgcaaagccgctaacattcctggattatatagcaaatgacaaacttaagcctaaaattgttgctgaaattgtaggaggtatggctcatgcatgtagagatacaggcgtttcactagttgggggtgaaacagcagaaatgccagatacatacctacctggggagcatgacctagtcggcataataaccggcattgttgataaagaaaaaataattacaggtaaaaatattttaccaggggatatacttgttggcctaccttcaaatgggctgcatacaaatgggtactcattagcccggaaaatattctttgaaagtgaaaaatataatgtcgatacatatatagattcattaaaaagtacagttggagaggcattactcaagccgcacattaattacacaaaccatgtttttaaagtattagaaaaaaatatagagataaagggcgtcgcgcatattacaggtgggggactaactgaaaatattccccgtattttaccagataattgttccgttaaaatcaaaaaagacacttggccaaaactaggattgtttagtgttttacaaaacttagggaacgtagatgaggacgaaatgtaccgcgcctttaacatgggcattggtatggttttcattgtagacaaaaattctattaaaaatattagagacactctcgaaaacataacgcaggtctatgaaattggcgaagtaatagaaggaaaaaatgttgttttttatgattaaa

SEQ ID NO: 313988 - DNA, 781 bp, Unknown
  Bacterial polypeptide expressing nucleotide sequence isolated from the Sargasso Sea
aggaattgatttagttgctatgagtgtaaacgatattttggttcaaggggcaaaaccattaatttttcttgactatatatctataaataaaattaaccataaaaaattaaaagaaattgttaagggaataaattatggatgtaaaataagcaactgtaaattagttggtggagagactgccgaaatgccaggaacatattctaagggtaaatttgatattgcaggattttgtgtaggattagtcgaaaaaaaaaatattcttaaaaatcaaaatataaaacaaaatgacgttgtattagcaataccatcttcaggtttgcattcaaatggattttcattggtaagatatgttttaaaaaaaaataaaataaattataaaaaaaataaaaaaattaaaaaatggttattagaaccaactaaaatatatgtaaatgaaataagtaaattaattgataaaaaattaataaatggatgtgcacatataactgggggaggtattaaagataatttatcaagaattattcctaaaggaaaatgtgcaaaaataaatttaaataaaataaaaacaaacagtgttttttcatggttaaagaaaaataaaattcgtgaaagtgaaatgttaaaaacatttaattgcggtgtcggatttataataatcattaatagaaaaaatttgaataaaataaaaaaacatttcaaaagtaaatatgctccatacattattggaaatataataaatggtaaatctaaagtattactaaatggtaaaattaactggtag

SEQ ID NO: 313989 - DNA, 757 bp, Unknown
  Bacterial polypeptide expressing nucleotide sequence isolated from the Sargasso Sea
catggattacaaaacttcaggtgttgatatagaagctgggcgagattttgtttccgaaattaaacaggcagttgaaggaacgcatacatctaatgtgattgagggtattggtggtttcggggggttatttagaattcctatagatagttttaaaaaaccagtcctagtttcgggaactgatggtgttggaacaaaattagaattagctcaaagtaaaaactttcactttgaggttggtattgatttggttgctatgtgcatgaatgatattattactagcggtgcaaaacctttattttttctggactatattgctactggcaagcttgataagaaacaattgttgcaggttgttcagggaatttcatatagctgtggagaaaataattgttcattactaggcggagaaactgctgaaatgccaggattttattcaaagaataaatatgatttggcaggattttgtgttggtatagttgatgaggataagcttattagtggcaaaagagtatctgaaaatgatttaataattgctttaaaaagtaatggagttcatagtaacggatttagcttagtaagaaaaataattcaaaacaataatcaaatagataaagagtttgaaaaagtttcccacttaaatttttatgatgaattattgaaacctacaaaaatctacaataatgtaattaacaaaatattatctgagaatatagatattaaggcaatgtcccatattactggtggaggaattccagag

SEQ ID NO: 313990 - DNA, 664 bp, Unknown
  Bacterial polypeptide expressing nucleotide sequence isolated from the Sargasso Sea
atgaataaaaaaatatttacctataaaaaaagtggagttaatattactactgctgatagttttgttaatttcatttcatcaatctcatcaaaaaaaaaaggcaaaaaaaagttttcaaatattggtggttttggttcgatatcagatatacctagaaatataaagcaaccaaaaattgttgcttgtactgatggtgtgggcaccaaaattgaagttgcaaatattctgaatagatatgataaaattggaattgatttagttgcaatgagtgtaaacgatttaattgttcaaggtgcaagacctcttgtttttttagactatatatctattaacaaaattgatttaatcaaacttaaatctattattaaaggaatcgtaaaaggatgtaagttatctggatgtgagttggttggtggtgaaactgctgaaatgccaggtacttacgaaaaaggtaaattagatattgcaggttttgcagtcggagtagttggcaaaaataagattttagataaaaataaaattaaagaaaatgatttagtattagctattccatcaaatggacttcattcaaatggttactctttagtaagatacgttattaatcaaaaaaaaattaatattaaaaaaaataaatttttaaaaactgagttactaaagccaacaa

SEQ ID NO: 313991 - DNA, 760 bp, Unknown
  Bacterial polypeptide expressing nucleotide sequence isolated from the Sargasso Sea
tattttagctgctgagctagatcaatataagggaattgggcaagatttagttgcaatgtgttcaaatgatattttatgcaacaaggcaaaaccattattttttctggactattttgcatgcaactccgttaaatcgaagcaatatactgaaattttgaaaagtattacaattgcttgtaagaaaattaattgttcacttgttgggggtgaaacagctgaaatgccatctttatataaaggaaatcattttgatttagcaggtttcttgataggcataaaagaaaaacacaagttactaaaaatttcaaaaggtgatcttattattggtgttaaatcaaatggcttccactctaatggatattcactcataagaaaaattattaaacaaaacaaaataaatttaaaaagagctatattcaacaaacaaaaattatctgatcttattatgagaccaacacggctatatcatcaattaattagttataatgatttgaaatatataaaaacactctctcacattacaggaggaggtattctttcaaattttaaaagaagtattccaaaagcaacaaaatttgattttaatatcaataagttgcctaaagagtatgattttataaaagataatattaatatctccgatattgaattaatggaaatatttaattgcggaataggtatgatttttataattaataaaaaatattataataaatttattaaaaggaatttctttaaactaattggtgaaattaaataa

SEQ ID NO: 313992 - DNA, 628 bp, Unknown
  Bacterial polypeptide expressing nucleotide sequence isolated from the Sargasso Sea
atcggcggcgaaaccgctgaaatgccgagcatgtacccggacggcgaatacgacctggccggctttgccgtcggcgccgtcgaaaagcgcaagatcatcgacggcacgaccattgccgagggcgacgtggtgctgggcctggcttcgtcgggtgcgcattcgaacggctactcgctggtgcgcaagatcatcgaggtgtcgcgcccggacttgaacgccgatttccacggccagcgcctgcaggacgccatcatggcgccgacgcgcatctacgtgaagccgctgctgtcgctgatcgacaagctgaccgtcaagggcatggcgcacattaccggcggcggtttgaccgaaaacgtgccgcgcgtgctgcaggacaacctgaccgccgtgctgcacaaggacgcgtggacgctgccgccgctgttccagtggctgcagaaggccggcaacgtggccgatgacgaaatgcaccgtgtgttcaactgcggtatcggcatggtcgtgatcgtgtcgccagccgacgcaccggccgccatcgcacacctgaaggacgcgggcgaaacggtctaccagatcggcgagatccgcgcacgccaagccggcgaagcgcagacgatcgtggtctgac

SEQ ID NO: 313993 - DNA, 855 bp, Unknown
  Bacterial polypeptide expressing nucleotide sequence isolated from the Sargasso Sea
aatgaataaaactgtctttacctataaaaaaagtggcgtcaatattgatgctgcagataagtttgtaaagttcatatctaaattatcatcaaaaaaacaaggcaaaaaaaagttgcaaaatattggtggatttgggtctatttcagatattcctaaaaatatcaaaagaccaaaaattgttgcttgtactgatggagttggaactaaaattgaaattgcaaacttaatcaaaaaatatgacacaattggcatagatttggtagcaatgagtgtaaatgatttaatcgttcaaggagcaaagcctattatatttttagactacatttctattaacaaaatagatttaaaaaaacttaattcaattctgaaaggaattattaaaggatgtaaaatagcaaattgtgaactagttggtggtgaaacagccgaaatgccaggaacctatgaaaaagggaaatttgatatagctgggtttgcagtaggagtagtcgatcaaaacaaaattttaactaaaaaaaaaattaaaaaaaatgatttaattttagcaataccttcgagtggaatacattcgaatggatattctttaattagacatcttttgaaaataaaaaaaataaatgtaaataaaaataattttttaaaaaaagagcttattaaacctactaaaatttatgtaaaagaagtgttaaatttaattgaccgtaatttattaaaaagttgtgcaaatattactggtggaggattagctgacaatattagccgtattattcctaataaattatgtgcagaaattgatttagataaagttaaaactttaaaaatttttaaatggttaaagcaaaaaaatatttctga

SEQ ID NO: 313994 - DNA, 760 bp, Unknown
  Bacterial polypeptide expressing nucleotide sequence isolated from the Sargasso Sea
atgattaaaaataacttaacatatgaaaaaagtggagttaacattaaagctgcaaataaatttgtcaaattcatatcaataatatctaaaaaaactaaacaaaacagtaattttaataacattggaagttttggatcaattaccaaaatttcaaataaattgaaaaacccatacatagttgctagttcagatggggttggtactaaaattgaaattgctaaccttttaaataaatttgacacaataggtattgaccttgtagccatgaatgttaacgacattatagttcagggcgcaaaaccaatattatttttagattatatttcaattaataaaattgatcttaaaaaattaaaatcaatcatcaaaggtattgtaaagggttgtaaaattgcaggatgtgaattggttggaggtgagactgcagaaatgcctggaacatatactcatggaaaatttgatgtagctggtttttctattggattagtaaataaaaaaaaaatttttaaaacaaataatataaaaaaaaacgatttgattgtagcattaccatcatctggattacattcaaatggttattctttggtaagaaaaattttaaagataaaaaaaattaatattaataaaaataaaattttaaaaaaagaacttttaagacctacaaaaatatatgtaaatgaagttataaatttaaataataaaaatttgattaaaagttgcgcgcacataacaggtggaggattagaagaaaatataaaag

SEQ ID NO: 313995 - DNA, 766 bp, Unknown
  Bacterial polypeptide expressing nucleotide sequence isolated from the Sargasso Sea
ggaattggtgggtttgcaagtctgtttgctataaataataaaagatataaaaatcctgttattgtatgcggaacagatggtgtgggaacaaaacttaggttagctacccttttaaatcaacatagttctattggacaagatctattagcaatgtgtgttaatgatgtgattaccacgggtgcagatcctgttttattcttagattatctagcaactggttctataaatctgagaatacacaaaaaagtcttaaaagggattaaaacggcatgtgacaaacataatattgctctgataggtggtgagacagctgaaatgcctggaatgtataataaaaatgattatgatcttgctggattttgtgttggtcttgttgataaaggaaatatacttgataaaaaaaatgtaaaaaaagataatatacttgttggaataaactcaagtggtattcattcaaatggattctctctgataaataatcttattgataagaagtttttatctttaaataaaaagatttataatatcgatataaaaaaagctcttatcaaacctactcttatttactctgatattataaagaaaatttcaatgagcgttaaactaagatctatatcgcacataacaggcggaggaataacagaaaatctaccacgagtgatccctgataatttgagcgcaaaagtaattagaaatagctgggtaatgcctaaaatatttaaaattatacaagaaaaatcaaaacttactgatgatgacatgttga

SEQ ID NO: 313996 - DNA, 717 bp, Unknown
  Bacterial polypeptide expressing nucleotide sequence isolated from the Sargasso Sea
attatttcgcaacctcaaaacttgataactcacaagcaaagagaatcataaaaggaattgcagatggttgcttgcaatctgaaatggctctcataggtggagaaactgcagaaatgccaggcgtatatcagtctggtgaatttgatcttgctggattctctgtgggtattgttgactacaaaaaaatcattgatggatcaaaaatatcagaaggtgattcaatcattggtctcgcttcgtctgggcctcattccaatggatactccttgataagaaaattgattgaagataactcagtggatttagatgaaatgatcaatggtgagaagattggtgcacaaatcattaagcccacaattatatatagtcgttcagtactgagttgtattgaaaaatatgaagtgagctcaatggctcacatcactggcggaggatttcaagagaatattattcgagccatacctgagggctgccaggcaatcatcgataaaaattcatggagctttcctcctgtctttcagtggattcaaaatcaggctggcatcgattccaatgaaatgctgagaacttttaattgtggcataggttatgttctgatcgttaaagcggatattaaaaattctgtgatcaagcatttccaaaatgaagacttagaagcttatgagatcggttctataacaagtggtgagaaatctgtcatcatcaatcatggctgat

SEQ ID NO: 313997 - DNA, 699 bp, Unknown
  Bacterial polypeptide expressing nucleotide sequence isolated from the Sargasso Sea
ctataaatttgaaaatacataaaacagtcttgaaggggattaaatcagcatgtgacaaacataatattattctgataggaggcgagacagctgaaatgccaggaatgtatagcaaaaatgattatgatcttgctggattttgtgttggccttgttgataaaaagaatatacttgataaaaaaaatgtaaaaaaagataatctgcttgttggaataaattcaagcggtattcattcaaatggattctctctgataaataatctcattaataagaagtttttatccttaaataaaaagattaataatattgatataaaaaaagctcttatcaaacctaccctaatttattctgatatcataaagaaaatttcgatggttgttagactaagatctatgtcgcacataacaggcggaggaataacagaaaatctacctcgggtgattcctgataatttaactgcaaaagtaattagaaatagctgggtgatgcctaaaatatttaagattatacaagaaaaatcaagacttactgatgatgacatgttgaaaacttttaattgcggtctcgggatgataataataattgataagaaagatgagctgaaggtacacaacataataaaaaagaatggctttagaagctacacaattggaaaaattattaaaagaatgaaaaatcaaagtatctgttatgactaaa

SEQ ID NO: 313998 - DNA, 886 bp, Unknown
  Bacterial polypeptide expressing nucleotide sequence isolated from the Sargasso Sea
taatgtgcttgaaaatattggtggctttgctgggatgtataaactcaataaagaatataaagatccaattttagttgcttgcactgatggtgttggaacaaaagtatcattagcgcaagatttcaatgacttaagcaatattggccaagatcttgttgctatgtgcgtgaatgacttgattgtttgtggcgcaaaacctttattcttcttagattattatgcttcttcaaagttaaatattcaggaagcatctgttgtcattagcagtattgctaatgcttgcaatgatgctggttgcgcattgctgggaggcgagacagctgaaatgcctgggcattacattgataataattttgacctagctggttttgccgttggttgtgttgatgaaaaaaaaataataaataatgagaatactaaatcgggagatgttttaattggcatagagtcaagtggaccacactcaaatggtttttccctgatacggaaaataattaacaattcaaaagctaaagaacaagaaataaatgctattaaggaaaaagtcttgaagccaacaactctatatcctaaattgataatgaatttaattaataattttaaaattaactctatctcgcatataactggtggtggtttaacagaaaatttaccaaggtccatttcaaaaaatttatctgttgagattaaaactgattcatgggatatgccaaaagtatttaaatggttaaaagaagaaggtgatatatcaaatagagatatgttcagaatatttaactgcggcattggtatggttcttatagttgataaaaatgatgtaaaagatatatcgaataagatatctgaaatgaattttaaaaattatgtgataggaactggaaagaaa

SEQ ID NO: 313999 - DNA, 829 bp, Unknown
  Bacterial polypeptide expressing nucleotide sequence isolated from the Sargasso Sea
gaatgatcataaaacaattggtatagatttagtggctatgtgcgtgaatgacttgattgttgataaagcaactccattattttttttagactacatctcaactggaaaattaaatatatccaaaggtgttgatataataaaagggattataaagggatgtaaaatttcacattgcgctttacttggtggtgagacagccgagcatccaggatatgatattaatgaaaaatatgatttagctggtttttgtgttggagtaaaaagtggtatttcgaagaaagttttacaattaaaaaaaagtgatcttatcatcggaattgagtcatctggtatccattccaatggattttcactgatacgtaaaattataaaagataataatattagtctaaaaaagaaaattatcaaaaatagtacattagggaaaatattattaaagcctacgtatatttacgcagatgtaattcttgatctttttagcaaaaatcttattaagacttgttcacacattactggtggcggtgtaaccgaaaacctgcccaggtcaatcagtaaaaataccaaggccgtaatagatttgaataaatggaaacttccagcaatatttaaatggattagtagttttaatgtatctcaaaatgagatgttgagaacatttaattgtggctatggaatgataatcgtaattgatgaaaaaaatttaagtagagttataaaaattataaagaaatataaattcaaatctgatataattggtaacattgaaataaaaaaatctgctaaagaaaaaagtatagaatttataggaagatttgatttccatgaataa

SEQ ID NO: 314000 - DNA, 730 bp, Unknown
  Bacterial polypeptide expressing nucleotide sequence isolated from the Sargasso Sea
aatgaaaaaaaaaattacttatgcaaaatcaggtgtaaatattgatgagggaaatatttttgttaaaaaaattcaaccctttgtaaaacgaactttatcaaaaaacactataggaaatacaacatcatttgcagctttatattctttagatcttaaaaacataaaaaacccagttttagtttcttgtactgatggtgttggaacaaaagttcagctaggagttgaaactaacaaaatagagggcttgggaattgatcttgttgcgatgtgtataaacgaccttatttgtactggtgcaaaacctttattttttttagattaccttgcaacttcaaaattgaattctgattatcactcaaaagtaattaaggcaattgctaaaggctgtatagattcaaattgttccctagttggaggagaaactgctgaaatgcccgggatgtacaagccaagcgagtttgatttagcaggattttccgttggtgtggttgacagaaaaaaaataatctctcctgaaaaagttagagcaggtgatattttgataggaattccatcatctggccctcattccaatggctattcactgattagaaaactttatagtggtaaaaataaacccaaaattaaaggaaagtttttaaatgctgtcatgaagcctacaagactatatgcaaacttaattcacaagttattgttgcaacaaggatccataactggaattgcaaacatc

SEQ ID NO: 314001 - DNA, 847 bp, Unknown
  Bacterial polypeptide expressing nucleotide sequence isolated from the Sargasso Sea
actgatggtgttggaacaaaattagaattagcccaaaataaaaaatttcattttgaggttggtatcgatttggttgctatgtgtattaatgatattattactagcggtgcaaaacctttgttttttcttgattatattgctactggtaagcttgataagaaacaattattacaggttgttcaaggaatttcatatggctgtaaagaaaataattgttcattgctcggtggagaaactgctgaaatgccaggattttactcaaagaataaatatgatttggcaggattttgtgtgggaatagttgacgaggataagcttattaatggtaaaaaagtatctgaaaatgacttaataattgctttaaaaagtaatggagttcatagtaacggatttagtttagtaagaaaaataattcaaactaatcaccaaatagataaagaatttgaaaaagtttcacacttgaatttttatgatgagttattaaaacctacaaaaatctacaataatgttattgataaaatattatctgagaatatagaaatcaaggcaatgtctcatattactgggggaggaatcccagaaaatttaccaagatgtataccttctgattttattccctatatcaatactaattcttgggatatacctattttatttaaatttttaaaagaaaaaggtaagattcctgaaaaagacttttggaatacttttaatcttggtgttggattttgtttaattattgataaacaatttaaagattcaatattaaacatatgtaaagattatgacattgatagttgggagattggaaagatagttcgaaaaaacgattcaacaattagtaaat

SEQ ID NO: 314002 - DNA, 754 bp, Unknown
  Bacterial polypeptide expressing nucleotide sequence isolated from the Sargasso Sea
atgaataatactaaatttacatatcaaaaaagtggcgtaaatataacaacggcagataaatttgtagattatatttctaataaaactaggcaaaaaaaaaataaatctaaatttaaaaatattggtggttttgggtcaattactgatattccaaaaatttataaaagaccaaaacttgtagcaagtactgatggagttggtaccaaaatagaaatttctaatgaactaaaaaaatttgataccataggtatagatttagttgctatgtgtgtaaacgacttaattgttcaaggagcaaagccactaatttttttagattacatttcaattaacaaattagaattaaaaaaaattaagtctgtaatgaaaggaattattaaaggttgtgaaatttccggaagtagcttagttggtggagaaactgcagaaatgccgggaacttatgaaaaaggtaaatttgatattgctggtttttcagtaggtgtagttgatgaaaataaaattttaactaaaaataaaattaaaaaaaataatataattttagctataccttcaagtggcattcattcgaatggattttctttaataagatacattttaaaaaaaaaaaaaataaatttaaaaaaaaataattttctaaaatctgaacttttaaaacctacaaaaatttatgttagtgagattttgaaattagttaaaaaaaattttattaatggatgtgcaaatataactggtggcggtatcccaagataat

SEQ ID NO: 314003 - DNA, 651 bp, Unknown
  Bacterial polypeptide expressing nucleotide sequence isolated from the Sargasso Sea
tatggcatcaaataaattaacatacagtaagagcggagttaatattccaaaagcagatagttttgttaagttcataagttcacttgcaagaaaatcaagcaaaagtggtgattttaagaatataggaggctttggagcaatctctccaatacctagacaactaaaagacccttgcattgttactagcactgatggagttggtacaaaaattgagattgcaaatgatctaaataaatttgatacaattggaatagatcttgttgcgatgtgtgttaatgatttgatcgttcaaggagcgaagccttatttgttcttagactacatttctattagcaaaattaatttgaaaaaattaaaacatttagttagaggaattgttaaaggatgtgatatcgcttgttgcaaattagttggtggcgaaaccgctgaaatgccaggaacgtatactaaagggaaatttgacatagcaggttttgctattggtcttgttgaaaagaaaaaaatacttaataaaaaaattagaaataatgatttaattttagctgtaccttcaaacggacttcactctaacggttattccttagtgagatatctcttaaaaaagaagaaaataaatttaaaaacaagcaaatttctcaaagacgaattaat

SEQ ID NO: 314004 - DNA, 498 bp, Unknown
  Bacterial polypeptide expressing nucleotide sequence isolated from the Sargasso Sea
tatgaaaaaatataaatttacatatcaaaaaagtggagtaaacataaatgcatctaatcaattcgttaaatatatatctaaattaaccaaaaaaggaaattctaaaaataaatttaagaatataggtagttttggttcaataaacgaaattccaaaaaagtttaacaatcctctattggtaagtagcactgatggtgttggaacaaaacttgaaataacaaatattttaaacaagtttaatactattggaatagatttagtagcaatgtgtgtaaatgatattttggtgcttggggcaaaaccacttttttttttagattatatttcaactgataaaataaatttaacaaaattaaaaagtatcattaaaggaatacatgaaggttgcaaaataagtaattgtcaattagtaggtggagaaacagcggaaatgccggggacctactctaaaaataaatttgatttagctggattttctgtgggacttgtaaacaagaa

SEQ ID NO: 314005 - DNA, 877 bp, Unknown
  Bacterial polypeptide expressing nucleotide sequence isolated from the Sargasso Sea
atgaataaaaaaagtaaaataaactattccttcgctggagtagatatagacgcaggaaacagagcagttgaaataatcaaggatgaggttaagtcaacttttagctcaaatgtattaacaggaattgggaattttggttctttgtttgaaataggggatttgttaaaaacctacagaaagcctgtcctggtacaaagcattgacggggttggaacaaaagcaatcatagcgcgaaaaatgaataggtataacaccatcggacttgatcttttaagcgctgcagcaaatgacataattgttatgggagcccgacctttaacgtttcttgattacatagcaaatgataaactagagccggaaattattaaggaaatcattgttggtatagcacaaggctgcagagatacaggcgtatcattagttggaggagaaacagcagaaatgcctaacacataccttccaaatgaacatgatttagttggtgttattacaggtgttgtagagaaagatgaaattattacaggagagtctgttaaaattaatgatgttgtactaggtcttccctctagcggtctacacacaaatggttattcacttgccagaaagctgttttttgaaattgcaaactacaaaatagatagtttaatcccaggcttgaagagaacagttggagaaacactactagagcctcatattaactatacaaaccctgtacagtctcttttgggaaaaaactttagtgttaatggcatagctcacattacaggcggcggtctcttagagaatatcccaagagttttaccagaaggctgcgatgtaaaaatcaaaaaaaactcgtggccacctctgcccgtttttaaaactagcaatcaatgaa

SEQ ID NO: 314006 - DNA, 544 bp, Unknown
  Bacterial polypeptide expressing nucleotide sequence isolated from the Sargasso Sea
aggcttccatcttccaaaacccataaaaaatggtgatttgataattggattaccttctagcggcatccactcaaatggtttttctctcgtcagaaagatagttgaaatttctggactgaattacaagtcgccgagtccattttctgataactccttggggttagagcttttaactcccacaaaaatatatgccaaaccttgcctaaaagtcattgagactgggcagatacttggtttggctcacattacgggtggtggattgactgaaaacataatacgtattcttgaaccggggctgggtttagaaataaatcttgatagttggactttacctccggttttcaattggttagcaaatgctgggtcagttgatcctgtggaaatgttaaaaactttcaactgcggtattgggatggtgcttatcattccgtctgcaagtaaggatttggtcaaacaaatgcttaacagtttttatgatcaagtctttgagattggcattgtaaatagcacgggtgaagtatcattttccggagaacttttgtga

SEQ ID NO: 314007 - DNA, 656 bp, Unknown
  Bacterial polypeptide expressing nucleotide sequence isolated from the Sargasso Sea
aaaatcatttaaaaacattggtggtttcggatcaatttttgacatttctacactaaaaatgaaaaaacctcttattgtgtcttcaactgatggtgtaggtaccaaaattgaaatatcaaacaaatttaaaaaatataatacaattggaatagatttggtcgccatgtgcgtaaatgatttaattgttcaaggcgcaaaacctattttctttttagactatattgcaattaataaaatcaaattaaataaaatgaaaaaaattttaaacggtattatcactggatgtaaattggcagattgtgctttactaggtggtgaaaccgcagagatgccaggtacctatggaagagataaatttgatttggccggattctcacttggtttagttgaggaaaaaaatttgttaaataaagataaagttaaagttaatgatcttattttagctattccctcctctggaatacattctaatggtttttcacttataagacatattctaaaaataaaaaaaaatttaaaaataccaaaaagaataaaaaaagaattgatgaagccaactaaaatttacgttcgtgaattaaataaaattaataataaaaaattaattacttcatgcgcacatataactgggggaggattaataaataatttactta

SEQ ID NO: 314008 - DNA, 729 bp, Unknown
  Bacterial polypeptide expressing nucleotide sequence isolated from the Sargasso Sea
tttcaaaatataggtgggtttggctcaattaccagcattccaaaaaatataaaaaatccacaactagttgcaagtactgatggggttgggagtaaaattgaaatcgcaaatgaattgaataaatttaatactattgggattgatctagtggccatgtgcgttaatgatttaattgtacaaggggcaaagcctcttatttttttagattatatatcaattaataaaattaacttaaaaaaattaaaacaaataataaaaggaattaccaaaggttgtgagatttcgaattgcgaattggttggaggtgaaacagctgaaatgccagcaacctattcaagaggaaaaatcgatatagcaggtttttcagtcgggatagttgataaaaataaaattttagataaatctaaaataaaagttaatgatttaatactagctattccctctagtggaatacattcaaatggatattcgttagtaagatatgttttagaaaaaaaaaaaattaatcttaaaaaaaataaatttttaaaaaaaaaattaatcgaaccaacaaaaatttatgtaaaagaagttttaaatttaattaataaaaaattaattaatggttgtgccaatattactggtggaggattaaaagataacgttaaaagaattttgccatcacatttatcggcttatatagatttagataaaataaaaacaaaatctatttttaaatggattcataat

SEQ ID NO: 314009 - DNA, 632 bp, Unknown
  Bacterial polypeptide expressing nucleotide sequence isolated from the Sargasso Sea
gtcaggaggtgaaacagccgagttaccagatatgtatgaggaaagcaaatttgatcttgctggttttgcattaggtgcggtagaaagagataatttaattacaaaagataaaataaaatcaaaaaatattattttaggactcccatcatctggtattcattcaaatggtttttctcttgtaaggaaaattatctcatctaataatataaaactttccgaaaaatttaactttaaaaaaaatcttggtgaagagcttcttaccccaactaagatatatgtaccaattctgaaaaaattaaataaaaataatttattaaatggtattgctcatataactggtggaggcttaatagaaaatatacccagagttttacctgataatagctctgctaaaatattattaaaatcatgggaaatcccagaaattttttcttggattaaaaatgtaggaaatatctcagataatgaaatgttaaggacttttaattgcggaataggaatggctttgattgttgataaagtaaatcttactagagttagtaatattttcgatgagatcaatgaaaaaatttttattataggtgaaattattcaagagactcattcaccaaaagtttatattgaaaattaat

SEQ ID NO: 314010 - DNA, 590 bp, Unknown
  Bacterial polypeptide expressing nucleotide sequence isolated from the Sargasso Sea
aatgacaaaagaaattatagaaaatgatccatataaatctgcaggtgttgatattgatgcaggcaatgatcttataaaaaaaattaaaacaaatgttggccttacacataataaaaatgttttaggtaattttggtggctttgcaggaatgtataagttaaataaaaatattaaaaatcctgtattggttgcatgtacagatggagtaggtacaaaggttgctcttgctcaagaatataatgctcttaatggtattggacaagatctagttgcaatgtgcgtaaacgatttagttgtttgtggtgcgcagcctcttttttttcttgattactttgcttcatctaagcttgatgtaaatgaggcatcaataataattaaaggaatatctgaagcatgcataagctcaggatgcgcccttcttggtggagaaacagcagaaatgccgggtcattataatgataataattttgatctagccggattttcagttggttgtgttgatgaaagaaagattattggtgacaaaaatgtaaaaagtggtgatgttttaattggtatcgaatcaagcggacctcattcaaatggatttt

SEQ ID NO: 314011 - DNA, 799 bp, Unknown
  Bacterial polypeptide expressing nucleotide sequence isolated from the Sargasso Sea
gtacaacgatttatcaggcattggtcaagatcttgtagccatgtgtgttaatgatttaattgtatgcggtgcaaagcctctattttttttggattattatgcatcttcaaagctagatgttaatgaagctactaccgttgtaaaaagtattgcagatgcatgcgtcaaatctgactgtgcgcttttaggcggtgaaactgctgagatgcctggtcattatattgataataatttcgatcttgctggattctcagttggatgcgttagcaaagataagataattaaaaatgataatgtcatgtgcggtaatgtcttgataggaatagaatcaagtggtccccattcaaatggattttctttaataagaaaaatcattaaagaatctaaggtaaatgaagaagaaaaaaatataatagctaaaagatgtcttgagccaaccttgctttatcccaaattgattatggagttaatttcaaattataagattaattctctttcacatattacgggaggtggtcttacagaaaatctaccaagatctataccagataatctctgcgtagaaatagatactgactcgtgggaaatgccaaatatttttaaatggttaaaagaaaatggaaatatttctgatgatgatatgtatagaatatttaattgtggaataggcatggtgctttttgttgatgaagatgaagagttaaatatttcttcgagaataaaagaattaaaaatgaatagtttcgtcattgggaaagtcaaaaataaaaaggaagaatcttctgtaatatttgtctaa

SEQ ID NO: 314012 - DNA, 751 bp, Unknown
  Bacterial polypeptide expressing nucleotide sequence isolated from the Sargasso Sea
atgaataaaagtcgctttacctataaaaaaagtggcgtcaatattaatgctgctgataaatttataaatttcatagctaataattcatcaaaaaataaaggcaataaaaagttaagcaatataggcggatttggttcaatttcggatatacctaaaaatatcaaaaaacctaaaattattgcttgcactgatggggttggaaccaaaattgagattgctaacttattaaacaaatatgacactattggagtagatctagtagcaatgagtgttaacgatcttatagtacaaggtgcaaaacctattttttttttagattatatttctattaataaaattgaattaccaaagcttaaatcaattattaaaggaatcttaaaaggttgtaaattatctggatgtgaactggtcggaggtgagacagctgaaatgcccggtacttatgaaagaggtaaatttgatatagcgggtttcgcagtaggaattgtagatgaaaaaaaaatattaaataaagaaaaaattaaaaaaaacgatttagtaatggctattccatcatctggaatacattctaatggctattctttggtaaggtatttgttaaaaaaaaaaaggattaatatttcaaaaaaagaattcttaaaaaaagaacttatgagaccaactaaaatttatgttaaagaaatactcaagcttgttgataaaaacttaatacactcttgtgctaatataacaggtggtggtttagctgata

SEQ ID NO: 314013 - DNA, 706 bp, Unknown
  Bacterial polypeptide expressing nucleotide sequence isolated from the Sargasso Sea
tttttagattatatcgcgactggaaaattagatataaataaaactaaaaagattctgaaaggtatccttaaaggttgcaaattatctaagtgtgatttaatcggcggggaaacagctgaaatgccgggaatttacaagaataatgattttgatttagcaggttttagtgttgggatagtatcaaaaaaaaaaattttaagtaagaaaagagtaagaaccaacgatataattatggcagtcccgtcaagcggtgtacattcaaatggatattctttagttagaactattttaaagagaaataagatatcaaataaaataaaaaatgaattacttaaacctacaaagatttattcatcggaaatcttaaaacttgtaaaaaaaaattacataaatgcttgtgcacatattacaggaggtggtcttgtagaaaatttgcttagatctgttccagaaaaattttcagtaaagattgatttatcaaaaatcaaagtaaagaagatttttaagtggataaaaagtaataatatttcagataaagaaatgcttaggacttttaattgtggagttggtttttgtttaattgtgccaaaaaaaaacgtaaaaaaaataactaatttttttccaaaagaatatttaccttatgaaataggacaaatcacttatggttccaaaaaaatagatttaataaattctttaaaatggtaaa

SEQ ID NO: 314014 - DNA, 544 bp, Unknown
  Bacterial polypeptide expressing nucleotide sequence isolated from the Sargasso Sea
aaaaacgaaaagttcatctaaaaaagaaattatcggaggatttggatctttatttgatatcagtaaattaaaaataaaagatcctgttattgtatcatgtactgacggagttggaacaaaaattgaactagctaatagatttaaaaaatttgatactattggaatagatttggttgcgatgtgtgtgaatgatttgatagttcaaggcgcgaaacctttattttttttagattatatagctgttggtaaattaaatcttaataaaacaaaaaaaatattaaaaggaatttttaagggatgctctatgtctaattgtaaattaatcggtggcgaaactgctgaaatgcctggaatttattcaagaaataaatttgatttggcaggttttagcgtgggtatagtttcaaaaaaaagaattcttagtaaagaaaaagtaaaaaacggtgatgtagttttagctattccttccagcggtattcattcaaacggttattctttagtaagatcattaataaaaaaaaatcaattagataaaaagttaaag

SEQ ID NO: 314015 - DNA, 703 bp, Unknown
  Bacterial polypeptide expressing nucleotide sequence isolated from the Sargasso Sea
atgaataaaaaacattttacatacaaaaaaagcggggtagatattaatgctgccgataaatttgtaagattcatatctaatatatcatcaaaaaaaaagggcaaaaaaaagttagataatattggtggttttggttctatttctaatatgcctaaaaagttaagtgatcctaaaattgttgcatgtaccgatggtgttggcaccaaaattgaaatagcgaatgtgttaaataaatataatactattggaattgatcttgttgctatgagcgtcaatgatctaatagttcaaggcgcaaaacctttattatttttagactacatatctataaataaaattaatttatttaaattaaagtcaattattaaaggaattgtaaaaggttgtgagatttcaaattgtgaattagttggtggtgaaactgcagaaatgccaggcacatatgaaaaaaataagtttgatattgctggatttgctgttggtattgtggataaaaaaaaaatcttaaataaatataaaatcaaaaaaaatgatattatattaggcattccatctaatggcttacattctaacggttattctcttgtaagatatatattaaaaaaaaaaaagattaatttgaaaaagaataaatttttatcaaaagaactaattagaccaacaaaaatttatgtaaaagaaaatattagatttattagataat

SEQ ID NO: 314016 - DNA, 787 bp, Unknown
  Bacterial polypeptide expressing nucleotide sequence isolated from the Sargasso Sea
ttggggactattgggcaagacttagttgcaatgtgtttaaatgatatggttacttctggagcacatccactattttttcttgattattttgcttcctcaaaacttaatgttactgaaacagtttcagttataaagggcattgctaaagcatgtaaaaaaactaattgttcacttattggcggcgagactgctgaaatgccaaatcactatatcggcaaaaattttgatttagctggattttctgttggtattgttgaaaaaaaattgattattgactcctctcaagttagaaagaataacatcataatcgggattgaatctagcggagctcattctaacggttactcattgatcaataaattaattaaggaatcaaaattaagcaagagtgaaaaaattaaattaattaagcttgctttgaagcctactcatttatatacaaatgtaattttggatttagtaaaaaaagttaaagttaagtcaattgctaacataactgggggaggtcttacagaaaatattcctagatcaattcctaataccctatcctctgaaatatatctgaataactggaaaatgccgctactcttttcagccctacaagaattgggaaaaattcaaataagagatatgttgagaatatttaattgtggaatcggaatgactttagttattgaacctaaggacttagataccaccatgaaagtactttccaagcataaatttaaagggttcatgattggaaaagttgtaaaaaaatcttcatcagaaataacttttctttaat

SEQ ID NO: 314017 - DNA, 736 bp, Unknown
  Bacterial polypeptide expressing nucleotide sequence isolated from the Sargasso Sea
atgacaaaagaaattatagaaaatgatccatacaaattagctggagttgatatcgatgctggtaataactttgttgatagaattaaaaaaagtgttgccgcctctcacaataagaatgtcttagaaaatattggaggctttgcaggaatgtatgagcttgataaagatattgagaacccagttttagttgcatgtacagatggagttggaacaaaggtttcgctagctcagcagtgcaatgacttatcaggtattggtcaagatcttgtagctatgtgtgttaatgatttaattgtatgtggagcaaaacctcttttttttctagattattatgcgtcagctaagctcgatgtaaatgaagcaactactgttgtaaaaagtattgcagatgcatgtatcgaatctaattgttctcttttgggcggtgaaactgctgaaatgcctggtcattatattgataataattttgatctagcaggattttcagttggatgtgttagcaaagataagataattaaaaatgataatgttatgaacggtaatgtcttgataggaatagaatcaagtggtccgcattcaaatggattttctttaataagaaagattattaaagaatctaaagtaaatgaacaagaaaaaactaaaataattaaaaaatgtcttgagccaactttactttatccaagattgattatgaatttaatttcaaattttaagattaattctctttcacata

SEQ ID NO: 314018 - DNA, 841 bp, Unknown
  Bacterial polypeptide expressing nucleotide sequence isolated from the Sargasso Sea
gatcctttattggtctctggcacagatggcatagggacaaaaatattactagggattgaaactgacattttagatggtttgggtcatgatctggttggtatgtgccttaatgatattctttgtcatggggcagagccactattttttttagattattatgcttcttctaagattgataaaaattcttttttaaaaattatgaaaagcattactgaagcttgcaagataaataattgctctcttattggtggtgaaacagcagagatgcctgggctttataaaaaagatgactttgattttgctggattttgtgttggtgcagtagagagaaaaaaaattctacctaaaagagatgtcatgaaagaagatgatcttctatatgggattagatcttcgggctttcattcaaatggatattctctcattagaaaagttttgaaagataaaaatatagatctacataaagaaacagaatttaaatcatcttatcaaacaaatgcagcagccttaatggctccaacaaaattatattttccttttttaaaaaaaattttaacaacaaatcttatcaacggtatttcacatataacaggtggaggtattattggtaatgcaccaagaatgctatctgaaaatttatcagcaaggattgataaaaaatttatttgtgatgaagaaattttccaatggtttcaaagtttagctaacatttcagatgaagaaatgttgaaaacctttaattgtggattaggtttgataatgactatttcaaaaaataattacaaagaatttgaacaattaataaaagatgaaaatttagatattttgaaattgggaaaat

SEQ ID NO: 314019 - DNA, 609 bp, Unknown
  Bacterial polypeptide expressing nucleotide sequence isolated from the Sargasso Sea
tctgtttacatataaaaaaagtggtgtcgatatcaatgctgctgatagatttgtgaggtacatatctactatctcatcaaaaaaaaggggcaaaaaaaagtttaataatattggaggttttggatctattagcaacatacctaataatataaaaaatcctaaaatagtagctagtactgatggtgtaggtactaaaattgaaattgctaatttaatcaataaatatgacacaattggaattgatttggtcgcaatgagtgtaaatgatttaattgtgcaaggtgcaaaacctcttttctttttagactatatatctattaacaaaatagatttaattaagttaaaattaattatcaaaggtattttaaaaggatgtgatatctcaaattgtgatttagttggtggtgaaacagcagagatgccaggaacatatgaaaaaggtaaatttgatatagcaggttttgcagttggaatagttgatcaaaaaaaaattttaaataaagataaaataaaaaataatgatttagttttagctgtcccttcaagtggtcttcattcaaacggttattcattagtaagaaatattattaataaaaaaaaaataaatat

SEQ ID NO: 314020 - DNA, 760 bp, Unknown
  Bacterial polypeptide expressing nucleotide sequence isolated from the Sargasso Sea
tatgacaacatataaagaagcaggtgttgatatagaaaatacagatgcccttgtcgaagatatttctcagctaagtaaatcgacaaatagaaatggaaattttgataaaattggtggatttgggggcatttttgatcttaaaaattgtggatatgaagaccctttattagtgtctggaacagatggcatagggacaaaaatattactagggattgaaactgacattttagatggtttaggtcatgatcttgttggtatgtgtctaaatgatattctttgtcacggtgcagagccattattttttttagattactatgcttcttccaagattgataaaaattcttttttaaaaattatgaaaagcatcactgaagcttgcaagataaataattgctctcttattggtggtgaaacagcagagatgcctgggctttataaaaaagatgattttgattttgctggattttgtgttggtgctgtagagagaaaaaaaattctacctaaaagagatgtcatgaaagaagatgatcttctatatgggattagatcttcaggctttcattcaaatggatattctctcattagaaaagttttaaaagataaaaatatagatctacataaagaaacagaatttaaatcatcttatgaaacaaatgcagcagccttaatggctccaacaaaattatattttccttttttaaaaaaaattttaacaacaaatcttatcaacggtatttctcatattacaggtggaggtatt

SEQ ID NO: 314021 - DNA, 723 bp, Unknown
  Bacterial polypeptide expressing nucleotide sequence isolated from the Sargasso Sea
cctaaattagttgctagcactgatggtgttggaactaaaatagaaatagcaaatcttttaaataaatttaatacaataggaatagatttggtagcaatgtgtgtaaatgacttaattattcagggtgctagaccattattatttcttgattatatttcaatcaacaaattaaatttaaaaaaattaaaatctattattagaggtatagtcgagggttgtaaaatttcaaattgtgaattggctggtggagaaactgccgaaatgccaggaacatattcggagggcaaatttgatatagcaggattttctataggaatagttgataaaaaaaaaatacttttaaaaaaaaaaataaaaaaaaataatcttattctagcaattccttcaaatggcttacactctaatggattttcattaataagatatattataaatagaaaaaaaattaatataaaaaaaaacatctttttaaaaaaagaacttcttaagcctacaaaaatttatgttaaagaagttttaaatctgcacgaaaaaaaaattattaatggttgtgcaaatataactgggggaggcttaaaagataatatagtgagaattgtacctgatggactatgtgcaaaaatagatttaaataaaattaaaatacaaccaatatttaaatggttaaaaaaccaaggtattaatgataaagaaatgttgaaaacttttaattgtggaattgga

SEQ ID NO: 314022 - DNA, 889 bp, Unknown
  Bacterial polypeptide expressing nucleotide sequence isolated from the Sargasso Sea
ccccttctggtctcaggcaccgatggtgtcggaaccaaacttgagctggcccaggagcatggcagccatcacggcgtgggcatcgacctggtggcgatgtgcgtcaacgacgtgatcacctcaggagccgcgccgctcttcttcctggattacatggccaccggagccttagcgccatcggcaatggccgaggtcgttgaaggaatcgccgatggctgcaggcagagcggctgcgccctactcggcggcgaaacggcagagatgccggggttttacccgaaggggcgctacgacctcgccggcttttgtgtggccgtcgtcgaagaagacgagctcattgacggccagcgcatccaacctggcgacagcgtgatcggtgtggccagcagcggcgtgcacagcaacggcttcagcctggtgcgcaaggtgctggagaaggccaacgccaatgcgaacaccttgtacggcgacgaccagcgccctctcatcgacgacctgctggcgccgacaagcctgtatgccgacctggtgcagcacctgctgcagagcggatgcgagctccacggcatggcccatatcaccggcggaggactcccggaaaacctgccgcgctgcctgcctgatggctgctctgcgcgcatcgatgcctccagctggacaagaccacccctgttccgatggctgcaggaggccggagacattcccgaaagagacctttggcacacgttcaacctcggcatcggtttctgcctggtggtgccggcgggaagcgaaaccgctgtgatcgagcattgccgcggcaagaaccatcgggcttgggtgattggcaacgtgacgtccaacaccccaggcagcgccgctgttctagaccggtgttcccgcccttgat

SEQ ID NO: 314023 - DNA, 599 bp, Unknown
  Bacterial polypeptide expressing nucleotide sequence isolated from the Sargasso Sea
catgaaaaaaacaaaaaataattataaaaaaagcggtgtaaacattgaaactgcagataaatttacaaaatacattggaaaatactcacaacaagccttcaaaaaaaaattaaacaaatttagtagatcaaatataggaaaatttgcttctgtgtttgatatcaaaccatttaaaataaaagatccaattttagttgcaagcactgatggagtgggaacaaagctagaaattgcaaacagatttaataaatttgatactataggaatagatttagtagctatgtgtgttaacgatttaatagttcagggagctaaacctctattctttttagattacatagcaaccggcaaaataaatctcaataaaatgaaaaaaatcgtccgtggaataataactggttgcaaaatttcaaactgtatattggttggtggagaaacagctgaaatgccaggtacatatggaaaaaataaatttgatttagcaggcttttcagtagggatggtttcaagaaaaaaaattttatccaataataaagtaaaaaataaagatattatacttgctgtaccatcaagtggtttgcactcaaatggtttttctt

SEQ ID NO: 314024 - DNA, 787 bp, Unknown
  Bacterial polypeptide expressing nucleotide sequence isolated from the Sargasso Sea
ataggaatagatctagttgctatgagtgtaaatgatttaattgtacaaggagcaagacccttattttttttagactacatttcaattaataaaatcgacttaaaaaaaatgaaatcaataattcgtggaatagttaaagggtgtaatattgcagaatgtagtttggttggtggtgagactgccgaaatgccagatacttacgagaaaggtaaatttgatattgctggtttcgctgttggaattacagataaaaaaaagatactttataaaaataagataaaaaagggagatttaattttagctgttccatctagtggtttacattcaaatggtttttcacttgttaggcatttattaaaaataaaaaaaataaatgtaaaaaaaaatctatttctcaaaaaagaactaataaagccaacgaaaatttatgtaaaagaaattttaaatcttgtgaaaagaaatttattaaatggttgttctaatattactggtggtggattagctgataatattagtagagttgttcccaataacttatctgtagaaatagatttaaatagaattaaacctctcaaaatttttaattggcttaagaaatataaaatcagtgataaagaaatgctcaaaacttttaattgtggagttggattttgtttaataataaaccccaaatatataaaaaaaattaatagatttttttcaaaagaatataagccttatgttattggtaaaattacaaaaaatagaaacaaagtaagtcttaatggtaaagttaactggctataaa

SEQ ID NO: 314025 - DNA, 636 bp, Unknown
  Bacterial polypeptide expressing nucleotide sequence isolated from the Sargasso Sea
gatgtacccgagaggatcctccgtgagcactcctaccccactgagctataaagacgctggcgttgatattgatgctggtaatgcactggtaagtaacattaaagcggctgttaaacgtacccgtcgtccagaggtaatgggcaacttaggtggttttggcgcattgtgtgaattacccactaaatacaagcaacctgttttagtgtcaggcaccgatggtgttggtactaaattgcgtttagctatcgattacaaaaaacacgacacagtcggtatcgacttagtggccatgtgtgtgaacgacttgatcgttcaaggcgctgagccgttgtttttcctcgattactacgcaacaggcaagctcgatgtagaaacagcaacctcggttgttaacggcatcggcgaaggttgtttccaatctggttgtgcgttaatcggcggcgaaaccgctgaaatgccaggcatgtatgaaggcgaagattacgacctcgcacgtttctgtgtgggcgtggttgaaaaggccgacatcattgacgggagtaaagtggctgctggtgatgcgctgatcgccttagcctcaagcggtcctcattcaaatggctattctttagtgcgtaaagtattagaagtcagcca

SEQ ID NO: 314026 - DNA, 834 bp, Unknown
  Bacterial polypeptide expressing nucleotide sequence isolated from the Sargasso Sea
aattcgaaaaataaattcaaaaacataggttcatttggttctttatttgatttaagtgaatacaagattaaagatccggtaatagtatctagcaccgatggagttggaactaaattagaattagctaactatttcaaaaagttcgacacaataggtatagaccttgttgcaatgtgcgtaaatgacctgattgttctgggagccaagcctcttttttttttagattatattgcgataggtaaaataaatttaaaaaaagtgaaaaaaatcttagctggtatagtaagtggatgcaaacaatcggattgtgaattaattggtggagagacagctgaaatgcctgggacatatgaaaaaaataaatttgatctggctggtttttctgttggaataatttccaaaaaaaaaatactaaaaaaaaacaatgtaaagaagggagatataatattagcatttccttcaagtgggttacactctaatggctattctttagtcagacatattttaaaaaataataagataccgaaatctttatctaaagaacttttgaagccaacaaaaatatacgttaaagaaattaaaaaattggttagcaagaatctaatcagtgccgcagctcatataacaggtggaggtatatcagaaaatatagttagatcggtaccctctaatttatctgttgaaattgatttagctaaaataaaaacccagaaaatattttcatggattaaatcaaaaaatttagacgatttagaaatgttaaacacttttaattgtggagtaggtttttgtattatagtaaaaaaaaataatctcaaaaaaatatacaaatct

SEQ ID NO: 314027 - DNA, 423 bp, Unknown
  Bacterial polypeptide expressing nucleotide sequence isolated from the Sargasso Sea
catggattacaaaacatcaggtgttgatatagaagctggccgagaatttgtttccgaaattaaaaaggcagttgaagaaactcatacatctaatgtgattgagggtattggtgggttcggaggtttgtttagaattcctatcgatagttttaaaaaaccagttctagtttcaggaactgatggtgttggaacaaaattagaattagcccaaagtaaaaactttcactttgaagttggtattgatttagttgctatgtgtatgaatgatattattaccagcggagcaaaacctttattttttcttgattatattgctactggtaagcttgataagaaacaattattgaaggttgttcaggggatctctcatggctgtggagaaaataattgttcattactcggtggggaaactgctgaaatgca

SEQ ID NO: 314028 - DNA, 611 bp, Unknown
  Bacterial polypeptide expressing nucleotide sequence isolated from the Sargasso Sea
gatgcggcgccgatgtgccattttcgcggcgtttcaacgcgttaaccgcgattcgcgtgtccatccccgccaaggcgcttttcttcgtcccgcacatgggctaatcccgcgcgcagatggcatggcaaggggcttcatcatgaccgatggcaagaacggcatcacctattcggatgcaggcgtggatatcgacgcgggcaatgcccttgtcgaccggatcaaacccgccgccaagcgtaccaaccgccccggtgtgatggccggtctgggcggcttcggcgcgctcttcgatcttaaggccgcaggctacaccgatcctgtgctcgtcgccgccaccgatggcgtgggcaccaagctgcggatcgcgatcgataccgggaacgtcgatggcgtgggggtcgaccttgtggccatgtgcgtcaacgatctggtctgtcagggggccgaacccttgtttttcctcgactatttttgccaccggcaactggaaaccgaaaccgccgcgcggatcatcgaaggcatcgccaggggctgtgaactgtcgggctgcgcgctcatcggcggagagacggcggaaatgccgggcatgtacccggagggcgatttcgacc

SEQ ID NO: 314029 - DNA, 717 bp, Unknown
  Bacterial polypeptide expressing nucleotide sequence isolated from the Sargasso Sea
aatgaataataaaaaatttacctataaaaaaagtggtgttaacattaaagcagccgataagtttgtaaatttcatttcatcagtatcatcaaaaaaaaaaggcaaaaaaaggttttctaatattggaggttttggttctatttcaaatatttcaagcaatattaaacaacctcaaatagttgcttgtacagatggtgttgggactaaaattgaaatagctaatactttaaataaatatgatacaattggcattgaccttgtggcaatgagtgtgaacgatttaattgttcaaggtgcaaaacctttgctttttttagattatatttcaataaacaagattaatttaattaaacttaaatcgatcattaaggggatagttaagggatgtaaactatctgagtgtgatcttgtaggtggcgaaacagcagagatgcctggcacttattcaaaagggaaattcgatatagctggttttgctgttggggttgtaagtaaaaataaaattttaaacaaaaataaaattaaaaaaaatgatttaatattagcaattccatcaagtggtttacattcaaatgggttctcactagtgagatacttaattaaaaaaaaaaaaattaatattaaaaaaaataaatttttaaaatcagaacttttaaaacctacaaaaatatatgtgaaagaagtaatcaatctaatttcgaaaaaacttatttatgg

SEQ ID NO: 314030 - DNA, 610 bp, Unknown
  Bacterial polypeptide expressing nucleotide sequence isolated from the Sargasso Sea
atatgatttggctggttttgcattaggagcagtagaaaaaaataatattttaccaaaaaataatattaaagatggtgattatataataggtctaaaaagctccggaatacattcaaacggcttttctttagtaagaaagatactaaaagataataacataaatatgaatgaaaaaataagtgattttccagaaaagtctataggtcttaatttacttactcctactaaaatttatgttagaccaataattaatgagcataaattaaataatattaaggcttgcgcacatattacaggaggaggcttaatagataatctacctagagtaatccctcataatttaacttctgttatatttggggataaaattatacctaatgatatctttaaatggcttaagaaaatgggaaatattaaaagtcgcgaaatgttaaaaacatttaattgtggtataggaatgtgcgtcatagtagacccaaataaagctgatcaagtattaaaaaattttaatacgcaaattgaagaggcctatataataggtaagcttgaaaaaaattcaaaaaataaaaatattataatagaagacgaaaataaaatttggaataattaa

SEQ ID NO: 314031 - DNA, 879 bp, Unknown
  Bacterial polypeptide expressing nucleotide sequence isolated from the Sargasso Sea
ttaaacaaaataaaagtaaaagatcccattttggtttccactacagacggcgttggaacaaaacttgagttatcaaataaatttaaaaaatttgatacaattggaattgatcttgttgcaatgtgtgtaaatgatttgattgtgcaaggtgctcggcctttattttttctagactatattgctgtaggaaaaataaacttggtaaaaatgaaaaatatagtcaaagggataatcaaaggctgtaaaatttctaaatgtatattggtaggtggagaaacagcagaaatgcctggaacgtacagtagaaataaatttgatttagcaggatttgctgttggaatagtttctagaaaaaatttaatacataaaaataaagtaaacaataatgatattattttagcaataccttcgaatgggcttcactcaaatggattttcgttggtaagacaaatattaaggaaaaaaaaaataaatatttttttaaaaaaagaattaatgaaaccaactaaaatttatgtaaattatattttaaaacttgtggaaaaaaaattagttaattcttctgcacatataactggtggtggattaatcgaaaatattactagatcagttccaaaaaatctcactgttaatttagatttatcgaaaattagggttcaaaaaatatttaagtggttaaaaaaagaaaatatagatgattatgaaatgctaaaaacttttaactgtggaattggtttttgtataattgtaaataaaaataatgttaaaaaaatagagagtttttttgataaaaaatataagccttacaaaattggttacatttccaaatccaaaagaaaaataaaattacttaataagataaaatgtaaaaaaaaaagc

SEQ ID NO: 314032 - DNA, 695 bp, Unknown
  Bacterial polypeptide expressing nucleotide sequence isolated from the Sargasso Sea
catggactacaagagtgctggcgttgacgtcgaggccgggcgcgcctttgttcaacgcatcaaatcgtccgtcgaagcaacacaccgccaggaggtggtcggtggtctgggtggcttcgggggcatgatgcgcctgccggctggcctgcgacagcccctgttggtttcagggactgatggtgtcggcaccaaactcgaattagcgcaggaccatcaagcccaccacaacgttgggatcgacctggtggcgatgtgcgtgaacgacgtgatcacatccggcgcccagccgctgttttttctcgactacatggccacgggcgcattaagccctgacgccatggctgaggttgttgagggcatcgctgacggctgccagcagagcggctgctcattgctcggcggcgaaaccgcggaaatgcctggcttttacccagcgggtcgctacgacctggccgggttctgcgtcgccgttgttgaagagagcgagctcattgatggacatcaggttcaaccgggtgatgccgtaatcggcgtggccagcagtggtgtccacagcaacggcttcagcctggtgcgccgggtgctggcccaggccaatgcggatcgatccaccctgtacggacctgaacagcgccccctgatcgacgatctgctgaggcccacccagctctacgcctcgctggtacagcacctgc

SEQ ID NO: 314033 - DNA, 787 bp, Unknown
  Bacterial polypeptide expressing nucleotide sequence isolated from the Sargasso Sea
gatggtgttggaaccaaatctgtaatggcttatagacatagaggattaaaatcatttattggactaggaaaagatatcgtaaaccatagtgtgaatgatattttagttcaaggagctcggccattattctttttagattactttggtaccgataagttgagactagatgaaatcaactattttatacaaggagccagtgaggcttgtattgaaaatggaaaatttcctattttaggtggtgaaactgctgaaatgccacttgtctactctaaagaaaaaacagatttagttggatgtataattggttttaaagatgaccgattctttgaaacccctgtaaataaaaataatattttattgggattaccatctgatggaccacatacaaatggcttttctttaattaatagtttaaaagatattgatacatctgtagtagacaatctattaaagccacataaatcctatctgagtgcggtagatggttttgttgaagagtttggatattcatgtttaactagtatggctcatattactggtggtggattacttgaaaatattaagagagttgttccaaataacttagatatctttattaattataatcaaatagaaatgccggtttggtgtgaatatataatgggtgctggatctgttacaaaagatgaaatgttaacagtttttaactgtggaataggatatgttttaattgtagatatatctaagatagatgaatctaaaaaggattgtttaaatagatttttaaaaattggatacatttactaaa

SEQ ID NO: 314034 - DNA, 739 bp, Unknown
  Bacterial polypeptide expressing nucleotide sequence isolated from the Sargasso Sea
gatcttgtagttcaaggagctaaacctttattttttctagattatatagctattggaaaactaaatattaaaaaaatcaaactaatacttaagggaataatcaaaggatgcaacatctctgattgtgatttgattggaggagagacagcggaaatgccaggaatatataaaaaagataaatttgatttagccggattttctgttggtattgtttccaaaaaaaaacttcttacaaaaaaaaatgtaagatcaggtgatataatactagctataccctcaaatggaattcattcaaatggctattctctggtgagatcggtattaaaaaaaaataaaattacaaaaagacttaaagctgaattattgaaaccaactaaaatttacactaatgaaatattaaatttaacaaagaataatttaattaatgcagccgcacatattacaggcggcggtttaatagaaaatatatcaagatcagtaccaaaaaatctttccataaatattgatctgtcaaaaattaaagtaaaaaatatatttaagtggataaaacaaaaaaatataaccgataaagaaatgttaactacttttaattgtggtgtgggattctgtttaattgttaaaagaaataatattaaaaagataaaaagatattttacgaaaaaatatatgccttacgaaatcggatatatttccaaagatagaaaaaggcttgacttttataaaagaattaaatggtaag

SEQ ID NO: 314035 - DNA, 1024 bp, Unknown
  Bacterial polypeptide expressing nucleotide sequence isolated from the Sargasso Sea
tatgggcttacataagttaacatatgcgaagagtggggttaatattaagaaagcagataaatttgtaaacttcataacttctttatcaaaaaaatcaaataaaagtggtgattttaagaatataggtggttttggcgcaatctcaaaagtgccaaataatcttgaaaatcctcatattgttactagcacagatggcgtgggtacaaaaattgaaattgccaatgaattaaacaaattcaatactattggtattgatttggttgcgatgtgtgtaaatgatttaattgttcaaggcgcaaaaccttacctatttcttgattatatatcagttaacaaaatagatttaaagaaacttaaaaatatacttaaaggaattatgaaaggttgcaaattagcaaattgtaaacttgttggaggtgaaactgctgaaatgcctggaacttatgatattggtaaatttgatatagctggtttcgctgtaggattagtagaaaaaaaaaaaatattaaaaaataaaattagaaaaaatgatttaattttagcagtaccttctaatggtttgcattcaaacggatactctttggtaagacaaattattaaaaaaaaaaaaataaagttaaaaaaaaataattttcttaaaaaagaattaattagaccaactaaaatttatgttaaagaattattaaaacttattgataaaaatatattaaatggatgtgcaaatattactgggggcggtttaaaggataatataaaaagaattatacctaataatctctgtgcagatattcaattaaataaaattaaaggtttaaaaatttttaagtggctaaaaaaaactggaataaaagaagatgaaatgttaaaaacctttaattgtagtgttggattttgtataataataaatcccgaaaatgttaaaaaagtaaaaaagtatttttctaaaacatttcaaccatatataataggaaaaatttctaaaaattcaaaaagagttaaatttagtggtaaagttaactggtaa

SEQ ID NO: 314036 - DNA, 1045 bp, Unknown
  Bacterial polypeptide expressing nucleotide sequence isolated from the Sargasso Sea
atggattacaaaacatcgggtgttgatatagaagctgggcgagaatttgtttccgaaattaaacaggcagttgaaggaactcatacatctaatgtgattgagggtattggcgggttcggaggcttgtttagaattcctatcgatagttttaaaaaaccagttcttgtttcgggaactgatggtgttggaacaaaattagaattagcccaaagtaaaaactttcactttgaggttggtattgatttagttgctatgtgcatgaacgatattattactagtggtgcaaaaccgttattttttctggattatattgctactggtaagcttgataagaaacaattattgagggttgttcaaggaatttcacatggctgcggcgaaaacaactgttcattactcggcggagaaactgctgaaatgccagggttttattcaaaaaataagtatgatcttgcaggattttgtgttggaatagtcgatgaggataagcttattaatggtaaaaaagtctctgaaaatgacttaataattgctttaaaaagtaatggagttcatagtaacggctttagtttagtaagaaaaattattcaaaataataatctaatagataaagaatttgaaaatgtttttcacttgaatttttataatgagttattaaaacctacaaaaatttacaataatgtgattaccaagattttatctgaaaatatagaaattaaagcaatgtctcatattactggaggaggaattccagaaaatttaccaagatgtattccttctgattttattccttacattaatacgagttcttgggaaatacctatcatatttaaattccttaaagagcaaggatcgattcctgaaaaagatttttggaatactttcaatcttggagtgggattttgcttaattattgataaacaatttaaggacgcgatattaagtatctgtgaagatcatgacatagatagttgggaaattggaaagatagttcgaaaaaatgatttaacaattagtaaatttttgccagaaatcttaacataaa

SEQ ID NO: 314037 - DNA, 900 bp, Unknown
  Bacterial polypeptide expressing nucleotide sequence isolated from the Sargasso Sea
cgctgtgcgcattgccgcaaaaatatcgtgaccgggtactgttttccggcactgatggcgttggtacaaaactgcgtctggcgatggatctgaaacgccacgacactatcggcattgacctcgtcgcaatgtgcgtcaacgacctcgtggttcagggcgctgagccgctgttcttcctcgactactatgcaaccggcaaactggatgtggacaccgcagccagcgtcattaacgggattgccgaaggctgcctgcagtctggctgtgcgctggtcggtggggaaacagctgaaatgccggggatgtaccacggcgaagattacgacgtggcaggtttctgcgttggcgtcgtcgaaaaatcagagattatcgacggttctaaagtggctgacggcgacgtactgattgcgctcggctccagcggtccgcactccaacggttactctctggtacgtaaaatcgttgaagtcagcggttgtgacccggaaaccaccgagcttgaaggcaagtcgctggccgatcacctgctggctccgacccgcatttacgtaaaatccattctggaactgatcgagaaggttgatgtgcacgccattgcccacctgaccggcggcggcttctgggaaaatattccacgcgttctgccagacaacacgcaggccgtgatcgacgagtcttcctggcagtggccagccgtcttcaactggctgcaaacggcgggtaacgtcagccagcatgagatgtatcgcacctttaactgcggcgtaggtatggttatcgccctgccagctccggaagtggacaaagccctggctttgctcaatgagaaaggtgaaaacgcatggaaaatcggtatcatcaaagcttctgattccgaacagcgtgtggtcattgaatgaa

SEQ ID NO: 314038 - DNA, 949 bp, Unknown
  Bacterial polypeptide expressing nucleotide sequence isolated from the Sargasso Sea
aatgaataataagcaaaaaacgaaaattaattaccaaaaatcaggcgttagtattgatagagcagataagctaatttcttcactcaaatctaaaaatataaataaagataagaatgtcctctcaaatattggaggattctctagcctctataaaatagacacaaagattaaagacccagttattgtctcggggacagatggtgtagggacaaaattaaaaatcgctaataagcttaaatgccacaaacatattggccaagatctggttgctatgtgtgtgaatgatataataactagtggagcaaagcctctgttcttcttggattatctagcaacgagtaaaataaagcagagcatacattctgatgtactcagaagtataaaaaatgcatgccatatatgtggaatgagtttgataggaggtgagactgcggaaatgccaggaatgtatcataaagatgattatgacttagcaggattttgtgtcggaatagtatctcaaaaaaaaattatatctccaaaaaaagtcaaatctggaaatatcatcattggtcttccatcgagcggttttcattcaaatggattctctttgatcaataaacttattgaatcaaaaagattaaagctaaacaaagtttttcagaaatcgatcctaggcaatattcttataaagccaacaagactttactggaaaataattaattctctccagaaagaaatccaaataaagggattagctcacataactggtggaggtattacagataatgttccgcgcatacttcctgaaaatttatcggcaagtattgacctacgtactctaaaaatacctaatatatttagaaatattcaggaattatcaaaaatgaatgatcttgaaatgcttcaaactttcaattgtggcattggtatggctgttatcgtagaagaaaagaatatttcaaaagta

SEQ ID NO: 314039 - DNA, 599 bp, Unknown
  Bacterial polypeptide expressing nucleotide sequence isolated from the Sargasso Sea
aatgaagaagctatcatactcaagttcaggcgtaagcataaataaaggaaataaatttgtatctgaaattaaaaatataattcgtaaagacaaaaatcttaaaaaatccaatattggtggtttttctggtcaatacattcttgatccaaaaataaaaagaccaattcttgtcggtgcaaccgatggagttggaacaaaaattgagattgcccgcatgatgaagaaccataagacaattggcattgacctagttgccatgtgcgtgaatgacttaatagttgatcaggctaaacctctttttttcttagactatatttcaactggaaaattagacataactaaaggtaaagaaattataaggggcattattgagggatgtaaaatatccaattgttcactgctaggtggagaaacagctgaacatccagaagttgattcaaacgacaagtatgatcttgctggattttgtgtaggagttaagaatggagaagttaaagcaagtgcaaaattaaaagaaaatgatcttattgtaggaatttcatcatcaggccttcactctaacggatattctcttgttagaaagataatcaaagaaaaca

SEQ ID NO: 314040 - DNA, 1060 bp, Unknown
  Bacterial polypeptide expressing nucleotide sequence isolated from the Sargasso Sea
atgtacccgagaggatcctccgtgagcactcctaccccactgagctataaagacgctggcgttgatattgatgctggtaatgcactggtaagtaacattaaagcggctgttaaacgtacccgtcgtccagaggtaatgggcaacttaggtggttttggcgcattgtgtgaattacccactaaatacaagcaacctgttttagtgtcaggcaccgatggtgttggtactaaattgcgtttagctatcgattacaaaaaacacgacacagtcggtatcgacttagtggccatgtgtgtgaacgacttgatcgttcaaggcgctgagccgttgtttttcctcgattactacgcaacaggcaagctcgatgtagaaacagcaacctcggttgttaacggcatcggcgaaggttgtttccaatctggttgtgcgttaatcggcggcgaaaccgctgaaatgccaggcatgtatgaaggcgaagattacgacctcgcaggtttctgtgtgggcgtggttgaaaaggccgacatcattgacgggagtaaagtggctgcgggtgatgcgctgatcgccttagcctcaagcggtcctcattcaaatggctattcattagtgcgtaaagtattagaagtcagccaagcggaccctcaacaggatctcaatggcaagccattgatccaacatctgttagaaccaaccaaaatttacgttaaatcattgctcaagctgattgaagcatcggacgtgcacgcaatggcgcacatcactggcggcggtttctgggaaaacatcccccgcgtactgcctgaaaactgcaaagccgttatccaaggtgattcatggcaatggcctgccgttttcaattggttaatggaaaacggtaacattgcagaatatgaaatgtaccgcacctttaactgtggtgtcggcatgattgttgcgctgccagccgataaagtcgatgccgcactggcactgctcgccgccgaaggcgaacaagcttggctaatcggtgctatcgctgctcgcgaaggcaatgaagagcaagtggagatcctgtaat

SEQ ID NO: 314041 - DNA, 1039 bp, Unknown
  Bacterial polypeptide expressing nucleotide sequence isolated from the Sargasso Sea
atgaaaaaaataaactataaatctgctggagttgatatcgatgctggaaataaagctgtagataaaataaaagataaagtacaatcaacatttacgggtaacgtgcttaccggaataggtggttttggatcattatatagacttaatgatatcatttcacaatataaagatcctataatggttcaaagcattgatggggtaggaacaaaaaccatcatagctagaaaaatgaaaaaatataatacgataggtatcgatttattgagtgcagcagcaaatgatattttagttatgggagcaaggccgttgactttccttgattatatcgcgaacgataagttaaaacctgatgtcattgatgaaatagttacgggcatggtttcagcttgcaaagaaacaggtgtttcacttgtaggtggtgaaactgctgaaatgccagatacctacttacctggtgagcatgacctcgttggagttattacaggaatagtagatagagaaaaaataattgacggtaataaaataaatttgggagacagcattcttggcttgccatcaaatggtttacatacaaatggctattcttttgccagaaaattattttttgatattggggggtatactgtcaaagacgttatacctgatttgggacaatctgttggcgatgctttgctagagcctcatataaattataccaatcatattagaatattgttagatcaagaaattgaaattaaaggtattgctcatataactggtggaggtatagttgaaaatattccacgcattctccctgataaccgtagtgtcaatattaatttaggctcatggcctatattgcctatttttaaaactatgcaatcaattgggtctgttgatgattctgaaatgtttagggcttttaatatgggtattggcatggcattaattgctgattcatcaaatattgataatataaaaacagctttaaaagaattaaccccggtttttgaaataggtaaggtcgttgagggtgataaggaaataataattgcataaa

SEQ ID NO: 314042 - DNA, 1033 bp, Unknown
  Bacterial polypeptide expressing nucleotide sequence isolated from the Sargasso Sea
atgaataaaaaaaaatttacctataaaaaaagtggagttaatatcaaagctgcagataagtttgttgatttcatttctacagtttcagcaaaaaaaagaggcaaaaaaaagttctctaatataggagggtttggttcaatcacaaatattccaggtaatattaaacaacctagaatagttgcttgtactgatggtgtgggaactaaaattgaaattgctaatacattaaataaatttgatactattggtattgatctggttgctatgagtgtaaatgatttaattgttcaaggagctaaacctttactttttttagattatatttcaataaataaaattgatcttaaaaaacttaaagcaattataaaaggaattaacaaaggctgcaatcaatcagaatgtgaactcgttggtggagaaactgctgaaatgccaggtacgtatgaaaaaggtaaatttgatatcgcgggttttgctgtaggagttgtaggaaagaatagaattttaaataaaaataaaataaaaaaaaataatcttatagttgcaattccttccagcggtttacattctaatgggtattctcttgtaagatatttattaaaacaaaaaaaaataaatattaaaaaaaataattttttaaaatctgagcttcttaaaccaactaaaatatatgttaaagaaataatgaatttgataaacaacaacttaataaatagctgtgcgaatataactgggggaggtttgtctgataatattaaaagagttataccagataagctcactgcacatataagtttagataaaattaaaacttctaaaatatttaattggcttaaaaaaagtggaatttctgataaagaaatgctgaaaacatttaattgtggagttggtttttgtcttattgttaaaagtagaaatttaaaaaaaataagtaaatttttttcaaaaaaatacaaaccatatgttattggaaaaattttaaacggtaaaaacaaagttaagttaaatggttctatcaactggtatcaataga

SEQ ID NO: 314043 - DNA, 1015 bp, Unknown
  Bacterial polypeptide expressing nucleotide sequence isolated from the Sargasso Sea
tatgagtttagggaagttaacatatacaaaaagcggggttaacattaagaaagctgataagtttgtaaagcatatttctaaaaaaacaaataaaagtggtgattttaagaacataggaggatttggagctatatcaaatatccctaaaaaactaaacaatccacatattgttaccagcacagatggtgttggaactaaaattgaaattgcaaatgatataaaaaaatttaatacaattggtatagatcttgtagcaatgtgcgttaatgatcttattgtacagggcgcaaaaccatatttatttttagattatatttctacaaataaaataaatttaaaaaaacttaaaaatattttaaaaggaataataaaaggatgtgagattgctaattgtaaacttgttggaggagaaactgcagaaatgccaggaacttatgagaatggaaaatttgatattgccggattctctgttggattagtagaaaaaaataaaattctaaaaggaaaaataaaaaaaaacgatataattttagctgttccctcaagtggtattcattcaaatggatattctttagtaagagaattaataaaaagaaaaagaattaatattaataaaaacaaatttttaaaaactgagttaattagaccaactaaaatttatgttaaagaagttctaaatttaattaataaaaatattttaaatggttgtgctaatattacaggaggtggattaaaggataatattaaaagaattattccaaacaatctttgtgctgaaatagatttaaataaaattaatacattaaaaatttttaaatggttaaaatattctggtattgaagaaaaagaaatgttaagaacttttaattgtggtgttggattttgtttaattataaataaaaaaaatattcaaaaagtaaaaaaatatttttctaaaaaatttcaaccttatgttattggtaaaatttcaaaaaattataaaaaagtaaaatttaatgggaaaattaaatggtaa

SEQ ID NO: 314044 - DNA, 771 bp, Unknown
  Bacterial polypeptide expressing nucleotide sequence isolated from the Sargasso Sea
aatgaataaaaaaaaatttacctataaaaaaagtggagttaatattaaagcagcagacaagtttattgatttcatttcttcagtttcagcaaaaaaaagaggcaaaaaaaagttttctaatataggaggttttggctcaatcacaaatataccaggtaatattaaacaaccaagaatcgtagcttgtacagatggtgtgggaactaaaattgaaattgctaatacattaaataaatttgatactataggtgttgatctggttgctatgagtgtaaatgatttaattgttcaaggagctaagccattactttttttagattatatttcaataaataaaattgatcttaaaaaacttaaagcaattataaaagggattaacaaaggatgccatcaatcagaatgtgaacttgttggtggagaaactgctgaaatgccaggtacgtatgaaaaaggtaaatttgatatcgctggttttgctgtaggagttgtaggtaaaagtaaaattttaaataaaaataaaataaaaaaaaataatcttataatcgcaattccttcaagcggtttacattccaatgggtattctcttgtaaggtatttattaaaacgaaaaaaaataaatattaaaaaaaataaatttttaaaatctgagcttctaaaaccgactaaaatatatgttaaagaaataatgaatttaataagcaaaaatttgatcaatggctgtgcaaatataactgggggaggtttgcctgataatataaaagaattatacca

SEQ ID NO: 314045 - DNA, 1045 bp, Unknown
  Bacterial polypeptide expressing nucleotide sequence isolated from the Sargasso Sea
atggattacaaaacatcgggtgttgacatagaagctgggcgagaatttgtttccgaaattaaacacgcagttgaagtaactcatacatctaatgtgattgagggtattggtgggttcggaggtttgtttagagttcctattgatagttttaaaaaaccagttcttgtgtcaggaactgatggtgttggaacaaaattagaattagctcaaagtaaaaactttcactttgaggttggtattgatttagttgctatgtgcatgaacgatattattactagcggggcaaaacctttattttttctggattatattgctactggtaaacttgataagaaacaattattgagggttgttcaaggcatttcacatggctgtggagaaaataattgctcattactcggtggagaaactgctgaaatgccaggattttattcaaaaaataagtatgatcttgcaggattttgtgtaggaatagttgatgaagataagcttattaatggtaaaaaagtatttgaaaatgatttaataattgctttaaaaagtagtggagtccatagtaatggctttagtttagtaagaaaaattattcaaaataataatcaaatagataaagaatttgaaaaagtttcttacttaaatttttatgatgaattattgaaacctacaaaaatttacaataatgtgatacaccaaattttatctgaaaatatagaaattaaagcaatgtctcatattaccggaggaggaattccagaaaatttaccaagatgtatgccttctgattttattccttatatcaataccagttcttgggaaatacccattttatttaaatttcttaaagacaaaggatcgattcccgaaaaagatttttggaatactttcaatcttggagtgggattttgtttaattattgataaacaatttaaacaagcgatattaagtatctgtaaagatcatgacatagatagttgggaaattggaaagatagttcgaaaaaatgattcaacaattagtaaatttttgccagaaattttaacttaaa

SEQ ID NO: 314046 - DNA, 515 bp, Unknown
  Bacterial polypeptide expressing nucleotide sequence isolated from the Sargasso Sea
aatgaaaaaaaaactttatagttacaaagatagcggcgtcaatatttctcttggaaataaatttgttaaacatattggtagattaacaaaaaaaaatgtcaaaaaaacgaaaaataataagcttcagaataatattggttcattcggatctttgtatgatatttcaagcttaaaaataaaaaaccctattatagtctcttgcacagatggtgttggtacaaagctcgaattagctgataagtttaaaaagttagatactattggtatcgatctagttgcgatgtgtgtaaatgatttaatagttcaaggtgctaagcctttattttttttagattatattgctatagataaaattcagcttactaaattaaaaaaaatactaaaaggaattttacaagggtgccaaaaggcgaaatgtagtcttattggaggagagacagcagaaatgccaggaatatataagaagaaaaaatttgacctagctggttttagtgtcgggatagttcaaaagaaaa

SEQ ID NO: 314047 - DNA, 1024 bp, Unknown
  Bacterial polypeptide expressing nucleotide sequence isolated from the Sargasso Sea
atgaagaaattagattataagtcagctggtgtagatattgatgctggaaatcaagcagtggacttaattaaatccaaagttaaatcaacctttacaaaaaacgttctaacgggtattggttcttttggttcactatatgatttaaaaccaattctacaaaaatatgataatcctgttctggttcaaagcattgatggtgtcggcactaaaactattattgcaaaaaaaatgaaaaaatatgataccattggtattgatcttttaagcgcagctgcgaatgacattttagtgatgggtgctcgccccttaacctttctggactatattgcgaacgacaaactagatcccctaataattaaggaaattgttgatggaatggtatctgcatgtaaagatagtggggtatcacttgttggtggagaaacagctgaaatgccagatgtttatcttactggtgaacatgatttggttggagtaataactggggttgttgaaaagaagaaaataataacaggtgaaaaaattcaacatggggatgtggtcttaggtttaccatcaagcgggttacacacaaatggtttttcactagcaagaaaaatattttttgaatacggaggatatagtatttcagataatattgatgaactagataaatcagtaggccttacattgcttgaaccccacacaaactataccaatcatgttttctccttattaaacaaatctattccaataaatgggattgcacatattacaggtggcgggttggtagaaaatattcctagaatacttccaaataattgtgcggtggaaataattgataatagctggccgatattgtctgtatttaaagtgatgcaatcaattgggaatgttagttcagatgaaatgtacagagctttcaacatgggtataggaatggtatttattgtaaaccctgacaatatggatgaaataatattaaaccttaaaccattaacagaagtttttcatattggtaatgttattaaaggtgtgaatgaag

SEQ ID NO: 314048 - DNA, 898 bp, Unknown
  Bacterial polypeptide expressing nucleotide sequence isolated from the Sargasso Sea
atgattaaaagtaatctaacatatgccaaaagtggagttaatattaaggctgctgataaatttgtaaaatttatatcctctttttctaaaaattcttcaaaaagaactaaatttaaaaatataggtgcttttgggtccgtcactaaagtaccatcaatatatagaaatccacatctggttgcatccacagatggagttggaacaaaaatagaaatagcgaacattttgaataatttcaaaacaatcggaatagatttagttgctatgtgtgttaatgatttaattgttcagggagcaaaaccaattatatttcttgattacatttctgtacataaaatcaatttaaaaaaactaaaaaatattattaaaggaataaaaaaaggttgtacaatttcacaatgtgaacttgttggaggtgaaactgcagaaatgccaggcacttatagtaaaaataaatttgatatagcgggtttttctgtcggaattgttagcaaaaataaaattttagattcaaataaaattaaaaaagataatttaattctagcaataccctcaagcggtattcattctaacggtttttctttaattagaaatattattaaaaaaaaaagagtaaatattagaaagaataattttttaagaaaagaacttttaaagcctacaaaaatatatgttaaagaaattttatccttaattgaaaaaaataaaataaatggctgtgctcatataacaggtggtggattaaaagacaatattgagagaataataccagataaactcactgctaaaatcaatttaaaccaaattaaaaccaaaaaaatatttaattggattagacaacaaggtgtaaaagataaagagatgttgaaaacatttaattgtggagtgggattttgca

SEQ ID NO: 314049 - DNA, 850 bp, Unknown
  Bacterial polypeptide expressing nucleotide sequence isolated from the Sargasso Sea
tttggttgcgtgtactgatggagttggaacaaaggtttcgctagctcagcagtacaatgacctatcaggtattggtcaagatcttgtagcaatgtgtgtgaatgatttgattgtatgtggagcaaaacctcttttttttctagattattatgcgtcatctaagctcaatgttaatgaagcagctactgttgtaaaaagcatttccgatgcatgtatcgagtctgattgtgcgcttttaggtggtgaaactgctgaaatgcctggtcattatattgatgataattttgatcttgcaggattttcagttggatgtgttagcaaggataaaataattaaaaatgataatgtcatgtgtggcaatgtattgataggaattgaatcaagcggtccgcattcaaatgggttctctttgattagaaaaatcattaaagaatctaaattaactgaagaagaaaaaactaaaatagctaaaaaatgtcttaagccaactatactttatcccagattgataatggagttaatttcaaattataagattaattccctctcacatattactggaggtggtcttacagaaaatctaccaagatctataactaatgatctctgtgtagaaatagatactagctcgtgggaaatgccagatatttttaaatggttgaaagaaaacggaaaaatatctgataatgatatgtacagaatattcaattgtggaataggtatggtgctttttgttgatgaggacgaagtattaaatatttctaaaagaataaaagaattagaaatgaatagtttcatcataggaacggtcaaaaataaaaaggaagaatcttctgtaatatttgtctaa

SEQ ID NO: 314050 - DNA, 1033 bp, Unknown
  Bacterial polypeptide expressing nucleotide sequence isolated from the Sargasso Sea
aatgacaaaagaaattatagaaaatgatccttacaagtctgcgggtgttgatattgatgcaggcaatgaacttattgaaaaaattaaagcagatgtagcatctacacaaaatgtcaatgttcttggaaatattggtgggtttgcaggaatgtacgaaattggcaaagaatttgaagagccaatcctggtagcttgcacagatggtgttggaacaaaagtttctcttgcaatggaatacaattacattgacggtattggacaagatttagtggctatgtgtgtaaatgatctaattgttacaggtgcaaagccattattttttctggattactatgctgcatcaaaattagatgttgaccatgccgcgcaaataataaaaagtattgcaggagcatgtaaaaattctggatgtgctcttcttggtggagaaactgctgagatgccaggccattatatagataataacttcgacctagcaggattttctgttggttgtgttgaaaagaaaaatataattgacaagaacagcgtatgcgacggagatatattaatcggaattgaatcaagcggaccccactcaaatgggttttctttgataagaaaaattctagctgaatcagataaaagtgtcgatgaaaaaaaagcagttgctactcaagtgcttgagcccactatcttatatccaacattaatatcatcattactaaaaaaacatgagataaaatcaatgtctcacataactggtggtggattaacggaaaatttgccgcgttcaattcctgaaaaactttgcattgaattgagtgtgaatagctgggatattcccccggtcttcaagtggctgcagtccgaaggaaacatacataacgatgatatgtacaaaatatttaactgcggcataggaatggttttatttgttgattcaagtcaagaagaagatataagaaaatctataacagagtttaattttaaaaattataaaattggaacagtttcaaaaacatctggaagtaaagaagttatattttcttaa

SEQ ID NO: 314051 - DNA, 718 bp, Unknown
  Bacterial polypeptide expressing nucleotide sequence isolated from the Sargasso Sea
atgaaaaaaaaactctatagttataaaaatagcggcgttaacatttctttgggtaaccaatttgtaaaacatataagtaaattaacaaaaaaaaatgtcaaaaaagcgaacaaaaagaataataagaataatattgggtcttttggatctttatacgatataagctcattgaatattaaaaatcccattatcgtctcttgtacagacggagttggaactaaattggaactatcagataggtacaataaattaaacacaattggtattgatctagtagctatgtgcgttaatgatttaattgttcaaggtgcaaaaccattattttttttagattatatagcaatagaaaaaatcaatctttcaaaattaaaaaaaattataaatggtattttaaaaggatgtaaaatagctggttgtgatcttatcggaggtgagactgcagaaatgcctgggatttataaaaaaaataaatttgatttggcaggttttagcactgggatagtttctaaaaacaagattttaaaaaagggcaatgttaaagatggtgatataataattgccattccctcttctggtattcactctaatggttattcattagtacgtaatattttaataaaaaataaattaccggaaaaaataaaaaaacaattacttactcctacaaaaatttacgtaaatgaaattttaaatttgtgtaaaaaaaatttaattcatt

SEQ ID NO: 314052 - DNA, 1021 bp, Unknown
  Bacterial polypeptide expressing nucleotide sequence isolated from the Sargasso Sea
aatgactagtaaaacaaaacctacagatccttatgcaaaggctggcgtaaatattgaaaagggtaataagctagttaaatctattaaagctagtgtcaatgcaactcatgataaaagagtcctcggaggaattggaggttttgcgggtctttttcaacttggatccaagtataaaaatcctgttttagtaggttgcaccgatggcgttggaactaaagtggctctgagtcaagcacacaataaaatacatctcactggtcaagacttagttgctatgtgtgttaatgatatgatcacatgtggtgcagaacccttatttttcttagattactttgctgcctcaaaactcgaacctagatcaactgcaaaaattgtaaagggcattgctaaagcatgtaaaaaaagtaattgtgcccttctaggaggagaaacagctgagatgccaggccattatgtaaagaataattttgatttagctggtttttctgttggcgttgttgagaagagcaaaataattgatggaaaaaatataaagtctggacatataattattggaattgaatctagtggtcctcattcaaatggctattcattaatacgctcaattattaaaaaacataaagctcctgactcaatactgcatgcattgctcaaaccgactcatttgtatactgcgcctattttagaactaattaaaaaaattaatgtcaaaggtatggcacatattactggaggtggtttaacagaaaatattcctcgtattcttaaaagtggattggtggcagatataaatttatcatcatggaaatttcctaagactttcaagtggcttcaagaaaaaggaagaatttctcaagcagacatgttgaggatatttaattgcgggatcggaatgatatatatcatagacaaaacagatctagcaaaagcacaaaaaattttatcaagtcataagttgcgtacctttgaaattggctcaattactaaaagtaatctcaaagaacaaattcgatattattaa

SEQ ID NO: 314053 - DNA, 1054 bp, Unknown
  Bacterial polypeptide expressing nucleotide sequence isolated from the Sargasso Sea
atgacttcagataataaagattctctaatagattataaacaagcgggcgtagacgtagatgcaggctatgatctagtaaaaaaaattaaaccttttgtgcagaaaactaaaaggcctgaaatactatcagggttaggttcattctctgcaataagcagaatacctactcacttcaaaaaccctcttctagtttcttgtacagatggcgtaggtactaaaattgaaatagcaaaagcagaaaataattttgaaaatataggcatagatctagttggtatgtgcgttaacgacctaatagtttgtggcgcagagcctttattgtttttagattattacgtaactgataaattgcaagttgaagtagcaagtaaagtcattgaaagcatagcaaaagggtgcattctagcaaattgttctttagtaggtggagaaaccgctgaacatccaggaagttttcctgatgatagtttcgatctagctggattttctattggaatagtagatgaagaacagatgattggattagatggacctaaaaatggagatatgattattggtatttcttcatctggctttcactcaaatggttattctcttattagaaaggtacttcaagattacgatattgcattatctcaagaaattgaaggtgaaactttaggaaatattttactcaaacctactaatatttatgtgcaagaaatcttaagtttaaataagttaattaatattagctctatggctcatataacaggaggtggattctttgaaaatatacctagaatgcttaatgaaaaccagaaagtaaatatagattttaatttcagtgattggccagcttccagttattttaaatggatccaagatatagccaatatttctgatgaaaatatgcttaagactttcaattgcgggatagggctaatgcttgcagtttctcctgaagacgaagaaatggcattagggacaattaatcaaagctccttttttgctaaaactattggtatcgttgaagaaaataaagggaacgaaaacattttaaactttgtctaag

SEQ ID NO: 314054 - DNA, 1057 bp, Unknown
  Bacterial polypeptide expressing nucleotide sequence isolated from the Sargasso Sea
tttggggattgccgtgagcgagcaaaaaacgtcgttaagttacaaagacgctggtgtggatatagatgccggtgaggccttggttgaccgtattaaaggtgcggtaaaacgcacgacccgtaaagaagtaatgggcggtttaggcggctttggtgctttgtgtcaaatccctgctggctataaagagccagtactggtatcaggcactgacggtgtgggtactaaactgcgcctggcgatggatttaaaacgccatgacagcgtcggtatcgacttagtggctatgtgtgtcaatgacattgtcgtttcaggtgctgaacctttattttttctcgactactacgcgacaggaaagctggatgtaaataccgctgctactgtagttgaaggtattgccaaaggctgtgagctggctggttgtgctctggtcggcggtgaaactgctgaaatgccaggtatgtaccacggcgaagactacgacatcgctggttttagcgttggtgtggttgagaagtctgaaattattgatggcagcaaagtaaaagccggcgatcaattaattgcattagcggcctcaggccctcattccaacggcttttcgttaattcgtaaagtactggaagtcagcggtcaggatcctcaaaccctgctggaaggcaaaactattgccgatcatctgttagagcctacccgtatttatgtaaaaaacctgctggctttaattaaatctatgccggtccatgccttgtgtcatatcactggtggcggtttctgggaaaatatcccacgggtgctgccagaaaacactcaggcaaacatcaaagagagcagctggcagtggcctgctattttcagctggttacaacagcaaggtaatgtagaacgtcatgaaatgtaccgcacctttaactgtggtgttggtatgattgtggtagttcctgcaactcacctcgatgcggctttagcccagttaaaagctgctggcgaaaatgcctggcatttaggtgaaatcaaccaggttgccgcggacgaacctcaagttgtgatccaaggctaa

SEQ ID NO: 314055 - DNA, 1081 bp, Unknown
  Bacterial polypeptide expressing nucleotide sequence isolated from the Sargasso Sea
atgacaataaacgataaaaaacaagaaaaagacataaaagatcataatttttcaggtgctacctataaagattcaggtgttgacgttgaagctggatatgagctcgtcgattcaattaaaccttttgtagagaaaacgcgcagacctgaaatcctctccggtcttggatctttttctgctctgagtagaattcctaagcatattgataatcctattcttgttacctgcactgatggagtgggaacaaaaattgaaatagctaaagaattggatgacttttcaactattggaatcgatcttgttgccatgtgcgtaaatgatcttatagtttgtggtgctgaaccccttgtcttcttggactactatgttacggataagctgaatgttgaaacggcttcaaccgttatcgaaggaatagcgaagggttgtgagcttgctaattgttccttggcgggcggtgaaacggctgagcatcctggcagtttccctgataatagttttgacttagcaggtttttctttaggagtagttaatgaaaatgaaattataggccaggacggtcctatgaataatgatattttaattggcattgagtcctctggttttcactccaatggtttttctttattacgaaaagtaattaaagactacgaaatagatctgcatgctcaatggaaaggtgaagagataggagaatttcttttgaagcctactcatatctatgtatctgagattttagcactgaaaaaaatagtctctgtaaatgcaatttctcatataactggaggagggtttatcgaaaatatcccaaggatgttaagtaaacatcaaaaggccattatcgaacatgaattcagtgactggccagcaggaaaatacttcgaatggcttatgcaaacagcagatatccctaaagaaaatatgcttgatacctttaattgcggagttgggctagtcttatctgttcatgaagccgatgaggaaaatgtattgggcgctttaaatcagaggtattttgcgaaacgtatcggtagaattgaagataaagaagagaacgaagagcctattgtttttgtctaat

SEQ ID NO: 314056 - DNA, 1042 bp, Unknown
  Bacterial polypeptide expressing nucleotide sequence isolated from the Sargasso Sea
aatgagtaaccaaaagtcaaaaataacatattcagattctggcgtagatattgacaaagccaatgatttgatcgatgagatcaagcctataatcaaagaaacactgactgatgatgtattgtctaatatcggtggtttcggagggttattcgagttaagcacaaaaggcattgaacgacctgttcttgtttcaggaacagatggtgttgggacaaaagtaaagctggcacaagagcttgatattcttgaaggggttggggttgatctggttgccatgtgcgtcaatgacatcattacttctggtgctaaacctctattctttcttgattattttgcaacctcaaagcttgataacgcacaagcaaaaagaatcataaagggaattgcaaatggatgtgtgcaatctgaaatggcactcattggtggagaaactgcagaaatgccaggagtctatcagctgggtgactttgatcttgcagggttttgcgttggtgttgttgattacgaaaaaatcattgatggatcaaaaatatcagaaggtgattcgattataggacttgcatcctctggcccccactccaatggctattcgcttatcaggaaaataattgaaaaaaattcagtcgatctagatgaattgatcgatggtgaaaaaattggatcacgaattattaagcccacgatcatatacagtaaatcggttctaagttgtcttgaaaaatatgaagtcaaatcaatggcacacatcacaggtggcggattcaaagaaaatattatccggtcaatcccagatggttttcaggcaataattgataaaaaatcatggaacttaccgtctgtctttggttggattcagggagaggctggtatcgattctgatgaaatgcttaaaacattcaattgtggcattggatacgtgatgattgtaaaaaaggatattagagattctgtaatcaaccacttccaagatgaaggaatcgaagcttatgaaatcggatctatcaagagtggtgagaaatctgtgatcatcaatcatggttga

SEQ ID NO: 314057 - DNA, 1057 bp, Unknown
  Bacterial polypeptide expressing nucleotide sequence isolated from the Sargasso Sea
catgaatcaacccaaatccgctccagatgcccaaggtttgtcctatcgcgacgccggcgtggacatcgacgcgggcgacgcccttgtcgacgcgatcaagccctttgccaaaaagacgatgcgcgacggcgtgctgggtggcatcggcggatttggcgcgctgttcgaagtgccgaagaagtacaaggaacccgtgctggtatcgggcaccgacggcgtcggcaccaagctgcgcctcgcgtttcaactgaacaaacacgacacggtcggccaggatctggtggccatgagcgtgaacgacattctggttcagggcgccgagccgctgttcttcctcgattatttcgcttgcggcaagttggacgtcggtaccgcggcaacggtcgtgaagggcatcgcgcatggttgcgaactgtccggttgtgcgctgatcggcggcgaaacggctgaaatgccgggcatgtacccggacggcgagtacgatctggccggtttcgcggtcggcgcggtggaaaagagcaagattatcgacggcagcacgatcgccccgggcgacgtggtgctgggtctggcttcgagtggtatccattcgaacggtttttcgctggtgcgcaagatcatcgagcgcgcgcagcccgatctgaatgcggattttgacggccgctcgctggccgacgcgttgatggcgcctacgcatatctacgtgaagcctttgctggccttgatgcagcagatcgctgtcaagggtatggcgcacatcaccggcggcggcctggtcgagaatattccgcgtgttctgcgtgaaggcctgacggctgagctggatcatcgcagctggccgctgccgccgctgttctcgtggctgcagaaacacggcggcgtggcggatgcggaaatgcatcgcgtgttcaactgcgggattggcatggccgtggtggtgtccgctgctgacgccgatgcggcaatcggcctgttgtcggccgccggcgagcaggtctggaagatcggcgtgatccgcgaaagcgcggcaggcgaagctcagacgttggtcgtctaa

SEQ ID NO: 314058 - DNA, 1024 bp, Unknown
  Bacterial polypeptide expressing nucleotide sequence isolated from the Sargasso Sea
tatgacaataagttacaagaaagcaggagttgacataactgagataaaaaaaagtcaacgtgcaattggcagattaattggctcaactcataatttacaaaaaatggcaaagatgacacatggatttgggcattatgcaggaattgttgaaattccaggtggaaaattattagcaacacatactgatggagtaggaaccaaagttatgattgcaaatttaatgaaaaaatatgatacaattggaatagattgtattgcaatgaatgtgaatgacattatttgtattggtgcaacgccaatttcatttgtagattacattgctgcaaacaaaaatgatcaaaaaattttcaaacaaatagtatcaggattggttaaaggtgcaaaaaaatcctcaatgccaattgtaggtggagaaactgcaataatgtcagatttaattgcaggcaaaggttttggatttgatcttgcagggatggtagtagggatgctttcaaaaaaagacatggtattgggagataaaataaaaccaaatgatgtaattattggaattaaaagttcaggattacattctaacggatactcattagcacgtaaagcacttttaacaaaatattcagttaaagacaatatcaaaggaattggaaatttaggaaatgcacttttacgtccaacagagatttacgtcaaaccagttttagaagcagtaaaaaaatgtaaaattcacggattggcacacattacgggaggatcatttacaaaattattgagactgaaacaaattggatataacttggacagtatgcctaaaactccagcattgatgcaattaattgaagattcaggtgtgaaaaatgaagaaatgtacaagacattcaacatgggaataggattttgtattatcgctccagagaatcaagccaaaaatattcataaaattttcaaaaaacataagacgaaatcttatgaaatcggcagaatcagtaaaaacaagggcgtttttattaataaattgaaaattgcatag

SEQ ID NO: 314059 - DNA, 820 bp, Unknown
  Bacterial polypeptide expressing nucleotide sequence isolated from the Sargasso Sea
atgacaaagaataagcttgattataaattagctggtgtagatataaatgcgggaaatgaagctgttgatctaattaaagatagtgtgaaatcaaccttttcaaaaaatgttcttattggattgggtgggtttggcgcactgtatgatttaaaatcaattataaaaaaatatgaacaccctgtgctcgtacaaagcattgatggtgttggaacaaaaactataatagcaagaaagcttaacaagtatgatacaataggtattgacctattaagcgcagctgctaatgatataattgttatgggggcaaggccggttacttttcttgattatattgccaatgacaaattaaaaccatcagttattaaagaaataatttcggggatggttatggcgtgtaaaaattctaatgtttctttgattggtggtgaaacagctgaaatgccagacacttatttgcctggagagcatgatttagttggagtaataacaggcttagttgaaaaagataaaattattagtggggacttaatttcagcgggcgacgttgttttgggtttgccgtccagcgggcttcacacaaacggatactccctagctagaaaagtgttttttgatattgggggttatggaattaacgatcgccttgacggtttaaacagctctattgggttaacccttttggagccacacatcaattacacaaacgatgtgtttaaactattagatagagatataaatattaaaggcatggcgcatattactggcggcggtcttgtagaaaacatccctcgcgttttacctaaaaatttatggcaattat

SEQ ID NO: 314060 - DNA, 1057 bp, Unknown
  Bacterial polypeptide expressing nucleotide sequence isolated from the Sargasso Sea
catgaatcctccgaaatccgctcccgacgctcagggtctgtcctatcgcgacgcaggtgtcgacatcgacgcgggcgacgcactcatcgacaagatcaagccttttgcgaagaaaaccctgcgcgacggcgtgctcggcggcatcggcgggttcggcgcgctgttcgaagtgccgaagaagtacaaggagcccgtgctcgtgtcgggcaccgacggcgtgggcaccaagctcaagctggcatttcatctgaacaaacacgacaccgtcggccaggatctcgtcgcgatgagcgtgaacgacatcctcgtgcagggcgccgagccgctgttcttcctcgattatttcgcgtgcggcaagctcgacgtcgacaccgctgcaacggtcgtcaagggcatcgcgcagggttgcgaactgtcgggctgcgcgctgatcggcggtgaaacggccgaaatgccgggcatgtacccggacggcgagtacgacctggccggcttcgcggtcggcgcggtcgagaagagcaagatcatcgacggcagcacgatcgccgaaggcgacgtggtgctgggcctcgcctcgagcggcatccactcgaacggcttctcgctggtgcgcaagatcatcgagcgcgcgaaccccgacctgtcggccgatttccacggccgctcgctggccgacgcgctgatggcgcccacgcgcatctacgtgaagccgctgcttgcgctgatgcagaagctgtcggtgaagggcatggcgcacatcacgggcggcggtctcgtcgagaacattccgcgcgtgctgcgcgaaggcctcaccgccgagctcgaccagaacgcgtggccgctgccgccgctgttcaagtggctgcaggagcacggcggtgtcgccgatgcggaaatgcaccgcgtgttcaactgcggcatcggcatggccgtgatcgtttcggcggccgatgccgacgcagcgatcgccgacctgaccgccgccggcgaacaggtgtggaagatcggcaccgtgcgtgcgacccgcgaaggcgaggcgcagacggtcgtggtctga

SEQ ID NO: 314061 - DNA, 994 bp, Unknown
  Bacterial polypeptide expressing nucleotide sequence isolated from the Sargasso Sea
atgacaaaaaacaaaaataaatataaagacacaggcgttgatattgaagaaggccaaaaatttattgaagacataaaggatctaactaaagaacctattacatcttattctttaagtaacattggaagtttttctggttatattgaaacaccatctgaattttcagaccctgtttatgctttagcctgtgatggtgttggcacaaaaataaaaataggtttaaagctcaataacttaaaaacaataggcatcgatcttgttgctatgtgtgttaatgatctaatctcaagtggtgcaaaaccaactgccttcttagattattatggctgttcaaagttagatagatcaaagggtaaggaaattatttcaggcatcttagaaggttgcaagatagcaggttgtgaattaattggcggagagactgctgaaatgcctaaccactacaccgataataattttgatttagttggtttctcaatgggagttaataacagaaatcaaataattgatggctcatctatagagtcaggtaatgtaatcctaggcttgccctcttctggatttcattcaaatggttattcactaataaatgaaattattaaagacaaggctattgatgattctcttatggaaaaattgttaatcccaacaaaaatatatgtaaatgagattttgtctcttaaagaggtttgcaatatcaatggaatggctcatataactggcggaggcttaaatgaaaacctatcaagaattgctaatggaatgactctatgtattgataaatcaaaatggtcagtgccagaaatttttgaagaaattaaagcgcttggaaatatatcagaagaagaaatgtttaacgttttcaattgtggtattggtttctgcttagttcttgataaagaaaatgctaaaaaagctattgaagaaaattcagaattaatagaaattggatttgtctctgacagagatgaagttgactttaaatttatatgaa

SEQ ID NO: 314062 - DNA, 1030 bp, Unknown
  Bacterial polypeptide expressing nucleotide sequence isolated from the Sargasso Sea
aatgaataaaaaaaaatttacctataaaaaaagtggtgtgaacatcactgctgctgataattttgttaatttcatttctaatgtttcatcaaagaaaaaaggcaaaaaaaagttttcaaatataggtggatttgggtccataaccaatattcctaaaggaataaaccaaccaaaaattgtagcttgtacagatggtgttggtactaaaattgagatcgcaaacacgctaaataagtatgacacaattggtatagatttagtagcaatgagtgttaatgatctaatcgttcaaggtgccaagcctcttttgtttttagactatatttcaattaataaaattgatttaaaaaaactcaaatctataatcaaaggaattcttaagggctgcagattgtctggctgtgaattggttggtggtgagacagctgaaatgcctggtacatatgagaaaggtaaatttgatattgcggggtttgcagtaggtgtagtaagcaaaaataaaattttaaacaaaaataaaataaaaaaaaataatcttatcttagcagtaccatctagtggattgcattctaatggtttctctttggtaaggtatcttataaatcaaaaaaaaattgatataaaaaataataaatttttaaagtcagaacttttaaagcctactaaaatatatgttgatgaagttttaaaattaattgatcagaatttaattaatggttgtgcaaatataaccggcggaggcttgtcagataatatcaaaagaattattccagatgaaatgattgctgatattgatttagatcaaataaaaactttgaatatttttaaatggcttaaaaaaaacggaatatcagaaaaggagatgcttaaaacatttaactgtggagttggattttgtttaataataaattctaaaaatttaaaaaaagtcataaaatatttttcaagagactataggccctatgtgataggtaaaatttctaaaggaaataacaaagttaaattaaatggttcaatcaactggtattaa

SEQ ID NO: 314063 - DNA, 1054 bp, Unknown
  Bacterial polypeptide expressing nucleotide sequence isolated from the Sargasso Sea
ttgaataaaaaaaactctccaataacatattcttcttcaggagttgatattgaaaaaggcaatcaactcgtggaagaaattaaacctataatcagagaaacaaaagtaccaggtgccgatattgaaataggaggttttggtggtttgtttgatataatgaaactaggatttaatgatcctctacttgtatcatctactgatggtgtcggaactaaacttcttcttgcaatagaaagtaataatgttagtggtgtaggaattgatctagtagccatgtgtgttaacgacttaatagtccagggagctcagcctctttttttcttagattattttgcgacaggaattctatcaaaaacaactgctaaagaagttataaaaagtattgcagatggatgtattcagtctaaatgtgcattaattggcggagaaactgcagaaatgcctggtttttacgatgaaaatcattttgatttggctggttttgctgtaggagcagtagaaagaaaaaacttacttccaaaagaagttaaagttaatgatgatataataggattaaaatcatcaggcgttcattcgaatggattttcactagtaagaaaaattctagatgtttctaaaactcaattagattctaatactccatttaatgagtttacttttagtgaagaactcttaaagccaacgagaatttatgtaaaaactatcatttctttgcttaataaaactaacgctattaatgcaattgctcatataaccggcggaggaattacagaaaatttaccaagggtttttagttcaggcaaagttcaggcagaaatttataaagatagctgggaaaaaccagaaatttttcactggcttcaaaatgctggaaatattgaagaatctgaaatgctaaagacatttaattgtgggattggaatgatcctaattgttaatccgaaagaaactaataatttactaaataaacttaaagaactaggagaagaaccttcattaattggaaaaataattcataatgaaaacccagaaactcttgtagtatataaataaa

SEQ ID NO: 314064 - DNA, 996 bp, Unknown
  Bacterial polypeptide expressing nucleotide sequence isolated from the Sargasso Sea
gatgccaacagacgataaagaaaaagaaaataatctagaagagcttagctataagcaatcgggtgttgatgttgatgccggatatgagctagttaagaaaattaaaccgtttgtagagaagacccgaagaccagagattctatctggattaggatcattttctgccttaactagaattccaaaacacatagagaaaccaattcttgtaacttgtaccgacggtgtagggaccaaaatagaaattgctaaagaaatgaataattattcaactataggtattgatttggttgctatgtgtgtcaatgatcttgtggtttgtggggctgaacctcttgtctttctcgattattacgtaacagataaactagacatagaaacggcttcaaaagtcattgaaggcatcgctaaaggatgtgaacaagcaaattgttctttagtcggtggagaaacagcggaacacccaggaagctttccagatgatagtttcgatttggcaggtttttctatgggcgtagtagatgaaaactcgatgataggccaggacgggcctaagaatgatgatgtgctgattggtattgaatcgtcaggttttcattcaaatggttattcgttattgagaaaaataattactgattatcaactagatcttggatctaaaatacaaaaagaggagatcggtaaagtttttttagagcctactaatatttatgtctctgcaatattggctcttaaaaaaattctccaaattaacgcaatagcacacattactggaggagggttttttgagaatattcctagaatgttgaatgaaaatcagaaagcaatcgtaaaccataacttcagtgactggcctgcagggcactactttgaatggttaatgcaactaacaaatatgcctaaagagaacttattaaatacctttaactgtggtgtgggtatggttattgctgttagtcaatcagacgaggaagatgctttagggatattaaatcaatc

SEQ ID NO: 314065 - DNA, 1036 bp, Unknown
  Bacterial polypeptide expressing nucleotide sequence isolated from the Sargasso Sea
gatggactacaaaagcgccggcgttgatatcgaagccggccgccattttgttgaacgcatccgcacgagtgtggaggccacccaccgccctgaggtcctggggggactcggaggctttggcggtttgtgccgtctcccaggtggactgaaaaatcccttgctcgtcgctggcaccgacggggtggggaccaaattggaactcgcccaagactgcagtcgccatcacggtgttggcattgaccttgtggccatgtgcgccaatgacgtcatcacttgcggtgctgagccactgttcttcctcgactacatcgccacaggaaaactcagccctgcggccatggccgaggtggtggaaggaattgccagtgggtgtcgccagagtggctgcagcctgctggggggcgaaacagctgaaatgcctggtttttacccagccggtcgttacgacttagccgggttctgcgtggccgtcgtcgacgagccaaaactcattgatggccagaagattcaaagcggtgatcaactgctagccatcgccagcagcggggtccatagcaatggcttcagcttggtgcgccggatccttgcagccaacgacaccccacttgaggcgagccaagctgaccttgatggacgcagcgcagctgaggccttacttgagccaacccttctttacgcgcctctggtaaaagccctgctgcaaagcccaggcctagacctgcgtggcatggcccacatcacgggcggggggctgcccgaaaacctgccgcgcgccctacccaaaggagtcgccgccaggatcgatccgggcagttgggttcgtccgagcctgttcagctggttacaaaagcttggatcggtaccagaacgcgatttatggcacaccttcaatctcgggatcggctacgtcctggtgatcccaccgaagagctgccagcaagccctccaagtggtgaaagacagcggctttgaaggctggatttgcggcgaaatcattccaggcgagggcgtccatggcctgcccgcaggggcctaa

SEQ ID NO: 314066 - DNA, 1027 bp, Unknown
  Bacterial polypeptide expressing nucleotide sequence isolated from the Sargasso Sea
atggctaagagagataaagaacataaagaattgagctacaaaaaatctggtgttgatgttgaagctggatatgctcttatagataaaattaagccttttgtggaaaaaacaaaaagaccggaaatcttgagtggacttggttccttttcagctctgagtagaataccaaaacatataaagaatcctattttagtgacttgcacagatggtgtgggcacaaagatcgaaatagcaaaggaattaaataattttgatagtattggtattgatcttgtagctatgtgtgtcaacgatttgatcgtctgcggagcagaaccactcgtatttttagattactatgtaactgataagctgaaagttgaaactgctgcagatgtcatcaaagggattgcaaaaggttgtgagctagcaaattgttccttggtaggcggtgaaacagcggagcatcccggtgcctttcctgaaaatagttttgatcttgcagggtttgcactaggtgttgttgaggaaaccgagattttgggtatagaaggtcctaaaaatgatgacattttaattgggatagaatcctctggttttcactctaatggtttttccttaatccgtaaggctataaatgagtttgatattgatctagaaaaaaaaattggacgtgaaaaactagggaacatacttctaaaaccaactcatgtgtacgtaaatgaaatcttagctttgaaaaaaataacaagtatcaatgccatagcacacataacaggaggtggattcgatgaaaatattccacgtatgcttggagaaaatcaaaaggctattattaaacatgactttgatgattggccttctgggaaatatttcaaatggctaatggaaacaactggtatacctaaagagaatctagttaatacatttaattgcggtgtaggtttgataatctctgtaaataaatcaaatgaagaggatgttttaggtgccttgaatcaatctttgtttgcaaaaacattggaaaagttcaagaaaaagaactgaa

SEQ ID NO: 314067 - DNA, 664 bp, Unknown
  Bacterial polypeptide expressing nucleotide sequence isolated from the Sargasso Sea
atgaaaaaattatcatactcaagttctggtgtaagtatcaacaaaggaaatgagtttgtaagcaaaattagcaacttaatcaaaaaagataaaggtcttattaaggctgaaatcggaggattctcaggtcaattccccttaagcactaaaattaaaaagcctatactagttggagcaacagatggcgtaggaacaaaaattcaaattgcagaggaaatgaatgaccataaaacaattggtatagatttagttgccatgtgtgtgaatgacttgattgttgataaagcaactccattattttttttagactacatctcaactggaaaattaaatatatctaaaggtgttgatataattaaagggataataaaggggtgtaaaatttcacattgtgctttacttggtggtgaaacagccgagcatccaggatatgatactaaggaaaaatatgatttagctggtttttgtgttggagtaaaaagtggtatttcgaagaaagttttacaattaaaaaaaggtgatcttatcattgggattgagtcctctggaatccactccaatggcttttcactgattcgtaaaattataaaggataataatattagtctgaaaaagaaaattatcaaaaatagtacattagggaaaatattattaaagccgacgc

SEQ ID NO: 314068 - DNA, 1039 bp, Unknown
  Bacterial polypeptide expressing nucleotide sequence isolated from the Sargasso Sea
atggactacaagagcgccggcgtcgacgttgaagcgggtcgcgccttcgtggaacggatcagaacctctgtggaggcaacccaccgacccgaggtgatgggaggcctcggcggctttggcggaatgatgcggcttccagaggggctgcgccagcccctgctggtggccgggacggatggagtcggcacgaagctcgaactggcccagcagcaccacgggcatcacggtgtcggcatcgatctggtggcgatgtgcgtgaacgacgtgatcacctccggcgcctcccccctgttcttcctcgattacatggcgacgggcgccctctcccctgacgccatggccacggtggtggaaggcatctccgcgggctgccgactcagcggctgtgccctgctggggggggaaaccgctgagatgcctgggttttatccagatggccgctatgaccttgcaggcttctgtgtcgccgtcgtcgaggctgaggacctgatcgatggaagcagcatccaccccggtgaccgggtcatcggattggccagcagcggtgtccacagcaatggctacagcctcgtccgcagggttctggagcggatggaggccgacgcttccaccgtctacggctcacaacagcggccgctgatcaaggacctgctgacgccgacgcagctgtatccaggcgtggtgcagagccttctgaagaacggactgactatcaacggcatggcccatgtgaccggaggtggattgccggagaacctccctcgctgcctgcccgaggcgacacgcatcgccattgacccaggaagctggccgcgaccggatctgttcgcatggcttcagcaggcaggagacatcccggaacgggacatgtggcacaccttcaacctcggcatcggttactgcctggtggttccctccgatcaggagaacgccgtgctggacctttgccgtgagcagcagcagcaggcctggagcatcggggaagtcctctcccgagcagcgggtgatccacctgagatcagcggaattcctcagtaat

SEQ ID NO: 314069 - DNA, 672 bp, Unknown
  Bacterial polypeptide expressing nucleotide sequence isolated from the Sargasso Sea
aatgaataaaaaaaaatttacctataaaaaaagtggtgttaatatcaatgcagcagataattttattaatttcatttctaaagtttcatcaaagaaaaaaggcaaaaaaaagttttcaaatataggcggatttggctccataaccagtattcctcacggaataaaccaaccaaaaattgttgcttgtacagatggtgttggtactaaaattgagatcgcaaacatgctaaataaatatgacaccgttggtatagatttagtagcaatgagtgttaatgatttaatcgttcaaggtgccaagcctcttttatttttagactatatttcaattaataaaattgatttaaaaaaacttaaatcaataatcaaaggaattcttaagggctgtaaattgtctagctgtgaattggttggtggtgagacagctgaaatgcctggtacatatgaaaaaggtaaatttgatatagcggggtttgcagtaggtgtagtaggcaaaaataaaatcttaaccaaaaatagaattaaaaaaaataatcttattttagctgtgccatcgagtggattgcattctaatggtttctcattggtaaggtatattattaatcaaaaaaaaattaatataaaaaataataaatttttaaaatctgagctgttaaagcctactaaaatata

SEQ ID NO: 314070 - DNA, 934 bp, Unknown
  Bacterial polypeptide expressing nucleotide sequence isolated from the Sargasso Sea
atgacaaaatatacttatagtaaatctggtgttgatataaataagggtaacaaattcatcgaaaacatcaaaaaaacaattaaaagtgataagaataaatcatcaaaagcatcagttataggtggttttgcaggacattttaaacttaacagcttaaaaaacagtccttatttggtagcagctacagatggagttggaacaaaacttgaaatagcaaacgacatgaataatcataaaacaattgggatagatcttgtagctatgtgtgtcaatgatattgttgtaacaggcgcaaagccgcttttctttctagactatattgcaacaggaaagctggatcttaaaaaaagtacagatgttattaagggtatccttaaaggttgtaatcaagccggctgtgagttactaggtggtgaaacagctgaaatgccaggattttactcaaagggaaagtatgatattgcaggttttagtgttggtattttagagcaaagagatattaaaaaaataaaggtgaaagaaaatgatgtagtaattggcatcaagtcatcaggtttacattctaacggctattctttagtaagaaatattattagagataaaaagatatctctaaaaaaatattttgattttgataaaaaaaaatctattggcaactatcttttgcaaccgacactaatttatgtagatttaatcttagagctttataaaaaaaatctaattaaatcctgtgcccatattactggtggaggcataattgaaaatcttccaagaattttagataaaaaatttcaagctcaaatcgaccttgataaatgggatttgggaaatctatataagtggcttatttcatgcggaataaatcaaagggaaacttctagaacatttaatgctggctatggaatgacttttattttagataaaaaaatataaa

SEQ ID NO: 314071 - DNA, 804 bp, Unknown
  Bacterial polypeptide expressing nucleotide sequence isolated from the Sargasso Sea
ttaataaatttgacacaataggaattgatcttgttgcgatgagtgtaaatgatcttatcgtgcaaggtgccaaaccacttttttttcttgattatatctcaataaataaaattaatttatcaaaattaaagtcaataataaaagggattgtcaaaggttgtgttatatcaaattgtgaattagttggtggtgaaacggcagaaatgccaggaacatatgaaaaaggtaaatttgatattgcgggttttgcagtaggactagttgatgaaagcaagatactaaaaaaaaacaaaataaaaaataatgatttaattttagcagttccatcaagtggtttacattcaaatggatattctttggtaagaagtattattgctaagaaaaaaattaatattaaaaaaaatagatatttgcaaaaagaattaatcaaaccaacaaaaatttacgtcaaagaaattttaagtttaatcaataaaaatcttataaatggatgtgcaaacattacaggtggtggtttacctggaaatatcggaagagtaattcctaatgggtattgtgccagtataaatttaaataatattaaaccacttaagatttttaaatggttaaaaaaaaataatattaaagataaagaaatgttaaaaacatttaattgtggtgttggcttctgtttaataattaaaccaaaaaatcaaaaaaaaattattaattattttccaaaaaactttaaaccatatttaattggtaaaatagttaaaaaaccatataaggtgaaactaaatggtaaaatcaattgggaataaa

SEQ ID NO: 314072 - DNA, 1024 bp, Unknown
  Bacterial polypeptide expressing nucleotide sequence isolated from the Sargasso Sea
atgacaataagttacaagaaagccggagttgacataactgaaataaaaaaaagtcaacgtgcaattggtaaactgattggctcaactcataatttacaaaaaatggcaaagatgacacatggatttggacattatgcaggaattgttgagattccaggtggaaaattattagcaacacatactgacggagtaggaaccaaagttatgattgcaaatttaatgaaaaaatatgatacaattggaatagattgtattgcaatgaatgtgaatgacattatttgtataggtgcaacaccaatttcatttgtagattacattgctgcaaacaaaaatgatcaaagaattttcaaacaaatagtatcaggattagttaaaggcgcaaaaaaatcttcaatgccaattgtaggaggagaaactgcaattatgtcagatttgattgcaggcaaaggttttggatttgatcttgcaggaatggttgtgggaatgctttcaaaaaaagacatggtattaggagataaaataaaaccaaacgatgtaattataggaattaaaagttcgggattacattctaacggatattcattagcacgtaaagcacttttaacaaaatattcagttaaagacaatatcaaaggaattggaaatttaggaaatgcacttttacgtccaacagagatttacgtcaaaccagttttagaagcagtgaaaaaatgtaaaattcacggattggcacacattacgggaggatcatttacaaaattattgagactgaaacaaattggatataacttggacagtatgcctaaaactccagcattgatgcaattaattgaagattcaggagtgaaaaatgaggaaatgtacaagacattcaacatgggaataggattttgtgttatcgctccagagaatcaagccaaaaatattcacaaaattttcaagaaacataagacaaaatcttatgaaatcggtagaatcagtaaaaacaagggcgtttttattaataaattgaaaattgcataga

SEQ ID NO: 314073 - DNA, 1015 bp, Unknown
  Bacterial polypeptide expressing nucleotide sequence isolated from the Sargasso Sea
atgaaaaacgatccctataagaaagctggcgttgatataaaagcaggaaatgatttagtagataaaattagaaaagatgtagctagtacttttgataaaaacgtattgggcgggattggaagcttttcaggtttttattctcttcctaaaggttttaaaaatccagttcttgttgcttgcacagatggagtgggcactaaagtcgccctagcccaaaagaattcttcattgggaactattgggcaagacttagttgcaatgtgtgtaaatgatatggttacttctggagcacatccactattttttcttgattattttgcttcctcaaaactcaatgttacagaaacagcaacagttataaagagcattgctaaagcatgtaaaaaaactaattgttcactaattggtggtgagactgctgaaatgccaaaccattatatcggcaaaaattttgatttagctggattttcagttggcattgttgaaaaaaaactaatcattgactcttcaaaagttagaaaaaataacatcataatcggtattgaatctagcggagctcattctaatggttactcattaatcaataaattaattaaggaatcaaaattaagtaagagtgaaaaaatgaaattaattaagcttgctttgaagcctactcatttatatacaaatgtaattttggatttggtaaaaaaagttaaagttaagtcaattgcgaacattactgggggcggtctaacagaaaatattcccagatcaattcctaataccctatcatctgaaatatatttgagtaactggaaaatgccggtgctcttttcaattcttcaagaattaggaaaaatccaaataagagatatgttgagaatatttaattgtggaattggaatgactttagttattgagcctaaggatttcgataccaccatgaaagtactttccaagcataaatttaaaggcttcatgattggaaaagttgtaaataaatcttcatcagaaataacttttctttaat

SEQ ID NO: 314074 - DNA, 513 bp, Unknown
  Bacterial polypeptide expressing nucleotide sequence isolated from the Sargasso Sea
tttgatagccacggaggatacaataaaagaagaacaaccatcaccgaaactatcataccagagctccggcgtcgatatcgagaacggcaaccaacttattgaattgataaaacctataacccgctccaccgcacgaccaggagctgatggtaaaattggaggttttggcggtatttttgatctaaaagccgcgcattatcgtgacccaatactagtagccgcaaacgatggggtgggaaccaaattaaagcttgcaattgagacgaataatcacaaacaagttggtattgatttagtcgcaatgtgtgtgaatgaccttgtagtccaaggtgctgaacctttattttttttagattactatgcaaccgggaaattatcactgggttccgcaaaagaagtgataaatggtatcgctgaaggatgtctaacggccggctgcgccttgataggaggcgaaacggctgaaatgccggggatgtataatggtaacgattatgacctagcagggtttgc

SEQ ID NO: 314075 - DNA, 856 bp, Unknown
  Bacterial polypeptide expressing nucleotide sequence isolated from the Sargasso Sea
catggattacaaaacatcaggtgttgatatagaagctgggcgagaatttgtttccgaaattaaacaggcagttgagggaactcatacatctaatgtgattgagggtattggcgggttcggaggtttgtttagaattcctatcgatagttttaaaaaaccagttcttgtttcagggactgatggtgttggaacaaaattagaattagcccaaagtaaaaactttcattttgaggttggtattgatttagttgctatgtgcatgaacgatatcattactagtggagcaaaacctttattttttttggattatattgctaccggtaagcttgataagaaacaattattgagggttgttcagggaatttcacatggatgtggagaaaataactgttcattactcggcggagaaactgctgaaatgcctggattttattcaaaaaataagtatgatcttgcaggattttgtgtaggaatagttgatgaggataaacttattaatggcaaaaaagtctctgaaaatgacttaataattgctttaaaaagtaatggagtacatagtaacggatttagtttagtaagaaaaattattcaaaacaataatcaaatagataaagaatttgaaaaagtttctcacttaaatttttatgatgagttattgaaacctacaaaaatttacaataatgtgattacccaaatgttatctgaagatatagaaattaaagcaatgtctcatataactggaggaggaattccagaaaatttaccaagatgtattccttctgattttattccttatatcaataccagttcttggcaaatacctattttatttaaattccttaaagagaaaggatct

SEQ ID NO: 314076 - DNA, 658 bp, Unknown
  Bacterial polypeptide expressing nucleotide sequence isolated from the Sargasso Sea
tatgacaacatataaagaagcaggtgttgatatagaaaatacagatgcccttgttgaagatatttctgagctaagcaaatcaactaacagaaacggaaattttgataaaattggcggatttggtggtatttttgatcttaaaaattgtggatatgaagatcctttattggtttctggtacagatggcatagggacaaaaatattactagggattgaaactgacattttagatggtttgggtcatgatcttgttggtatgtgccttaatgatattctttgccacggggcagagccattattttttttagattactatgcttcttctaagattgataaaaattcttttttaaaaattatgaaaagcatcactgaagcttgtaagataaataattgttctcttattggtggtgaaacagcagagatgcctgggctttataaaaaagacgattttgattttgctggattttgtgttggtgcagtagagagaaaaaaaattctacctaaaagagatgtcatgaaagaagatgatcttctatatgggattagatcttctggctttcattcaaatggatattctctcattcgaaaagtattaaaagataaaaatatagatctacataaagaaacagaatttaaatcatcttatgaaacaaatgca

SEQ ID NO: 314077 - DNA, 736 bp, Unknown
  Bacterial polypeptide expressing nucleotide sequence isolated from the Sargasso Sea
atgggggcaaggccggttacttttcttgattatattgccaatgacaaattaaaaccatctgttataaaagatattatttcgggaatggttgtggcgtgtaaaaattctaatgtttctttggttggtggtgaaacagctgaaatgccagatacttatttgcctggagaacatgatttggttggggtaataacaggcttagttgaaaaagataaaattataagtggggacttaatttcggcaggcgacgttgttttaggcttgccatccagcgggcttcacacaaacggatactccctagctagaaaagtgttttttgatgttgggggttatggaattaacgatcgccttaacggtttaaacagttctatcgggttaacccttttggagccacatatcaattacacaaacgatgtttttaaactattagataaagatataaatattaagggcatggcgcatattactggcgggggtcttgtagaaaatatccctcgcattttacctaaaaattgtatggcaattataaataaagacgcgtggagcgttctgcctgtatttaacgcaatacagtctattgggagcatagatgaatcagaaatgtttcgaacgtttaatatgggtattggaatgatatgtatagtctcaagtgattatgtctctagtataaaacaattgattagagttcgtgaaattgggaaaattgtaagtggcgatggtgaggtaaaaatagtttaat

SEQ ID NO: 314078 - DNA, 1084 bp, Unknown
  Bacterial polypeptide expressing nucleotide sequence isolated from the Sargasso Sea
atgtctactataaaaagtaaaaaaacaaaaacatatattgatgctggagtaaatatcgatataggcgatcaattcgtagatgagattaaacctttagtcaaaaaaacgaatacgtttggtgcaaaagcatcactgggtggttttggtggtatttttgatttgtcaaaattatcattaaaagaaccgcttttaatttcttcaactgatggagttgggactaagctcgaaattgcaattaagatgcaaaaacacgatacaataggcattgatttagtagcaatgtgtgtaaatgatattcttgctgaaggcgctcagcctcttttttttctagattattatgctactggaaaattagatttaaacatatcaaaagaaattttaaaaggaatcgtaaaaggctgtatacaagcagaaatatcattaataggcggagaaactgctgaaatgccaggaatttatcaacaaaatatttatgatcttgctggcttttgtgtaggtgcaattgaaaagaaaaaatattatagcagggaattcataaaaaaaggtgatattgcaatagctttatcttccagtgggattcattcaaatggattttctatggtaaggtcaattttgaaagataatgatatcagtctttatgatgctgatccttttgaaaaatccaaaactattggtgagacacttttagaacctaccaaaatttatacaaagtttctaaacaagcttaacgcacttaatttaattaaaagatctgtcaatattacaggaggtggattaatcaaaaatcctccaagagtgtttgatgataaccttacactaaaaattaacgttaataattggcacttaccaaaagagtttaaatggttaaagaaaaagggtaatttaagcacctttgaaatgctaaaagtatttaattgtggaattggaatgattgtattagtagaaaaagattatgtggatgaagtaattcaatacgcaaataatggcaatgaaaattgctttgtaataggtgagatggttgagaaatgtgaaagttcagtattttttgaaggaaaccttaaaaaatggtcaacaatgggatagt

SEQ ID NO: 314079 - DNA, 490 bp, Unknown
  Bacterial polypeptide expressing nucleotide sequence isolated from the Sargasso Sea
aatgaaaaacgatccctataagaaagctggcgttgatatcaaagcaggaaatgatttagtagacaaaattagaaaagatgtagctagtactttcgataaaaatgtattgggcgggattggcagcttttctggtttttattctcttcctaaaggatttaaaaatccagttcttgttgcctgcactgatggagtgggtactaaggtcgccctagcccaaaagaattcttcattgggaactattgggcaagatttagttgcaatgtgtgtaaatgatatggtcacttctggagcacatccgctattttttctagattattttgcttcctcaaaactaaatgttactgaaacagcaacagttataaagggcattgctaaagcatgcaaaaaaactaattgttcacttattggtggcgagactgcagaaatgcccaatcactatatcggaaaaaattttgatttagctggattttcagtcggtattgttgaaaaa

SEQ ID NO: 314080 - DNA, 736 bp, Unknown
  Bacterial polypeptide expressing nucleotide sequence isolated from the Sargasso Sea
tatgggggcaaggccggttacttttcttgattatattgccaatgacaaattaaaaccatcagttattaaagaaataatttcggggatggttgtggcatgtaaaaattctaatgtttctttgattggcggtgaaacagctgaaatgccagacacttatttgcctggagagcatgatttagttggagtaataacaggcttagttgaaaaagataaaattattagtggggacttaatttcagcgggcgacgttgttttgggtttgccgtccagcgggcttcacacaaacggatactccctagctagaaaagtgttttttgatattgggggttatggaattaacgatcgtcttgacggtttaaacagctctattgggttaacccttttggagccacacatcaattacacaaacgatgtgtttaaactattagatagagatataaatattaaaggcatggcgcatattactggcggcggtcttgtagaaaacatccctcgcgttttacctaaaaattgtatggcaattataaataaagacgcgtggagcgctctgcctgtttttaacgtaatacagtctattggcagcatagatgaatcagaaatgtttcgaacgtttaatatgggtattggaatgatatgtatagtctcaagtgatgatgtctctagtataaaacaattgattagcgttcgtgaaattggggaaattgtaagtggcgatggcggggtaaaggtagtttaa

SEQ ID NO: 314081 - DNA, 847 bp, Unknown
  Bacterial polypeptide expressing nucleotide sequence isolated from the Sargasso Sea
atgaataaaaatctctttacctataaaaaaagtggggttaatattgatgctgcagataaatttgtaagtttcatatctaatatttcatcaaaaaaaagaggcaataaaaagaatgctaatattggtggctttggttcagtcacagatttgccaaaaaatataaaaaatccaaaaatagtggcttgtactgatggagtgggaaccaaaatagagatcgcaaacttactaaataaatatgacactataggaatagatctagttgctatgagtgtaaatgatttaattgtacaaggagcaaaacctttattttttttagactacatttcaattaataaaattgatttaaaaaaaatgaaagcaataattcgtggaatagttaaagggtgtgatattgcagaatgtagtttggttggtggtgagactgccgaaatgccagacacttatgcaaaaggtaaatttgatatagctggtttcgctgttggaattacagataaaaaaaaaatactttataaaaataagattaaaaagggagatttaattttagctgttccatctagtggtttacattcaaatggtttttcacttgttaggcatttattaaaaataaaaaaaataaatataaagaaaaatatttttctccaaaaagaattaataaaaccaacaaaaatttatgtaaaagaaattttaaatcttgtaaaaagaaatttattaaatggttgtgctaatattactggtggtggattagctgataacattagaagagttgtacccaataacttgtctgtagaaatagatttgaataaaattaaaccccttaagatttttagttggcttaaaaaacaataat

SEQ ID NO: 314082 - DNA, 1045 bp, Unknown
  Bacterial polypeptide expressing nucleotide sequence isolated from the Sargasso Sea
aatgaagaagctatcatactcaagttcaggcgtaagcataaataaaggaaataaatttgtatctgaaattaaaaaaataattcgtaaagataaaaatcttaaaaaatccaatattggtggtttttcaggtcaatttgttcttgattcaaaaattaaaaaaccgattcttgttggtgctaccgatggagttggaacaaaaattgagattgcccgtatgatgagagaccataagacaattggcattgacttagttgccatgtgcgtgaatgacttaatagttgatcaggctaaacctctttttttcttagactatatttcaactggaaaattagacatatctaaaggtaaagaaattatagggggtattattaagggatgtaaaatgtctaattgttcactgctaggtggagaaacagctgaacatccagaagttgattcaaacgataaatatgatcttgctggattttgtgtaggagttaagagtggagttgccaaagcaagtccaaaattaagagaaaatgatattattgtaggaatttcatcatcaggtcttcactctaatggatattctcttgttagaaagataatcaaagaaaacaaaataaaattaaataagaagatagaaaaaaataaaaccattggtgaactattactcaagcctacagagatatacgtaagtccaatacttgaaatgtactcaaaaaaaataataaaaacatgcgctcatattactggtggaggaattacagaaaatttaccaaggtcactaaataaaaatgtttcagcaaaaataaatttagaaacctttaatttgccaacaatattcaaatggatacaaagttttggggtatcgcaaaatgaaatgttaaaaacatttaattgtggatatggtatgatagtaatcttagatagaataaagtttaatcagtttgaaaaattaattaaaaaatacaaactcaaatacagtgtaattggtaatttagtgaattcaaaaaaaataaataaaaaagttagttatattggcaaattaaattttaatgtataa

SEQ ID NO: 314083 - DNA, 976 bp, Unknown
  Bacterial polypeptide expressing nucleotide sequence isolated from the Sargasso Sea
ctgataaatttacaaaattttgttgctaaatattcaaaacatgcattcaaaaataaaaaagatttgcttgctcaaggaattggagggtttggtgctgttcataatttttataaacttaaatttaaaaatccacttttagtttcttcaactgatggcgttggaacaaaaatcgaaattgcaaataagctaaataaatttgatacgattggaatcgaccttgttgcaatgtgtgtgaatgatcttatagttcagggtgctaaacctttattttttctagattatatagctgtagaaaaaatcaatttaaaaaaagttaaagcaattattaaaggcattgttaaaggatgtaaaatatctaattgcatattagtcggtggagaaacggcggagatgccaggaacctaccaaaataataaatttgatcttgctggtttttctgtaggtgttgtagaaaaaaataaacttattcacaagggtaaagtaagaaatagagatgttgtattagcgataccttctagtggtctacactcaaatggtttttctttagttagacatattttaaaaaaacaaaaaattaataaatttttaaaaaaagaacttttagaaccaacaaaaatttatgtagatcccgtaataaaactttgtgaaaaaaaattaatacattcttccgcaaatattacagggggaggtattgttgaaaatatttcaagatctatccctgataaactaactgctaatatagatttatctcgaataagagttactaaaatatttaaatggattaagaaaaaaaatatttctgaaagtgaaatgttaaaaacttttaattgcggtgttggtttttgtttaatagctgaaaggaaaaagattaatattataaaaaaattatttgaaaaaaaatacaaaccttatgaaataggttttatttctaaatcatctaaaaaaataagattatttaataaagtgaaatggtaaa

SEQ ID NO: 314084 - DNA, 942 bp, Unknown
  Bacterial polypeptide expressing nucleotide sequence isolated from the Sargasso Sea
aatgaaaaaaaacttatttacctataaaaaaagtggcgttgatattaaagctgctgataaatttgtaaaattcattgcatctatttcatcaaaaaaaaaaggcaaaaaaaagttgagtaatatcggtggttttggatcaataaataatattcctaaaaatttaaaaaacccaagtattgttgcttgtactgatggagttggaactaaaattgagatagcaaaccttataaataaatatgatacaataggaattgaccttgttgcaatgagtgtaaatgacttaattgtgcagggcgccaaaccactattatttttagattatatttcaataaataaaattaatttatcaaaattaaaatctataattcatggaatagtaaaaggatgtaaaatttctggttgtgaattagttggaggtgaaacagcagaaatgccagaaacatatgataaaggtaaatttgatatagctggttttgctgttggcttagttaataaaaataaaatattaaataaaaaaaaaataaaaaaaaatgatattatattagccataccatcaagtggccttcattctaatggtttttctttagtaagaaatattttaaaaaaaaaaagaattaacataaaaaaaaatatttatttgaaaaaagaattaattaagccaactaaaatatatgtagaagaagtattaagcttggtcaaaaataacttaattaatggttgtgctaatattactggtggaggtttacctgaaaatataaaaagagtaataccagatggtctttgtgcagaaattgatctaaaaaaaataaatacacttcaaatatttcgatggttaaaaaaaaataatatttctgatatcgagatgttaaaaacatttaattgtggtgttgggttttgtttaataataaatccaaaaaatataaataagataaataaattttt

SEQ ID NO: 314085 - DNA, 573 bp, Unknown
  Bacterial polypeptide expressing nucleotide sequence isolated from the Sargasso Sea
gatgacttcagataataaagattcaaaactagattataaaaaagctggcgtagacgtggatgccggttatgaactggtagataaaataaaaccttttgttaaaagcactaaaagacctgaaatattatctggattaggttccttttcggcactaagcagaattccttcacatatcaaaaatcctcttttggtaacttgtactgacggtgttggaactaagatcgaaatagctaaattagaaaatagatttgagaatattggaatagatcttgttgcaatgtgcgtcaatgatctaatagtttgtggtgcagaacctttattgtttcttgactattatgtaacggataaattgcaagttgatatcgcaagtaaagtcatagaaggaatagcggaaggatgcatattagctaattgctcattagtaggcggcgaaacagctgaacatccaggaagttttcctgaaaatagctttgatcttgctggtttttctttaggagtcgttgatgaagaagagatgattggaatggatggtcctaaaaatggagatatccttataggtgtttcttcttctgg

SEQ ID NO: 314086 - DNA, 1042 bp, Unknown
  Bacterial polypeptide expressing nucleotide sequence isolated from the Sargasso Sea
catgaaaagcactgcctaccagcaggcaggtgtcagtctggatgctgctgatgaggtggtggacaaggtgaaacccttggctcaaaggactttcagacccggggtgattggagggctcgggggctttggagggttgtttcatctcgatccaaacaaatggaaaaacccggttcttgtttcaggaaccgatggggtcggaaccaaactcaaactggcttttgaactggaaaagcacgacaccatcggaattgatctggtggcaatgtgtgttaatgacattctggtccagggtgcggaaccgctttattttctggattatctagcatgcggaaagctgtatccggataaagtagctaccatcgttagcggaatcagtgaaggctgcaggcagtccaattgtgctttgatcggtggcgagacggcagaaatgcctggaatgtattcaggcgaggactacgatcttgcgggatttgcagtgggagtggtggaaaaggaaaagctcatcaacggagaaaaaatcctgccgggcgatcaactgatcggacttccttccagtggtatccacagcaatgggttctccctggttcgaaaaattctggaagataactccctgcacctgaatcagagcatggacgctcatgtttcttctggtcaaaaaacccttggagaggttttgctggaacccaccagaatctacgtcagaccattattaaaactgatgcaaaccattccgataaaggggatggttcatgttaccggagggggactgccaggaaaccttcctcggatgttgcctgagggtgccgcggttgagttggactccggaagttgggaaaaccttcctgtttttgattggcttcaagaaaaagggaatctcagtaaagaggagatgcttccggttttcaacatgggcatcggttttgtgatttgcctttccccggaacaccttgatcaagttttttcaattttacatcaagaaggtgaacaaccggtgaccatcggaaaagtgatttccggaaaccgtcatgtgatcatccattaa

SEQ ID NO: 314087 - DNA, 1054 bp, Unknown
  Bacterial polypeptide expressing nucleotide sequence isolated from the Sargasso Sea
cttgcgtaaaaaaaactctccaattacttattcatcttcaggtgttgatattgaaaaaggaaatcaacttgtagaagaaatcaagcctattataagtaaaacaaaaattccaggtgctgatatagatataggaggttttggcggtttatttgatataatgaaattaggctataatgaccctcttcttgtgtcatctactgatggagttggaacaaaacttcttctggccattgaaagtaagaatgtaactggagttggtattgaccttgttgcaatgtgcgttaatgatttaattgttcaaggcgctcaaccattatttttcttagattactttgctacgggcgttctttcgaaatcaaccgctaaagaagtaataaaaagtattgcggatggatgtatacaatctaaatgcgcattaattggaggagaaactgcggaaatgcctggtttttatgacaaagagcatttcgacttagctggattttctgttggcgcagtagaaagagagaagttactcccaaaaaagattgaaattggtgatgatattattggactaaagtcctccggcgttcactcaaacggattttctcttgttagaaaaattttagatgtttcaaaaacacaattagatgataacacatcttttaatgatctttcatttagcgaagagctattaaaaccaacaagaatatacgtaaaaactataatgtctcttttagggcaaactaatgcaataaaagctattgcacatataacaggcggaggaattacagaaaacctaccgagagttttcagttcaaatgaggttggagcagaaatatataaagacagctggaagagaccaggtatttttaattggcttcaaaaaacaggaaacattgaagacattgaaatgctaaaaacatttaattgcggtataggaatgattttagttgttaatccaaatgagactaatgacatattaatggaattaaaaaaattaggcgaagatccctcattaattggtaagatagacgattctaaaaatctaaactgtccggtagtttataaataa

SEQ ID NO: 314088 - DNA, 967 bp, Unknown
  Bacterial polypeptide expressing nucleotide sequence isolated from the Sargasso Sea
attgccaaacgaggatttcggaaaacaagggagtatctcgtatagagacgccggcgtggacataaatgctggctcaaaacttgtagaccggataggaccggtagtaaaggctactcagaatactgatcttcaattaagcagcataggtggtttcgccgctctcacacagctgcccgcacattacaagcaaccagtcttagtgtctggcacagacggagttggcactaaactggaattagcagaaaaatttggccggcacgaaaccatcggtcaggaccttgttgcaatgtgtgtgaatgatgttttagtttgcggaggtgaacctttaatttttctggactacttcgccactggcaaactcgatattgaccttgccgccgaggtcatcaaaggcatagcaaagggttgtcaaatagcaaagtgctctcttgttggcggagaaaccgctgagatgcccggtttttaccagggttcacaatacgatctagctgggttttgtgtgggaatcgtagaaaaagacaaaatcattaatggagctgaaataacaaaaggcgacaaaatcatcggtctgccaagcagcggtccccatagcaacggattttccttaatccggaaaatcctagagctgaaagaaatcgaaagttcagatctcattgatgagatgatgaaccctacaaaaatctacgtgcgcagcgtgcttgctcttttacagaaaataaaggttaaagggatggtccatattacaggtggggggttttatgaaaatatccgaagaatcctacccaaccaacatctatcagcaaacattgatctctcagcttgggagagacctcaaatttttagatggcttcaagatgcaggacgcgtcgatgaacgcgagatgctaacaactttcaattgcggcatcggttacctaatcatagtgagttcaaaggacgttgaaaaaacaacagaaattttagcgctc

SEQ ID NO: 314089 - DNA, 961 bp, Unknown
  Bacterial polypeptide expressing nucleotide sequence isolated from the Sargasso Sea
tatgaaaaaaataaattacaaatcagctggggttgatattgatgccggtaatcaagcggttgataagataaaaggaaaggttggctctacattttcaaaaaatgttttgacaagcataggaggatttggttctctttatagtttaaaaaaattgctaacagagtataaagaaccaataatggtgcaaagtattgacggcgtaggaaccaaaacgattattgctagaaaaatgaaaaaatatgatacaattggtatcgatttattaagcgcagccgctaatgatatattagtaatgggagccaagcctataacgtttttagactatatagcaaatgataagcttgacccagatgttattgatcaaattgttagtggaatggtcattgcatgtagagaaacaggtgtttcactagttggtggtgaaaccgctgaaatgcctgacacatatctcccaggcgagcatgacttagtaggggtcataactggggtagttgataaagaaaaaattattgatggaagcaaaataaagtgccacgatagtattttagcaattccatctaatgggcttcatacgaatggatattcattggcgcgcaaattatttttcgatatcgggaaatatgacgtaagagatgaaattccgaagcttgaaaaatcggttggtttgacattgcttgaaccacatatcaactatacaaaccacattaataatcttgtcaaaagtgatattgagataaaaggtattgcgcatataactgggggtggtctaatagaaaacattccgcgtattcttcctgatttatgtgctgcaaaaatcgatcatgattcatggccaattttaccaattttcaatgtaatgcaatcgataggttctattgatgacgatgaaatgtttagagcttttaatatgggtgtcggaatggttttaattgttgatcctgaattggaaagtcgtgtaata

SEQ ID NO: 314090 - DNA, 1060 bp, Unknown
  Bacterial polypeptide expressing nucleotide sequence isolated from the Sargasso Sea
atgtacccgagaggatcctccgtgagcactcctaccccactgagctataaagacgctggcgttgatattgatgctggtaatgcactggtaaataacattaaagcggctgttaaacgtacccgtcgtccagaggtaatgggcaacttaggtggttttggcgcattgtgtgaattacccactaaatacaagcaacctgttttagtgtcaggcaccgatggtgttggtactaaattgcgtttagctatcgattacaaaaaacacgacacagtcggtatcgacttagtggccatgtgtgtgaacgatttgatcgttcaaggcgctgagccattgtttttcctcgattactacgcaacaggcaagctcgatgttgaaacagcaacttctgttgttaacggcatcggcgaaggttgtttccaatctggttgtgcgttaatcggcggcgaaaccgctgaaatgccaggcatgtatgaaggtgaagattacgacctcgcaggtttctgtgtgggcgtggttgaaaaggccgacatcattgacgggagtaaagtggccgcgggtgatgcactgatcgccttagcttcaagtggtcctcattcaaatggctattcattaattcgtaaagtattagaagtcagccaagcggaccctcaacaggatctcaatggcaagccattgatccaacatctgttagaaccaaccaaaatttacgttaaatcattgctcaagctgattgaagcatcagacgtgcacgcaatggcacacatcactggcggcggtttctgggagaacattcctcgcgtactgcctgaaaactgcaaagccgttatccaaggtgattcatggcaatggccagctgttttcaattggttaatggaaaacggtaacattgcagaatatgaaatgtaccgcacctttaactgtggtgtaggcatgatcgttgcgctgccagccgataaagtggatgccgcacttgcgctgcttgcagcggaaggcgaacaagcatggcttatcggtgctatcgctgctcgcgaaggtaatgaagagcaagtggagatcctgtaat

SEQ ID NO: 314091 - DNA, 1054 bp, Unknown
  Bacterial polypeptide expressing nucleotide sequence isolated from the Sargasso Sea
cttgaataaaaaaaactcttcaataacatattcatcttcaggagttgatattgaaaaaggcaatcaacttgtggaagaaattaaacccataataaaaaaaacaaaagtgccaggtgcagatattgatataggaggttttggtggtttatttgatataatgaaactaggatttaatgatcctctacttgtatcatctaccgatggagttggaacaaagcttcttcttgcaatagaaagtaataatgtcagtggcgtaggaattgatttagtggccatgtgtgttaacgatttaatagttcagggagctcagcctctttttttcttagattactttgcaacaggaattctatcaaaaacaactgctaaagaagttataaaaagtattgcagatggttgtattcagtctaaatgtgcattaattggcggagaaactgctgaaatgccaggtttttacgatgaaaatcactttgatttggctggttttgctgtaggggcagtagaaagaaaaaaattacttccaaaagaagttaaagttaatgacgatataattggattaaaatcatcaggtgttcattcaaatggattttcactagtaagaaaaattctagatatttcaaaaacacaattagattctaatactccatttaatgagtttacttttagtgaagagctcttaaagccaacaaaaatatatgtaaaaactataatttctttacttaataaaactaatgctattaatgcaattgcccatataaccggtggaggaattacagaaaatttaccaagagtttttagctcaaggaacattcaggcagaaatttataaagatagctgggaaaaaccagaaatttttcattggcttcaaaatactgggaatatagaagaatctgaaatgctaaagacatttaattgtgggattggaatgatcctagttgttaatccgaaagaaactaatagtttgttaaataaacttagagatctgggagaagagccggcattaattggaaaaataactaataatgaaaacccaaaaactcttgtaatatataaataa

SEQ ID NO: 314092 - DNA, 1033 bp, Unknown
  Bacterial polypeptide expressing nucleotide sequence isolated from the Sargasso Sea
aatgacaaaagatattatagaaaatgatccttataaatctgctggcgtggatatagaagcaggtgaagacttaattaataagattaaaaaggatgtagcgctaactcaaaatcaaaatgttataggcaatattggtggttttgcaggaatgtataaacttgataaaaaatatgacagtccagtcttggtttcttgcactgatggagttggtacaaaggttgctttagctcaagaatataataatttagaaggtataggacaagatcttgttgcaatgtgcgttaatgatctagttgtgtgtggagcaaaacctttgttctttttagattattttgcttcttcaaaacttgtagtcaatgacgctgcacaagtaatcaaaagcatctcaaaagcatgtattgactctggttgtgctttgcttgggggagagactgctgaaatgcctggtcactacgtaaatgataattttgatttagcaggattctctgtcggttgtgttgaggagagtcatataattcaatctcaaaacgtaggcctgggaaatgttttaattggtattgagtcaagcggtccgcattcaaatggcttttctttaataagaaaggttttaaatgaatccaaaatatctaattcagaaaaaaaagttatagcaaagaagttgctaataccaactactctttatccaaagttaataatgaagattcttaaagattttaaaatcaactcaatatcacacattactggtggtggtctgactgaaaatctcccaaggtcaattccaacagatatgagtatagaaatagatactaattcatgggaaatgcctgaaatttttaaatggcttagtattgaaggaaatatatcagttaataatatgtttaggatatttaattgtggaattggtatggtattaattgtcgaagagggtgcggcagaagaaatttctaaaaaaatatcttcgttaaattttaaaaatttttttattggaaaagtaaaagaaaagactcaaaataattctgttgtatttttataa

SEQ ID NO: 314093 - DNA, 1015 bp, Unknown
  Bacterial polypeptide expressing nucleotide sequence isolated from the Sargasso Sea
aatgaaaaacgatccctataagaaagctggcgttgatataaaagcaggaaatgatttggtagacaaaattagaaaagatgtagctagtaccttcgataaaaacgtattgggcgggattggaagcttttcaggtttttattctcttcctaaaggttttaaaaatccggttcttgttgcttgcacagatggagtgggcactaaagtcgccttagcccaaaagaattcttcattgggaactattggccaagacttagttgcaatgtgtgttaatgatatgattacttctggagcacatcctctattttttcttgattattttgcttcctcaaaactcaatgttactgaaacagcaacagttataaagagcattgctaaagcatgtaaaaaaactaattgttcactaattggtggcgagaccgctgaaatgccaaaccactatatcggcaaaaattttgatttagctggattttcagttggtattgttgaaaaaaaacttatcattgattcttcaaaagttagaaaaaataacatcataattggaattgaatctagcggagctcactctaatggttactcattaatcaataaattaattaaagaatcaaaattaagtaagagtgaaaaaatgaaattaattaagcttgctttgaagcctactcatttatatacaaatgtaattttggatttattaaaaaaagttaaagttaagtcaattgcgaacattactgggggtggtctaacagaaaatattcctagatcaattcccaataccctatcctctgaaatatatctgagtaactggaaaatgccggtactcttttcaactcttcaaaaattgggaaaaattcaaataagagacatgttgagaatatttaattgtggaattggaatgactttagttattgagcctaaggatttcgataccaccatgaaagtactttccatgcataaatttaaaggcttcatgattggaaaagttgtaaataaatcttcatcagaaataacttttctttaa

SEQ ID NO: 314094 - DNA, 355 bp, Unknown
  Bacterial polypeptide expressing nucleotide sequence isolated from the Sargasso Sea
tttggagccacacatcaattacacaaacgatgtgtttaaactattagatagagatataaatattaaaggcatggcgcatattactggcggcggtcttgtagaaaacatccctcgcgttttacctaaaaattgtatggcaattataaataaagacgcgtggagcgctctgcctgtttttaacgcaatacagtctattggcagcatagatgaatcagaaatgtttcgaacgtttaatatgggtattggaatgatatgtatagtctcaagtgatgatgtctctagtataaaacaattgattagcgttcgtgaaattggggaaattgtaagtggcgatggcggggtaaaagtagtttaa

SEQ ID NO: 314095 - DNA, 1030 bp, Unknown
  Bacterial polypeptide expressing nucleotide sequence isolated from the Sargasso Sea
aatggaaaaaacaaaaaatagttataaaaaaagcggagtaaatattgctcttgcaaataaatttgtaaaacatatagctaaaatctcaacaaaaaatgtcagaaaaaagaataaaattaacaaacaagataatattggggcatttggttcagtttttgatttaacaaaaattaaaattaaagatccattaatagtttcatgtactgatggggtgggtacaaaaatagaattggcaaataaattcaacaaatttgatactataggaattgatttagtggcaatgtgtgtgaatgatcttatagttcaaggtgctaaacctttattttttctagactatatagccgttggaaaattaaatcttaaaaaaattaaattaatattaaagggtatattaaaaggatgtgaacaatccaattgcgaattaataggtggcgagactgcagaaatgcctgggatctatgaaaaaaataaatttgacttagctggtttttcagtaggtgtggtttctaagaaaaaagtattaaataaaaaaaatgtcaaaagcggaaatataattttaggtattccatcgaacggtatacattctaatggttattctttggtcaggtcagttttaaaaaaaaataaagtttcacagagattaaaaaacgaattattaaaacccacaaaaatttatactaaagaaatattaggtttgtgtaagaataatttaattaattctgccgctcatattacaggaggaggtttgtttgaaaatctggcgcgatcggttcctcaagatctatgtattaatatagatttatcaaaaattaagattaaaaatattttcaaatggttaaaaagaaaaaatatttctgatagagaaatgctaaatacttttaattgtgggatcggattttgcataattataaaaaaaaataacattaataagataaaaaaatattttaaaaaagataattctccttttgagattggttatatttcaaaaggtaaaaaaagatttaatttaataaatgaaatgaaatggtaa

SEQ ID NO: 314096 - DNA, 610 bp, Unknown
  Bacterial polypeptide expressing nucleotide sequence isolated from the Sargasso Sea
tttaattggaggtgaaacagcagaaatgccagggatatattcaaaaaataaatttgatcttgcaggttttagtgttggtgttgtttctaaaaaaaaaattctttcaaaaaaaaaagttaagaaaaacgatgtagttttagctattccctctagtggattacattctaatggtttttctttagtaagaaatattttaaaaaaaaataaaataccaaaaaatttaaaaaaagaattattaaaaccaactaaaatttactctaatgagattttaaaaatttcggatgctaaactaattcatgcctcagcccacattactggtggcggtctcattgaaaatttattaagatctgtgcctaaaaaccttacattaaatattgacctttcaaagataaagataaaaaaaatttttaaatggataaaaaaaagaaatgtatcagacaacgaaatgttaaacacatttaattgtggtgttggtttttgtataatattacctaaacaaaatatatcaaaagtagaaaaattttttacggatgaatataaaccttatgaaatcggttttatatccgaggaaaaaagtaaagtaaatttatcagaaaatttaagatggtaa

SEQ ID NO: 314097 - DNA, 1030 bp, Unknown
  Bacterial polypeptide expressing nucleotide sequence isolated from the Sargasso Sea
atgccaaataacttaacatatgccaaaagtggagttaatattagatctgccgacaaatttgttaaatttatatctaaaataacttcaaaacagagcaaaaactacaaacaaaataatatcggtaattttggatctattaccaaaataccaataaatataaaaaatgttcatattgtagcaagtactgatggggttggtactaaaattgaaattgcaaatgaactaaataaatttaacacaataggtattgatttagttgcaatgagtgtaaatgatattttggttcaaggtggaaagccatttatttttttagattacatatcgataaataaaatcgatcaaaataaactaaaaaatatttttaaaggcatttataaaggatgtaaaattagtcgatgtgaattagtaggtggagaaacagcggaaatgccaggcacttactctaagggaaaatttgatatggcaggtttctgtgtaggactggtcgaaaaaaataaaattttacataaaaataaaataaaaaaaaataatcttataatagcgattccttcaagtggtttacactctaatggatattctcttgtaagatatttattaaaacaaaaaaaaataaatattaaaaaaaataaatttttaaaaactgagcttttaaaacctactaaaatatatgttaaagaaataatgaatttaataaacaaaaacttaattaatggttgtgcgaatataactggtggaggactatctgataatattaaaagaattataccagataaactttctgcagacataagtttagaccaaattaaaacttctaaaatatttaattggcttaagaacaatggaatttctgacatggagatgctcaaaacattcaattgtggggtaggattttgtctgattatagatcgtaaaaatttgaaaaaaatagataaatttttttcaaaagaatacaaaccatatatcattggtaagatttctgaaaataacaataaagtaacactaaatggttcaatcaactggttacaataaa

SEQ ID NO: 314098 - DNA, 1027 bp, Unknown
  Bacterial polypeptide expressing nucleotide sequence isolated from the Sargasso Sea
atgaaatatagtaatctaacatatcaaaagagtggcgttaacattaaagctgcagataattttgttaaatttttatcttcattatcaaaaaaaagtcgaaaaagtaagaattttcaaaatattgggggtttcggatcaataactgaaattgataaaaaaacaaaaaacccacagttagtagctagcacagatggtgtgggaactaaaattgagattgcaaacgaacttaataaatttgataccatcggtattgacctagttgcaatgtgtgtaaatgatcttattgttcaaggtgctaaaccacttatatttttagattatatttctttaaataaaatagatttaaaaaaattaaaacaaataattaagggagttgtaaaaggatgtaaattatctaattgtgaacttgttggaggcgaaactgcagaaatgccaggaacatattcaaaaggaaaatttgatattgctggattttctgttggcattgtagaaaaaaagaaaattttagataaatcaaaaattaaagttaataacttaattttaggaattccgtctagtggagttcattcaaatggatactcattaataagatacttattaaaaaaaaataaaatcaacttaaaaaagaataaatttttaaaaaaagaattaattaaaccaactaaaatatacgtaaaagaaatattaagtttaattaataaaaacttaattaatggatgcgctaatatcactgggggaggtcttgtagataatattaaaagagttttaccagaaaattactgtgcaaaaatttacttagaaaagttaaaaacaaataaaatatttaaatggctacacttaaatggaattggcaatagtgaaatgttaaaaacttttaactgtggaataggtttttgtataataataaatcctaaaaatttaaaaaaaataaaaaagtattttccaaaaaaatttgaaccttacgtaattggaaaaataattaatggaaaaaaacgtgttgatctaaatggtaaaattaaatggtaaa

SEQ ID NO: 314099 - DNA, 1025 bp, Unknown
  Bacterial polypeptide expressing nucleotide sequence isolated from the Sargasso Sea
aatgacaaaagaaattatagaaaatgatccatacaaattagctggagttgatattgatgctggtaacagcttagttgataaaattaaaaagagtgttgccgcctctcataataagaatgtcttagataatattggaggctttgcaggaatgtacgagctagataaagatattaagaatccagttttagttgcatgtacagatggagttggaacaaaagtttcgcttgctcaacagtacaatgatttatcaggcattggtcaagatcttgtagctatgtgtgttaatgatttaattgtatgcggtgcaaagcctctattttttttggattattatgcatcttcaaagctagatgttaatgaagctactaccgttgtaaaaagtattgcagatgcatgcattaaatctgactgtgcgcttttaggcggtgaaactgctgagatgcctggacattatgttgataataatttcgatcttgctggattctcagttggatgcgttagcaaagataagataattaaaaatgataatgtcatgtgcggtaatgtcttgataggaatagaatcaagtggtccacattcaaatggattttctttaataagaaaaatcattaaagaatctaaggtaaataaagaagaaaaaaatataatagctaaaagatgtcttgagccaaccttgctttatcccaaattgattatggagttaatttcaaattataagattaattctctttcacatattacgggaggtggtctcacagaaaatctaccaagatctataccagataatctctgcgtagaaatagatactgactcgtgggaaatgccaaatatttttaaatggttaaaagaaaatggaaatatttctgatgatgatatgtatagaatatttaattgtggaataggcatggtgctttttgttgatgaagatgaagagttaaatatttcttcgagaataaaagaattaaaaatgaatagtttcgtcattgggaaagtcaaaaataaaaaggaagaatcttctgtaatat

SEQ ID NO: 314100 - DNA, 1045 bp, Unknown
  Bacterial polypeptide expressing nucleotide sequence isolated from the Sargasso Sea
atgaataaaaaaataacttataaggatgctggggttgacattaaaaaagctgatgaagctattgaaatgtcaaaaaaagaaattagtagtacatttagcaaagatgttttgtctacaattggtggctttggatcgatgtattcgcttaaaaatatttttaacaactttcaagatccagttctagttcaaagtattgatggtgttggaacaaaaatgtctgttgccatggcagcaaacaacttccggttcattggacatgacctggtaaatgcatgctgtaatgatgtagctgcaaccggggctgtgcctttaacctttttagattatgtagctggtagcgatcttaataaaaacattatttcggaagtaattaaaagcgttgcacacgaatgcaaagcacatggtgtttcattggttggtggtgaaactgctgaaatgcctggaacataccataaaaatgagtatgatttggttggagtggctactgggattgttgaaaaaagaaatattgtcgatggaacaaaagtaaaaccgggagatgttgcaatcggtgttttttctaatggtcttcatactaatggttattctttagccagaaagcttatttttgaaactatggagcttacaacttctgatattttaccaggacatgacatatcaattgaagactgtttattagctccacacacaaattatagctctttaatcacacgtattactaatgccggaattaaaattaagagtattgcccacattactgggggtggtttagtggataatataccgcgcgttattccaggagaattttctttagaaatagacaccgcgtcctggaaaaaaataccaatatttaattttttacaaaacaatttggatattaatacaaaagatttgtaccaaacttttaatatgggcattggtcttgtgcttatcgtagatgagtcaaaaaaagaaaagttgatttcttttataggcagagacaattgtaacagtattggtgttgttgtaaatgataaagataatatggtacacctttatggataaa

SEQ ID NO: 314101 - DNA, 1036 bp, Unknown
  Bacterial polypeptide expressing nucleotide sequence isolated from the Sargasso Sea
atgagcaagttagattataaatcagcaggagtagatatcgatgctggaaatgaggcagtagaccgcatcaagaatagtgtaaggtctacctttacaaccaatgtgcttacaggtctgggaagctttggatccctttatgaactgaaaccaattttggatgcttaccaggatcctgtaatggtacaaagtattgacggcgtgggaacgaaaaccattatcgctagaaaactgggcaaattcgacaccatcggcattgacctgttgagcgcagcagccaacgatattttggtcatgggtgcccgtccgcttaccttcctcgattatatcgccaatgacaaattaaatcctgctatcattgaagagattgtatccggcatggtgaaagcatgcaaagatacgggcgtatcacttgtaggtggagaaacagcagaaatgcctgacacttatttacctggagaacacgaccttgtgggtgttatcacaggcgtggtagagaaagataaaattattactggtgaaaacatccagccggggcacgtggcgttgggactcccgtccaatggattgcacactaatgggtattcatttgctcgaaaacttttttttgagatcggtggatatgatgtgaatgacaccatccccgaattggaaagctctgttgggcttacgttacttgaaccacacattaattatacgaatcatgtgtttacagcgctagatgcaggcattgatattaagggcatcgcccatattactggaggcggattggtggaaaatataccacgaatcttgccagatgggtgcggtgtagaagtccaaaaggggtcatggccaaaagttcctgtttttgatgtgatgcaatccatcggaaatgtggatgaagatgaaatggcccgtgctttcaatatgggtatcggcatggtatttgttgtggattcaaatgatgtgaaatccataaaggatgtactaaaagatttgacggaaacctatgaaattggagaggtcgtttctggtgaaggggtcaaaattggataat

SEQ ID NO: 314102 - DNA, 783 bp, Unknown
  Bacterial polypeptide expressing nucleotide sequence isolated from the Sargasso Sea
aatgaaaaaattatcatactcaagttctggtgtaagtatcaacaaaggaaatgagtttgtaagcaaaattagcaacttaatcaaaaaagataaaggtcttattaagagtgaaatcggaggattttcaggtcaattccccttaagcactaaaattaaaaagcctatactagttggagcaaccgatggcgtaggaacaaaaattcaaattgcagaggaaatgaataaccataaaacaattggtatagatttagtagctatgtgcgttaatgacttgattgttgataaagcaactccattgttttttttagactacatctcaactggaaaattaaatgtacccaaaggtattgatataattaaaggaattataaaaggatgtaaaatttcacattgtgctttacttggtggtgaaacagccgagcatccaggatatgatattaaggaaaaatatgatttagctggtttttgtgttggagcaaaaagtggtattccgaagaaaattttaaaattaaaaaaaagtgatcttatcatcggaattgagtcgtctggaatccactccaatggcttttcactcatccgtaaaattataaaagacaataatattagtctaaaaaagaaaatcatcaaaaatagcacattagggaaaatattattaaagcctacgcatatttacgttgatgtaattcttgatctttttagcaaaaatcttattaagacttgttcacacattactggtggaggtgtaaccgaaaacttgcccaggtcaatcagtaaaaataccaa

SEQ ID NO: 314103 - DNA, 1018 bp, Unknown
  Bacterial polypeptide expressing nucleotide sequence isolated from the Sargasso Sea
catggataaattaacatataaaaaaagtggggttaacattaatgaagctgataaatttgttaaatttatatcaaaaataagaccaaagcttaatagacaaagatcatcaaatatcggtgcttttgcatcgattacagaaatcccaaataaatttaaaaaacctgtaattgtaacaagtactgacggtgttggaaccaaaattgaaatagcaaataaattaaaaaagtttgacacaattggcgttgatttagttgcaatgtgtgtaaatgatctaattgttcaaggtgcaaaacctttggcgtttttagattatatttctataaataaaataaatttaaaaaaattaaaacatattgttagtggaattgttaaaggttgtaaaatttctggttgtgagctcgttggaggagaaactgccgaaatgcctggtacttatgaattaaataaatttgacattgcgggtttcgctgttggtgctgtagagagaaaaaaaattttaaaaaaagaaaatgtaaaaaagaataatttgattttagcaattccttctaatggacttcattcaaatggttattcattaattagatttttactggaatcaaaaaaagtaaatttaaaaaaaaacaaatttttaaaaaaagaattgctaaaacctacaaaaatatacgttcaagaaattctaaagcttgcaagtaaaaatttaataaattcctgtgctaatataactggcggtgggattgaagaaaatataaagagagttatacctaataatttaactgccgaaatcgatttaaaaaaaataaaaactcaaaaaatattcaaatggttaagaagaagcatatctgaaaaagaaatgatcaaaacttttaattgtggtgttggtttttgtataattataaaacctcagaatttaaataaagttataaatatttttaagaaagaatacaaaccttatgtaattggaaaaataatttctggaaataaaaaaacaaaactatatagtaaaattcaatggatctaa

SEQ ID NO: 314104 - DNA, 1039 bp, Unknown
  Bacterial polypeptide expressing nucleotide sequence isolated from the Sargasso Sea
tatgtctaagctggattataaatctgctggggtagatattgatgctgggaatgaagcagtagaccgcataaaagacaaagttcggtctacattcactaacaatgttttaactgggttaggtagttttggttcgctttttgaccttaagcccattttaaaagaatataataatcccgtaatggttcaaagtattgatggcgtaggtacaaagaccattatagcaagaaagcttgataaatttgatacgatagggattgacctgctgagcgcctgcgcaaatgatatcctggttatgggtgccaagcctctcacttttttagactacattgccaatgaaaaactaaaacctgctatcgttgaagaaatcgtttctggcatggtcactgcgtgtaaagacacgggggtctctctagtgggtggggaaacagcagaaatgcctgatacatatttaccgggagagcatgaccttgtgggcattataactggagttgttgaaaaagagaaagctatcactggagaaaaaatttcccctggcgacattgtattaggactcccatcaagtggtttacataccaatggttattctctagccaggaaggtcttttttgatattggcggttataatatcaatgatcatatatcaggcctagaaaagtctgtaggcctgacacttctagagccccatattaactatacaaaccatgtttttaatgttctagataggggcattgatataaaaggaatagcccatattactggcggtggactcttagaaaatatcccaagggtattacccgcccaatgcgatgtggagattaaaaaaggttcttggcccacaactccagtattcaatgtcatgaaagccattggaagtatcgatgaaaaagaaatgttaagagctttcaacatgggaattggaatggtatttattgttaggccaggtgatgtgggtaaggtcaaagatgttttgaaagacctgtcgccgatatatgagataggacatgttaagaatggttcaaaaaatatttttatcaaatga

SEQ ID NO: 314105 - DNA, 994 bp, Unknown
  Bacterial polypeptide expressing nucleotide sequence isolated from the Sargasso Sea
atgacaaaaaacaaaaataagtacaaagatacaggcgttgatatcgaggaaggccaaagatttatagaagatataaaggaccttacacgagaacctattacatcatattcactgagtaatattggcagcttttctggatatgtcgatacaccttccgaattttcttcacccgtctatgctttggcatgtgatggtgttggcacaaaaataaaaattgctctaaagcttaataatttaaaaacaattggtatcgatcttgttgctatgtgtgttaacgatttaatttcgagtggtgcaaagccaacagcattcttggattattatggctgttcaaaattagataggtcaaaaggcaaagaaatcatttcagggatactagaaggttgtaaattagcaggttgtgagttaattggtggagaaactgctgaaatgcctaatcactatacaaatgacaactttgatttggttggtttctcccttggtgttaacaataaagatgaaataatcgatggttcatcaatagaagcagacaatttagttcttggcctgccctcctctgggtttcactcaaatggatattcattaataaatcaaattatcgaagataaggttattgataattctctcatgcaaaaattattaactcctacgaatatatatgtaaatgatatcttggctcttaaaaaggtctgcaaaattaatggaatggcacatataactggtggtggtttaaatgaaaatctatcaagaattgctaatggaaaaacaatatgtatagatagaaaaaaatgggcattaccaaatatatttgaagagataaaagaattaggaaatatttcagaagaagaaatgtttaatgttttcaactgtggtattggtttttgcttagtgctagataaattgaacgcaagaaaagctattaaagagaatccgaaattaatagagattggttttgtgtcggacaagggtgaagttgactttaaatttatatgaa

SEQ ID NO: 314106 - DNA, 550 bp, Unknown
  Bacterial polypeptide expressing nucleotide sequence isolated from the Sargasso Sea
attgtcctcacaaaaaaaaatctcctataaaaaatctggcgttgatattgctaaaggagaaaagctagtagaaaagataaagcctatagccaaagctactttccgaaaagaagttataaatgaaattggtggattctcctccttgatgtcgataccgaaaaaatataaaaatcctgttttggtaagttctacagatggtgttggtacaaagatagaaatagctgaaatgatgaaaaaccatacaacaataggaattgatttagtggcaatgtgcgtaaatgaccttataacttccggagcagagccactattttttttagactatttagtaactgataaaataaatttaaaaaaatctaaagagataatttctggcatagcaaatggatgtaaggagtctaattgttctctaattggaggagaaacagcagaacacccaaaaaactttcctaaaggtaaatacgatttagcaggcttttctgttggaataattgagaaagagaatttaaaaaaagaaaaattaaggtcaggagatattctggtaggacta

SEQ ID NO: 314107 - DNA, 757 bp, Unknown
  Bacterial polypeptide expressing nucleotide sequence isolated from the Sargasso Sea
atgaaaaaaatacaaaataattataaaaaaagtggtgtaaatatttcacttgctaataaatttgttgatcacattgcaaaaatatctaaaaaaaatgaccaaaaaacgaataaattatttgattcaagtaatattgggtcttttggttcagtttttgacataagtaacattaatataaaagatccagttatagtttcttgtactgatggcgtaggtacaaaattagacttagctaacaaatataaaaaatttgatactattggaatagatttagtagctatgtgtgtgaatgatttaattgttcaaggagcgaagccattattttttttagattatatggctcttggtaagttagagctaaataaaacaaagagtattttaaaaggtattttgcgaggttgtaagatctcaaattgtaagctcattggcggagaaacagcagaaatgcctggaatttattctaaagacaaatttgatttagctggtttttgtgttggcattgtttcaaaaaaaaaaattttaaataagaaaaacgttaaaaaaaacgatttgatattcgctattccctctagtggtgttcattctaatggttattcattaataagatcaatattgaagaaaaataaaattccaaaaaatttaaaaaaagaattattaaaaccaacaaaaatttatacgaatgaaattttaaatttagttaaaaagaatctaataaattcagcagcacacataaccggaggtggcttaattgaaaatg

SEQ ID NO: 314108 - DNA, 1000 bp, Unknown
  Bacterial polypeptide expressing nucleotide sequence isolated from the Sargasso Sea
caaatcagcaggcgttgatatagatgctggtaatgatttaataaacaaaattaaaaaagatgttgctgcaactcaaaataataatgttttagaaaacattggtggttttgcaggcatgtataaacttggtaataattttaagaacccggtactagttgcatgtactgatggagttggtacaaaagtctcacttgctcaagaatataacgatttatcaggtatcggacaagatctggttgcaatgtgtgtgaatgatctaattgtttgtggtgctgaacctcttttctttcttgactattacgcctcttctaaacttaatgtagacgaagcatctttagtgatcaaaagtattgctaaagcatgtttagattcaggttgctctctcttaggaggagaaacagctgaaatgccaggacactatattgataataattttgatttagcaggattttccgttggttgtgttgatgagaaaaaaatattaaatgataagaatgttaaagttggaaatattctaattggtattgaatccagtggcccacactctaatggattctcattgattagaaaaattattaacgattcccagtctccaaaaactctgaaagaggatatggttaaacaagttcttaagccaactattttgtatccaaaccttataatgagtttaataaaagatttcaaagttaactctatttctcatattactggaggtggcttactagaaaaccttcctcgatctattccaaataatctatccattgaaatagatgaaacttcatgggaaataccaaaaatatttcaatggcttaaagaagaaggaaatctatcaaataatgaaatgtacagaatttttaattgtggtatcggaatggcactatttgttgaaaaagatgattcatcaaaaataatgaataaaatattgcagatgggacataagtgctttcagattggtgtggtttctgaaaaaaaagacaatgattcaataaaatttttctaa

SEQ ID NO: 314109 - DNA, 767 bp, Unknown
  Bacterial polypeptide expressing nucleotide sequence isolated from the Sargasso Sea
gtgtgtgaatgatgtgattactacaggagccgatcctatattatttttagattatcttgcaactggttctataaatttgaaaatacataaaacagtcttaaaagggattaaatctgcatgtgacaaacataatattattctgataggaggcgagacagctgaaatgccaggaatgtatagcaaaaatgattatgatcttgctggattttgtgttggccttgttgataaaaagaacatacttaataaaaaaaatgtaaaaaaagataatctgcttgttggaataaattcaagcggtattcattcaaatggattctctctgataaataatctcattaataagaagtttttatccttaaataaaaagattaataatattgatataaaaaaagctcttatccaacctaccctaatttattctgatatcataaagaaaatttcgatggctgttagtctaagatctatgtcgcacataacaggcggaggaataacagaaaatctaccacgggtgatccctgataatttaactgctaaagtaattagaaatagctgggtgatgcctaaaatatttaagattatacaagaaaaatcaagacttactgatgatgacatgttgaaaacgtttaattgtggtctcgggatgataataataattgataagaaagatgagctgaaggtacacaacataataaaaaagaatggctttagaagctacacaattggaaaagttattaaaagaatgaaaaatcaaagtatttgttatgactaaa

SEQ ID NO: 314110 - DNA, 1000 bp, Unknown
  Bacterial polypeptide expressing nucleotide sequence isolated from the Sargasso Sea
aattgatcatcccggtggttttagtggtatcatagacttcggtgatgaacttctcgcaatgtgtactgatggtgttggaagtaaactcatgttggcaagtaaactcgggcaatgggaaactgttccaattgattgtatggctatgaatgttaacgatttgctatgtatcggcgcagaaccaattgcctttgttgattatattgctacacctaaacccgatcctgaagtccatgctgctttaggaagaggattggcaaaagcggcagaaattgcaaatgtcagtttagccgggggagaaactgcatcacttcccgacattgtcacagaattagatatgtctggaacatcattaggatggttaccaaaaggtgaccaattaactggtgaaaatataatttcaggagatgttttaattggtattccttcatctggtattcattcaaatggtttctcacttgttaggaaaattttggagctttctaatgctgatttagaaatgcctcctccgtttgatgctacaaatgaatatagagaaattgaaaggttcgatatcaataaagagttgacacttggagaagtgctccttaatcctactagaatttatgttaatccaatgattccgttatttgaagaatgtagaaaaaataaatctccttgtaattatagtgatatcaaaggtattgcacatataactggcggaggtttatccaatctattgagattacatccaagccttggttaccatattaataatccattaccttccttacctgagtttgattggttacaagaagttgggggggtaagtgattatgaaatggcacggaccttcaatatgggaatgggattatgtgtagttgtcagtaaagaaagtgtaaactctattttatcttggcttgaagaatctggtattcgaggatgtgccgaagttggccatgttaatgatagtggacatcgagtaactcatatcaaccccgacatatgctttgagcactactga

SEQ ID NO: 314111 - DNA, 1042 bp, Unknown
  Bacterial polypeptide expressing nucleotide sequence isolated from the Sargasso Sea
atgagtaatcaaaagtcaaaaataacatactcagattctggtgtagacatcgataaagccaatgatctcatcgatgagatcaaacctatgatcaaacaaaccttaaccgctggcgtactatcaaatattggtggttttggaggattatttgagctgaatagtgaagattatgaacggcctgttcttgtctcgggaacggatggcgtggggacaaaggtcaaattggcacaacaacttgatattcttgaaggggttggtgtagatctggttgcgatgtgtgtcaatgacatcataacttcaggtgcaaaaccactgttctttcttgattatttcgcaacctcaaaactcgataactcacaagcaaagagaatcataaaaggaattgcagatggttgcttgcaatctgaaatggctctcataggtggagaaactgcagaaatgccaggcgtatatcagtctggtgaatttgatcttgctggattctctgtgggtattgttgactacaaaaaaatcattgatggatcaaaaatatcagaaggtgattcaatcattggtctcgcttcatctgggcctcattccaatggatactccttgataagaaaattgattgaagataactcagtggatttagatgaaatgatcaatggtgagaagattggcgcacaaatcattaagcccacaattatatatagtcgttcagtactgagttgtattgaaaaatatgaagtgagctcaatggctcacatcactggcggaggatttcaagagaatattattcgagccatacctgagggctgccaggcaatcatcgataaaaattcatggagcttgcctcctgtctttcagtggattcaagatcaggctggcatcgattccaatgaaatgctgagaacttttaattgtggcataggttatgttctgatcgttaaagcggatgttaaaaattctgtgatcaagcatttccaagatgaagacttagaagcttatgagatcggttctataacaagtggtgagaaatctgtcatcatcaatcatggctgat

SEQ ID NO: 314112 - DNA, 910 bp, Unknown
  Bacterial polypeptide expressing nucleotide sequence isolated from the Sargasso Sea
agcagcataggtggtttcgccgctctcacacagctacccgcccattataagcaaccagtcttagtgtctggcacagacggagttggcactaaactggaattagcagataaatttggccggcacgaaaccatcggtcaggaccttgttgcaatgtgtgtgaacgatgttttagtttgcggaggtgaacctttaatttttctggactacttcgccactggcaaactcgatattgaccttgccgccgaggtcatcaaaggcatagcaaagggttgtcaaatagcaaagtgctctcttgttggcggagaaaccgctgagatgcccggtttttaccagggttcacaatacgatctagctggattttgtgtgggaatcgtagaaaaagacaaaatcattaatggagctgaaataacaaaaggcgacaaaatcatcggtctgccaagcagcggtcctcatagcaatggattttccttaatccggaaaatcctagagctgaaagaaatcgaaagttcagatctcattgatgagatgatgaaccccacaaaaatctatgtgcgcagcgtgcttgctcttttacagaaaataaaggttaaagggatggtccatattacaggtgggggtttttatgaaaatatccgaagaatattgcccagccaacatctatcagcaaacattgatctctcagcttggcagagacctcaaatttttaaatggcttcaagatgcaggacgcatagatgaacgcgagatgctaacaaccttcaattgcggcataggtttcctcatcatagtgagttcagaggacgctgaaaaaacaacagaaattttagcgctcgaacacgaagaacctttgttagttggggagatagtttcttctgactcgccagctaattctaaccaaatactcatttaac

SEQ ID NO: 314113 - DNA, 402 bp, Unknown
  Bacterial polypeptide expressing nucleotide sequence isolated from the Sargasso Sea
tcgccagcctgctgccgccggtgcaggcgatcctggccaggggcgcggacttctcgctggtggagggcgcaggcggctggcgcgtaccgctggccggtgaggaaaatctgtcggacctggccgtggcgttgggcatcccggtgattctggtggtgggcgtacgcctgggctgtatcaaccacgcgctgctgagcgcagaggcgatcgagcgtgatgggctgaaactggccggctgggtggccaatatcgtcgagccgaagacctcacgtctggaggaaaatctcgccaccctcaccgagcgcctgccagcgccttgcctggggcgtgtgccacacctggacaaggcgacggccgctgcggtggcggaacacctcaaactggagctgttggctgactggtaat

SEQ ID NO: 314114 - DNA, 139 bp, Unknown
  Bacterial polypeptide expressing nucleotide sequence isolated from the Sargasso Sea
tatgagcgccgcttacttcatcaccggtacagacaccgatgttggcaagaccaccatcgccgccggcctgttgcatgcggccaggctttccggcaaaagcacggccgccggaaagccggtggcgtcgggctgccaactg

SEQ ID NO: 314115 - DNA, 663 bp, Unknown
  Bacterial polypeptide expressing nucleotide sequence isolated from the Sargasso Sea
tatgacaaaaggtctttttattactggtaccgacacggatgttgggaagacagcagttgctgtcgcgatcttacaacagtgtgttttgcagaggattgattgccgagcgtacaagcctgtggcaagtggtgttcagtctcatccatcagacattgatcgcctgtggagtgcctctggaaatgccgggacccgcgatgatgtctgcccgcaatcgtttcaacttcctgttgcaccggaacaggctgctgctgctgagggaagccagattgatgacgcccttctccgtcagggtctgtatcctcatatgcgtgcagacgtggtggtgatcgagggagcgggtgggttattttcaccgcttagccaccaaacactgaatgcagatctggctcgagattttcaaatacctgtggttatcgtagacagcagtcgtctcggggctattggtcgaacattgaccgcagtgacggccgctgagtcagtgggcctgactgtttcggcagttgtgctttctcagttggaagctggccaccatggtgagaaccaaaagccagagagccctgaggtcatcgcgattcagtcgcaagtagaattgcaaaggagacttccttatattgttgtttgtggtctcggctacgaggcctcaacaattgaacccttcgtgga

SEQ ID NO: 314116 - DNA, 532 bp, Unknown
  Bacterial polypeptide expressing nucleotide sequence isolated from the Sargasso Sea
atgaaccatccatctccccagatcgtggtctgcggcacggacaccgacgtgggcaaaaccgtcgtcagcgcctggctggtgcaggggctgaacgctcattactggaagccggtgcagagcggactggaggacggcggcgatcgcggccgggtgcaggaccttcttcagctcgcccctgaccgcatgctgcccgaggcctatgcgtttcaagagccggtatcgccccattgggccgctgagctggacagcaccatgctcaaccccgaggccttggtcgttcctcacggctcggcgcccctggtggtggagaccgccggcggactgatggtgcccttgacgcggcaatggctgcagatcgaccagctgcagcgctggggtctgccgattgttctggtggcccgcagcgggctcggaactctgaaccacacactgctgagcctggaggccctcaagcgtcgtcagttgacggtgctggggctgatcctcaacggccccgcccatgccgacaacccagccaccctgaacacttcgg

SEQ ID NO: 314117 - DNA, 646 bp, Unknown
  Bacterial polypeptide expressing nucleotide sequence isolated from the Sargasso Sea
catgcaattggtggtgtgcggcacggatacggacgtcggcaagaccgtcgtcagtgcgcttctcgttcaggggctgcaggccagctactggaaaccaatccagagcggattggagggtggcggcgatcgcaaccgtgtacggcagcttcttgacctcaatgaagagaggatgctgcctgaggcgtacgccttcagccaaccggtgtctccccactgggcctcggagctcgatggaacagcgcttgatccaagatctctggccctgccagaccatccaggacctctggttgtggaaaccgctggcggacttctggttccactcacgcgcaactggttgcagattgatcagctgcaggtctggaacctgccgatcgtgcttgtggcccgcagcggacttggcaccttgaaccacaccctgctgagtcttgaagcattgaagaaacggcagatcaatgtcctgggactgatcctcaacgggccgctgcatgccgacaatccacggactctggaacagttcggaggcgttccggtgctggcggaactgccttcgctggtcccgctgtcggcggagacgttggcagcgcaatggcagcaacaggggctgggccctaaattccggcgactggaggatcaggcatcaccatga

SEQ ID NO: 314118 - DNA, 661 bp, Unknown
  Bacterial polypeptide expressing nucleotide sequence isolated from the Sargasso Sea
atgaatcatccatctccccagatcgtggtctgcggcaccgacaccgatgtcggtaaaaccgtcgtcagtgcctggctggtgcagggcctgaacgctcactactggaagccggttcaaagcggcctagaggacggcggcgatcgcggacgggtgcagtccctgctcaaccttccacccgatcgcatgttgcccgaggcctatgcctttcaacagccggtttcaccccattgggccgctgagctggacggtatccccctcaacccggatgacctggtcgttccccattgcacggcgcccttggtggtggagaccgcaggcggattgatggtgccgttaacgcggcgatggctgcagatcgatcagctgcagcgctgggatcgaccgatcgtcctggtggcccgcagcggactcggcaccctgaaccacacactgctgagcctggaggctctcaaccgtcgtcagctgacggtgctgggactgatcctcaacgggccggcccatgccgacaatcccggcaccctcgaacagttcggtggtgtgccggttctggcccatctgccgacactgtccccactgacggctgagtccctcgccagggaatggcaacaccagggattgagctctaagttccaggatctgctcggcatccagcagcaatgaa

SEQ ID NO: 314119 - DNA, 697 bp, Unknown
  Bacterial polypeptide expressing nucleotide sequence isolated from the Sargasso Sea
catgttttttgtaacaggtacagataccgatagtggtaaaaccttagtgtcgacggcgctgttaaccgcattcaatcgtgaagctgcttgcataggcgctgtaaacttaagccttggggtcaaacctgtggcctcgggatgtgaaatcacagagcagggcttacgcaacagtgatgcgttaaaactgatgtcggcctcatctttaaagctcaactatgagcaggtcaatccgataagctttgaacccgccattgcgccgcatattgccgcaaaacagcagggggttaatttatcccccgaggcgattttggcaacgttagatagacaagcctttgcgcaggctgatttttgcttgatagaaggcgcgggtggctggcgtttgcccttaggggacgggcgttatttatcggaattagtgcagcaacttaatttgccagtggtcttggttgtgggaatgaaacttggctgcttaaatcatgcgttattaacccaagaggcgattatagctgatggcttaaccgtggcgggttgggtggcaaattgcgtcgatcccaatatgagcgtgtttgatgaaaacttagcatcgcttaaagagatgatgacatcgcctttccttggttgtattccgcatcttaaacaggctgatgcagaacatgccgcccattttatcgatatccaggctttgttgatgaaataa

SEQ ID NO: 314120 - DNA, 630 bp, Unknown
  Bacterial polypeptide expressing nucleotide sequence isolated from the Sargasso Sea
aatgacaaatttttttataacaggtacagatactggagttggcaaaacacgagttacaattaccataatggctgctttgaagaatgcaggatttgacgttgttggcatgaagccagttgcatcaggcgcacaaatgataaacggaaagttaattaatgatgatgcaaaattaattcaaaaacaatgcagtcattcagtttcttatgaagcggttaatcctttcgtctttcgttttcctgcggcacctcatatagcggcagagctagagcataaatcgatagaccataatcaaataataaaaaattatcatgctctagattctgcctcagatattttgattatggagggtattggcggctgggagatgtcattaaacgaagaatatactcttccggatcttgtcgagtctctaaatctagcagttattttagtagttggattaaggctagggtgtataaatcatgcaatattaacagcgcaatcaatagcaggcagaggcatcaagctttgtggctgggtaagcaatcacctagataaggaatatttaacgccagatcagacgataatgaccttaaaaaaacgcataaactgccctcatatagcggatttaccatataatccgaattttga

SEQ ID NO: 314121 - DNA, 682 bp, Unknown
  Bacterial polypeptide expressing nucleotide sequence isolated from the Sargasso Sea
gatgactcctaagcatcgccatccccatcaactggtggtggtgggcactgacaccgatgtgggcaaaaccgtgatcagcgccctggtggtacaggggctcagcgcccactactggaagccggtgcagtgcggtgatctcgagatcggcggtgacaccggccgtgttgccaacctctgcgggttgagcgaagccgaacaacagcagcggctgctggctgaggcctaccggctcaaagcaccggcatcccccaaccaagccgcgagggaagaaggctttgccgttgatccagctcagttgaacttgccgccggttgatgggcctttggtggtggaaacagcgggcgggcttttggtgcccctgcgggatgactacctgcagattcaacagatccagcaatggcaactgccggtgctgctggtggcccgcagcggcctgggcaccctcaaccacacgctgctgtcattggaagccttgcagcgccgccagatcccggtgttggggttgatcctcaatggcccgcgccacagcgccaaccaccaaaccctcagcgccatgggcggcaccacggtgctggcggaagtggaaccgcagccaacgctggatcagcaggcgttgagccgcctatggagcagcagcggcctggctgaacgcctacctgcggccctagaggcccgggcttga

SEQ ID NO: 314122 - DNA, 697 bp, Unknown
  Bacterial polypeptide expressing nucleotide sequence isolated from the Sargasso Sea
atgttttttgtaacaggtacagataccgacagcggtaaaaccttagtgtcgacggcgctgttaaccgcattcaatcgtgaagctgctcgcacaggcgctgcgcacttaagccttggggtaaaacctgtggcctcgggatgtgaaaccacagagcagggcttacgcaacagtgatgcgttaaaactgatgtcggcctcatctttaaagctcaactatgagcaggtcaatccgataagctttggacccgccattgcgccgcatattgccgcaaaacagcagggggttaatttatcccccgaggcgattttggcaacgttagatagacaagcctttgcgcaggctgatttttgcttgatagaaggcgcgggtggctggcgtttgcccttaggggacgggcgttatttatcggaattagtgcagcaacttaatttgccagtgatcttggttgtgggaatgaaactgggctgcttaaatcatgcgttattaacccaggaggcgattatagctgatggcttaaccgtggcgggttgggtggcaaattgcgtcgatcccaatatgagcgtgtttgatgaaaacttagcatcgcttaaagagatgatgacatcgcctttcctgggttgtattccgcatcttaaacaggctgatgcagaacatgccgcccattttatcgatatccaggctttgttgatgaaataac

SEQ ID NO: 314123 - DNA, 697 bp, Unknown
  Bacterial polypeptide expressing nucleotide sequence isolated from the Sargasso Sea
atgttttttgtaacaggaacagataccgatagcggtaaaaccttagtatcgactgcactcttgaccgcattcaatcgtgaagttctgcgcgcagggttttcgcgctcaagtcttggggtaaagcctgttgcctcaggctgtgaaatcactgaaaagggtttgcgtaacagtgatgcattaaaactgatgtcggcttcatcccttaaactgagctatgagcaggtgaatccgattagttttgaacctgcgattgcaccgcatattgcagcaaaacagcagggagttaatttatcccccgaggcgattttggccaagcttgatcgtgcggcgtttgcgcaggcggatttttgtttaatcgaaggagccggcggttggcgtttgcctttaggggaagggcgctacttatctgagttggtacaacagcttaatttacccgtcattcttgtggtgggaatgaaactcggttgtctaaatcatgcgttattaactcaagaagcgatattagccgatggcttaacggtcgcaggttgggtggcaaactgtgtcgatcccaatatgagtgtgttcgatgaaaacttagcgtcgcttaaagagatgatggtatcgccttttctcgggtgtattccacatcttaagcaggcggatgcggagcatgccgccaattttatgaatattcagcccttattgatgaaataag

SEQ ID NO: 314124 - DNA, 712 bp, Unknown
  Bacterial polypeptide expressing nucleotide sequence isolated from the Sargasso Sea
ccgtgaaccatttgtagaagcagctggtgtaggtattacagatagagggttaaaacttcttaaagatcctattcctacagctacgtataccggtagacagtttgtacaagatcaatcagcattagaacaacaagcagcaacagctgcagcaggtttagatacattagttggcgcagatgcttacaaacaatttatgtcaccataccaacaagaagttattgatacttcgcttgcggctatggatagagaacaagcaaaaggaatcacatctttaagacaaagagcagcacaatctggagcttttggtggtggtagagaagcagcagctttgggtgagtatcaagcaacagctgatatagctagagcagtagaagaagctagattaagagaagctggatttcaaaatgcaagacaagcagcagcagctgatcttgcagcaagacaaggtttaggaacttaccaacaacaaattggtgcacaaggaagacaattagatcaagctaaattagcagcagatcaagaagcagctagagaaacagcgtttgcagattacacacaattaggattagttggaccacaattagcatcagttatcggtggattcccagcagcaacacaagttcaatcaacacctccaccaagtgctacacaacaattattaggattaggtattggtgcagccggattagcaggggcgttaaggagaatataa

SEQ ID NO: 314125 - DNA, 495 bp, Unknown
  Bacterial polypeptide expressing nucleotide sequence isolated from the Sargasso Sea
ttggtgtgctatatggtggttttatgttaaccaagagcggggtaaaggtaattgaatataatgctcgctttggagatccagaggcaatgaacgtattgtccatattaaaatcagactttttatctgtttgcatgtctatagttggtgggtctctagaaaaacaagaggtctgttttgaaaggcttgctactgtctgtaaatatgttgtgcccgttggctatcctaacaagccctcaagggggtttgaggttgtttgtaatcaaaatgactcgtcactttttcttgcatcggtaatgttaaaagacaaaaagttaatagcctgtggctctagaacagccgccgttgttggaaaaagcagcgacattaaacaagctgaatcttttgccgaggataaaatatcaaaaatttcaggaaatctttttcacagaaaagatattggtacaaaaaaactaattgactctagaaccaaaagaatgaaggagttgctgggttgag

SEQ ID NO: 314126 - DNA, 555 bp, Unknown
  Bacterial polypeptide expressing nucleotide sequence isolated from the Sargasso Sea
ctaaaataaaaaaacaagtagacagggaaattattacacccactttaaaagctcttaaaaaaaatggacatccatataaaggtattctctatgctggattaatgattaaagatggttatgcccgattggttgaatataatattagatttggtgatccagagtgtcaggtgttaatgcttagaatgaaaaatgatttaattagattaattcttaattgcttgcaaggcagtctaagtaaaactaaattagaatggaaagatgataactgtgctacagtggttgtggcggcaaaaggttatccaggcgactataaaaaaaatacaaaaattattggctatgaaaatttcgagagtaatgatctatttcaagtattccacgcaggaacaaaacatgatgggaataaccttctagctaacggaggtagagttctttccgtaacagcaaaaaataaaaatctaagagatgctctaaatatgatttatgcttacatcggtcagcttgattggccagatggttattacagaagagatataggaaaaaaggcaattaaatgac

SEQ ID NO: 314127 - DNA, 916 bp, Unknown
  Bacterial polypeptide expressing nucleotide sequence isolated from the Sargasso Sea
acatgctatttgttattttttaaaaaaatccaaaaaagttagtgaaatattttgttttccaggtaacgcaggcacaagaattatagccaaaaatgttttaattaatccagataaatttgatcatataaaaaattttattcatgaaaaaaaaattgatttagtaatagttggtccagaaaaacctttagttgatggtttggtagattacctagagaaatttaacataaaagtttttggaccaaataaaatggcttcacaacttgaaggttcaaaaatatttactaaacaactttgcaaaaaatttaatataccaactgcaaaatttggtatttttgaaagtaaagacaaatgtaagcaatttataaaaaaatctgattttcctattgttgtaaaagcagataatcttgcatctggaaaaggtgtatatatttgtaaggatatcaaagaatctgaacttgctatcaatgaaatatttgatggaaagtttggttatgcaaaaagcatactagtagaagaatttctaactggagaggaaatgagtttttttactatccacgacggtaaaaaatttaaaacatttggaacagcccaagatcacaaaagggttttagagggggatcaaggtaaaaatactggtggcatgggagcatattctccatcaagattaattactcctgaattagaggataaaataatcaataaaattataaaaccaactctcttaggtttgaatgaacttggaagtacatataagggctttttatatacaggattaatgattatcaacaatgaaccttacctaattgaatataatgtaaggatgggtgatccggaatgtcaaaccatactgccctgtttgaagactgatctttgtgaaatttttttagcttgttgtgaaggaaatttaaataagatt

SEQ ID NO: 314128 - DNA, 278 bp, Unknown
  Bacterial polypeptide expressing nucleotide sequence isolated from the Sargasso Sea
tatgaaagtaggaataataggaagtggaggaagagaacattcaatctgtgaaagtattaaaaaatctaaaaatgtagagaaaatatactgttttccaggaaatgctggaacagaaaacattgctcaaaatattaatttaaacctggatgattttgaaactttaaagaactttattattgaaagtcaaattgatttaataattgttggtccagagaaaccgttagtgaatggcattgtagattatttagaaaaattcaatataaatgtatttggtccaa

SEQ ID NO: 314129 - DNA, 358 bp, Unknown
  Bacterial polypeptide expressing nucleotide sequence isolated from the Sargasso Sea
atgaaaattgcaattcttggaaatggtggtagagaacatgcaatagcaaccaaaatctcaaaatctcctaagcttcaaaaattatactgtatcccaggtaatgctggtactgatttaattgctgagaatgtggaaatagatttttacaattatgaaagtttattacaatttattaaagaaaataaaattgatttagtaattgtaggacctgaaaaaccactagttgatggtgttgttgattttctttcgaaagaaaatataaaagtttttggtccaaacaaaaaagtttcacaattagaagggtcaaaaatatttacaaaaaaaatatgtgaaaaatataatattcctactgcacaat

SEQ ID NO: 314130 - DNA, 273 bp, Unknown
  Bacterial polypeptide expressing nucleotide sequence isolated from the Sargasso Sea
tatgcttatagttggtagcggcgggagagaacatgctttcacctggaaagcatcacaatctgatcttgtagaaaaaatcttcgtagcaccaggaaatgcgggtacttcacttgagccaaaagctgagaacatcaatatcagtgcctctgatattggtgctctgatatctttttcaaagaaagaaaatattgatcttgtgattgtcggcccagaagatccacttgttaatggcattactgatgaattcaaaaaagttggaatcaaatgttttgg

SEQ ID NO: 314131 - DNA, 270 bp, Unknown
  Bacterial polypeptide expressing nucleotide sequence isolated from the Sargasso Sea
aatgattatagcaattataggaagtggaggaagagagcattcaatatgtaaaaaaatttcagaatctccaagagtcaagaaaatattttgtatacctggaaatgctggaactcatgaaattgcagaaaatattgagatagacttaaataattttgaagaaattaaaaattttttaaaaaaaataaaagctgacatcgtaatagtaggtcctgaaaagcctttggttgatggtattgttgattatttagaaaaagaaaatataaaagtttt

SEQ ID NO: 314132 - DNA, 507 bp, Unknown
  Bacterial polypeptide expressing nucleotide sequence isolated from the Sargasso Sea
gattaatgatatcaactcttgatgataaaccatatctacttgaatataactgtagaatgggtgatccagaaacacaaaatatccttatgtatcttgataaaaacgaagttgatttccttgaccttataggatttgacaactcacaatatcctgataacttcaacttatcatttatagataataaaaaatactcgggttattgttgtactatagttttagcagctacaggttatccagaaaaaccaataaaggatttttatattgatttatcccaattagaggaaaatgaatttgttaaagtatttcatgctggaacgcaaattaataatggttcgttaaaggttacgggtggaaggatactttccgttaatacgtatggagaggacaaacaaagtgctattgatacagcatatgagagtatatctaaaattaaggcttatactgattcagatttgaaaaatgaagatgattccttagtatttttcagaagtgatattggttcgtaat

SEQ ID NO: 314133 - DNA, 640 bp, Unknown
  Bacterial polypeptide expressing nucleotide sequence isolated from the Sargasso Sea
atgcctttctcttgtgaccataagcctgtctttgacgggaataaaggcccgaataccgggggtatgggcgtgtattcctctccaccacatctcaaaaaagcacagcaagactttattgagacgtcagttacggaaaaattggtttcggcgatggctgctgaggggctcacttatcagggaactatttatcccggcatgatgctgaccagtagtggccctagagtcgttgagatcaacgcccgtttcggtgatcctgagaccgaggctttgatgcctcggttgaaaagtgacctaatcgacatcgttgaggctgttgcgaaccagactttgaatgacatacatcctgaatggagtaacgagtactccgttggtgtcataatggcatcagcaggctatccgaattcctatactgccggtcatttaatttccggtattgaagatactgatgacaacgtccaggtgtttctcgccggagccgacagagacgaagacaataatctaatcacagcaggtggacgagtgctttgtgtagtggggactggcacaactttggaagatgctcgtgaaataacatatgacaacgtcaatagaataacctttgaaggagctcatttcagaacggatatcggctcgctttagt

SEQ ID NO: 314134 - DNA, 512 bp, Unknown
  Bacterial polypeptide expressing nucleotide sequence isolated from the Sargasso Sea
tttgaaaatattaattttgggaggtgggggaagagaacatgcattggcttgggctgtttctcaaaatccaaaatgtgaggatttattttgtgctccagggaatgctggcattaagaaactcgcgacttgtgtagctctaaacatattagacaaaagtgcggttgttgatttttgtaaaaaaaatcaaattagttttgttataattggaccggaagccccattagaaataggtatagcagacgcactggagtctgaagaaatattgacttttggaccttctgcaaagggaagtctgttggagtcttcaaaagcattcaccaaagaggtctgcagacttggtaaaattcctacggcgccatcacaagtttttaacaaagagcacgaggctattgattttataaacgcatcgaatcttccaattgtaatcaaagctgacggtttagcttcgggaaaaggtgtaacaatttgcaccctccgtgaatcagcatttgtggctataaaagatttattca

SEQ ID NO: 314135 - DNA, 136 bp, Unknown
  Bacterial polypeptide expressing nucleotide sequence isolated from the Sargasso Sea
atgaatttagctgttataggaagcggtggaagggaacattcgatttgctataaattaaaacaatctgctaaaataggtaaaataatttgtattcctggaaatgctggtacaaaagacctggctgaaaatatcaata

SEQ ID NO: 314136 - DNA, 406 bp, Unknown
  Bacterial polypeptide expressing nucleotide sequence isolated from the Sargasso Sea
atggccatctcgtccacccgtccccaccccctgcccgacctgcagcgggtgctcgtcgttggtggtggcggccgcgaacacgccctgagctgggccctgcagcgccatgacgccattgagacggtctggatcaccccgggcaacgccgggagtgaccagcaggccctcgccatcgcggagaccgacagcgccgccctgatcgcccattgccagacgcactccgttgatttggtcgtggtggggccggaagcccctctggctgctggggtggccgatgccctgcggcaggccggcatcgccgtgttcggtccaggggcagagggagcgcaactggaggccagcaaggcctgggccaaacagctgatgcaggaggccggggtgcccaccgccggccattgggcggtga

SEQ ID NO: 314137 - DNA, 526 bp, Unknown
  Bacterial polypeptide expressing nucleotide sequence isolated from the Sargasso Sea
aaacctacaatttctggtatgaataaaattggttgtccatataaaggaatattatacgcaggtataattcttaaaaataatgagcctaaattaattgaatataatattagatttggtgatcctgagtgccaggttttaatgatgagattaaagaatgacttatttgatttaatagaatctacattcgatggatcacttaaaaacaaagatataaaatggacagaggagccttgcataacagttgtggctgcaagcaaaggatatccgaaagaatttgaaaaaaatatagaaataaaaaatgttaaggatttaaagctaaatgataaagttcaactttttcatgctgcaacctttttagatgaaaaaggattaatgagaaataacggtggaagagtttttagttctactgtaatggacagtagtctaaaaattgctagaaaaaaagcattagaattattagatcttattgattggaaaaataaatattatagaaaagacattgcatttagaattattgataaatgag

SEQ ID NO: 314138 - DNA, 364 bp, Unknown
  Bacterial polypeptide expressing nucleotide sequence isolated from the Sargasso Sea
ggacgctcggtggccaacattgtggttgaaactcattccggttgtgcggtggcgactgtcctagcctcaggtggttacccaggaagttatgcgaagggaaaacccattcacctgcccaccgagttagactcagacgacctagtgcttttccacgccgggaccgcacgtaatgaggatgccttggtcacgtccggcggtcgcgtgctcgctgtagcggcagtggctaagacatttgctgaagcagctgaggcgagtcgggccggagcaagccaaataggatttgagggggctttttaccgcgccgacatcggatggcgcgagcaagctcgagtcgatcttccacccgagggcgatacgggttgag

SEQ ID NO: 314139 - DNA, 506 bp, Unknown
  Bacterial polypeptide expressing nucleotide sequence isolated from the Sargasso Sea
tatgaatatattaattattggtggcggtggaagagaacattctatagcgcgctctatttcgataagtaagaattgtaacaaaatatatattctcccaggaaatgctggaacagcagaagtaggggaaaatattgaaggggatgtaaatgattttaacctcataaagaaaacggttttgtcgaatcaagtttctgttgtttttgtaggacctgaggaccccattgtgaatggtatttatgatttttttaaaaaagaacaattattaaaagatgttttaattgtagcgccaggaaaaagagcagcaaaattagaagggagcaaagattttgcaaaagtattcatgaagaaaaataatatccctacagcaaaatacgcaacattttcaaaagaaactattcagcaagcctattcctttcttgatcaaatgaaacctccttatgttttaaaagctgacggtttagctgctggaaaaggtgtgttaattcttaataatttaaatgaagcta

SEQ ID NO: 314140 - DNA, 763 bp, Unknown
  Bacterial polypeptide expressing nucleotide sequence isolated from the Sargasso Sea
atttaatggaaaatttggtaaagctaaaaatctcttagttgaagaatacttaaatggtgaggaaatgagtttttttacaattcatgatggaaatatttttaaaaattttggtacagcgcaagaccataagagagttttagagggagacaaaggtaaaaatactgggggcatgggtgcttattcaccttccaggctaattaatgacgagctagaaaaaaaaataataaacagaatcataaaaccaactttgttgggattatctgaacttggaaatcaatacagaggttttttgtatactggtttaatgattgtaaaaaatgaaccatacttaattgaatataatgtaagaatgggcgatccagaatgccaaacaatacttccaaaattaaaaactgatttaagtgatatatttttagcttgttgccaaaaaaaattaaataaaattaatatagagtgggaaaataaaaaaagtttatgtattgttttatgttctaaaggatatccagaagatttcaaaaaaaatattgaaataaaaaacttagataaaatagaattaaataaaaataattttatttaccacgcaggaacatcagaaaataataataaaatttacgcgattggaggaagagtattaaattttgtttctacttctgagagttttgattttgctagaaaaaatattattaataatttaaaaaaattaaattggagtggtggtttttttaggagtgatataggtcacaaagttattcaagaaaaatga

SEQ ID NO: 314141 - DNA, 196 bp, Unknown
  Bacterial polypeptide expressing nucleotide sequence isolated from the Sargasso Sea
tttgaagattcaaacgaagcccacaaatggatatcaaagaataatactcctgttgtgatcaaagccgatggcttggccgctggaaaaggtgtattcatagcggatactaaagaggaaccattaaatgctgtttcttcaattatgtctaaacgaatattcggaaagtctggcgacaagatcgtaatcgaagaaaaga

SEQ ID NO: 314142 - DNA, 564 bp, Unknown
  Bacterial polypeptide expressing nucleotide sequence isolated from the Sargasso Sea
taacgaggctcaaaaaaaccaatgaacttgtagccaaacaactttttgaggaaacgggtactccctatgttggcatactgtatggtggctttatgttaacaaggggtggtgttaaggtcattgaatataacgcacgtttcggtgaccccgaagcaatgaatatcttgtctatattagagtcagacttcttgtcaatttgtatttctatggttgatggaaacctaaaaaaccaagatgtctctttcgaaaagcttgctactgtttgtaaatatgttgttccggtgggttacccagaaaaacccacaaaaaactttgaagtgttttgtgatcaaaatgaccgctctgtttttcttgcatctgttatgttaaaagatcaaaagctaatagcctgtggctcaagaaccgttgcggtggttggtaaaaacaaagacgtttttcaggctgagctgtttgctgaaaccggtatagcaaacatatccggaaacctctttcacagaaaagacattggcacaaagaagttgattgactctagaattaaaagaatgaagaagttgttgcaatgag

SEQ ID NO: 314143 - DNA, 376 bp, Unknown
  Bacterial polypeptide expressing nucleotide sequence isolated from the Sargasso Sea
catgaatgttctcgtaattggtaatggcggaagagaacacgcattgtgttatggtattaaacaatctccaaattgttttaatttatattgtataccaggtagtgatgctatcagcgaaattgcttcatcaattaacatagacgtagatgatcatgacgctattcttctattttgtctagaaagtaaaattgagcttgtggtaattggtcctgaactacctttaactagaggcttgtcgaatcttttaattaataattcaatattagtttttggtcctgatcagaaaggggctgatctagaaaaatcaaaaaagtttacaaaagatatttgtaaaaaattaaatattgaaacagctgcatatgatgtattttataat

SEQ ID NO: 314144 - DNA, 604 bp, Unknown
  Bacterial polypeptide expressing nucleotide sequence isolated from the Sargasso Sea
tatgggtgcttattctccagcaagattattaacaaacaatctagaagataaaattaaaaaaaaaattatagaaccaactttgaaggcaatggaaaaactgggtcatccatataatggttttttgtatgctggcctgatggttagcaaaggtgaaccttatttaattgaatataatattagaatgggagatccagagtgccaagttttgatgatgagattaaagacagatcttcttgaaatcatagattgtgtaacaagaaataaatcgcagaatttaaaaatagaatggaatgaaaatgagagcataacaatagttttgtgtgctaacggctatccaggtaattatgtaaaaaataaagagatcaaaaacttatcatctatattttcagataaaaataatcaaatttttcatgctggcacatataaaaaaaataacaagattttctcaaatggaggaagagttttaaatatcacttgttctgcaaaaaatttagaaaaagctagagatcaatctttggttaatataaaaaaaataaattggactgacggcttttttagaaaagatataggttggagagtaattaaaaaaaatgagaataattag

SEQ ID NO: 314145 - DNA, 766 bp, Unknown
  Bacterial polypeptide expressing nucleotide sequence isolated from the Sargasso Sea
aaataaaattgataaaatattctgttttcctggaaatgctggaaccaaagatattgcagaaaatataaatattgatttagataattttgaaatcctaaaaaattttattctagaaaaaaaaattgacttaatgattattggtccagaaaaacctctggtagaaggattggttgattatcttgaaaaatttaaaataaaagtatttggaccaggtaaaattgcctctcaattagaggggtctaagatttttacaaaacaaatttgtgaaaaatataaaattcccacagccaattttggaatttttgaaaataaaaatgactcaaaaaaatttttaaaatcaactaattatccaactgtaataaaagcagataatttagcatcaggtaaaggtgtttatatttgcaataatgaaaatgaagcaataattgctattgaagaaatatttaatggtaaatttggtgaagcaaaaaatttactcattgaagaatttttagaaggtgaagaaatgagtttttttactattcatgatggaaaaaactttaaaacttttgatacagctcaagatcacaaaagggttttggaaggagacaagggtaaaaataccggaggtatgggagcatattcgccctcaagactaattaacaaagacttaaaaaataaaattattgaaaaaattattagacccaccctagaaggtttggatgaacttggcactaaatataaaggatttttatatacaggcctgatgattgtgaaaaacgaacct

SEQ ID NO: 314146 - DNA, 608 bp, Unknown
  Bacterial polypeptide expressing nucleotide sequence isolated from the Sargasso Sea
aaaaaatacaggtggtatgggagcttatagtccgtcaggattaataaatgaaatattagaaaaaaaaattattaataaaataatttctccaactttaaaagcaattgaagatatgggagaaaagtataaaggatttctttatgctggtttaatgatatcagaaaatgaaccatatttaattgaatataatgtaagaatgggagatcctgagtgccaaacgattttgcctcttttaaaaactgatctcattgatatttttaatgcatgttgtgatgaaaatttagaaaatttaaatataaaatggagagaggaaaaaagtctatgtatagtattatgttctatgggctatccagataagttcacaaataatattaagatagaaaacttaaataatttaaaattaaataataatgatttcatttttcacgcaggaacaaaaaatgaaaaaaatgaaatattttcaaatggaggcagagttttaaattttgtttctctctctaactcatttaagaattcaagaaaaagagctataaaacttataaatcaattaaattggggaaatggtttttttagaaaagatattggttttaaaataatagataaatgag

SEQ ID NO: 314147 - DNA, 522 bp, Unknown
  Bacterial polypeptide expressing nucleotide sequence isolated from the Sargasso Sea
tacaaatagtaaattagtaaataaaatttatgctcttccaggtaatgggggaaccagtacaattgctacaaatattcaaggtgacgtaaatgactttaaaaaaattaaagaagaagtaattaataacaatatctctttggtctttgtcggaccagaggacccgattgtaaacggtatatatgatttttttaaatcagataattctttaaaaaatattaaaattattgcaccaagcaaacttgcaggacaacttgaggggagtaaagaatttgcaaaaaaatttatggatagatacaatatacccactgctaaacatggaacttttacgaaagataatattgatcagtctgatgcttttttggaaagcatgaaccccccatatgttctaaaagctgatggtcttgcagctggtaaaggagttttaattattgataatcttcagaatgcaaaagacgaactaagaagtatgattttagacaaaaaatttggtgattcatcatcaaaagttgttatagaagagtt

SEQ ID NO: 314148 - DNA, 727 bp, Unknown
  Bacterial polypeptide expressing nucleotide sequence isolated from the Sargasso Sea
tttgattgaagaatttttagacggtgaagaaatgagttattttatagttgctgatggtaaaaattacaaattctttggttcagcgcaagatcataaaagagtaggggaaggcgatgtaggtaaaaatacaggaggtatgggatgctactcgccatcaagacttttaagcgatgatttagaatttaaaattaaaaaaagaataatcgaaccaactttgaatgcaatcagagaacatggtggggtttacaaaggctttttatatgttgggcttatgattaaaaatgataatccatatttaatcgaatttaatgtgaggatgggagatcctgagtgccaaacaattttacctacacttaatacagacttaatggacgtatttcaatcatgttgcgaagggacattgagtcaattaaagataaatttttctaagtcaaaaagtatttgtgttgtattgtgttcaaaaggttacccagacaaatttgaaaataatattgaaataaaggatttagaacatctaattacacttaagaatcaaaatatttttcatgcaggaacattaaaaacaaaaactggtataatttctaacggtggaagagtattgaattttatttcaacatcagatgattttttaaaatctagaaatgaagcaattaatttaattaaaaaattaaattggaaaaacggttactatagatcggatattggttacaaagtaataaaattatga

SEQ ID NO: 314149 - DNA, 268 bp, Unknown
  Bacterial polypeptide expressing nucleotide sequence isolated from the Sargasso Sea
aatgaaggcgttagttataggaagcggcggaagagaacattgccttgcctggaagatagctcagtcccctatagtcgataaggtctatgtggcgccggggaatgcgggttcagcgcaggagcctggtgtcttcaacgtaaatatcgccgctatggattttgatgccttaatcgaatttgccacgaaagaatctatagatcttacagtcatcggcccggaagctcctttggtcgccggtatagtcgacgtatttgccctggccggactc

SEQ ID NO: 314150 - DNA, 811 bp, Unknown
  Bacterial polypeptide expressing nucleotide sequence isolated from the Sargasso Sea
gaaacaattgatgatgcaaaagatgcacttatcaaatgttttaaggataattcttttggtgatgctggttcagtagttgttattgaggagtttttagttggtgaagaggtaagtttattttcacttgtcgataaaaacggatttgttttaccacttacaacagcacaagatcataaaaaaattttagaaggagaaaaaggtttgaacactggcggtatgggtgcctacacacctgttccttctatttcagcagataaaatgaatgaattatctaaaacatttgttgagcctattatccaatatcttgctgaacaaggcataaattatcaaggcatgttttatgcaggattaattgtaacagataaaggtacaaatttactcgaaatcaatgttcgttttggcgatcccgaaactcaagcaatcattccacttttagaaacagatttactagaactacttcatgcctcagcagtaggcacgttaaatgaaataaaaaaaattaagtggaaaaatgattatgctatgacagtagtgatggcttctaatggttatcctgaggattataaaaaattgacatcaattaataatttggaaaatctttctttaactaaagatgattatctgtttcatgcaggaacaattcttagagaacataaatggctatctaatggtgggagagtattaaatatctctagtacaggtaaagaattaaaaactattagacaaaatattcataaagtgatcaatcaaattaattgggatgaaggatattatagaaaagatattggttggagatatatagatgattaat

SEQ ID NO: 314151 - DNA, 319 bp, Unknown
  Bacterial polypeptide expressing nucleotide sequence isolated from the Sargasso Sea
cttgattcatatgatatcgaatggactcaagcacattcttgcggagtagttattgcctcgaaaggataccccgaaaattatgaatcaaacaaagagattcagattaatattaatgatgaaaatgatactaaattatttcatgcaggaactaagtatgaaaacaataaaatcctcactagcggaggaagagtattttgtgcaacagctttaggtgttgatttgaaagaagctcaacaaaacgcatataatttagtaaataaagttgatttcgaaggtgctttctacaggaaagatataggatataaaggtattaaatgag

SEQ ID NO: 314152 - DNA, 325 bp, Unknown
  Bacterial polypeptide expressing nucleotide sequence isolated from the Sargasso Sea
atgcgaaaatcagcttggaggaggtcgtacgctttcgccggagagaaggtgctcgttctcggctccggcggccgggagcacgctctcgcgctcactcttgcaaagagctcgcgggtttcatccgtcatctgcgtccctgggaatggcggctgctctggcggcaagctgcggcgcgctaatgtgcccagaacgtatttagttgatgacggggactatcggcaggcaggcaagcgaagcataggacagaccgtcctctgccctgacgacgccaatatcacaagcaatattcatttgcagagttttgcgaggtttactactcagtaga

SEQ ID NO: 314153 - DNA, 626 bp, Unknown
  Bacterial polypeptide expressing nucleotide sequence isolated from the Sargasso Sea
agaaggcgataaagggaaaaatactggtggtatgggtgcatattctccttcaagattaattagcagtcaacttgaaacaaaaataataaataagataataaaaccaacattagaatatttaaaaaaagaaaatggaatctatattggttttttatatgcaggcttgatgattaaagataccgagccttacctaatagagtataatgttagaatgggagaccctgagtgtcaaactatattacctttgcttaataatgacttattagaattaattaataattgcgtagatggcactttggataaattagacatatcgtggcaagacaaaaaaagtatttgtatcgtcttaacttctaaaggttatcctgaaaaatttaaaaaaaatgttaaaattaaaaatttagaaaaggtagtaccaaaaataaaccaatatatttttcatgcaggtacaaaattttctaatgaagagttcttttctaatggtggaagggtattaaattttgtaacaattgatagcaattttaagttggctaaagaaaaatctatagatttaattaaaaatttgaattgggaaaatgggtattatagaaatgatattggttataaagttattaataataaatgag

SEQ ID NO: 314154 - DNA, 433 bp, Unknown
  Bacterial polypeptide expressing nucleotide sequence isolated from the Sargasso Sea
ttgttggaggtgaacacccgctttggcgatccggagtgtcaggtcatcctgccgcgcctcgaaagcgatctcttgaccgcgcttcgtgccacgcgcgaagggcggctgaacgagattgagttgacctggcaggaccaggcggcgctttgcgtcgtcatggcgagcaagggctatcccgagtcctatactaagggctcgatcatccgcggtattgttgacaccgaggcggcaacaagcgcgatcgtgttccatgccggcacgagccttgcggatggcgagatcacggctaccggcgggcgggtgctcggcgttaccactctcggggacgatattgccgcggcccaagcggcggcctatcgcgcggtggagatgatcgactggcctggcggcttctaccgccgcgatattggctggcgcgcactcggacgctaac

SEQ ID NO: 314155 - DNA, 114 bp, Unknown
  Bacterial polypeptide expressing nucleotide sequence isolated from the Sargasso Sea
gatgaaagttttagtgataggcggcggtggccgcgaacacgcactggcgtggaaagcagcccaatcgccaaaagtcagtcaggtatttgtagcgccggggcatgccggtactgc

SEQ ID NO: 314156 - DNA, 636 bp, Unknown
  Bacterial polypeptide expressing nucleotide sequence isolated from the Sargasso Sea
accacaaaagagtccatgaaggagataaaggtaaaaatacaggtggcatgggtgcttattctccatcaagattgtttaatgaaaaattagaaaaaaaaattattgaaaaaattataaaaccgactctttttggacttaaggatttaaagataacttacaaaggttttttatatgcaggtttgatgattaaaaataacgaaccttatttaattgagtataacgtaagaatgggcgatcctgaatgtcaaacaatacttccaaaactagatagtgatttattagatatttttttaacatgttgtgatggaaatttaaaagaaacaaaaatatcatggaataataaaaaaagcttaagcattgttttatgttctaatggataccctgatgaatacaaaaaaaatattttaatcaataatttagaaaaaattaaacaagatcaagacaatttatgttttcatgctggtacaataaaagaattagataaaatcatgtctgtaggtggtagagttttaaactttgtttgtattgcggataactttaatgaggctagaaaaaatgcaattaataacataaatattcttaattgggataaaggtttttatcgtaaagatattggatataaagtaattgactaat

SEQ ID NO: 314157 - DNA, 663 bp, Unknown
  Bacterial polypeptide expressing nucleotide sequence isolated from the Sargasso Sea
ataactcctctgaattggcagctgtttgtgattataagcggatttttgaaaatgataaaggtcctaatactggtggcgtgggggcatattcgcctccagagttttgggataaaaaattagaagataaaattaaagatgaaattctataccctactataaacgctttagaattagaaaactccagttattcaggattgctttatataggcataatggttacaaaaactggtccacaggttattgagtataactgcagatttggagaccctgaaacacagattttgatgtctaagcttgattctgatttattcgaaatttgcatggatatttcaaaaaaccattttgacccaaataaagttgtttggaacaataaaaatttttgctttgtcatgatgacagcagatggttatccaggagattatgaaacaggtaaattgatcagtggactagaaaatgcaagagattataatattatccactctggcacaaaaaaagtggacaaaaaaatatttactaatgggggaagagtaatcggagttgtaggagaaggatccagtatggaagaggcgataaaacactcatacaaaggtattaaaaaaattagttttaaaaattctttttatagaaaagatatcggaaaaagagctataaatgacaaataac

SEQ ID NO: 314158 - DNA, 469 bp, Unknown
  Bacterial polypeptide expressing nucleotide sequence isolated from the Sargasso Sea
gttaccaagagcggggtaaaggtaattgaatataatgctcgctttggagatccagaggcaatgaacgtattgtccatattaaaatcagactttttatctgtttgcatgtctatagttggtgggtctctagaaaaacaagaagtctgttttgaaaggcttgctactgtctgtaaatatgttgtgcccgttggctatcctaacaagccctcaagggggtttgaggttgtttgtaatcaaaatgactcgtcactttttcttgcatcggtaatgttaaaagacaaaaagttaatagcctgtggctctagaacagccgccgttgttggaaaaagcagcgacattaaacaagctgaatcttttgccgaggataaaatatcaaaaatttcaggaaatctttttcacagaaaagatattggtacaaaaaaactaattgactctagaaccaaaagaatgaaggagttgctgggttgag

SEQ ID NO: 314159 - DNA, 121 bp, Unknown
  Bacterial polypeptide expressing nucleotide sequence isolated from the Sargasso Sea
atgaaggtcttaatagttgggtcaggcggtagagagcacgccctctcgtggaaaatatctaaaagccctttagtaaaagaaatttatgttgctcccaggaaatggaggaacagaattggaa

SEQ ID NO: 314160 - DNA, 579 bp, Unknown
  Bacterial polypeptide expressing nucleotide sequence isolated from the Sargasso Sea
gctataccccacctgaattttgggatgaaaaactaagtcatcagataattagcaaaatcatttcccctactctaaattcaatgaataaaaatcaaacaccttttcaaggtattctttatgctggcataatgataactgaatcaggacccaaagttatagaatttaactgtagatttggtgatccagaatgtgagctaataatgccaatgtttcaaggaaatttatctgaagtttttctagatattgccaataaaaaatttgataataaaaaagttagttggaaaaataaaaaaggtgtatgtgttgttgtatgctcaggaggttatcctaattcttacaaaaaaggtttagaaatatcaggaatagataaaattaaaaataatttaatttttcattcaggaacaaaaaaaatagaaaataaaattatttcagatggtggaagagttttagtattatcaaatttagatgaaaatatcatgaaatctagatcaaatatttataaagaaatagataaaattaaatttaagggatcattttatagaaaagatattgggcttagagctgagaataatgaataaa

SEQ ID NO: 314161 - DNA, 555 bp, Unknown
  Bacterial polypeptide expressing nucleotide sequence isolated from the Sargasso Sea
agaaaaaaattatagacccaaccttgggggccatgaaagatttaggtcatccgtataaaggttttttgtatgcagggttaatgattaataaaaatgaaccttatttaatcgaatacaatattagaatgggagacccggaatgtcaggtattaatgatgagattaaaaacagacttagttaaaattatagacaatgcaactaaaaattcattaaataatttaaaaattgaatgggacaaaaatagttgtatgactatagttttatgttcaaaaggttatcccggatcttatattaaagatattgaaattaaaaatttaactaaatctacatcagacaaaaataatcaaatttttcatgcagggacatatgaaaaaaataataaagttttttcaaatggtggaagagtgctaaatattacatcgttagctaacaatttgttgggggcaagaaataaatctttagataatttagaaaaaataaactggactgatggtttttttagaaaagatataggttggaaagcgattaaaaaagatgagaataataagtggtaag

SEQ ID NO: 314162 - DNA, 694 bp, Unknown
  Bacterial polypeptide expressing nucleotide sequence isolated from the Sargasso Sea
gatgagctactttgtaatatctgacgggaaaacatttaaaaaatttaatactgctcaagaccataaaagagttggtgaaggtgacaagggtaaaaatactggtggtatgggggcatattctccgtcaggacttataaatgatgagttagatattaaaattattgagaatgttattaagccgaccttaaaagcaattgaggacatgggtgaaaaatacaagggatttttgtatgttggtctcatgattaaagacaataatccgtatctaattgaatacaatgtgagaatgggagatccagaatgtcaaacaattttaccattattaaactcagatctattagaattaatgctctcttgctgtgaaggaaatttagaaaatcaaacaataaactggaaaaataaaaaaagtatgtgcatcgtactttgctctaatggatatccagatatatacaaaaaaaatgtagagattccaaacttagaaaaagttacaaagaacaatagtacttttatttatcatgctggaactaaattgattgataacaaagtttatgcaacaggaggacgtgtattaaactttgtgaatatttctgaggatttaaagaaatcaagagagtctgtaataaatgaaattgaaaatttaggatgggcaaaaggtttttatagaaaagatattggttttagaattataaataaa

SEQ ID NO: 314163 - DNA, 208 bp, Unknown
  Bacterial polypeptide expressing nucleotide sequence isolated from the Sargasso Sea
atgattaaagttctaattgttggtagcggtggaagagaacatgctttcacttggaaggcttcacaatccaaacttgttgataaaattttcgtagcaccaggaaatgctggaacttcactcgagcctaaagccgaaaatatagatatcagttcctctgatattgaaggcctagtttctttttcaaagagagaaaatattggtcttgtta

SEQ ID NO: 314164 - DNA, 193 bp, Unknown
  Bacterial polypeptide expressing nucleotide sequence isolated from the Sargasso Sea
atgaatattggaataattggaagtggtggtagggaacattcaatatgttttaagttaaaacaatcatctttggttaatagaatttattgtataccaggtaatgctggaacttctgaattaagtgaaaatttaaatattgatattaatgattttgaaaaaatttatagagagattaaaaacaaagaatattaaa

SEQ ID NO: 314165 - DNA, 274 bp, Unknown
  Bacterial polypeptide expressing nucleotide sequence isolated from the Sargasso Sea
tatgaaaattgcaattttaggaagtggaggaagagaacatgctcttactttttcaatatctaaatctaataaagttaaaaaaatttactgtataccaggtaatgctggaacatcctcactagctgaaaatatttctatagatataaataattttgaaactgtatatgagtttttaaaaaaaaataatattgattttgtagttgttggtcctgaagatccacttgtaaatggcattgtagactatttggaaaagttaaatataaaagttttcgga

SEQ ID NO: 314166 - DNA, 697 bp, Unknown
  Bacterial polypeptide expressing nucleotide sequence isolated from the Sargasso Sea
aatgagttacttcgtaatctctgacggcaaaacttttaaaaagttcaatactgcccaagatcataaaagagttggtgaaggcgataagggaaaaaatactggtggtatgggagcttattccccatctggactcattaataaagagttggacttaaagattattgaaaatgttataaaaccaacatttggagctattaaggatttaagacaagcatacaaaggttttttgtatgttggtctcatgataaaagataatgagccttatctagtggaatataatgtaagaatgggtgacccagaatgccaaacaattttacctttactagaaaatgaccttttggaattaatattatcttgttgcgaggaaaacttagaaaaacaaatcataaagtggaaaaataaaaaaagtatgtgcattgtactttgctcaaaaggatatccggatgcctataaaaaaaacttagaaatccctaatctagataaacttactaatgataaaaatacttttgtttatcacgctggtactgagttaattgagagtaaagtttacgcaacaggaggacgtgtacttaattttgtaagtatttctgataatcttaaagagtcaagaaattcagcaattaaagaaattaggaatttaaattgggaaaatggtttttatagacaagatattggatttagagttatagataaatga

SEQ ID NO: 314167 - DNA, 691 bp, Unknown
  Bacterial polypeptide expressing nucleotide sequence isolated from the Sargasso Sea
attttgtaatattcagaatggaaaaacattcaaaagatttaataccgcccaagatcacaaaagagtgggtgaaggagataaaggtaagaatactggaggtatgggagcatattcgccgtctggacttattaacaacgatttagattcaaaaattcttgatagaattgtaaaacctacttttgctgcaattaaagacatgggagaaacttacaaagggtttttatatgttggtcttatgatcaaagataataacccgtatcttgttgaatataacgtgagaatgggggatccagaatgccagacaattttacctcttctaaaaacagatttattaaatttaataattgcatgttgtaacaataaacttaatgaacagaatattgattggtataaaaaaaagagccttagcatagtattatgttctaaaggttatccagaaaattataaaaaaaatattgaaatcccaaatttaagtaatattgagttagatgaaaataccttcttatatcatgctggaactaatatgtcagatggcgtggtacatgctataggcggaagggttttaaactttgtctcgatttcagataattatttggatagtagaaataaagctattgatcagataaaaaaattagattggaaatatggtttttatagatctgatataggttataaaattatagataaatga

SEQ ID NO: 314168 - DNA, 257 bp, Unknown
  Bacterial polypeptide expressing nucleotide sequence isolated from the Sargasso Sea
tatgaaaattgcaattttaggaagtggtggtagagaacatgcaattgcattacaaatttctaaatcaaaaaaacttgaaaaactttattgcataccaggaaatgctggtactaactctatagcaaaaaatataaatatagggttaaataattttgataaaattactagctttcttaaaaaagaaaaagttaatcttgttatagtgggccctgaaaaacctttagttgatggaatagttgattaccttgaacaaaaaa

SEQ ID NO: 314169 - DNA, 913 bp, Unknown
  Bacterial polypeptide expressing nucleotide sequence isolated from the Sargasso Sea
tcaaaaatttttacaaaacaactttgtgaaaaatttaatattccaactgctaaatttggaatatttaagaataaaaatagtgcaaaagagtttctgaaaaaaactaattatcctactgtgattaaagcagataatatagcttcaggtaaaggtgtatatatttgtaacaacgaaattgatgcattgttagctattgaagaaatttttaatggaaaatttggtaaagcaaaaaatttacttatagaggaatttttagagggtgaagaaatgagcttttttacgatccatgatggaaatacttttaaaaattttgaaactgcgcaagatcataaaagagttttagaaggtgataaaggtaagaatacaggtggaatgggtgcgtactcaccgtcaagacttattaacgatgaattaaaagataaaattataaaaaaaattattcaaccaacactaataggcttaaatgaacttggaagtaaatataaaggatttttatatacaggtttgatgattataaaaaatgaaccttatttaattgaatacaatgttaggatgggtgatccagaatgtcaaacaatacttccaaaacttgagagtgatctgcttgatatctttttagcttgttgtaatgaaaaactaaaagaaataaatatcaaatgggtaactaagaaaagcttatgtgtagtgctttgttcaaaaggatatccagactcatttgaaaaaggtgtagaaattaataatttaaatagaataaaactgaataaaaatgagtatttgtttcatgcaggaacaacagaaaaagaagataaaatatatgctgttggtggtcgagtattgaattttatttctatatcagaagatcttagctcagcaagacagaatatttttaaaaacatagaaaaattaaattggt

SEQ ID NO: 314170 - DNA, 697 bp, Unknown
  Bacterial polypeptide expressing nucleotide sequence isolated from the Sargasso Sea
aatgagtttttttgttatttgtgatggaaaaaattttaaaatatttaagactgcgcaagatcataaaagagttggtgaaggagatgaaggaaaaaatactggaggaatgggttcatacagtccgtcagggttaataaatgaagccttagaaattaaaattattgataaaataatttctccaactttaaaagcactaaaagaaatgggtgaaaagtataaaggatttctctatgctggtttaatgatattagataatgaacctttcttgattgaatataacgttagaatgggagacccagagtgccaaacaattttgccccttttaaagactgacttaattgaaatttttaatgcatgctgcgatcaagaattagataatttaaatatagaatggaaagaagaaaaaagtttatgtatagtattatgctccaaaggatatcctgataaattcacaaataatattaagatagataatttaaataatttaatattaaataataatgattttatttttcacgcaggaacaatcggtaaaggaaatgaaatattttcaaatggtggaagagttttaaactttgtctctctatctaattcatttaaaagttcaagagaaagagctgtaaaacttatagagcaattaaattgggagaatggtttttttagaaaagatattggttttaaaataatagataaatga

SEQ ID NO: 314171 - DNA, 571 bp, Unknown
  Bacterial polypeptide expressing nucleotide sequence isolated from the Sargasso Sea
gcgtcgacaccctttcatggaattctttatgctggcctcatgctcacgtcgcaaggtcccaaggtccttgaattcaatgttcgttttggtgatcctgagtgccaggctctctgcatccgtcttgaatcgagcctccttgagctcattgacgcggccgttgatcggcgtctcaatgaaatagcgtcaccaacatggaagtctggagcgagtgttactgtagtcatggcgtcggagggttatcccgaaacagttgagaagggacacgcaatccgtggacttggtccggctagtgaattgaacaatgttgttgtgttccacgctgcaacaacaacaaacccggataatccagaaacaatactcaccactggtggccgtgttctgggggtgactgctcatgcagagtctctggcacgtgcaaaactcaaagcgtacgaaggcgtcaaagcaattcgctggcgaggcgcgtggtgtcgcaaagacatcgcagacaaaggcttgcgacacgaacaggagcaagctgcctctgagtcgactgattcaagctcaccatcttctgagggcacggcatgaa

SEQ ID NO: 314172 - DNA, 391 bp, Unknown
  Bacterial polypeptide expressing nucleotide sequence isolated from the Sargasso Sea
tacaaaggaatcttgtatggtggatttatggctacaagagatggtgtaaaactcatagagtacaatgcaagatttggggatcctgaagctatgaatttattgactttactagactctgattttgcttcagtttgcatgtctatggctaatggtagtttggttgatgtgaaattcagaaaagaggcatcggtttgtaaatacgtggttcctaaaggctatggaagcaatccggcaaacgatgctactttgattgtaaatgattcttacagggaacattcagatctgtattatgcagcagttaacattaatgattcaggagaaattacaacaacgagctcgagagcagccgctattgtaagtactggtcatgatattggaactgcagaatcca

SEQ ID NO: 314173 - DNA, 470 bp, Unknown
  Bacterial polypeptide expressing nucleotide sequence isolated from the Sargasso Sea
cttgaatattttagttttaggaagcggagcgcgagaacattctatttgttgggctataaaaaagtctaaaacatgtgacaagttattttgctcacctggcaatgcaggaattcaaaaaattgctgaatgtaaatttataaatttaaaaaaaagaattaagatcctaaatttttgtaaaaaaaactctattgatttagttataattggtccagaggaatacttagctgatggggtaagcgactatctccaagataaaggaataaaaacctttggtccagttaaaaaagctgccaaacttgaaacctcaaaatcatttgccaaatcttttttgttaaaaaataaaatattaacaccaaaatatcgtaaatttacatcagtaaataaagccttgaactatttaaactccataaattttcctattgttataaaagcagacggtttagctgcgggtaaaggagttattatatgta

SEQ ID NO: 314174 - DNA, 825 bp, Unknown
  Bacterial polypeptide expressing nucleotide sequence isolated from the Sargasso Sea
ccggaggcaaaggagtcatcattacagaagaacttagtgaagcaaggcaagcactccgctcattgattgaagataaaaagtttggagctgcgagtgaaaaggtgctattggagaaatttttgaaaggaatagaagtctctttttttgtattaactgatggtgacgactatcgaattttgcctgaggcaaaagattataaaagaattggggaaaaggatacagggccaaacacgggaggaatgggggctgtttcgcctgtagtctttgcggatagggcctttaaagaaaaggtaagtaaaacaatcattagaccaacgattgaagggttgaagaaagagggaattgatttttgtggttttatcttctttggactgataaatgtagggggaaatcctttcgtgattgaatacaatgtgagaatgggcgatccggagacagaagttgtgcttccacggataaagagtgactttcttgaattattaattgccactgccgatcgaaaactaatcgataccgaaatagaatacgagcgatataccgccagcacggtggtctatgtgagtcggggctatccggaattttatgagaaaggccatgaaattaccattggagatgcaaagaccgtactttcgtttcatgccggcaccacgaccaaggatggaaaattggtaacgaatggaggaagagtgctggcacttacagggctgggcaaaaatttaggggaggcactcagcaaatcttatgcaggaggaaaagagatagaatgggaaggaaaaaaattcagacaggatataggatttgatttaaaagctttgggccaatagc

SEQ ID NO: 314175 - DNA, 574 bp, Unknown
  Bacterial polypeptide expressing nucleotide sequence isolated from the Sargasso Sea
cctttacttacaaataaactggaagaaaaaattaaaaaaaaaattatagaacctactcttaaagctatgaaaaatttgggtcatccatataaaggtttcttatatgcaggtttaatgattaacaaaggtgaaccttacttaattgaatataatattagaatgggcgatccagaatgtcaggttcttatgatgaggttagaaactgatttattagaaattatagatagagcaactaaaaataaaataaataatttaaaaattgaatggaataaaaaaagttctatcactattgttttatgtgccaagggttatccatataattatattaaagatagtgaaatcaaaaatttacctaatgttttaaccgataaaaataatcaaatatttcacgctggtacttatgaaaagaataataaaacttattctagtggtggaagagtattaaatataacttcatcatcagaaagtttaactgaagcaagaaataaatctttagctaatatagataaaataaattggtctgatggcttctttagaaaagatattggatggagaacaataaataataaataat

SEQ ID NO: 314176 - DNA, 305 bp, Unknown
  Bacterial polypeptide expressing nucleotide sequence isolated from the Sargasso Sea
tatgaaaattgcaattttaggaagtggtggtagagagcatgcaattgcaataaaaatttacaaatcaaaaaagtttgaaaacaagctttattgtattccaggtaatgggggaactaaatcgatagcacaaaatgtagatataaaattaaatgattttagtaaaatttataattttcttaaacaaaaaaaaattgatcttgttatagtcggtcccgaaaaacctttggttgatggaatagtagactatcttgaaaaaaaaaatattaaagtatttggacctaatcaaaaagtttcccaactcgaag

SEQ ID NO: 314177 - DNA, 721 bp, Unknown
  Bacterial polypeptide expressing nucleotide sequence isolated from the Sargasso Sea
tgatggaaaatttggttcagccaataaagtcctcctagaagaatttttagaaggtgaagagatgagctattttgtaatatctgatggaaatacgtttaaaaaatttcatactgcccaagaccataaaagagttggcgaaggtgacaaaggtaaaaatactggaggcatgggggcatatgctccctcagcactaataaatgatgagttggacctgaaaattattgaaaatgtaatcaagccaacttttgaagcgattaaggatatgggagaagtctacaagggttttttatatgtaggtctaatgataaaagataataacccttatctagttgaatacaatgtaaggatgggtgatccagaatgccagacaattttacctttattaagctcagatcttttagaattaatgttatcttgttgtgaagaaaacttagaaaatcataaagtggagtggaaagataaaaaaagtatttgcatcgtactttgctctagtggatatcccgatacatataaaaaaaatgtagaaattcctaacttggaaaagattacaaataataatacatttatatatcatgcgggcactgaattaattaataacaaagtttatgcgataggtgggcgtgtacttaattttgtgagtatttctaatgatttaaagaaatcaagagaatcgttgatttataaaattgaaaattttaattggaaaaatggtttttacaga

SEQ ID NO: 314178 - DNA, 898 bp, Unknown
  Bacterial polypeptide expressing nucleotide sequence isolated from the Sargasso Sea
taaacttgcaggacaacttgagggtagtaaagagtatgcaaaaaaatttatggagaggcacaatatacccacggctaaacatggaacgtttacaaaagagaatattgatcaatctgatgcctttttggaaagtatgagcccgccatatgttctcaaagctgatggtcttgcagcaggtaaaggagttttaattattaataatctgcaggaagcaaaagacgagctaagaagtatgattttagataaaaaatttggcgattcatcatcaaaagttgttatagaggagtttttagacggaatagagttatcgtgttttgttctcactgacggaaagaattataaaacacttccatttgctaaagattataaaaaaattggagaaggagacactggtttaaacactggaggaatgggtgcaatatcccccgttccttttttagataataagtttttagaaaaaattgaagaaagaataataaaacctacaattcatggaataaataaagaaaatatggaatacatgggggttgtttttattgggttaattaaagttgacgaagatccttatgtaatagaatataatgtcagaatgggtgaccctgaaactgaagttgtttttccaagaatcaaaaatgatcttttggatctttttagttcaatgggtacaactgagtttaaaaaaataaaattactaattgatgatagacatgctgctacaataattatggtctcaggcggatatcctctgaattatgaaaaaaataaaataatttcaggtttacctgaagaaacagattccataatttttcacgctggaacaaaaaaagttgacgataattttttaactagtggaggaagggttatcgctgtaacatctctttcggaaaactataaggat

SEQ ID NO: 314179 - DNA, 622 bp, Unknown
  Bacterial polypeptide expressing nucleotide sequence isolated from the Sargasso Sea
ccggaaaagccactagtagatggaattgttgattttttagaaaaaaataatattaaagtttttggccctagaaaaatcccttcacaattagaaggttcaaaaatttttacaaaaaatatttgtaaaaattacaatattccaacatttaaatttggtatttttgaaaatatagaaaatgcaataaattatcttaaaaatgtaaattttccaatcgtagtaaaagcggatggacttgcttcaggaaaaggagtctatatttcaaataattttgacgaagccaaactagcagtaaaagaaatttttggaggaaaatttggaatagcaaaaaatattttgattgaagaatttataaaaggtgaagaaatgagttttttcattataagtgatggaaaaagttttaaaatatttaagaccgcccaagatcacaaaagggtatatgaaggtgatgagggaaaaaatactggaggaatgggtgcttacagtccatcagggttaattaatgaagaattagaaaaaaaaataattaataaaataattttaccaacacttaaggcaattgaagatatgggtgaaaaatacaaaggattaatatacgcaggattaatgatatcaaataatgaac

SEQ ID NO: 314180 - DNA, 652 bp, Unknown
  Bacterial polypeptide expressing nucleotide sequence isolated from the Sargasso Sea
atgttaaatattttagtaattggatcaggggcaagggagcatgcaattgtgaggtctcttagtggctcttcaaaaaagaaagagatatactgtctcgccacaaatcataaccctggaattgctgagctctgtaaagatatggcagttgcagatataaataatcaagaaaccgtaaaaatttatgcaaaaaagaaaaagatcgattttgcaattattggtccggaaaacccactcgcaaacggtgttgcagatgccctatttgatataggagtagaatccgttggtcctaagaaagaccttgcgcagattgagacatctaaatcatttacaagaaatctcctaacagaatataagatccctggatgcccaaaattcaaaaccttttcaagtatggagggtgtagaagagtttttagatgaactgggtgattactatgttgtgaaatatgatggtcttgctggaggaaaaggtgttaaggtagctggagaccatcttcactctcatggtgaggcaatctcatactgcaaagagctgattgacagtggtgggagctttgtcatagaaaaaaaacttattggcgaggaattctcactaatgagtttttgtgatggctctaacttgagtcacatgcctgcagttcaggatcataaaa

SEQ ID NO: 314181 - DNA, 217 bp, Unknown
  Bacterial polypeptide expressing nucleotide sequence isolated from the Sargasso Sea
atgattatttgtgtcttaggaagtggaggtagagagcatgctatatgcaaaaccatatctttatcctcaaaaataagcaaaatatattgtatacctggtaacgctgggactcaacaattagctgaaaatatagatttagatatcgataattttgaaaaaattttaaagtttataaaaaattcaaaagtcgatttagttattgtaggtcctgaaaaac

SEQ ID NO: 314182 - DNA, 538 bp, Unknown
  Bacterial polypeptide expressing nucleotide sequence isolated from the Sargasso Sea
cctggagccggtggtgcaggccttgcgccaacggggcatcaactaccgcggggtgatctatgcggggctgatgctcaccagcacgggaccgcaggtgatcgaattcaactgccgctttggtgatccggagtgccaaacgctgatgcccctgctgcaaggcgacctggccgaagtgctgctggcctgcgccaacggacaactcgatcaagcacctgcgctcaccatcgcgcccctctgcagcgcctgtgtggtggccgctgcggctggttatccaggcacaccacaactgggtgaccccatctgtgataagggtccaggcctcgatcgcagccagaactccagccagctgtttgcggcgggggtgaaagccaatgccaatggcgagctgcacaccagcgggggccgggtgctggcggccgtggcccaaggccatgattttgatgaggcctttgccaaggcctacgaacgcttggctcaggtgaggtttacagggatgcaactgcgccgcgacatcggccatcaggtgcggcgtctttag

SEQ ID NO: 314183 - DNA, 423 bp, Unknown
  Bacterial polypeptide expressing nucleotide sequence isolated from the Sargasso Sea
tatgaaaattgcaattcttggaaatggtggtagagaacatgcaatagcaaccaaaatctcaaaatcccctaaacttgaaagattatattgtataccaggtaatgctggcactgactcaatagcagtgaatgttgatctggatttttataactttgaaagtttattgcaatttttaaaagaaaataaaattgatttggtaattgtaggacctgaaaaacctttagttgatggtgttgttgattttcttttaaaagaaaatataaaagtttttggtccaaacaaaaaagtttcacaattagaaggatcaaaaatatttacaaagaaaatatgtgaaaggtacaatattcccactgcacaatttggagtatttagaactgctgtagaagcttattcatatttaaaaaatgcaaatatgcctatagt

SEQ ID NO: 314184 - DNA, 261 bp, Unknown
  Bacterial polypeptide expressing nucleotide sequence isolated from the Sargasso Sea
aatgacgaatagtgaaaagactaacgtgctgttgctgggtaatggcggtcgagagcatgccattgcatggaaattagcccaaagcccaaatttagataaacttttcatagccccgggcaatgcgggtacagctgaagttggtaccaatgtacaactttcactggacgaccctgcaaaattgctggagtatgcaaagagccagtcaatcggacttacagttgtcggacctgaggctccattagcacttggtgtggtaaacat

SEQ ID NO: 314185 - DNA, 127 bp, Unknown
  Bacterial polypeptide expressing nucleotide sequence isolated from the Sargasso Sea
atgaaggttcttgttgtaggtggtggcggaagagaacacgctctagcctggaaattatctaaaagtaatttagtgactaacgtttttgttgctcctggcaatggaggaactgagattgaagatttaa

SEQ ID NO: 314186 - DNA, 406 bp, Unknown
  Bacterial polypeptide expressing nucleotide sequence isolated from the Sargasso Sea
attggttaatgtcttggtagtaggttccggtggacgtgaacatgcactaacatggaaattatcaaattctgataaggttgaacaagtttttactgcgcctggtaatggcggaacgtcaaataatgtattgatttctgtagatgatattgatgaactagtgaaatttgctcaagaaaaaaactgttttactgttgttggtccagaagctccacttgcaaatggaattgttgataaatttcatgaaaaacatatgcccatttttggtccgtcccaaaatgctgctcaattagaatcaagtaaaatttgggcgaaagaattcatgaaacgaaactctattcctactgcagattttgaaatatttgatgatgcacaaaaagcaaaagactttgtaaaatcatatgataag

SEQ ID NO: 314187 - DNA, 400 bp, Unknown
  Bacterial polypeptide expressing nucleotide sequence isolated from the Sargasso Sea
acacaaccaataatgatgagactgaaaagtgacctagttactttgtgtctagcgtcattcaacaatacattagctaaatgtaaggctaaatgggtagagcatgctgcgcttggagtagtagcagcttcagccggataccctgcgagtgccagtaaaggggatttaattacaggactcgattcaaaattttctgatcatatcaaagtgtttcatgctggtacttcaattattgataataaagtagtaactgcaggagggcgtgttttgtgtgttaccgcattaggtgaaacagtcgttgatgcaaaaaagtatgcatataaagcaatagagaatattacctacgaaggtatgttttttcgaaatgatatcggccatcgggctgttacaagggaaaattaat

SEQ ID NO: 314188 - DNA, 118 bp, Unknown
  Bacterial polypeptide expressing nucleotide sequence isolated from the Sargasso Sea
atgaatgttgggattttaggaagtggcggtagagaacatgcaatttgtttttgcatcaaaaaatcaaaaaatgtaaaaaatatatattgcctccctggaaatgctggaacttcaacta

SEQ ID NO: 314189 - DNA, 493 bp, Unknown
  Bacterial polypeptide expressing nucleotide sequence isolated from the Sargasso Sea
attattggcggattttttatatgcgggagttatgattgactctaatcaaaatataaaagttttagaatttaattgtagatttggggatcctgaaactcagcccattatgatgcgtctaaaaactgatttagctgaactatgtttaaaagcttgcaagaaagaattatcagatgaagatttagattgggatgacagaaagtcactaggagttgtaatggcttctggaggatatcctgctaattatgaaaagggcaatattattgaaggtattcctgatgaagcagaagatattaaagtattccatgcaggtactacttatcaagaaggaaatatcaaaactaatggaggtcgggttctttgcgtaacgactttaggagaatctgttttgttagctcaaaaaaaagcttatgatgctatctcaaatatttcatggaaggaatgtttttatagaaatgatattggctatagagctatagaaagggaagaaaattga

SEQ ID NO: 314190 - DNA, 325 bp, Unknown
  Bacterial polypeptide expressing nucleotide sequence isolated from the Sargasso Sea
tatgaaagttggaataataggaagtggtggtagagaacatgctatttgtgaaaccgtaaaaaaatcaaacaaaattgataaaatattctgttttcctggaaatgctggaactaaagatattgcagaaaatataaatattgatttagataattttgaagtccttaaaaattttattttagaaaagaaaatcgatttaatagtagttggcccagagaaacctttagttgatggattggttgattatcttgaaaaatataaaattaaagtatttggaccaaataaaattgcagctcaattagagggatctaagatttttacaaaacaa

SEQ ID NO: 314191 - DNA, 112 bp, Unknown
  Bacterial polypeptide expressing nucleotide sequence isolated from the Sargasso Sea
atgaaagttctgataattggttcaggtggaagagaacatgctttggcctggaaatgtgctcaagatgatatcgtcaaacatgtttttgtctgtcctggtaacgcaggaaccc

SEQ ID NO: 314192 - DNA, 208 bp, Unknown
  Bacterial polypeptide expressing nucleotide sequence isolated from the Sargasso Sea
aatgaaaattgcaattattggtagtggaggacgagaacatgctttagttcatcacttaagtaattcaaaaaaaataacaaaaatatattcaatacccggtaatgctggtactgaaaaaatatcttttaatattgatcttaatttagaaaattttcaagaattatatgattttatctataaggaacaaatcgaattagtgattgttggt

SEQ ID NO: 314193 - DNA, 481 bp, Unknown
  Bacterial polypeptide expressing nucleotide sequence isolated from the Sargasso Sea
tatgaaagttggaataataggaagtggtggaagagaacatgcgatttgtcaaagtttaagaaattccaataaaatagatagtatatattgttttcctggaaatgctggaacagctgatattgcagaaaatgtaatacttaatttagaaaattttgaaaatatcaaaaattttattttaaataaaaaaattgatttagtagttattggtccagaaaaacctttaaccgaaggtttggttgattatttaataaaatttaaaattaaagtatttggaccaaacaaaatagcatcacagcttgaaggatcaaaaatatttactaaaaaactttgtgaaaaatttaatattccaactgctaaatttggaatttttcaaaacaaaaatgatgcaaaactattttgtaaaaaatctaaatatccaactgtaattaaagctgacaatctagcgtctggtaagggtgtttacatctgtcataatgaagct

SEQ ID NO: 314194 - DNA, 148 bp, Unknown
  Bacterial polypeptide expressing nucleotide sequence isolated from the Sargasso Sea
ctcctgggtccaaggtgccccgattgtgatcaaggccgatggattggctgccggtaagggagtcacggtggcagaaacccatgcaagaagcggaagcggctttggacgatgccctaaggcagggaatttttggagaggctggacataa

SEQ ID NO: 314195 - DNA, 287 bp, Unknown
  Bacterial polypeptide expressing nucleotide sequence isolated from the Sargasso Sea
aatgaaagtacttgttttaggtcaaggcggcagggaacatgctatagcgtggaagctatctcgctcacctaaaatagaaaaagtttttatatgtcctggaaatggtggtacagctttagaaaaaaatattgaaaatgttgatttatctatagatgattcagatttattgattaattttacaaagaaagaaaatatagatattactattgtaggtcctgaaggtcctcttgttgatggcttagtagataaattcaaggaacataaccttaaaatatttgggccaacaa

SEQ ID NO: 314196 - DNA, 805 bp, Unknown
  Bacterial polypeptide expressing nucleotide sequence isolated from the Sargasso Sea
tatgagtattaattcaaaaagttctaaatgcttcaatagattagaaaatattttaataattggtaatggaggaagagaaaattctttggcttgggctattcaaaaaaatgaattagttaataaagtttatttaattcctggcaacgctggatctgaaagaataaataaatgtgaaagaataaaaattgatttagacaataaaattgaattatttgaaaaacttaaatttttaaaaatagatttaatcgtaatagggccagaaattccattggcaaatggattagcagattttcttcgaaaaaaagactttaaagtatttggaccaggtaaagatggagcaaaattagaatatagcaaatcttgggcaaaggaatttatgcgagacgcagatattccaactgcaagtttttggaaagttaattctctagaagaagctcaaaaaattatccattcatcctcgattccacttgtagtgaaagcggatggtttagcttcaggtaaaggtgtttttgttcccgattcaaaagaagaatgttttaaagctgcggaatcaatctttaatggtaagtttggtaaatctgggaatgtggtagttcttgaagaaaaaatccaaggtccagaagtctcagtttttgcattatgtgatgggaaaaaatatattttactcccaacagctcaagatcataaacgtcttgaggagaaagataaaggcccaaacacaggaggaatgggagcttattctcctgctccactaattactaaagactaccttgatgaaattatcaaaaaaataattgaacctaca

SEQ ID NO: 314197 - DNA, 399 bp, Unknown
  Bacterial polypeptide expressing nucleotide sequence isolated from the Sargasso Sea
catgagtattaattcaaacgactctaaaagttccaagaaattagaaaatattttaataattggtagtggtggccgagaaaatgctttagcatgggcaattgaaaaaaacgatttaatcaaaaacatttatctacttccaggaaatgctggttcagataaagtaaataagtctcagagaataaatttagatttgcataatattgaagaattaataaaacaattaaaatatctaaaaattgatttagtggtaataggaccagagactcccttagcagagggattaggtgatattcttcgtgaaaacaactttgatgtatttggaccaggatccgatggagctaaattagaatcaagtaaatcatgggcaaaggaatttatgaaggaggcgaaaattccgac

SEQ ID NO: 314198 - DNA, 571 bp, Unknown
  Bacterial polypeptide expressing nucleotide sequence isolated from the Sargasso Sea
tatgaaagttggaataattggaagtggtggaagagagcacgcaatttgtgaaagtttaaaaaattcaaaaaaaatacataaattattttgttttcctggaaatgctggtactgcaaacatcgcagaaaatatcaatataaatattgaaaattttgacagtttaaaaagttttatttttagtaataaaattgatctaataattattggtccagaaaaacccctagtagatggattagtagattatttagagaaacacaaaattaaagtgtttggaccaaataaagtagcttcccagctagaaggatccaaaatatttactaaagagctttgtaaaaattataacattccaacagcaaaatttggtacttttaaaaatagcattgatgcaaaaaaatttttaaaaagttcaacttatccaatagttataaaggctgataatcttgcgtcgggtaaaggcgtttatatttgtaatagtaaaaaagaaagttttttagcagtagaagaaatatttaacggaaaatttggtttagcaaaaaatgtattaatcgaagagtttttaaaggagaagaaa

SEQ ID NO: 314199 - DNA, 410 bp, Unknown
  Bacterial polypeptide expressing nucleotide sequence isolated from the Sargasso Sea
gatgaatgttttagttgtaggtcaaggtggtagagaacatgcattggcatggaaattatctaaatccaaacaagttagcaaaatttttgttgctcctggaaatggaggaacagctaatgaagcaaaatgttttaacaaaagcataaacgtaaataatttttctgcattagaagaacttgttaatagtgaaaatattgaattaatagtagtaggacctgaagatccacttgtaaacggcatcaatgattatttccaagattcaaaagtaaaagtatttggtccgacaaaagagggcgctcagcttgagggttctaaaatattttccaaaaaatttatgtttgagaataatattcctacaggtgctgctagtttcttttctgaatcaaaattagccaaaaattatcttaaga

SEQ ID NO: 314200 - DNA, 419 bp, Unknown
  Bacterial polypeptide expressing nucleotide sequence isolated from the Sargasso Sea
taactgtaggtttggagaccctgaaactcaaccaataatgctaagactgaaatctgaccttattgagatgattcaaacttgcttcactggaaatattagtaattataaagttgagtgggatgaaagatcagctatgggtatagtgatgtctagtatcggttatccagaatcttatgaaactggtaaagaaatatctggacttgatacattttataacatacttgataccaaagtattccactcaggtactcgtttagaaggcaacaatgtacttacaaatggtggtagggttttgtgtgtgacagctcttggagataacttaaagcagtccaataaaaaagcatactctgctgttaaacaaatagattggaatggaaaatattttagaaaagatattggatatagagtaatggagtagc

SEQ ID NO: 314201 - DNA, 763 bp, Unknown
  Bacterial polypeptide expressing nucleotide sequence isolated from the Sargasso Sea
ttggatgatgccctaaggcagggaatttttggagaagctggacaaaaggtggtgatcgaagaatttcttgaaggtgaagaaatgaccgttcttgcctttgtcgatggagaaacagttcttcctcttgttccctcccaggatcacaaaccgatcttcgatggagatcgtggaccgaataccggagggatgggagcctattcccccgtaccccaccttgaacaatggcttagggagattcaacgtctcattctgaaacccctggcaaagggtctgactgagtctggacagccttatcgcggtttgctttacacaggtctgatgctgaatgaatcaggtcctaaggtggtggaattcaatgtccgtttcggagatcctgaggcacaggtcgtacttcccttactggaaaatgaccttgttgaaatcctttcggcatcctgtgaggggaaattgtatgaggtcgaacttgaatggaagaaagaagcctcagtctgtgtgattgcagcagcaccgggctaccccgggcctcccatgaaagggttagccattgaactgccggaatttttggaagatggaacacagatctttcatgcgggaacgcgcatccaggaaaacaccttggtgacttcggggggaagggtttttggcgtcacggcccaggcgagggatattgaacaggctcggaatcgtgtttaccaactgatggaaaacatcaagttcaggggaatgcagtttcgttacgatattggagccaaagcgctttgaa

SEQ ID NO: 314202 - DNA, 416 bp, Unknown
  Bacterial polypeptide expressing nucleotide sequence isolated from the Sargasso Sea
catgagaattgcaataattggtagtggcggaagagaacattcaatttgccaaaaaatctacgagtcaagaaatgtaaatagcttattttgtattccaggaaatggaggaacagaaaatattgctactaacgttgaaataaatctaaaagattttgaaaaaataaaaaattttttaaaagagaaagtaattgacttaacaatagtaggccctgaggaacccttagtaaatggcattgttgattttcttagaaaacatgatttaaatgttttcggtcctgacaaattttgctcaaagcttgaaggttcaaaaattttcacaaaaaaaatttgtgatttaaaaaaaataccaacagcaaattttaaaatcctaaataatttaaaaaattcaattaagtatttagaaaataaaaaatatc

SEQ ID NO: 314203 - DNA, 513 bp, Unknown
  Bacterial polypeptide expressing nucleotide sequence isolated from the Sargasso Sea
aatgaatgtaggaattattggaagtggtggtagagagcatgcaatttgttatatgcttaataaatcaaaaaaagtgtccagaattttttgttttccaggtaatgcgggcacaaatctgattgcgcagaatgtcaatttaaattctgataacttctctgaactggaagaatattgcttagaaaaaaacatcaaaatgttaattgttggaccagaaaaaccattggtaaatggaattgtaaatcattttaaagataaatcgataaaagtgttcggtccagataaaatatcatcacaacttgagggttctaaaatttttacaaaaaaaatttgtcaaaaatataatattcccacctcaaagttcaaaatttgtgaaagtttaaatcaaacaataaattatctaaaaaatagtcattttcctcttgttataaaagctgatggtttagcatcaggaaaaggtgtttatatatgtgaaaatttcaatgaagcaaaaatagcctctgaagaaatttttaa

SEQ ID NO: 314204 - DNA, 544 bp, Unknown
  Bacterial polypeptide expressing nucleotide sequence isolated from the Sargasso Sea
tatgaaagttgcaattttaggaagtggtggcagagaacatgcattatgccatagtctaaaaaaatctaataaggtctctcaaattttttcaatacctggtaatgctggcacagcatctatttctgaaaatatcaatattaatttagatgattttaatgagataaaaaactttattattaggtcaaaaattgatctagtgattattggtcccgaaaaacctcttgtagatggattggtagattttttatatgaaaataatataaaagtttttggtcctaataaagatgcttctcaacttgaggggtcaaaaatatttacaaaagacttatgtaaaaataataatattccaacagccagatatggaatatttaggtctaaagaggcagcaatacaatttattaataaatcaagtcatcctattgtggtaaaagctgacggtttagcagctggaaaaggagtttatatttgtgaaaatattcaacaatctacaaatgcaattaatgaaatctttgatggaaaattcggaattgctgaaaagtactag

SEQ ID NO: 314205 - DNA, 661 bp, Unknown
  Bacterial polypeptide expressing nucleotide sequence isolated from the Sargasso Sea
aaaaaatttgaaaccgcgcaagaccataaaagagtatttgagggtgataaaggtaaaaacactgggggtatgggagcctactcaccatctaggttaattaatgaccaattagaaaaaaaaattattgaaaagattatcaatccaactcttcaaggtcttgaagatcggaaaataaactatattggatttctttatgctggattaatgattaaaaataatgagccttatttgattgaatacaatgtgagaatgggagatcctgaatgccagactattttaccaaagttggaaactcaacttttagatatcttattatcatgtacaaataagacattagataaaattaatattaaatggagtaatgaaaaaagcttgtgtgtagttgtctgttctaatggttatcctgatgaatataaaaaaaatgttttaattaataatttagataaaatttatttagataataaaaatttatgttttcatgcaggaactatttcaaaaggtaatcaaattttagctgtggggggaagagttttaaattttgtatcattatcaaatagctttaatattgctagagaaaaaatttttgacaacctaaaaattttaaattggggtcagggattttttagaaaagatattggatacaaagttatagacttatgag

SEQ ID NO: 314206 - DNA, 628 bp, Unknown
  Bacterial polypeptide expressing nucleotide sequence isolated from the Sargasso Sea
catgaatattggtttaattggaagcggtggaagagagcatgcactatgtaaaaaaataagcgagtcgaacaatgttaaaaatttatattgctttccaggtaatgctggaactgctgacatagcaactaatattgatattgatattttaaattttaagaaacttttaaaaataatcaagatattggaaatagatttaattatagtcggccccgaagagcctttggtaaggggcattgttgattatttaaaaagaaataatataaaagtttttggacctaataagaatgcttcaaaacttgaaggatcaaagtcatttgttaaaaaaatttgttcaaaatataatattccaactgctaagtttaaaatttgtaagaataagaaacatgtcaatgtttttttaaaaacttgcaagttacctatagttgttaaagctgatggattggcttcaggaaaaggtgtatcaatttgtcaatcaaagaaacaagttattaatagctgtaacaaaatatttaatggcaaatttaaatcttcaaaaaaagtagttttagaggaattcttatatggtgaagaagcgagttattttctaattgttgacaataaaaacttcaaattttttggaactgcccaa

SEQ ID NO: 314207 - DNA, 726 bp, Unknown
  Bacterial polypeptide expressing nucleotide sequence isolated from the Sargasso Sea
gtccagaagtttcagtttttgctctttgcgatggaaagaaatatattttacttcctacagcccaagatcataaaagacttaacgataatgataaagggcctaatactggaggtatgggagcttattctcctactccacttttgacaaaaagcaatcttgaaaatattaccaaagaaataattgagcctacaatcgatacattgataagaaagaatatcgactatcgaggagtcttatattttggattaatgatcacaaaatcaggtccaaaagttatagaatataactgcaggtttggtgatccagaatgccagacattaatgccattaatggataaagactttgtaatccttttacaaaaatgcgccaagggcaatcttcttggaaatgaaaaaattgaaatgcctaacaaattcagcggttgtgtaatagcaacttcaaaaggttatcctaatttttacgaaaagggatttcggataaattacggaaatattgatttagaagattgtcaaattttcgattctggaacatctcttaactcaaaaggtgaattcataaccgatggaggaagagttcttagtgttgtctgtcaaggccaaaattttgataaggtttttgaaaaggcttataaaaatttaaaagaaataagtttcgaaggtatttattatagaaaagatattggtcatcaagtgagagataaaaaattaattgataggaccaattaaa

SEQ ID NO: 314208 - DNA, 649 bp, Unknown
  Bacterial polypeptide expressing nucleotide sequence isolated from the Sargasso Sea
agtccttcctcttgttccctcccaggatcacaaaccgatctttgaaggagaccgtggaccgaataccggagggatgggagcctactcccccgtaccccaccttgaacaatggcttacggagattcaacgtctcatcctgaaacccctggcaaagggtctggctgagtctgggcagccttatcgtggattgctttatacgggtttgatgctgaatgaatcagttcctaaggtggtggaattcaatgtccgtttcggggatcctgaagcccaagtcgtgcttcccttgctggaaaatgacttagtggaaatcctttcggcatcctgtgagggaagattgaatgaggtcgaacttgattggaaaaaggaagcctcagtctgtgtgattgcagcagcaccgggctaccccggtccccccacgaaagggttagccattgaactgccggaatttttggaagatggaacacagatttttcatgcaggaacgcgtatccaggaaaacaccttggtgacttcggggggaagggtatttggcgtcacggcccaggcgactgatattgaacaggcccggaatcgtgtttaccaactgatggaaaacatcaagttcaggggaatgcagtttcgttccgatattggggccaaagcgctttga

SEQ ID NO: 314209 - DNA, 799 bp, Unknown
  Bacterial polypeptide expressing nucleotide sequence isolated from the Sargasso Sea
aaattttgcaagtttccggttgtagtaaaagcagatggtttggctgccggtaaaggtgttacaatttgtaacgataaaaaaaaagttttaaaaatttcagatgaaatttttaaaggtaaattcaaatcttccagaaaaattgttcttgaagaatttttagaaggtgaagaagcaagttactttttaattgtagatgaaaaaagttttaaattttttggctcagctcaggatcataaaagagttggagaaaaagataaaggtccaaacactggtggaatgggagcttactcgccagcacctattataaatgagtcaattgaaagaaaaataattaataaaattgttaaaccgaccttatcagcattaaaaaaaagaaaacatccttataaaggttttttatatgtaggtttaatgataaaagacaatgaaccttacttgatagaattcaatgtaagaatgggtgatcctgaatgccaagtaatattaccgaggttaaaatcggacttattaaaaataattattaatgtagtgacaaatagattagataaaacatatattaaatggaaaaaacaaaaatgtatgacgatagttctctgttcaaaaggataccctggaaactataaaaaaaataaaaatataaataatattgataaaatcaaattatctaaaaatgactttatataccacgcagggactaaacttgaaaataataaacttttatcaaatggaggtagagttttaaatataatctcattaggtaaaagttatttagctatacgaaaaaaaattattaaatgat

SEQ ID NO: 314210 - DNA, 667 bp, Unknown
  Bacterial polypeptide expressing nucleotide sequence isolated from the Sargasso Sea
tatgcaagacgcaaatattccaactgcaaacttttggaaagtcaattctctagaagaagccaagaaaattatcaattcatcattaatgccactggtagtaaaagctgatggtctagcctcaggtaaaggagtttttattcctaattcaaaaaatgaatgttttaaatcagcagagtcaatttttaatggtagatttggcaactctgggaacgtagttgttctagaagaaaaaattcaagggccagaagtttcagtttttgctttatgcgatggtaagagatacatattacttccatcagctcaagatcacaaacgacttaatgagaaagacaaagggccaaatacaggaggtatgggtgcttattctcctgccccattattaacagaagattaccttgatagaattatcaaagagataattgaacctactataaatgaactaaacaaaagaaatatcgattatagaggcgtaatttactttgggttaatgatcacagaatctgggcccaaagttatagaatataactgtagatttggcgatccagaatgccaaacaataatgcctttgatggatccaaattttgtatttcttttagaaaaatgctcaatgggaaattttactggtgatgaaaaattaatacttctgaaaaagttagtggttgcgtaa

SEQ ID NO: 314211 - DNA, 803 bp, Unknown
  Bacterial polypeptide expressing nucleotide sequence isolated from the Sargasso Sea
atgtgaatctaaaaaacaggttttaaacgtctctgaagaaatttttaaaggtaagtttgaatcttcaaagaaattagttattgaagaatttttaatcggagaagaggcaagctatttcttaattgttgataaaaatagttttaaatttttcggcactgcacaagatcataaaagagtcagagaaaaagatattgggcctaatactggtggaatgggtgcttattcaccagcacctattattaacaaaaatatagaaaagaaaattataaataaaattgtaaaacctactttaaaagctctaagaaaagaaaatcatccttatacgggttttctttacgttggcttgatgatcattaaaaatgagccgtatctaattgagtataacgtcagaatgggtgatcccgagtgtcaggttatattaccgaggcttaaaactgatcttttaaaaataattaaattttcaattaataacaatcttaaaaaaataaatattaaatggagtaaagaaaaaagtatgacaatagttttgtgttcaaagggctatccaggtaaatacaagaaaaatattttaatcagtaatttaaaaaatttaaaagaaaataaaaaagatattgtttaccatgctggtacaaaaattattaatggaaaacttttatctgttggcggtcgggttttaaactttacttcatcaggaaataatctttttatggtgagagaaaaaataattaaaatgattaaaaaattaaaatggaagagtgggttttttagaaaagatataggttggaaaattttagatagaaaat

SEQ ID NO: 314212 - DNA, 733 bp, Unknown
  Bacterial polypeptide expressing nucleotide sequence isolated from the Sargasso Sea
tgcaattctagaggggtctaaagtattcgcaaaagaatttatgaaaaattatgatattcctacagctgattatcagatgttttcatcagctgatgaagcaagagattttgttaaagataagaagcaccctattgtcattaaagcagatggtctagctgctggcaaaggtgttgtggtctctaattcaatagaggaatcaaatgaagcaatagataacctattgtcatcaaaacattcagattatcttgttatagaggagtttctgagcggacaagaattgtcagcaatttatgtatgtaattttaaaggctgttcttatgagatagcacttccatggacaaaggactataaatctagagatgaatacaataatggccctaatacaggcggtatgggagctgttactcatccgcttagctatgaacataagaatacagtatttaaactgcatttagatattgaaaaaataatggtaaagacaattgcaagtatcaatgattataataaaaaacatggataccttggatttttatatataggtttgatgattgatagccataataacattaaagtccttgagtataactgtaggcttggagatccagaaactcaaaacttaatgttaacactagaaaataaaaaaatagactttatagatcttatattaaatcaacctattaatgatattaaagatattaatctggatagaatagaaaagacagataatagtttt

SEQ ID NO: 314213 - DNA, 287 bp, Unknown
  Bacterial polypeptide expressing nucleotide sequence isolated from the Sargasso Sea
tatgaaacttggaataataggaagtggtggtagagaacatgctatttgcgaaaccgtaaaaaaatcaaataaaattgataaaatattctgttttcctggaaatgcaggaactaaagatattgcagaaaatataaatatagatttagataattttgaagtccttaaaaattatattttagaaaaaaaaattgatttaatagtagttggtccagaaaaacctttggtagatggattggttgattatcttgaaaaatataaaattaaggtatttggaccgaataaaattg

SEQ ID NO: 314214 - DNA, 214 bp, Unknown
  Bacterial polypeptide expressing nucleotide sequence isolated from the Sargasso Sea
atgaatattgctttaattggaagtggaggtcgtgagcacgcgttatgtaaaaagttaaaagagtgtacgaaaatcaagaaaattttttgcatcccaggaaatgccggcacagctgaattggctacaaacttaaatatagattatttaaattttaacttattactaaaatctatcaagcattataatataaaactagttgtagtggacccgaaga

SEQ ID NO: 314215 - DNA, 453 bp, Unknown
  Bacterial polypeptide expressing nucleotide sequence isolated from the Sargasso Sea
agcttcacagcttgaaggttcaaaaatattcacaaaaaaactttgtgaaaaatataagataccaactgcaaaatttggaattttttcaaacacaaaaatggctttatcatttcttcaaagctgtagctttccaattgtgattaaggctgatggtttggctgcaggtaaaggtgtctatatttcagaaaatttttcagaggcaacaaaagctgtacatgaaatatttgatggtaaatttggtacagcagaaaatttacttattgaagaatttttaagtggtgaagagatgagtttttttattatctcagatggtcaaagctacaaaatgtttggaacagctcaagaccacaaaagagtttttgaaggagataaaggtaaaaatacaggcggaatgggagcatactcaccctcaagattggagtcagataaattaaatgaaaaaataatcaataa

SEQ ID NO: 314216 - DNA, 355 bp, Unknown
  Bacterial polypeptide expressing nucleotide sequence isolated from the Sargasso Sea
tgccctggccaaggcgctggacaaggtcgaggcgacctgggacccgcgtccgaccgtcggcgtggtgctggccgccggtggctacccgggcgactacgccaagggcgatgtcatcgaaggtctggatgaagccgccaagctcgacggcaaggtgttccacgccggtaccgcactgaaggacggccagatcgtcaccgctggcggtcgcgtactctgcgccaccgccatcggcgccagcgttgccgatgcccagcagcaggcctaccgcctggccgagaagattcgctggaacggcatgttccaccgtaacgacatcggctatcgggccatcgcccgcgagcgcggcgaggactga

SEQ ID NO: 314217 - DNA, 499 bp, Unknown
  Bacterial polypeptide expressing nucleotide sequence isolated from the Sargasso Sea
ggcagtaattattgtggattcctttatgcaggaattatggttgataccaacgaacgaatcaaagttctagaatttaattgtcggtttggagatcctgaaactcaacctatcatgatgcgtctaaaaactgacttagctcaattatgcttaaaagcttgtaagaaagaattatcagatgagaaattagattgggatgaaaggaaatctttaggggtagttatggcttctggagggtaccctttcgcctacgacaaaggaaatattatccaaggaataactgaagagtctgaagatcttaaagtatttcatgctggaacaatatatgaagaaggagacattaaatctagcggaggtagggttctgtgcgtaacgaccttaggtgattctgtttcgttagcacaaaaaaaggcttatgatgcgatttcaagcattaagtggaaagactgtttttacagaaatgatattggctacagagctattgaaagagaaaaaaattgaa

SEQ ID NO: 314218 - DNA, 508 bp, Unknown
  Bacterial polypeptide expressing nucleotide sequence isolated from the Sargasso Sea
ttggttaatgtcttagttgtgggcgctggaggacgcgaacacgcactgtcatggaaattatcaacttctgaaaaaattgatcaagtatatgcagctcctggaaatggtggcacacttcaaaatgttgaattatctgttactgatattgaaggattagcaaaatttgctcaagaaaaaaattgttttactgtagttggtcctgaagatccacttgctgcaggcatagttgatgcctttgttgaaaaaggtcttcctatttttggaccctctaaaaatgcagcaaaattagaatcaagtaaaatttgggcaaaagaattcatgaaacgaaattcaattcctactgcagattttgaaatatttgatgatgcacaaaaagccaaagattttgtaaaatcatatgaaaaacctgttgtaataaaggccgacggtcttgcagcaggaaaaggtgttattgtttgtaaaaataaagatgaagctaatgacgctattgatacaattctaacaaaaa

SEQ ID NO: 314219 - DNA, 212 bp, Unknown
  Bacterial polypeptide expressing nucleotide sequence isolated from the Sargasso Sea
tttgaatatcttaatcataggtagtggtggtcgagagcatgcactagcttggaaatgtgctcaagatcaaaatgtaaatcaggttttcgttgctcctggtaatggaggcacctcattggataagggaattgaaaatttaaggattaatatcgaaaatgctgactcgattgcaaacatatgtaatcaaaatgggattgaccttgtgataattg

SEQ ID NO: 314220 - DNA, 674 bp, Unknown
  Bacterial polypeptide expressing nucleotide sequence isolated from the Sargasso Sea
catgaacgttcttgtcattggtaatggtggaagagagcacgcattatgttatggtattaaacaatcctctaattgttctaacttatattgtattcctggcagtgatagtatcagtgaaattgctttttctattgtcatagatgttaatgatcatgatgctattcttcaattttgtatagaaagtaaaattgatctagtggtgataggtccagaattgcctttaactaaaggattatcaaaccttttaatgaacaatgctatattagtttttggtcctgatcaaatgggagcagagttagaaaaatcaaaaaagtttacaaaagatatttgtaaaaaattaaatattgcaacagctgcctatgacgtatttgacaactatgatgatgccttaaatttttgtcaaaaccaatcctatcctgttgttatcaaagctgatggtttagcagcaggaaaaggagttattatttgtcaaaaaaaggaggacgcaaaagatgcgctgattaaatgttttaaagataattcttttggtgatgctggttcagttgttgttattgaagaatttttagttggtgaagaggtaagcctattttcacttgttgataaaaatggatttgtgttgccacttacaacagcacaagatcataaaaaaatcttagaaggagaaaaaggtttaa

SEQ ID NO: 314221 - DNA, 427 bp, Unknown
  Bacterial polypeptide expressing nucleotide sequence isolated from the Sargasso Sea
gaagaagctagttattttctaattgttgataaaaaaaattataagttttttggtactgcacaagatcataaacgtgttggtgaaaatgacaaagggcctaatactggaggaatgggtgcttattctcctgctccaataattaattcaacgcttgaaaaaaaaataattaaaaaaattgttgaacctactttacaagcattaaaaaaaaagaagtctccatataaaggatttttgtacgttggattgatgatcgtgaataatgagccttatctaatagaatataatataagaatgggtgatccagagtgtcaagttatattgccaagactcgaaactgactttttaaaaataattgataaagcagttaataataatttaaaaaaattaaaaattaaaaggagaaaacaaaaatgtatgacgatagttt

SEQ ID NO: 314222 - DNA, 214 bp, Unknown
  Bacterial polypeptide expressing nucleotide sequence isolated from the Sargasso Sea
aatgaacattgcattaataggtagtggtggaagagaacatgctttatgtcagaaaatctatgagtccccactgacacaaaaaattttttgtatcccaggtaatgctggtacaagtaaaattgcagaaaatgttaagataaatattttagattttaaaaaaatactaaaatttattagattaagtaaagttaaacttgtaatagttggtcctgaa

SEQ ID NO: 314223 - DNA, 346 bp, Unknown
  Bacterial polypeptide expressing nucleotide sequence isolated from the Sargasso Sea
atgaaaattgcaattcttggaagtggtggtagagagcatgcattagctttttcaatttcaaattctaaacaaacaaaagaaatttattgtattccagggaatgctggcacgtctaaaatagctcaaaatattttgatcaatttaaatgattttgaaaaaatttataaatttttaaataaaaaaaaaattgatttagtggttgtaggtcctgaagaaccactagtaaatggtattgttgattatttagaaaaattcaatataaaagtttttggaccaaataaacttgcatcacaattagagggatcaaaaatctttacaaaaaaaatttgtaaaaagtataatatac

SEQ ID NO: 314224 - DNA, 775 bp, Unknown
  Bacterial polypeptide expressing nucleotide sequence isolated from the Sargasso Sea
gcgctctttgggagcgcgggcgaagagattgtcgtggaagagtttttagacggcgaagaggcctcgtttttcgccgtcgtcggcggcggtaaggcggtgccgctcgcgagcgcgcaagaccacaagcgcgtgggagatggcgacaccggcttgaacacgggtggtatgggcgcgtactcccccgccccggtcgtcactccggagatcgcggacaaggtgatgcgagacatcatcaagccgacggtggatggcatggcggcggagggctgcccgttcacgggtgtcattttcgccggtttgatgatcaccaaggacggcaacgtcaaacttttggaacacaacatccgtttcggtgatcccgagtgccaagtgctcatggcgcgcttgacgagcgatctcacggcgttgctcctcgccgccgccaacgggacgctcaaaaacgccgaggtgacatggtccgacgactccgccgtcgtcgtcgtcatggccgccaacggctaccccggatcgtacgccaagggtgaggtgatctccaaactcgacgccgcgggtgatatcgacggcgtcaaggttttacacgcgggaaccgcctcgaacgacgccggagacgtcgtctccgccggcggtcgcgtcctcggcgtcaccgcctacggctcctccatcaccgaagccgccgcccgctcgtaccaggccgtggacaccatccaatggcccggcggtttcaaccgcagagacatcggctggcgcgccatcgctcgcgagaaagagggtcgat

SEQ ID NO: 314225 - DNA, 622 bp, Unknown
  Bacterial polypeptide expressing nucleotide sequence isolated from the Sargasso Sea
gatgaagatcctggtcatcggaggtggaggaagagaacacgcgctggtctggaaactgaaccagagtgctcatgtagagaaaatattttgtgcaccggggaatcccgggatttccgaaatggccgaatgtgttcccattgcggtcaatcaagttgatcaactggctgaatatgctgaatcccaaaaaatggatctgaccgtggtcggaccagaggaacctctggtattgggtgtggttgatgaattcaaaaaacgcgggttgaaaatttatggccccgatcgtcagtctgcaaaactcgaaggaagtaaagcctatgccaaatcagtgatgaagcgtttcggcattcataccgcccgttacgaggagttcacagattttgaagatgcccttggttatctccgggtccaaggtgccccgattgtgatcaaggccgatggattggctgccggtaagggagtcacggtggcagaaacccagcaagaagcggaagccgctttggacgatgccctaaggcagggaatttttggagaagctggacaaaaggtggtgatcgaagaatttcttgaaggtgaagaaatgaccatacttgcctttgtcgatggggaaacggtactccctctt

SEQ ID NO: 314226 - DNA, 397 bp, Unknown
  Bacterial polypeptide expressing nucleotide sequence isolated from the Sargasso Sea
atgaatattgctttaataggtagtggcggtagagagcatgttttatgccaaaaaatatatgaatctaaattatctaaaaatataatttgtattccaggaaatgcaggaactgcgaaaattgcaaaaaatatagacttagattttctaaattttaaaaaattactcaaaaccattaaatcacataaaatagatttggtagttgtcggtcctgaggagcctttagttaaaggaatagtagattttttgcgtaaaaaaaaagtaaaggtattcggaccaaataaatttgcagcaaagttagaaggctcaaaggcatttatgaaatccatttgtaaaaaatataaaatcccaacagcccaatttaaaatatgcaagaataaaaaagatgtaattaaatttc

SEQ ID NO: 314227 - DNA, 361 bp, Unknown
  Bacterial polypeptide expressing nucleotide sequence isolated from the Sargasso Sea
catgaatattggtttaataggaagtgggggaagagagcatgctttatgtcaaaaaatatcctattccacattagtaaataaaattgtgtgtatgcctggtaatgctggcactgcaaagctagcaattaatgaagatattgatattcttgattttaataaagtcttaaagacaatcaaatttcataatatagatttagtaattattggtcccgaagaacctctagttaaaggcttagtggattttttagagagaaagaaaattaaagtatttggtccaagaaaatatgccgctaaacttgagggtttcaaagccttcatgaagaaatatgtaaaaaaacaaaatcccgactggcaattttaa

SEQ ID NO: 314228 - DNA, 646 bp, Unknown
  Bacterial polypeptide expressing nucleotide sequence isolated from the Sargasso Sea
gcacaagatcataaaagagttaatgaaagagatgaaggaaaaaatactggaggaatgggtgcgtacagtccatcagggttaataaacgaatccttagaaattaaaattattgataaaataatttccccaactttaaaagcgctgcaagaaatgggcgagaagtataaaggatttctctatgctggtttaatgatattagataatgaacctttcttgattgaatacaatgtaagaatgggagacccagagtgtcaaacaattttacctcttttaaagactgacttaattgacatttttaatgcatgctgcaatcaagaattagataatatgaatatagaatggaaagaagaaaaaagtttatgcatcgtattatgttccagaggatatccagataaattcaaaaataatattaaaataaataatttaaataatttaacattaaataataatgattttatttttcatgcaggaacaacaggtaaaggaaatgaaatattttcaaatggtggaagggttttaaactttgtctctctatctaattcatttaaaagctcaagagaaagagttataaaacttatagaacagttaaattgggagaatggtttttttagaaaagatattggttttaaaattatagataaatgag

SEQ ID NO: 314229 - DNA, 808 bp, Unknown
  Bacterial polypeptide expressing nucleotide sequence isolated from the Sargasso Sea
caaaatagaaaaatgcctttagtaataaaggcagatgggctagctgctggtaaaggtgtttacatatgcaaagataaggaaagttcaaaaaatgctgtcatagaaatatttaatggaaaatttggtgaaacagaccaaatattagttgaagagtttttagaaggtgatgaaatgagttattttattatttctgacggattaagttttaaaagttttaataccgctcaagatcacaaaagagttggtgaaggtgacacaggtaaaaatactggtggcatggggtcatatgctccctcaaagcttattaatcagaatttagaagagaaaatagttaataaaattataaaaccaaccttaaaagcaattagagacatggacgaaaagtataatggatttttatatgcaggactaatgataaaagataatgaaccttatttgatagaatataatgtaagaatgggagatcccgaatgccaaacgattttacctcttttaaaaacagatttactagatttgatacttgcatgttgtaatagcaatcttaaagaaaaaaatatcgattggtttgaaaaaaaaagcttatgtatagtattatgctcaaaaggataccctgaaagttataaaaaaaatgttgatataccaaacttaaataatctaacaccaaataataataattttatatatcatgcaggaactgaaatttcgggtgataaagttcacgctgtaggaggaagagttttaaactttgtatcaatttcagataattatttagattgtagaaatgaggctattaatctaatagaaaaat

SEQ ID NO: 314230 - DNA, 211 bp, Unknown
  Bacterial polypeptide expressing nucleotide sequence isolated from the Sargasso Sea
tatgattgttggagttattggaagcggtggacgtgagcatgcaatatgttcaaagttatatacttcaaaaaaaatttctaaaatatattgttttcctggcaatgcaggtacttcaaaaatcgccgaaaacgttaatctagatttaaaaagtttttcaaaattaaaaaaatttatatataaatataaaatcgaattactgattgttggtcct

SEQ ID NO: 314231 - DNA, 664 bp, Unknown
  Bacterial polypeptide expressing nucleotide sequence isolated from the Sargasso Sea
tatgaatatattgatattagggagtggaggccgtgaacattctctagcctgggctatcaaacaaaatcccaagtgtgataatattttcgtagcaccaggaaatgcgggtattgctcaaattgcgaaatgtataagcgtcgatattcttaacgcaacgcacgtagtaaatacggtaagagaatacaatatcgattttgttctaattggccctgaagcacctttagcggcgggtgtcagtgatgttttgaaaaaagaaggaattttgactttcggaccttctaaagcatcttctcagttggaaaccagtaaaaagtttacaaaagaaatctgcgatgcctccggagcgcccaccgccgagtatagaagctttgactcgctggaaccagctttaacgtacataaaaactaaggaagctcccttggttgttaaagccgacgggctagctgctggcaaaggcgtaatcgtagctacagatattaagatggccttatcggcagtacataaaatttttggcggatcttttggaaacgccggcgcaagtgttgtgatcgaggagtttttggagggcgaggaagcatccctttttcttctaattgatggcgaaacaattctacctattggcactgcgcaagatcataagcgggcaggagatggcgacaccgga

SEQ ID NO: 314232 - DNA, 676 bp, Unknown
  Bacterial polypeptide expressing nucleotide sequence isolated from the Sargasso Sea
ctggaggagcggatggagggccctgaagtgtcggtgttcgccctctgcgatggggagcggatggtgctgttgccaccggcgcaggaccacaaacggctcaaggacggtgatcggggacccaacaccggcggcatgggcgcctatgcccccgccccgcttctgaatgccgagggcctcgaggaggtgcgccgcatcgtgctcgagcccaccttgaaggccctgcgccaacggggcatcgattaccgcggtgtgatctacgccggcctgatgatcacggccgatgggccccaggtgatcgagttcaactgtcgcttcggcgatcccgaatgccagaccttgatgcccctgctcggccctgagctcggcgccgtgctgcaggcctgtgccctgggacgcctcgatctggccccgcaactgagcatcgccgaacgctgcagtgcctgcgttgtggcggccgccgagggctacccggaggctccccgcaaaggcgatgcgattcgcatcgccctcgcccccagccccaaccatcagctgtttcatgccggcacccgccgcgacagctccggcgaactgctcaccgcagggggccgggtgctggccgtcgtcgcccagggagatgacttcgatgccgcctttgccggggcctacaacagcctcaatcagctggattacgccg

SEQ ID NO: 314233 - DNA, 159 bp, Unknown
  Bacterial polypeptide expressing nucleotide sequence isolated from the Sargasso Sea
aatgaacgtacttgtaattggcggcggtggtcgcgaacatgcgctcgcttttaaagcagcccagtcttctgaagtttcaacagtttttgtcgcgcctggtaatgcaggcacagcaacagagcctaagctagaaaatgtacctatcgatgttaatgacat

SEQ ID NO: 314234 - DNA, 334 bp, Unknown
  Bacterial polypeptide expressing nucleotide sequence isolated from the Sargasso Sea
catgataaatattctaattgttggtagcggaggaagagagcatgctttcacatggaaagcttcacaatctgatcttgtagaaaaaatctttgtagcaccaggcaatgcaggcacttcacttgagccaaaaactgagaatatagatatcggtgcttctgatattgaagctttaatatctttctcaaaaaaagaagatattgatctcgtgattgttggtccagaagacccattagtaaatggcattactgacgaattcaaaaaatttgggatcaaatgttttggccctgaatcacttggaacacagcttgagggctcaaaagattttgcaaaagcg

SEQ ID NO: 314235 - DNA, 941 bp, Unknown
  Bacterial polypeptide expressing nucleotide sequence isolated from the Sargasso Sea
tcaaataaaataaataagtctgagagaataattttgaatttaagcaatattaaagaattaatcaaaaaattaaattatttaaatatcgatttagtggtaataggaccagagatacctctagcacaaggtttaggagatgttcttagagaaaacaactttaatgtatttggtcctggagcagatggagccaaattagaatcaagtaaatcttgggcgaaggaattcatgaaaagtgcgaatattcctactgcaaatttttggaaagttaagtcattcgaggaagcaaagaagattattttaaactctccaaatccattagtggtaaaagctgacggattagcttcagggaaaggagtttttatacctgaatcaaaagaagcatctcttaaagctacagaagaaatatttaaagggaagtttggcaacgctggtgagatagttgttttggaagaaaaaattgagggtccagaagtttcagtttttgctctttgcgatgggaaaaaatacgttttacttccgacagctcaagatcacaaaagacttaatgagaatgataaaggtcctaatacaggaggtatgggggcatattcacctaccccactgattacaaaaaatattcttaaaaggattacaaaggaaataattaggccaacaattgatacattgttgagaaaaaatattgattacagaggggttttatattttggactaatgatcacaaaatcaggcccaaaagttatagaatataattgtaggtttggcgatccggaatgccaaacaattatgcccttaatggataataattttgtaaacctcttacaaaaatgtgccttaggtaatcttgttggagacgagtatattaaaatgactgataaatttagtggatgtgttattgcaacttcccaaggttatcctaattcttaccaaacaggtttttccta

SEQ ID NO: 314236 - DNA, 746 bp, Unknown
  Bacterial polypeptide expressing nucleotide sequence isolated from the Sargasso Sea
tttaaaaatttcaaaaaaggtagtcatcgaagaatttcttgagggtgaagagcttagttattttcttgtagtagataaaaaaagctttaaattttttggttctgctcaagatcataaaagagtaggtctaaaagatactgggccaaacacaggtggaatgggagcttactcacctgcaagattaatgagtcatgatttggagagaaagattttaaaaagaattgtaataccaaccataaaatttttaaagaaaaaatcgtcattcactggttttttatatgttggattaatgataaaaaaaaacaatccttatttagttgagtttaatgtgcgaatgggagaccctgaatgtcaggtaatattacctagagtcaaaactgatttatttaatataatttataactcctgtaaaaataaattaaataaaattaatattaattggaaaaaatctaaagccttaacaatagttttatgttcaaaaggatatccaaatagttttaaaaaaggatttgagataaataacctaaaacaaatttcaaaaaataataatttttatttatttcacgctggaaccaaaacaaatggcaataaaatagtttcagatggcggaagagtgcttaatttcgttggattaggatcatcttttaaaaccattaggtttaatataataaaaaaaattaaagaaattaaatgggagcatggtttttttagacgagatataggatggagagtaataaaaaaatgag

SEQ ID NO: 314237 - DNA, 734 bp, Unknown
  Bacterial polypeptide expressing nucleotide sequence isolated from the Sargasso Sea
agtatttatagaggaatatttggagggtgatgagctaagttacttcataattacagatggaaaagattttaagtgcattggtacagcgcaagaccataaaagaattggagaaggtgacaaaggtttaaatactggcggtatgggagcatattctccttctcaaattataaataaaagcttagaacaaaaaattattaaaaaaataattaaaccaacaataaagggaatgagcaaaataggatataaatattcaggtattttatatgctggtataattgttaaaaataatgaaccaaagttaatagaatataatattagatttggtgatccagaatgtcaggttttaatgatgcgattagaaagtgatctcatcagattaatgttatcaatctttaataaaaaattaaaaaatactaaaattaagtggtcaaaaaatccaggtataacgattgttgctgcaaacaagggatacccaaaaaaatttaaaaaaaactcagaaataaagggaataaaaaattttttaggaaataaaaacaaacaattgtttcatgcaggcacagaaataaatgataatgggaaatttattgctacaggtggcagagtattgaactctaccgtcgtatccaaatcattaaaaaaagctcgtgatgaagcattattagttttagataaattgaaatggaaaaataaatattaccggcgagacataggatttaaagttattagaaaatgag

SEQ ID NO: 314238 - DNA, 478 bp, Unknown
  Bacterial polypeptide expressing nucleotide sequence isolated from the Sargasso Sea
tctttatgccggactaatgattgaaaatgaaaaagctattttagttgaatacaatataagatttggagatccagagtgccaagttttaatgatgaaactaaaatcagatctaatagatttaataatgcattcaatcaatggatcaataaatgattatgattgcgattggcataatgaggactgtgccactgtagttcttgcttcaaaaggatatcctggagaatataaaaaaaacacagaaattaaaggtcttgaaaatatcaagaccagtcaaaaccttcaggtatttcatgcagcgacaattgagtctgataagaaaatactagcaaatggtggaagggttctatcagtaactgcaaaagataaatctttgcggtctgccctgagtacaatatatgacggagttaagaaaatagaatgggatgaatgttattatcgaaatgatataggtcataaagcattaaaaaatgaacactag

SEQ ID NO: 314239 - DNA, 826 bp, Unknown
  Bacterial polypeptide expressing nucleotide sequence isolated from the Sargasso Sea
atgggaattaattcaccaagtcctagaagctctaataggttagataatatcttaataattggaaatggcggaagagaaaactctttagcttgggctattcagaaaaatgagttagttaaaaaagtttatttaatacctggtaacgctggttcagaaagaataaataaatgtgaaagaataaaaattgatataagtaataaaaatgaactagtagaaaagcttgattttctcaagatagatttagttgtaatcggaccagaaatacctctagcaaatggattagctgattttcttcgcaaaaaagattttaaagtttttggtccaaataaagatggagcaaaattagaattcagcaaatcttgggcaaaggaatttatgcaagacgcaaatattccaactgcaaacttttggaaagttaattctctggaagaagccaaaaaaattatcaattcatcatttattcccctagtagtaaaagctgatggtctagcttcaggtaaaggtgtttttattcctaactcaaaagatgaatgttttaaagcagcagagtcaatttttaatggcaaatttggcaactctgggaatatagttgttctagaagaaaaaattcaagggccagaagtttcagtttttgctttatgtgatggagagcgatatatattacttccaaccgcccaagatcacaaacgacttaacgagaaagataaaggcccaaacactggaggcatgggagcttattctcctgcaccactattaacagaagattaccttgataggataatcaaagagataattgaacctacaataaatgaacttaaaaaaaaga

SEQ ID NO: 314240 - DNA, 793 bp, Unknown
  Bacterial polypeptide expressing nucleotide sequence isolated from the Sargasso Sea
cgggaacggcgggacgcgctcttccttggaggcccagcaggatcatctctcgcatcatcatgccgtccagcatctcgggcagaccggcgccggggagcaaaacgagggcgggctccaccagcttgcggcgatccagtcggtgccggagctccaggtttccgcccctgagttcgctgaggtgctcagcttctgccaggagaacaaggtgagcctcctcgtagtcgggccggagcagcccctggccgacgggatcgtcgacgtgctttccgcggcgggcgtgctcgtcttcgggccctccaaggctgccgcggagctcgaggcctcgaaggccttcgcgaaggagttcatgcaacggcacaagatccccaccgccgagttccgcgccttcgaggggaaggagaacctcgaggccgccctccagtacgtgaaggagcacgcgagcggggaggggaaggagcagaagcagctcgtcgtgaaggcgagcggcctcgcggcggggaagggcgtggtggtcccggaaacgctgcaggagacggagcgcgcggtgcgggatgcgctggagaagcgggtcttcggcgccgccggggagacgctggtgctcgaggagcgcttgtccgggcccgaggtctccgtcttcgtgctcacggatggggagcggtacctcttcttgcccccggcgcaggaccacaagcgagccttggacaacgactgcgggccgaacaccggaggtatgggggccttcgccccctcgcccctcctctccacggaggggctccggcaggggaggagcgga

SEQ ID NO: 314241 - DNA, 226 bp, Unknown
  Bacterial polypeptide expressing nucleotide sequence isolated from the Sargasso Sea
aatgaaaatcttagtaattggttcaggaggaagagagcatgctttggcatggaagtgctctactgataaatttgttgaaaaggtttacgttgctccaggcaatgcaggaacatttcttgaagaaaaaatagaaaatatttccttggacataaataacaatgaggatgtctctaacttctgtgtttcaaataatattgaacttgtaattgtcggtcctgaagatcct

SEQ ID NO: 314242 - DNA, 478 bp, Unknown
  Bacterial polypeptide expressing nucleotide sequence isolated from the Sargasso Sea
atgaaagttggcataataggaagtggtggtagagaacatgctttatgtgtttcattggaaaaatctgagataatcgaaaaaatatattgtgttcctggaaatgctggaacaaatcaaatagctgaaaatgtcaatattgatattagtgattttaaaaaattaaccagctttgttaaagaaaaaaaaattgagattgtattggttggccctgaaaaaccactagtcgatggtatagttgattatctagaaaatgaaaatgtcaaggtttttggtccaaataaattcgcatctcaattagagggttctaaaatatttacgaaaaaaatttgcaaaaaatatgaaataccaacagctaaatttgaaatctataatgataaagaaaaggctcacagtttctttaaaaattgcaattttccagtagttgtaaaagcagatggtctcgcagctggtaaaggagtttatattgcgaaaaagaaga

SEQ ID NO: 314243 - DNA, 749 bp, Unknown
  Bacterial polypeptide expressing nucleotide sequence isolated from the Sargasso Sea
ttctggtaaagaagttatcgtagaggattatcttattggcgaagaaataagttgtttagctctagttgatggaaaaaattatatacctttattattgtcacaagatcacaaaaaaatttatgaaaatgataaaggccctaatactggtggaatgggagcctattgtcctttgccatacataaaaagaaatatacaagatcaaataaataaagaaataattgagccaactataagagctatgaataaagaaaatagaatgtttaatggaattttatatgctggattaatgctagtaggtaaaaaaatttatttgattgaatttaatgttagatttggagaccctgaatgccaaccattaatttttttattaaaatcagatttgttaaaaattttgattaattgtactaacaaaaaattaagtaaaacaaaaattaaatggaaaagagaatatgcattaagtgttgtaatggtaaataagggatatcctggtaaatataaaaatattggtgttataaaaaatttaaacttagtagctaaaaaaagaaatgtaaaagtttttcattctgggacaagtttaaacaataaaaatgatataattgcttctggaggaagagttctatctgtaacggcttctgataaaaattttaatgttgcaaaaaaaaatgcctaccagatagtaaaaaaaataaaatggcaaaatagcttttttagaagagatattgggttcagagcaaagaaaatgaaatagc

SEQ ID NO: 314244 - DNA, 808 bp, Unknown
  Bacterial polypeptide expressing nucleotide sequence isolated from the Sargasso Sea
gtttatatatctgaaactaatgatcaagccaaaatagctgttaaagaaattttcgatggcaaatttggcgaagcaaaacagttactaatcgaagaatttttagacggtgaagaaatgagcttttttattatttcggatggaaaaaattataagcagtttggaacagcacaagatcataaaagagtacttgaaggcgacaagggtaaaaatacaggcgggatgggagcctattctccatcaagattggaaaataaagttttaaataaaaaaattatcgacaaaattatagagcctactttaaaggctttaaaagagggaaattcaacctttagaggatttttatatgcaggtttaatgatctcaaaaggcgagcccttcttaattgaatataatgttaggatgggggatccagagtgtcaaactcttttaccgaaacttaaaactgattttggattattgattaaggcatgcattgacgaaaatctaaaaaatacaagtatcgaatggcataatgataaaagtctttgtatagtaatgtgctcaaaagggtaccctgatgaatataaaaataacgttgaactgaaattgaataatctaatattaggaaagagtgagtttttatttcatgcaggaacaaaattaattgatggaaaaacttactctaatggaggcagagttttaaatatagttgttagatctaatttttttaaatctgccagagataaagccttaagtcttctagcaaaattgaattgggaaaatggtttttatagaaaagatataggtcataaagttgttgatcaatgag

SEQ ID NO: 314245 - DNA, 587 bp, Unknown
  Bacterial polypeptide expressing nucleotide sequence isolated from the Sargasso Sea
catgaacgttcttgtcattggtaatggtggaagagagcacgcattatgttatggcataaaacaatctcctaattgttctaatttatattgtattcctggaagtgatagtatcagtgagattgcttcttcgattatcatagatgttgatgatcatgatgctattcttcaattttgtctagaaaataaaattgatctagtggtaataggtccagaactacctttaactaaaggattatccaaccttttaatgaacaattctattttagtctttggccctgatcagatgggagctgaactagaaaaatcaaaaaagtttacaaaagatatttgtaaaaaattacatatagcaacagctgcttatgacgtatttaacaattatgatgatgccttcattttttgtcaaaaccaatcctatcctcttgttattaaagctgatggtttagcagcaggaaaaggagttattatttgtcaaacaatggaagatgcaaaagatgcactgattaaatgttttaaagataattcttttggtgatgctggttcagttgttgttattgaagaatttttagttggtgaagaagtaagcctat

SEQ ID NO: 314246 - DNA, 385 bp, Unknown
  Bacterial polypeptide expressing nucleotide sequence isolated from the Sargasso Sea
aatgaatattggattaataggtagtggaggcagagaacatgcattatgtcttaaaatatcaaagtctaaactagtaaaaaaaattttttgttttcccggaaatgctggcacagccgaaatagcgaaaaatattgaagtagatgtactaaattttaaaaaattacttcagtttatcaaattttataaggttgacctagtggtgataggtcccgaagaacctttaacaaaaggattggttgattacttagaaaaaaataaaatcaaagtatttggcccaaataagatttcgtctaagctggagggatctaaagctttcatgaaaaaattgtgtaagaaatataaaattccaacagcaaactataaaatttgcacaaataaaaatcag

SEQ ID NO: 314247 - DNA, 525 bp, Unknown
  Bacterial polypeptide expressing nucleotide sequence isolated from the Sargasso Sea
aatgaatgttttagttattggcaatggtggaagagagcacgcattatgtttaggcattaaaaattcttcaaaatgtgaaaatcttttctgtatgcctggaagtgatagcattaaagaaattgctacatgtgtggactatgatgttactaatcatcaaagtatagttgatttttgtgaagataataaaattaacttagtcgttattgggcccgaactcccactcacgcaaggattgacagacagcttatcgcaaaattctattttagtttttggtcctgatcaaaaaggtgctgaattagaaaaatcaaaacaatttacaaaagatatatgtaaaactcttaacattccctcagctaattatgctgtttttagtaattatgatgaggctatacaattttgtaaaaaccatcaatatccccttgtcattaaagcggatggtttagcagcaggtaagggtgttattatatgtgaaacttttgatgaggctgaaaaagctatctctaaatgttttaaagataaagcttt

SEQ ID NO: 314248 - DNA, 194 bp, Unknown
  Bacterial polypeptide expressing nucleotide sequence isolated from the Sargasso Sea
agaaatattccacgcaggtacaaaaactaaaaataataaaattgtcacttctggaggaagagttttaaatatcaatggttatggaaagaatttagttgatgcaaaggaaaaagcttatagtcttgtaaaaaaaattaattggtcaggttgttattataggaaagatattggttggagagcattaaaggaataaa

SEQ ID NO: 314249 - DNA, 473 bp, Unknown
  Bacterial polypeptide expressing nucleotide sequence isolated from the Sargasso Sea
tatgaaagttgttgttattggttctggaggaagagagcactctattgtttggaaattatcgcttgataatagagtgaaaaatatttatacatttacagataattctgggattgtagctttatctactttttcggagcccttgaataatctagaaaatattattgataaagtcttagaaataaatccagatatagttgtagtaggtcctgaggaacctcttagtaaaggtataacaaatatattaaatgaaaaaaatattaaagtatttgggccatctaaagaagccgcaagaattgaatcatcaaaaatcttttctaaaaagctaatgctagataataatattcctacggcatatgcagaatttttttcagactttgataaagcaaaagaatattcagaaaagaaaggctttcagaatattgtaatcaaggctgatggactagcagctggcaaaggagtctttttacctgatt

SEQ ID NO: 314250 - DNA, 406 bp, Unknown
  Bacterial polypeptide expressing nucleotide sequence isolated from the Sargasso Sea
ttttctaagaaagaaaatattgatcttgttatcgttggcccagaggatccattggtaaatggaattactgatacattcaccaaggatgggatcaaatgctttggtcctgaatcattaggggctcaacttgagggatctaaagattttgcaaagtcctttatgaaaaaacataacatcccaacagcaaactatgagagcttcagtgatgcaaatgaagttaagaaatacgttgaggataacgagttgccactagtgattaaagctgacggattagcagcagggaaaggcgttgtaattgcagaagatcacgaaactgctagtaaaaccattgatcaatttattggtgaaacaaaatttggagacgccagtaaaaaaatcattattgaggattttctagtaggtcagg

SEQ ID NO: 314251 - DNA, 385 bp, Unknown
  Bacterial polypeptide expressing nucleotide sequence isolated from the Sargasso Sea
tatgattgttggaataataggaagcggtggaagagaacatgcattatgtgaaagtttaaaaagatcaaataaaatcaataaaatttattgtttccctggaaatgcaggaactgactcaattgccgaaaatattaatgttaatgtaaatgattttgaaaatttaaagaatattatattagaaagaaatattgatattattattgtaggacctgaaaagccattagtagatggattggttgactatcttgaaaaatataagatcaaagtttttggtccaaataaaattgcttcacaacttgagggttctaaaatttttactaaaaaaatatgtgagaaatataaaatcctacagcaaaatttggaatttattcaagttatgaagagg

SEQ ID NO: 314252 - DNA, 389 bp, Unknown
  Bacterial polypeptide expressing nucleotide sequence isolated from the Sargasso Sea
tatgaatatagctttaataggtagtggtggaagagagcatgcattatgcaaaaagttaagagagtcaaagaaaataaacactatttactgcttgcccggtaacgctggaacctctaaacatgctcaaaatttaaaaattgatataaataaccgtagaaatttacttaaggtaataaattttttaaatataaaagttgttattgtaggtcctgaagaacccttagtaaacggaattgtagatttccttacaaaaaataagattaaagtatttggcccatcaaaatatgcctcccaacttgaggggtccaaatcattcatgaagttgatttgtaaaaaatatcaaatacccaccgcagattttaaaatttgtagaaaaatttcagaggtga

SEQ ID NO: 314253 - DNA, 613 bp, Unknown
  Bacterial polypeptide expressing nucleotide sequence isolated from the Sargasso Sea
catgaatgttggtataattggaagtggaggtagagaacatgccatatgtgtttcattaaaaaattcaaagaaaataaataatgtttactgttttcctggaaatgcaggaaccagtttaatagctcaaaatattgaagctgatcttaataattttgaagagttaaaaaagttaatccaaaaattaaatatagatttaataattattggtccagaaaaacctcttgttaatggtttggtagattatttagaagaaaataaaattaaagtatttggtccaaaaaaaattgcttctcaacttgaggggtcaaaaatatttacaaaaaagttatgtgaaaaatataaaattccgactgcaaattttggtgtgtttgaaaatgtagcaaagagcttatctttcctaaaacattgtaattttcctattgttgtaaaagcagacggtttagctgcaggcaaaggagtttatatttgtgaaacatttgagagttcaaaaactgctgtagaggaaatttttgacggaaaatttggaaaagccaaagaagttttaatagaggaatttttagaaggagaagaaatgagtttttttataatttctgatggaaaaacctttaaaaaa

SEQ ID NO: 314254 - DNA, 658 bp, Unknown
  Bacterial polypeptide expressing nucleotide sequence isolated from the Sargasso Sea
atgagtaatattttagttattggttctggaggaagggaagcatgtattataaaaaaattactaaaagattctaaagttatcgataaaaaaattaaaatattttgtttagcgtcaaataaaaatccatttataacagataattgtttatatgaaatttataatcatttaagtttaagtattctagaaatagtccttaacaaatttactccagattttgcgattataggacctgaagcaccactagaacttgggtttagtgattttcttgaatctatgaatataccgtgtattggaccactagaaatgtacgctaaaatagaaactagcaaaatcttttgtagaaatattataaacaaagcaggattacatgatctatcgcctagattttggattataccctctaatagtgatattgaaagttgttctgttattttgagtagtattaattgtgatattgtaataaaaaaaaatggattatgtggtggcaaaggtgttaaagttcaaggtgtagattttgttaatcatgatgatattttaaatgagttaacgcactgtgatcatgaaattttaattgaagagaaattgtgtggtgaagaattttcgttaatgagtatgctagatggttctgatagtatctatcactttcctcccatacaaa

SEQ ID NO: 314255 - DNA, 277 bp, Unknown
  Bacterial polypeptide expressing nucleotide sequence isolated from the Sargasso Sea
tatgaaagtaggaataataggaagcggtggaagagagcatgctttatgtctatctcttaaaaaatcagaaaaaatagataagatatattgttttcctggaaacgcggggacaagttttattgctgaaaacatacagactgatttaaacaattttgaaaaattaaaagaaattattcaaaaactgaaaatagatataattattattggacctgaaaaaccactagttgatggaattgttgatttttttgaaaaaaaccaaattaaagtttttggtcct

SEQ ID NO: 314256 - DNA, 358 bp, Unknown
  Bacterial polypeptide expressing nucleotide sequence isolated from the Sargasso Sea
tatgaatttattagttataggaagtggtggaagagagcatgcaatttgctataaattgagacaatctaacagagtaaatgaattattttgcctacctggaaatgcaggtacaaaaaaaattgcaaaaaatataaatcaagatatttcaaattttgaggaaatttataaaatcataaagcaaaataaagttgatatcgttattattggtccagaagagccgctggtgaatggcataactgatttcctaaaagaaagatcagtaagggttttgggtccaagtaaatttgcagctcaattagaagggtctaaagcttttatgaaaaatttatgtaaaaaaaataatattccaactgctgat

SEQ ID NO: 314257 - DNA, 813 bp, Unknown
  Bacterial polypeptide expressing nucleotide sequence isolated from the Sargasso Sea
gaagtccctctggtggatggaataagtgatttgtttgagaggaataatcttaacatttttggaccaaaaaagtatttcgcacagttagagggatcaaaagtattttctaaaaaatttatgcaagataataaattacctacggctgattataaggaatttgatgatattgaaaaagctgtttactacgtaaaatcaaaaaaacctcctatcgttgttaaatatgacggcttggcagctggtaagggggttgatgtatgcgaatctcaagatcaggcagaatcttctataaaaaatcttctcaaaccaaaagaaaagataatagttgaagatttcatcaaaggcatagagctttcatctatatatatatgtaatcctaatgcatcgaagaaaactattggcttaccatggataaaagattacaagtcccgtgatgaatacaactcaggtccaaatacaggaggtatgggtgcgattactcatccatattgttctttcaaaaaaaatgatgtctactcactcaacactgaaattgaaaagattattatcaaaaccattgtatcaataaataatagctctggtgatcaaagtaactataatggttttttatatcttggcttaatgatatctacagaagacaataagccctatctcctagagtataattgtagaatgggagatcctgaaactcagaatctaatgatgtatttatacaataatgatgtcgatttccttgatttgattggttttgataattcagagtatccagataattttaatctaacattcatagatgacaaaaaatattctggtttt

SEQ ID NO: 314258 - DNA, 721 bp, Unknown
  Bacterial polypeptide expressing nucleotide sequence isolated from the Sargasso Sea
tatgaaaattgcaattttaggaaatggaggaagagagcatgctttagcttctcaaatatcaaaatctccaaaaattgaaaaaatttactgtattccaggaaatgctggaaccagtatggtagctgaaaatgtaaaaatagaaattgatgattttaataaaatttataattttgtaaaaattaatcaattagatctagtaatagttggtccagagaaaccattagtagatggaattgtagattttttagaaaaaaaaaaagttaaagtttttggaccaagtcaaaaagcatctcagctagaaggatcaaaaatttttactaaacaaatttgtcaaaaatttaatataccaaccgcaaaatttggaatatttaataatggacaagaagctttagagtatttaaaaaatacaaaatttccaatagtaattaaagcggattgcattgctgcaggtaaaggagtttatatttgtaaagatctagaaagttcaaaaattgcaataaatgaaatttttaatggaaaatttgaaaaagcagaccagcttttaatagaagaatttttagaaggtgaagaaatgagttattttatcatatctgatggaaatagttttcaaagtttcaatacggcccaagatcataaaagagttggagaaggagatgtaggaaaaaacacaggtggtatgggtgcttactctccatcgagccttataaatcccgaactagaa

SEQ ID NO: 314259 - DNA, 751 bp, Unknown
  Bacterial polypeptide expressing nucleotide sequence isolated from the Sargasso Sea
aagaataaaaattgatataagtaataaaaatgaattagtagaaaagcttgattttcttaagatagatttagttgtaatcggaccagaaatacctctagcaaatggattagctgattttcttcgcaaaaaagattttaaagtatttggccctgataaagatggagcaaagttagaattcagcaaatcttgggcgaaggaatttatgcaagacgcaaatatcccaactgcaaaattttggaaagtcaattctttagaagaagccgaaaaaatcatcaattcatcatcaattccattggtagtaaaagctgatggtctagcttcaggtaagggagtttttattcctaattcaaaagatgaatgctctaaagccgcagaatcaatttttaatggtagatttggcgaatcaggtaatatagtagttctagaagaaaaaattcaaggtccagaagtttcagtttttgctttatgcgatggaaagaggtatacattgcttccaaccgcccaagatcacaaacgccttaatgagaaagatcaaggaccgaatacaggaggtatgggagcttattctcctgccccattattaacagaagattaccttgatcgaataatcaaagagataattgaacccacaataaatgaactaaataaaagagatattgactatagaggtgtaatctactttgggttaatgatcacgaaatctgggcccaaagttatagaatataattgtagatttggtgatcccagagtg

SEQ ID NO: 314260 - DNA, 762 bp, Unknown
  Bacterial polypeptide expressing nucleotide sequence isolated from the Sargasso Sea
aaaggtgttgtgttatctaatcagatttctgttgtatttgttggtccagaagaccctattgttaatggtatttatgattttttcaagactgataaagcattaaaagatgttgtaattattgcgccggcaaaggctgcagcattattagagggaagtaaagattttgcaaaagtttttatgcaaaaaaataatataccaacagcaaaatattcaacattttctaaagaaaatcttgaagaggcatactcttttcttgacgaaatgaaaccaccgtatgttctaaaagcagatggtctagctgcaggcaagggagtcttaattattaatgatttaaatgaagccaagcaagagcttcaaaatatgcttttaaaaaataagtttggcaaagcttctagtagagtagtgatagaggagtttcttgatggaattgagctttcctgttttgttataactaacggaaaagactacaagattctaccttttgcaaaagactataaaaaaataggagaatctgatattggccttaataccggtggaatgggggccatttctcctgtaccatttatagatactgattttaaaaagaaaatagaagacaggattataaagcctacgattagaggtatccaacaagagagaatggactatatcggttttatatttataggactaatcaaagttaagggtgagccatatgttattgagtataatgttaggatgggagatccaaaaactgaagttgtattccctagaattaaatca

SEQ ID NO: 314261 - DNA, 641 bp, Unknown
  Bacterial polypeptide expressing nucleotide sequence isolated from the Sargasso Sea
tcataaaaaagttggcgagggagatactggcttaaatactgggggtatgggtgcttactcccctgcaagaaatttaacttgggaattagaaaataaaattaaaaaaaaaattatagagcctacgcttaaagctatgaaagcattagaaaatccttataccggttttttatatgcaggtctaatgattaaggacggtgagccctatttaattgagtacaatattagaatgggagatccagaatgccaagtgctgatgatgaaattaaaaacagactttttgagtatagtcgaagcaacgataaataataatttaaataaattgaaaattgagtgggataataaaaaatgtattactattgttttatgcgctaaaggatatcccggagaatatgttaaagataaagaaatcaaaaatttatcaaaaattcatttagataaaaataatcaaatatttcatgctggaacctacgagcttaataataaaatattttcaaaaggtggcagggttttaaatgtaacttcctcaagcgaagatcttgatgaggctagaattaattctttatcaaatcttgaaaaaattgagtgggaaaatggttttttcagaaaagacattggctggagagctatcaaaaaaaaatgag

SEQ ID NO: 314262 - DNA, 640 bp, Unknown
  Bacterial polypeptide expressing nucleotide sequence isolated from the Sargasso Sea
atgaatatcttagttttaggaaatggtgctagagagcatgctctgtgttatgccatcgcaaaaagtcaaaagttaagtaagttattttgtgctccaggaaattatggcatatccaatgttgctgaggtatataattttgatattaacaattttgatatgctttatgacttttgcactgaaaaatctattgatttggtggtggtcggtcctgaagttcctcttgtgaatggtgtagtagattttcttgaaactaaagatatcaaatcttttggaccaaaaaaagttccagctatgttagagggatcaaaaatttttatgaaagatgtttgtgcgcaatacaatataccgacagcacgatatcaaaactttacagagaaaacttccgcagaagcttatcttcgtaaacaacccttgccagttgtcgttaaggcaagtggcttagctgcgggcaaaggtgtaaccatagctacgactttggacgaaggtcttaatgctattaatgacatttttaatgataaatttggctctggctgtgaactagtcattgaagagtttatggatggcgaagaagcaagttattttgttttcacggaatggtacaaattatattcccattatctagtgctcaagatcataaaag

SEQ ID NO: 314263 - DNA, 541 bp, Unknown
  Bacterial polypeptide expressing nucleotide sequence isolated from the Sargasso Sea
atgaacgttcttgtcattggtaatggcggaagagagcacgcattatgttatggcataaaacagtctcctaattgttctaatttatattgtattcctggaagtgatagtatcagtgagattgcttcttcgattatcacagatgttgatgatcatgatgctattcttcaattttgtctagaaaataaaattgatcttgtggtgataggtccagaactacctttaactaaaggattatccaaccttttaataaacaattctatattagtttttggtcctgatcaaatgggagctgaactagaaaaatcaaaaaagtttacaaaagatatttgtaaaaaattaaatattgcaacagccgcctatgacgtatttgacaactatgatgatgccttaaatttttgtcaaaaccaatcctatcctcttgttattaaagctgatggtttagcagcagaaaggggagttattatttgtcaaacaatggaagatgcaaaaaagggactaattaaatgttttaaagataattcttttggtgatgctggttcag

SEQ ID NO: 314264 - DNA, 436 bp, Unknown
  Bacterial polypeptide expressing nucleotide sequence isolated from the Sargasso Sea
atgattgtaggaattattggaagtggcggaagagaacatgcaatttgcaaaaaagttaaagaatcatcaaaaatcgataaaatattttgcatacctggtaatgctggtactaataatattgctgaaaatatagatattaaaattgatgattttgcatctataaaaaatttttgtctaaagagtaaaatagagctactaattgttgggcctgagcaacctttagtagatggaatagttgattattttcatgatacaaatataaacgtttttggtccaaacaaattagcctcaaagttagagggctctaaaacttttacaaaagaactatgcaaaaaatatgatatacctacagcaaatttcaatatatttgaaaatctaaaaacgaccgaattatctttaaaaaattttagatatcctttggttatcaaagcatgat

SEQ ID NO: 314265 - DNA, 781 bp, Unknown
  Bacterial polypeptide expressing nucleotide sequence isolated from the Sargasso Sea
tcaaacaaaattgataaaatattctgttttcctggaaatgctggaactaaagatattgcagaaaatataaatattgatttagataattttgaagtccttaaaaattttattttagaaaagaaaattgatttaatagtagttggcccagagaaacctttagttgatggattggttgattatcttgaaaaatataaaattaaagtatttggaccaaataaaattgcagctcaattagagggatctaagatttttacaaaacaaatttgcaaaaaatataaaattccaacagctagttttggaatcttcgaaaacaagaaagatgcaaaaaaatatttaaaatcaacaaattatccaacagtaattaaagcagacaatctagcttcaggcaagggtgtttatatttgtaataacgaaaatgaagccataattgctattgatgaaatatttaatggaaaatttggtgaagcaaaaaacttacttatagaagaatttttaaacggtgaagaaatgagttttttcactattcatgatggaataacttttaaaacttttgatacagctcaagatcataaaagggttttggaaggagataaaggtaaaaatactgggggtatgggagcctattcaccctcaagactaatcaacgaagatttaaaaaataaaatcattaataaaattattaaaccaactcttgagggtttagctggatttggctctaaatataaaggatttttatatacaggcttaatgattgtaaaaaacgaaccttatttgattgaat

SEQ ID NO: 314266 - DNA, 843 bp, Unknown
  Bacterial polypeptide expressing nucleotide sequence isolated from the Sargasso Sea
aattaaatatatttaacataaatattaatttatcaaatttagatgaattaattaattttgtttcgactgaaagtattgaccttaccatcgtaggtcctgagcaacccttagttagtggtatagtagatgtgtttaagaaaaatggcttaaatatttttggtccttcaaagaaggcttcaagaatagaaggttcaaaaatatgggcatataaacttatggaaaaatataatataccttgtcctaaatctgaagtttttgatcagtctgaattggcaaaaaaatatgtacgaaatttcaatcctaatgatttggtgttgaaggtagatggtttagctggaggaaaaggagtttttcttccaaagacagaagatgaaattaacaaaactattgaagatatactagataaaaaaatttttggttcacttaattctaaaattcttatttcagaaagaatttatggtccagaagttagtgtttttgcttttgttgatggtggtaaaacttctgaattggcagctgtttgtgattataagcggatttttgaaaatgacgaaggtcctaatacaggtggagttggtgcatattctcctcctgagttttggaagagaaaattagaagataaaattaaaagtgaaattttatacccaacaataaatgccctttcattagaaaattctagttattcaggagttctttatataggtgttatggttacaaaaactggtccaatggttatcgaatataactgcagatttggagacccagaaacacagattttgatgtctaaacttgattctgatttatttgaaatttgtatggatatttcaaaaaaaatattttgac

SEQ ID NO: 314267 - DNA, 550 bp, Unknown
  Bacterial polypeptide expressing nucleotide sequence isolated from the Sargasso Sea
catgattgtcggaattataggaagtggtggaagagaacatgcaatttgtgaatctttatataaatcaaaaaaaattaataaattatattgttttcctggaaatgctggaacttcaaaagttgcaactaatataattttagatttgaacaattttgaagagatcaaagattttgttttagaaaatagaatagatttggtaattgttggaccagagaaacccttagttgatggaattgtagattatttagaaaagtttaatataaaagtctttggacccaacaaagttgcatctcagcttgaaggttcaaaaatatttactaaaaatatttgccaaaaatacaatattccaactgctaattttggaatatttatcaatgaagaagaggcgtataaatttttggaaacttctaattttccaatcgtgataaaagcagataatttagcttctggtaagggagtttatatatgtgagaatagagaacaatcatctaccgcagttcaagaaatttttggtggaaaatttggtgaggcgaaaaatgttctttattga

SEQ ID NO: 314268 - DNA, 484 bp, Unknown
  Bacterial polypeptide expressing nucleotide sequence isolated from the Sargasso Sea
atggccgtggagcgcattttggtcgtaggcaacggtgggcgagagaacgctctggcctgggccctggctcgcagcccgcagcagccgcaggtatggatcagccccggtaacggagccagtgctgcgattccaggctgcaaggtgctgaaccactccgccagtgatgacgaggcactcgcaggcagttgccaaacccttgagattgggttggtcgttatcggcccagaagcgcccctggctgcaggcttagctgatcaactcaggggccatgggatcgccgtctttggtccaggggccgatggggcacaactggaagccagcaaggaatgggccaaaactttgatgcaggaggcaggcattcccacagcagggttctgggttgcctccgacgctgagcaaggccaagccattgcacagcgagagaacaaggcgttggtggtcaaggctgatgggctggctgccggcaaaggcgtcacggttgcca

SEQ ID NO: 314269 - DNA, 293 bp, Unknown
  Bacterial polypeptide expressing nucleotide sequence isolated from the Sargasso Sea
aatgatagttggaattattggaagtggcggaagggaacatgcaatttgtagcaaaattaaagagtcaagaaaaataagcaaaatatattgtattcctggtaatgctgggacaagtagtatcgcggaaaacatagatttagaaattaacgattttaaatctatcaaaaaattttgtgtaattaataaaatagaacttttgatagttggaccggagcagcctttagtagagggcatagttgattattttaaaaatacaaaaataaaaatttttggccccaataagatagcctctc

SEQ ID NO: 314270 - DNA, 791 bp, Unknown
  Bacterial polypeptide expressing nucleotide sequence isolated from the Sargasso Sea
aatgaaaaaggtattagttttggggtctggcgcaagggaggttgcaataactagaagtgtttcccaaagttcaatcgaaaatgctatcttttgtatttcaaaagacataaaccctcaaattaacgatctttgtgaagactaccatgtgtgtgatgttagcgatgttgccagcattgtctcttatagcaaaaaaagggaggttgatttagtaattgttggacccgaaaaccccctagcaggtggggtggtaaatgctcttgaacaagccggcgttgggtgcgttggaccaaaaaaagaggttgcaatgatagaaactagcaaggcttttgcaagaatgatagttgatctttgttgtccagaaaaaaacccacaaaggaaggaattcgattcaatcaagggcgtaaaaaacttcatggaagctcttgggggagaatatgttgttaagtttgatggtcttatgggaggaaaaggtgtgcgtatttcaggcgaacacctcaaaaacacgaatgaaggtcttgattatgccaacgaaatagtaaaaggtggtggaaagtttttagtggaagaaaagcttgttggtgaagaattttctttaatgagctttgttgatggcaagacctgtaagcacatgcctgtcgtacaagatcataagagggcgttcgagggagatgtcggaccaaacactggggggatgggcacctactcttatggaaaccactcccttccttttctaaccaaagaagatgttttagaggctcaaaaaactaatgagcttgttgctaaacagcttt

SEQ ID NO: 314271 - DNA, 583 bp, Unknown
  Bacterial polypeptide expressing nucleotide sequence isolated from the Sargasso Sea
atgaatttagccgttataggaagtggtggtcgtgagcatgctctatgttacaaattagggcaatcaaaagaagtaaaaaaaatattttgtatacctggcaatgctggtacaaaaaaactggctgaaaatataagcgaagacctctctaattttgaaggaatctacaaaataattaaggaaaaaaaaattgattgtgtaatcgttggtccagaagagcctttggttaacggtatagtggattttctaaccaagaaaaacattaaggtttttggtcctgacaaattttcttctcagcttgaagggtccaaagcattcatgaaaaatttatgtaaaaaaaataatattcccactgcaaattttggaatttttgaaaattttgaggaggcaataaattttataaaaagcaataagttgccaatagttgtaaaggctgatggtcttgcagccggcaaaggtgtctctatatgtcaaacaaaggaagaggcagagaaaaaagtaaaagaaataattgagggaaaattcaaatcttctaataaggttgttcttgaacaatatatcgatggtgaagaattaagctattttt

SEQ ID NO: 314272 - DNA, 151 bp, Unknown
  Bacterial polypeptide expressing nucleotide sequence isolated from the Sargasso Sea
atgaatttagccgttataggaagtggtggtagagaacatgctatttgttataaattaaaacaatcttcaaaaattaaaaaattattctgcatacctggaaatggtggtacaaaaaaaattgcagaaaatatagttgaggatacttctaatt

SEQ ID NO: 314273 - DNA, 506 bp, Unknown
  Bacterial polypeptide expressing nucleotide sequence isolated from the Sargasso Sea
tatgaaaattgcaattctgggaagtggcggtagggaacatgccatggcatataaaatttcaaaatccccaaaacttaaaaaactttattgtatacctggtaatgcaggaacaagctttattgcagaaaatgtaaatatagaaattagtgattttaatgaaatcagcaaatttattgaaaaatttaaaatagacttagtcattgtagggcctgaaagacctcttgtggatggcattgtagattttttaaaacaaaaaaaaattaaagtatttggacccaataaaaaagtttctcagcttgaagggtctaaaatctttacaaaaaaaatatgtgaaaaatatgaaatcccaactgcaaaatttggaatttttaactctaaatcaaaagctgttgattttataaaaaaaagtaaaatgcctattgttgttaaagcagatggtttggcggcaggtaagggagtttatatttgtgaaaatttagaaagttcaaaaagagcagttaatgaaa

SEQ ID NO: 314274 - DNA, 849 bp, Unknown
  Bacterial polypeptide expressing nucleotide sequence isolated from the Sargasso Sea
tgttttccaggaaatgctggtacaaatgatattgcagaaaatatctctattgatttagaaaattttgaaaatttaaaaaaatttatttttgataataaaataaatttaattgtgattggtccagaaaaacctttggttgatggtttaactgattatcttgaaaaacataacattctagtatttggtccaaacaaaattgcatcacaacttgagggctcaaaaatatttaccaaacaactttgtaaaaaatttaatattccaacagcgaaatttggaatttttaataacagagaagaatcaattaaatttttaaaaaattcaaaatttccaatagtaatcaaggctgacaatttggcttcgggaaaaggtgtttatataagtgaaaatgaaaaggaagctcaaattgctgttaatgaaatttttgatggaaaatttggtgaagcaaaaaacttattaattgaagagtttttatatggtgaagaaatgagcttttttacaatacatgacgggaaatgttttaaaaattttggaactgctcaagatcataaaagagtacttgagggtgataaaggaaaaaatactggcggcatgggtgcatactcgccatctagattaataaacaatgaacttgagaaaaaaataattaataaaattataaatcctactcttaagggattatctgaattaggagtagaatataaagggtttttatatgctggattaatgatagtggaaaatgaaccatttttaattgaatacaatgtaagaatgggagacccagaatgtcaaacaattcttcctaaactaaaaactgatctgtgtgacgttatacttgcttgctgcaaaaaa

SEQ ID NO: 314275 - DNA, 532 bp, Unknown
  Bacterial polypeptide expressing nucleotide sequence isolated from the Sargasso Sea
atgaaagttggaataataggaagcggtggaagagaacatgctatttgccaaattataaaaaattccaataaaattgataaaatattctgttttccaggtaatgctggcactaaagatattgccgagaatataaatatagatttagagaattttgaaaaccttaaaaattttattttagataaaaaaattgaattaattattgttggaccagaaaaacctttggtaggaggattagttgactatctagaaaaatttaaaataaaggtgtttggaccaaacaaaatagcttcacaactagaaggctcaaagatttttacaaaacaactttgtcaaaaatacaatataccaacagctaaatttggaatttttgaaaatataaatgatgccaaaaaatttttgaaagaaactagttttccagctgttgtaaaagcagacaatctagcttcaggtaagggagtttatatttgtaaaaataaagacgaggggttttctgcagttgaggaaatatttaatggaaaattggaaaagcaaa

SEQ ID NO: 314276 - DNA, 739 bp, Unknown
  Bacterial polypeptide expressing nucleotide sequence isolated from the Sargasso Sea
gcgggcaagggagtttatatatcaaagaatttttctgaggctaaagaagcggttgatgagatttttgacggaaaatttggagaagctaaaaaaatattggtagaagaatttttaaatggtgaagaaatgagtttctttattatttgtgatggtaaaaattttaaattatttaaaactgcacaagatcataaaagagttaacgagggagatgagggtaaaaatactggaggaatgggcgcttatagtccttcaggattaataaataaagatttggaaaataaaattattaaaaaagtaattttaccgactttaaaggcaatagaagaaatgggtgaaaaatataaaggttttctttatgctggtctaatgatattggataacgagcctttcttaattgaatataatgttagaatgggagatcctgagtgtcaaacaattttacctctcttaaaaactgatctaattgatatatgtgatgcatgctgtactgaaaatttacaaaatataaatatagaatggaaagaagaaaaaagtttatgtattgtgctgtgctctcaaggttatcccgaaaaatttacaaataatattaaaatagataatttaaataagttacaattaagcattaatgattttgtttttcatgcaggaacaaaaaaagaaaaaaatgaaatattttcaaatggaggaagagttttaaactttgtttctctctcaagttcatttaaaagctcaagagaaa

SEQ ID NO: 314277 - DNA, 223 bp, Unknown
  Bacterial polypeptide expressing nucleotide sequence isolated from the Sargasso Sea
atgataaatgttctaattgttggtagcggcggaagagaacatgctttcacctggaaagcttcacaatctgatcttgtagataaaatcttcgtagcgccaggaaatgcaggcactgcacttgaaccaaaagctgaaaatataaatatcggtgcttctgatatcgatgccctggtatccttttcaaaaaaagtaaatattgatctcgtgattgttggtccagaag

SEQ ID NO: 314278 - DNA, 484 bp, Unknown
  Bacterial polypeptide expressing nucleotide sequence isolated from the Sargasso Sea
aaaaccattgatcaatttattggtgaaacaaaatttggagatgcgagtaaaaaaatcattatcgaggatttcctagtaggtcaggagcttagctatatcgtgatggtggatggaactgaatatcttccccttgcaacatctcaggatcataaaacaatcggagagggagatgtcgggctcaatactggtggaatgggagcatattcgcctgttccgtttgtaaatgatcaactcgatatcacaattagggaaaaagttattgagcctactattagaggactttctgaggaaggaattatgtttagaggctttctgtatgccggcctaatgattgattctaattataatctaaaggtattggagtataactgcagatttggagatcctgagactcaaccaataatgctgaggctgaaatcagaccttatagatatgattcaagcttgcttctctggaaagattagtaattatgaaattgaatggg

SEQ ID NO: 314279 - DNA, 902 bp, Unknown
  Bacterial polypeptide expressing nucleotide sequence isolated from the Sargasso Sea
acatattgcagaaaatataaatatcgatttagatatttttgaagtccttaaaaattacattttagaaaaaaaaattgatttaatagttgttggtccagaaaaacctttggttgatggattggttgattatcttgaaaagtataaaattaaagtatttggaccaaataaaattgcagctcaattagagggatctaaaatttttacaaaacaaatttgtgagcaatataaaattccaacagctagttttggaattttcgataacaagaaagatgcgaaaaaatttttaaagtcaacaaattatccaactgtaattaaagcagacaatctagcctcaggcaaaggtgtttacatttgtaacaacgaaagtgaggctgtaattgctattgaggaaatatttaatggaaaatttggtgaagcaaaaaatttacttgtagaagaatttttaaaaggtgaagaaatgagtttttttactattcatgatggaataactttcaaaacttttgatacagcccaagatcacaaaagagttatggagggagataagggtaaaaataccgggggtatgggagcctattcaccctcaaggctaatcaacgaagatttaaaaaataaaataattaataagattatcaaaccaactcttaaaggtttggctggatttggctctaaatataaaggatttttatatacaggcttgatgattgtaaaaaatgaaccttatttgattgaatataatgtgcgaatgggcgatcctgaatgtcaaacgatactaccaaaactaaaaactgatattagtgaaatttttttagcatgttgtgaggaagaattaaataatgttaatattgaatggacagataaaaaaagtctatgcattgttgtctgttcaaaaggttatccagacg

SEQ ID NO: 314280 - DNA, 595 bp, Unknown
  Bacterial polypeptide expressing nucleotide sequence isolated from the Sargasso Sea
tatgggtgcttattcacctacaactttaataaatgatgagattgacttaaaaattagaaaaaaaatcattgaaccaacaataagagctatgaaagaaaaaggcttcccctacaaaggaattttatatgctggactaatgattaaaaattctgaaccgaagcttatagaatataatatacgttttggtgatccagaatgccaagtactaatgatgagattaaaaagtgatttattagaaataatattatcaacattaaataataaactagacaagataaatattgattggattaaagattattgtattacagttgtagctgctagcaaaggctatcctaaaaattttaaaattaagaaagaaataaaaaaaatcagagaaattaaacaagattctagccaacaattatttcatgcttctacaattaaagatgaaaacgggaaaattttttcaaacggaggaagagtattaagttcaacagttttaaactcttcactaaaagaggcgagaaataaagctttaaagatattagataatattgaatgggaaaataaatactatcgaagagatattggtcataaggttatcaaaaaatga

SEQ ID NO: 314281 - DNA, 837 bp, Unknown
  Bacterial polypeptide expressing nucleotide sequence isolated from the Sargasso Sea
aatgaaaattttagtaattggacaaggtggaagagaacatgcattagcatggaaattatctcagtcaaaaaaaagtaaaattatttttgtggcacctggaaatggtggtacaagcaccgaagaaaaatgcgtcaatgtcaatattaaggctgatgatttccctagcataagaaaatttattattgaaaaacaaatagatcttgttgtaataggaccagaagacccactggtaaatggtattgttaattatcttgaagatttaaatattttagtatttggtccatgttcaaatggtgcaagacttgaaggttctaaaatattctccaaaaagtttctctttgaaaacgacattcctacaggtaaagctagttttttttctgatcctgtaagtgcatattcttttttagacagctgtgtttacccaattgttcttaaggcagacggtctcgcagctggaaaaggagttttagtctctaaaaacattcaagaagcaaaagaatgggttgattcagtgatgaataattctttatttggtgctgctgggaataaaatcttaattgaagagtgcttgtatggaactgaacttagttttatgggcatcatgactccgagtgagtttattccctttgaaacaagcgtcgactataagccacttttagatggtaataagggtccaaatactggcggaatgggctgcatatcaccctctccttttatgaatgatactctaagggaaaaagtaatgaaaaaagtggtgcacccaacaataagtggtcttaataaaattggtgtttcttattatggttttatgtactttgggcttatggtcaaagatga

SEQ ID NO: 314282 - DNA, 699 bp, Unknown
  Bacterial polypeptide expressing nucleotide sequence isolated from the Sargasso Sea
aaatgagttatttcattatcagtgatggaaaatcatttaaatattttggctcagctcaagatcataaaagagttggagaaggagacacgggcaaaaatactggagggatgggtgcatactcaccatcaagattgtttaatgaagaattagagcaaaaaattttagaaaaaattctaaaaccaactttaaaaggtataaatgatttaggaacaaaatataaaggttttctatatgctggattgatgattgttaaggatgaaccatatttaattgaatacaatgtaagaatgggtgacccagagtgccaaacaattctaccaactttagacactgatatcataaaaatttttcaatcatgtattgatgaaaagcttgatgaactagaaataaaatggataaataaaaaaagtttgtgtgtcgtattatgctcaaatggttatcctgataaatacgaaaaaaatataatgataaaaaattttgagaaactaagtttaaatgaaaataattatctttttcatgcaggaacaaaaaaaaaggataataaaatttatgctgttggaggaagggtattaaattttatatcactttctaacacatacactgaagcaaaaaaaaatatctacaaaaacttagaaaaattaaattggggaaaaggtttttttagaaaagatattggatacaaagtcatagataaatgag

SEQ ID NO: 314283 - DNA, 604 bp, Unknown
  Bacterial polypeptide expressing nucleotide sequence isolated from the Sargasso Sea
atgaatttagcagttataggaagtggtggacgagaacatgctctttgttacaaattaagagaaacaaaggaagtaaagaaattaatttgcataccaggcaatgcggggactgaaaaaatagctaaaaatataaataaaaatctttccgactttgagggaatttataaagtaattaaaaaagagggaattcatattgtaattgttggtcctgaagaaccactggttaatggaataattgatttccttgaaaaaaaaaatattaaagcaatcggccctgataaattttcatctcaactagaaggatctaaggctttcatgaaaaatttatgcaaagagaacgatattccaactgctaattttggagttttcgaggatcttcaaagtgcccaaagttttataagtaatagcaaaataccgctagtcgtaaaggctgacgggcttgccgcaggtaaaggtgtttcgatatgtaaatctaaaaaggatgcgataaataaaactaaagaaattattgaaggaaaattccaatcctcaaaaaaggttgtccttgaagaattcattgaaggagaggaattaagttattttgtcgtcgtggacaaaaaatagt

SEQ ID NO: 314284 - DNA, 647 bp, Unknown
  Bacterial polypeptide expressing nucleotide sequence isolated from the Sargasso Sea
tatgaaagttggaatagttggaagtggtggaagagaacatgctctttgtgctatattaagaaaatctagtaaaatcagtgaaattttttgttttccaggcaatgctggaacttccactatagcacaaaacatagatttagatgcaaataattttgaagatcttaagaattttatacttaaacaaaaaattgatttaatgataatcggaccagaaaaaccattagttgaggggattgttgattattttgaaaaacataagattaaagtttttggaccaaataaaattgctgcccaattagaagggtcaaaaatatttactaagaaaatctgtcaaaaatataaaattccaactgcaaaatttggtatttttcaaaataaaattgactcaaaaaaatatttagaaggttggaactatcccgctgtaattaaagctgataatttagcttcaggaaaaggtgtttacatatgtaataatcaaaaagagtcatatacagcgataaatgaaatatttgatgggaaatttggtgaagctaaaaatattctaattgaagaatttcttgagggtgaggaaatgagtttttttataataagtgatggtaaaacatttaaatgttttggtactgcacaagatcataaaagagtttttg

SEQ ID NO: 314285 - DNA, 640 bp, Unknown
  Bacterial polypeptide expressing nucleotide sequence isolated from the Sargasso Sea
ttggttaatgtcttagttgtgggcgctggaggacgcgaacacgcactgtcatggaaattatcaacttctgaaaaaattgatcaagtatatgcagctcctggaaatggtggtacacttcaaaatgttgaattatctgttactgatattgaaggattagcaaaatttgctcaagaaaaaaattgttttactgtagttggtcctgaagatccacttgctgcaggcatagttgatgcctttgttgaaaaagggcttcctatttttggaccctctaaaaatgcagcaaaattagaatcaagtaaaatttgggcaaaagaattcatgaaacgaaattcaattcctactgcagattttgaaatatttgatgatgcacaaaaagccaaagattttgtaaaatcatatcaaaaacctgttgtaataaaggccgacggtcttgcagcaggaaaaggtgttattgtttgtaaaaataaagatgaagctaatgacgctattgatacaattctaacaaaaaaatcattcggtgatgcaggatctaaaattataattgaagaaagaattgatggcgttgaagcatcatacattgcattatgtgatggaaaaataggaattcctatggctacgagtcaagatcataagcgagttt

SEQ ID NO: 314286 - DNA, 688 bp, Unknown
  Bacterial polypeptide expressing nucleotide sequence isolated from the Sargasso Sea
ttttataatagtagacaaaaagtcttaccacttttttggctcggctcaagatcataaaaaagtcggtgaaggagatactggacccaacactggtggtatgggagcctattctcctgctgtcttattaacaaataatcttgaagaaaaaatcaaaaaaaaaattatagaacctaccttacaagcaatgaaaaatttgggccacccttacgaaggttttttatatgcgggattaatgatcactaaagaagagccttacttgatcgagtacaatattagaatgggagatcctgagtgccaagtattaatgatgaagttgaagacagaccttcttgaaattgtagattgcacaacacaaaataacttaaataatttaaaaatagagtggaacaaaaataattgtataacaattgttttatgtgcaaatggctatcctagtaattacattagagataaagaaattaaaaatttatctacaattatttcagatgaaaataatcaaatctttcatgctggaacctatgaaaaagataataaaattttctcaaaaggagggagagttttaaatataacctgttcggccaaaagtctgcgtgaagctagggaccaatctttagttaatttaaaaaaaataaattggaccgatggtttttttagaaaagatataggttggagagccattaaaaaataa

SEQ ID NO: 314287 - DNA, 517 bp, Unknown
  Bacterial polypeptide expressing nucleotide sequence isolated from the Sargasso Sea
acagttagaggtctttctaaagatggaattagtttcagagggtttctatatgcaggtctcatgattgactctaatatgaatccaaaagtattagagtataactgcagatttggagatcctgagactcaaccaataatgctaagactgaaatcagatcttatcgatatgattcaaacttgcttctctggatgcattagcgattataatgttaagtgggataataaatcagctatgggtgtcgtaatctctagtcatggttatccagaatcatacgaaactggcaaagaaattattgggctagaaactctttctgataggaatgatgttaaagtctttcattccggaacacgctcagtgaatgatagcatccttacgaatggaggaagggtgttatgtgtgacagctcttgggaatgatttaaatcaatctaatgaaaatgcataccgtgccgtagatcagattgactgggatggaaaatattttagaaaagatattggttttagagtgatgaaataat

SEQ ID NO: 314288 - DNA, 516 bp, Unknown
  Bacterial polypeptide expressing nucleotide sequence isolated from the Sargasso Sea
tatgaatattgctttaataggaagtggaggtagagaacatgtgctttgccaaaaaatagtggaatctagtaaggttggtaaagttttttgtattccaggtaacgcaggcacgagtaaaattgcaacaaatttaaatatagatttcttaaactttaccctacttttaaaaataattaaaaaaaataaaattaatctagttatagtaggtccagaacaacctcttgtctatggaatggtagactttttaaaaaaaaataaaattaaagtttttggacctgacaaatatgcttcacaacttgagggctctaaatcctttatgaaaaaattgtgtaaaaaaaataaaattccaactgcaaactttaaaatatgtaaaaaaaagtctgatgttctagaatttttaaaaaatagtaaaacccctctagttgttaaagccgatggcttagcttcaggcaaaggagttacaatttgttattctcagaatgaagttctaaaaatttctaatgaaatatttttggg

SEQ ID NO: 314289 - DNA, 844 bp, Unknown
  Bacterial polypeptide expressing nucleotide sequence isolated from the Sargasso Sea
gttgtaaaagcagatggtttagcttctggcaaaggtgtttttattcccgattcaaaagatgaatgtattagagcagcagaatcaatctttagtggcaaatttggcaactctgggaatgtggtagtcctagaagagaaaattaatggtcctgaagtttcagtttttgctctatgtgatggaaagagatatatactgcttcccaccgcacaagatcacaaacgtcttaatgagaaagataaaggtccaaatacaggcgggatgggagcttattctcctgctcaacttttaacagaagagtatcttgatcaaataatcaaagagataattgaaccaacaatagatgaactaaagaaaaaaaatattgattatagaggcgtaatttactttggattaatgatcacaaaatcggggcctaaagttatagaatacaactgtagatttggcgatccagaatgtcagacaataatgcctctaatggatgaaaattttgtatttcttctagaaaaatgctcaatgggaaatttaatcggtgatgaaaaaattgatattcccgatatggttagtggttgtgtagtggccacctcaaaaggttacccttacgaatacgaaactggctttccaataaagataggaaagattgatccaaataattgtcaaatattcgactctggtacttctttaagtaaaaaaggtgaattattaactgatggaggaagagtgttaagtattgtatgccaagaaaaaaatttcgatatggtttttgataaagcatacaaaaatttaaaagaaattaattttaatggtatttactttagaaatgatattggtcatcaagtaagaaaaa

SEQ ID NO: 314290 - DNA, 513 bp, Unknown
  Bacterial polypeptide expressing nucleotide sequence isolated from the Sargasso Sea
catgaatatcggattaataggtagtggtggtagagagcatgctttgtgcaaaaaattacatgagtcgaaattatgtaaaaaaatattttgtttccctggaaatgcaggaacagaaaatttagcaaaaaatttagaagtagacatactaaattttagtaaacttttaaaattaattaaattctacaaaatagatttggttttagtaggtcctgaagagcctttatctttgggaattgtaaattttctaaataaaaataaaattcaagtttttgggccttctaaatatgctgcaagattagagggatcaaaagctttcatgaaaaaaatatgtaaaaaaaataatattccaactgctaaatttcaaatatgtaaaaataaaagacaagttgtaaaatttttaaaaagatcgaaattaccaatagttgtaaaggcagatgggcttgcagctggaaaaggagtgactatatgcaaaacaaaaaaacaagttttaaatgtctctgaagaaatctttaa

SEQ ID NO: 314291 - DNA, 271 bp, Unknown
  Bacterial polypeptide expressing nucleotide sequence isolated from the Sargasso Sea
aatgaatattgcattaattggtagtggtggaagagagcatgctctttgcgaaaaaatatctaattcaaaaattaaaaataaaattttttgttttcctggaaacgcaggtacatcaaaaatagcaacaaatatagacactaatattttaaattttaataaccttttaagacttttaaagctttataaaattcaacttgtaatagttggtcctgaagaacctttggtgaaaggacttgttgattttttaaataaaaataaaattaaagccttt

SEQ ID NO: 314292 - DNA, 781 bp, Unknown
  Bacterial polypeptide expressing nucleotide sequence isolated from the Sargasso Sea
aatggattagctgattttctacgcaaaaaagattttaaagtatttggtcctaataaagatggagcaaaactagaatttagtaaatcttgggcgaaggaatttatgcaagacgataatattccaactgcaaaattttggaaagtcaattctatagaagaagccaaaaaaattatcaattcatcaccaattccgcttgttgtaaaagctgatggtctagcttcaggaaaaggtgtttttattcctaattcaaaagatgaatgcattaaagcagcagagacaatttttaatggtagatttggcaactctgggaaggtagttgttcttgaagaaaaaattcaagggccagaagtttcagtttttgctttatgcgatggaaagagatatacattacttccaacggcccaagatcacaaacgacttaaagagaaggataaaggtccaaatacaggaggtatgggggcttattctcctgctccattattaacagcagattcccttgataggatcatcaaagagataattgaaccaacaataaatgggctaaataaaagaaatattgactatagaggcgtaatttattttggattaatgatcacaaaatctgggcccaaggttatagaatataattgcagatttggtgatccagaatgtcaaacaattatgcccttgatggatcaaaattttgtattccttttagaaaaatgctcaatgggaactttaactggtgatgaaaaaattaatgcatctcacaaagttagtggttgtgtaatagcgacctcca

SEQ ID NO: 314293 - DNA, 635 bp, Unknown
  Bacterial polypeptide expressing nucleotide sequence isolated from the Sargasso Sea
gtttggtggattacctttgaaaaattcaagattaaaagtatttggtccaaacaaattagcatctcaacttgaaggatctaaaatattcacaaaaaatctttgtcaaaaatataatattccaacagcaaaatttggtatttttcaaaataaaaatgatgccaaaaaatttttgacagaaaccaaataccccactgtaattaaagcagataatcttgcatccggaaaaggtgtgtatatttgtaatgatcaatctgaggctaatttagctgttgatgaaatatttaacggtaaatttggtgaagctaaaaatttgttagttgaagagtttctctacggagaggaaatgagtttttttattattagtgatggaaaaacttttaaaaattttggaacagctcaagatcataaaagggtactagaaggggataaaggtaaaaatacaggaggtatgggagcctattctccatccaggctgattagcggagaattagaaaaaaaaatattagaaaaaataattaaaccaactttaaaaggtttgtcagaattagggaccaactttaagggtttcttatacgctggtttgatgattgataataatgagccatatttaattgagtacaatgttcgaatgggtg

SEQ ID NO: 314294 - DNA, 898 bp, Unknown
  Bacterial polypeptide expressing nucleotide sequence isolated from the Sargasso Sea
atagcaaaaaatattaaaattgatattgatgattttgataaaattaaagaatttgtaattaaaaataaaattgatttacttgtagtgggaccagaaaaacctttggttaatggaattgttaattactttaaaaatcacaatataaaaatatttggtcctgaaaaaattgcttctcaacttgaaggttcaaaaacatttacaaaaaaaatctgtgaaaaatataagatacctacagcaaaatttgcagatcttaaaaatttgaaagaagcaaatttatttctgaaaaaaagtagttttccaatagttataaaagctgatggccttgcttctggcaaaggcgtttatatttgtgaaaatattaaaattgcaaaaaaagcagttaacgaagttttcaatggtaaatttggtgtagctaataatgttctaattgaagaatttttaataggagaggaaatgagttattttattattactgatggaaaaagtattaagaaatttcaaactgcacaagaccacaaaagagtactggaaggagacaaaggtaaaaacacaggtggcatgggagcatattcaccttcaagattgataaataaagatttagatgaaaaaattattaataaaatcataaaaccaactattcaagctttaaatgatatgggagttaaattcacaggatttctttatgctggtttaatgattattaaaaatgaaccttacctaatagaatataacgttcgaatgggtgacccagaatgtcaaacaattttgccaaaacttaaaaccgacattgtagacatatttttagcatgctgcgaaggtaatctttcttccattaatatagagtggtacaaagaaaaaagtctatgtaatgtattatgctcaaaaggatatcctgata

SEQ ID NO: 314295 - DNA, 967 bp, Unknown
  Bacterial polypeptide expressing nucleotide sequence isolated from the Sargasso Sea
attagctgattttcttcgcaaaaaagcctttaaagtatttggccctggtaaagatggggcaaaactagaatacagtaaatcttgggcaaaggaatttatgctagaagcaaatattccaactgcaagcttttggaaagtcaattccttagaagaagccaaaaaaattatccatttatcatcgatcccgctagtagtgaaagcggatggtctagcttcaggcaaaggcgttttcataccaaactcaaaggatgaatgttttagagctgccgaatcaatatttaatggtaagttcggcaactctgggaatgtagtagttcttgaagaaaaaattcaaggcccagaagtttcagtatttgctctatgcgatggaaagagatacatattactaccaaccgctcaagatcacaaacgtctcaatgagagagataaaggtccaaatacaggagggatgggagcttattctcctgccccacttttaacagaagattgccttaatataatcgtcgaagagataattgaaccaacaataaatcacctaaataaaaaaaatattgactataaaggtgtaatttattttggattaatgatcacgaactctgggccaaaagtaatagaatataattgcagatttggagatccagaatgtcaaacgatcatgcctttgatggatcaaaattttgtatttcttctagaaaaatgctcaatggggaacttaactggaaacgaaaaaattgatccttctgatatggttagcggttgtgtaatagccacctcaaaaggatacccccacaaatataaaactggtattccaataaaaattggaaagattgattcaagaaattgtcaaattttcgactctggtacttctttaagtaaaaatggggaattagtaactgatggaggaagagtattaagtattgtctgtcaagacaaagacttcgatatggtttttgagaaggcatacaaa

SEQ ID NO: 314296 - DNA, 496 bp, Unknown
  Bacterial polypeptide expressing nucleotide sequence isolated from the Sargasso Sea
tatgaacgttttggtaattggaaatggtggtagagaacatgcactttgttatggaataaaaaaatcttcaaattgtaaaaatttatcttgtattcctggaagcgacgccattagtgaaattgctaattcgataaatattaatattgatgatcatgaggccatccttaaatattgtttagaaaatacaattgatcttgttgttattggaccagagctacctttaactaaaggtttatcgaatcatttacttagtaattctatattagtttttggccctgatcagatgggagccgaattagaaaaatcaaaaaaatttacaaaagatatttgtaaaaaattaaatattgcaacagctgcttatgatgtatttgataattatgatgatgccttaactttttgccaaaaaaaattctatcctttagttattaaagctgatggtttagctgcaggaaaaggagttattatttgtgaaacaattgatgatgcaaaagatgca

SEQ ID NO: 314297 - DNA, 184 bp, Unknown
  Bacterial polypeptide expressing nucleotide sequence isolated from the Sargasso Sea
ttgaaagttttagtaattggctctgggggaagagagcatgcgatttgttgggggatatccaataataaaaaaatagataaaatctattgtgcaccaggtaatgcaggtatctctaatattgcagaaatcgttaacattaaaactgataatcttgaagggttagttaattttgcaaaaaaagaaa

SEQ ID NO: 314298 - DNA, 369 bp, Unknown
  Bacterial polypeptide expressing nucleotide sequence isolated from the Sargasso Sea
aatgaatattttagtcattggatcaggaggaagagaacatagtatttgttgggctataaaaaaatcaccccaggtaaataaactttattgtatcccaggaaatgctgggattagtaatatagcaaattgtatagaagaaaaagatcttaacaatgagaatattatcaaaatttgcagaaaatttgatatagaactagtagtaataggaccagaagcatatttggttaatggtttgagcgatattctaattaaagagaatattaaagtgtttggaccaaataaagttgcttcaactcttgaaagctctaaaagttttacaaaaaatctttgctcaaaatataacattccaacagctaagtatgagacttt

SEQ ID NO: 314299 - DNA, 744 bp, Unknown
  Bacterial polypeptide expressing nucleotide sequence isolated from the Sargasso Sea
aatgaaaagtgttttagtggtggggtctggggcaagagaggttgcaattgctagatgtatttcacaaagctcaataaaaaattctcttttttgcgtatcaaaagatataaatccgcagatcttcgatctttgtaaggactactttgttactgatcttgcgaacatatctgatattgtgtcatatagcagaaaaaataagatcgattttgcaataattggtccagaaaacccgcttgctaacggcattgtcaatgagcttgaaaatgttggggttaggtgcgttgggcccaaaaaagaagttgcattaattgaaaccagtaagacttttgcaagaaaaataattgacctttgctttccagaaaaaaacccacaaagaaaagagtttggctcaatagagggggttgaaagctttatcaagcaactgggtggggagtacgtaataaaatttgatggtcttatggggggaaagggggttcgtgtttctggtgaacacctaaaaaatattgatgagggcgttgcctatgctaacgaaattattaacattggcggaaagtttttaatcgaagaaaagttggttggagaagaattttctttaatgagttttgtagatggaaaagtttgcaaacatatgcctgttgttcaggatcacaaaagagcatatgaaggcgacgccggtcctaacaccggggggatgggcacctactcttttggaaatcattctctcccctttttaagcgaaaaaga

SEQ ID NO: 314300 - DNA, 618 bp, Unknown
  Bacterial polypeptide expressing nucleotide sequence isolated from the Sargasso Sea
aagacaaaggtcctaatactggtggtatgggcgcatattctccagctccaattttaacaaaaaaattggaaaccaaaataataaaaaaaattattaaacctacgcttacacatttaaaaaaaaataagaattccttcacaggttttttatatgctggcctaatgattaaaaatggaaacccttttttaatagaatataatgttagaatgggagatccagaatgccaggtcattttacctaggcttgaaactgattttgcaaaaatcatttcatatgcaattaagaataaactaaaaaaaataaaattaaaatggaccaaaaaaaaatgtatgacagttgttatatgttcgaaaggctatccaggaaagtataaaaaaggtatcgaaataaaaaatatcgataaaattaatgaaaataacaataattacatattccatgcgggcactgagagaaaaaataacaaaattatttcagtaggcggaagagtattaaatattactaggcttggttcaaattataaaaatataagaacaaaaattacaaaaataattaaaactataaattggaaaagtggtttttttagaagagatattggttggagagtaataaaaaaataat

SEQ ID NO: 314301 - DNA, 751 bp, Unknown
  Bacterial polypeptide expressing nucleotide sequence isolated from the Sargasso Sea
cgcaaatattccaactgcaaacttttggaaagtcaattctttagaagaggccaagaaaattataaattcatcatcgattccattggtagtaaaagcagatggtctagcttctggtaaaggtgtttttattcctaattcaaaagatgaatgtttaagagctacagaatcaatctttaatggcaagtttggcaactctgggaatatagtagtactagaagaaaaaattaacggcccagaagtttcagtttttgccctctgtgatggagagagttatacgttacttccaactgcacaagatcacaaacgtctaaatgaggcagataaaggtcccaatacaggaggtatgggggcttattctcctgctccactattaacagaagatcatcttgatagaatcattaaagagataattgaaccaacattagatgaactaattaaaaaaaatattgattatagaggtgtaatttattttggattaatgatcacagaatcagggcctaaagttatagaatataattgcaggtttggagatccagaatgtcaaacaataatgcctttgatggatcaaaattttgtatttcttttagaaaaatgctcaatggggaaattaattggtgatgaaataattgatatttctgataaggttagtggctgtgtaatcgccacctctaagggttacccttccgaatataaaactggcatcccaatcaaaattggggaaattaacttaagtgattgtcaaattttcgat

SEQ ID NO: 314302 - DNA, 271 bp, Unknown
  Bacterial polypeptide expressing nucleotide sequence isolated from the Sargasso Sea
catgaatattggattaataggaagtggcggtagagagcacgcattgtgtcaaaaaatctacgactctaaattttcaaaaaaaatagtgtgtatacccggtaacgctggaacatcaaaaattgcggaaaatgttgatgttgacatcaaaaattttaaaaaattatataatattataaaattaaaaaaaattgatttagttgtagtaggccccgaagagcctttggttaatgggttggttgattttttatcaaaaaagaaaataaaggttttt

SEQ ID NO: 314303 - DNA, 274 bp, Unknown
  Bacterial polypeptide expressing nucleotide sequence isolated from the Sargasso Sea
atgtctgataaattaaagatacttgtagttggtaagggggctagagagcatgctttagcttggaaggtatcacagtcttctttagtggatgatgtttttgtggcacccggtaatggaggtactgcagaaattgctaaaaatatcgatatttccgaaacagatatttcaaggctacttgattttgtattgaaagaaaaaattgatgtaactatagtaggccctgagagctcattagaagttggtatagtaaatctttttagatctagaaattgaa

SEQ ID NO: 314304 - DNA, 283 bp, Unknown
  Bacterial polypeptide expressing nucleotide sequence isolated from the Sargasso Sea
atgaatttagcagttataggaagtggtggacgtgaacattcaatttgttacaaactgagcctttcaaaaaaaattggcaagattgtttgtataccgggtaatgctggaacgaaaaaaatagcagaaaatatacaagaaaatattagtgattttgaagcagtatataaaataattaaaagaaaaaatattgatatagttattataggtccagaacaaccattgactgatggaatggtagattactttaaagaaagatcaataaatgtgattggccctgataaat

SEQ ID NO: 314305 - DNA, 505 bp, Unknown
  Bacterial polypeptide expressing nucleotide sequence isolated from the Sargasso Sea
atgaacattggaattattggaagtgggggaagagaacattcgctttgttttaaactaaaagagtcgaaattagtaaaaaaaatattctgtttccctgggaatgctggaacagagacaatcgctgaaaacataaatcttgatataacagattttgaaaaaattcataaaacttgcgagcaaaaaaaaattgaattagttatcgttggtccagagaaacctcttgtagatggcattgttgagtattttaagaatacaaaaattaaaatattcggtccagataagattagttctcaattagagggatcaaaaacttttactaaaaaactttgtaaaaagtacaaaataccaacatctaattttgagatttttaatgaggaagaattggcattaaattatttatcctctattcaatatccgattgttgttaaagctgacgggctagcggctggaaagggtgtttatatttgcaaaaatctagatgatgcaaaaaaagcagtaaaagaaa

SEQ ID NO: 314306 - DNA, 665 bp, Unknown
  Bacterial polypeptide expressing nucleotide sequence isolated from the Sargasso Sea
tatggccgtggagcgcattttggtcgtgggcaatggggggcgagagaacgctctggcctgggccctagctcgcagcccgcagcagccgcaggtatggatcagccccggcaacggcgccagtgcggcgattccaggctgcagggtgctggtccactctgccagtgatgccgaggcactcgcaggtagttgccaaacccttggaattgacttggcggtgattggcccggaggcgccactagctgctggtttggctgatcaactcaggggccatgggatcgccgtctttggcccgggagccgatggggcacaactggaagccagcaaggaatgggccaaaaccttgatgcaggaggcaggagttcccacagcaggtttctgggttgcctccaccgcggagcaaggtcatgccattgcgcagcaacagggccaagccttggtggttaaggcagatgggcttgccgccggcaaaggggtcacggttgccagcagcctggaagaaacactcgccgccattactgactgcttttccgggcggttcggtgatgctggccagcgcgtcgttctcgaggagtgccttgaggggccagaagtgtcagtcttcgccctttgtgacggagaacgacttgtgcttctgcctccagcgcaagaccacaagcgcatcgggg

SEQ ID NO: 314307 - DNA, 355 bp, Unknown
  Bacterial polypeptide expressing nucleotide sequence isolated from the Sargasso Sea
atgaatattgctttaattggtagtggtggacgcgaacatgcgttatgtaaaaaacttataaagtcaaagaaaattaaaagaattttttgcataccgggaaacgctggtacattaaaaatttcaacaaatatcaaagcagatttaaacaattttaatagcattttaagtatcataaaaaaaaatgatattaaattagtaatagtaggccccgaagagcctttagtgaaaggcattgtagattttttagaaaaaaataaaataagagtatttggtccaaataaatatgcatctcaacttgagggctctaaagcttttatgaaatcaatatgtaaaaagtataatattcccacagcta

SEQ ID NO: 314308 - DNA, 229 bp, Unknown
  Bacterial polypeptide expressing nucleotide sequence isolated from the Sargasso Sea
aatgaatattgctttaataggaagtggtggaagagaacatgccatttgtcaaaaaatatatgagtcacaactctcaagcaaaattttttgtatacctggtaacgcaggaactgtaaaaatagctcaaaatatagatatagatattttaaactttcaaaaaattttaaagataataaaattttataaaatagatctagttgtaataggaccagaagaacctcttgtaaaa

SEQ ID NO: 314309 - DNA, 277 bp, Unknown
  Bacterial polypeptide expressing nucleotide sequence isolated from the Sargasso Sea
tatgaatattgctttaattggtagtggaggtagagagcacgctttatgcagaaagttaaaggtctccagagaaatctctaatattttttgtatacctggcaacgccggaacagctaaaatatctataaaccttaatatagattttcttaatttcaaattattacttaaaactcttaagagccataaaattcaattagttatagtgggacctgaggagccattggtaagaggtatagttaattttcttgaaaaaaataaatataaaagttttcgggcc

SEQ ID NO: 314310 - DNA, 184 bp, Unknown
  Bacterial polypeptide expressing nucleotide sequence isolated from the Sargasso Sea
atgattgttggagttataggaagtggtggaagagaacatgcaatttgtcatgctttaaataagtcaaaaaaaattgataaaatttattgttttcctggaaacgctggcactactaaattagcagaaaatatcaatttagacttaaataattttaaaaatattaaagattttattataaataaaa

SEQ ID NO: 314311 - DNA, 701 bp, Unknown
  Bacterial polypeptide expressing nucleotide sequence isolated from the Sargasso Sea
ttttggagaagcaaaaaatgtgctgatagaggaatttttgactggtgaagaaatgagtttttttattgttactgatggtaatgatattaaattatttaacactgctcaggaccataaaagggttcttgaaggtgataagggtaaaaatactggaggtatgggtgcttattcaccatcaagattgattaatatagatcttgaaaacaaaataattaatcaaataattcatccaactcttgaaggccttaaggaaatgaaaattgaatattcgggttttctttatgctggtcttatgattaaaaatgataacccctatttgatcgaatataatgttagaatgggagatccagaatgccaaacaattttacctaggttagagtcagacttaacaaatattattttagcgtgttgcgaaaaaaaattaaatgaaatcgagataaaatggaagaaagacaattccatttgtattgttttgtgctctgatggttatccagaaaaatataaaaaaaatgtattaatcaaaaatttagaaaagattaatacagatgataaaaattattgcttccatgcaggcactaatattatagacaagaaaacatacgctgttggtggaagagttttaaattttgtatcattatcatcaaatttttctgaagctagaaaaaaaatatttgatagcttaaataatttaaactggaatg

SEQ ID NO: 314312 - DNA, 697 bp, Unknown
  Bacterial polypeptide expressing nucleotide sequence isolated from the Sargasso Sea
gagatatcaattcttgcaattagtgatggagaaaaagccgttgccctcagccctgctcaagactttaaacgacttcacgacaatgacctcggaccgaacacaggaggaatgggggcatactccccagtcccaatagctaccccctctctcgtggataatgttctcaacaatttcatccagcccacgattaccgaacttcgccgaagaggaattgattaccgaggagtgctttacgcaggtctcatgatgacagaagacgggccaaagctccttgaatacaacgttcgattcggcgacccagaagcccaagtagttctaccccgcttcgaaagtagcttaaccgagcttcttctcgaagcttcaagaggagatatcagaacaacgccggcattcacgtctgatgcaatggttacggtggtttgtgctactgagggatacccgacatctccccgagtcggtgaccccattagaggcatagaggaagcaactcataccagcggggtagagaaagtatacgtcgccggcatcaaactcgataaagaacagcagccagtaacggccggaggacgtgtacttgcggtgactggtcgaggcaacacaattgaagcagctcgccaaaacgcatacacgggcgcagagaaaattcattgggaagggctacataaacgacaagacatcgcagaggcgatcaaatgac

SEQ ID NO: 314313 - DNA, 385 bp, Unknown
  Bacterial polypeptide expressing nucleotide sequence isolated from the Sargasso Sea
atgaaagttggaataataggaagtggaggtagagagcatgcattatgtcaaagcttaaaaaattcaaataaaactgataaaatatattgttttccaggtaatgcgggcacaagcaatattgcagaaaatataaatataaatccagaggactttgaaaatattaaaaactttataattgataataaaattgatttagtcatagttggtccagaaaaacctctagtagaaggaatagtagattatctcgagaaatttaaaataaaagtgtttggtccgaataaattagcttctaaacttgaagggtctaaaatttttacaaaaaaaatttgtgaaaagttcaacattcctactgcaaaatttggaatatttaaaaacaaaaacgatg

SEQ ID NO: 314314 - DNA, 199 bp, Unknown
  Bacterial polypeptide expressing nucleotide sequence isolated from the Sargasso Sea
aatgaaaatcttggtaattggttcaggaggaagagagcatgctttggcatggaagtgctctactgataaatttgttgaaaaggtttacgttgctccaggcaatgcaggaacatttcttgaagaaaaaatagagaatatttccttgaatataaataacaatgaggatgtctctaacttctgtatttcaaataatatgaac

SEQ ID NO: 314315 - DNA, 531 bp, Unknown
  Bacterial polypeptide expressing nucleotide sequence isolated from the Sargasso Sea
tatgaatttagctgtaataggaagtggtggaagagaacactcgatttgttataaattaaaacaatcaacgaaaataaaaaaattaatatgtattcctggcaatgcaggaacaaaagaaatagctgaaaatataaacattgatattaaaaattttgaagagatacatgctatattaattaagaaacatattgatattgttgttgtaggaccagaagagccgttagttaacggcatagtagactttttgattaatagaggagttaaagttttaggtcctaataaatttgcctcacagctcgaaggctcaaaagcttttatgaaagatttgtgcaaaaaaaacgacattcctacagctaggtttggtgtgtttgaaaattatgagagcgcagtagaatttttaaataaaaacaaaacacctattgtggttaaggcagacgggttagctgctggaaaaggtgtatcaatatgtaaaaatatggatgaggccaaagaaaaaattaaagaaatagtaaatgggaaatacaaatcatc

SEQ ID NO: 314316 - DNA, 969 bp, Unknown
  Bacterial polypeptide expressing nucleotide sequence isolated from the Sargasso Sea
aagatgtactgaaatttattgtagtcctgggaatgctggaacctccatgctggcaacaaatctggatatcgatataaactcgaatagaaagattatagaaaagtgtaaggagtattctatcgatatcgtagtagttgggcctgagaagcaatttgagcaaggattaacagacgctcttaaagaaaaaaattttttagtatttggaccaagtagggaggcttcacaattggaaacctcgaaatctttcacaaaaattatgtgtaagtacaaaaatattcctactgcaaattatgaaattttttctggagaaaatgacgcgaaagaatttttaagatcacaaccaaagccctatgttattaaagcagatggtctcgcagcaggtaagggagttttagtttctagtgattttgaagaaagtactcaatttattagttcaatctttgatggaaaaattggaaccggaaaaaatacggtcataattgaagagtaccttgaagggcaagaaatgagcgttttttttgcaattgatagaaatacagttaaatgcattggaagtgcgcaagactataagagagcctatgataaggatcatggcccaaatactggtggcatgggggccttttcgccatctcctttattaaccaaaggaaatttagacaagatcattcgtagaatcattaagccaaccatagaatacatgaaagaaattggtagtgagttttcaggaatactttatgctgggttgattttcaataagggagaaccaaagcttatcgaatacaatgtcagatttggcgatcccgaatgccaagctctgtgtattcgattaggtgcccagatactagatatctattttaacggtgcaaaaaatgaattatctgatttatcaattaatgaagctaatgatagcgcaataactgtaatttgttgcagaaaagggctatcccaacaatccaaagagtggttgtg

SEQ ID NO: 314317 - DNA, 177 bp, Unknown
  Bacterial polypeptide expressing nucleotide sequence isolated from the Sargasso Sea
aatgaaagttctgataattggttcaggtggaagagaacatgctttggcctggaaatgtgctcaagatgatattgtaaaacatatttttgtctgtcctggtaacgcaggaacccatctagaggataaagtaagcaatattgaacttaacttaaatgaatttagctcaatagaaaaatt

SEQ ID NO: 314318 - DNA, 211 bp, Unknown
  Bacterial polypeptide expressing nucleotide sequence isolated from the Sargasso Sea
atgaaagttctcgttataggaagtggtggaagagagcatgcattagcttggaaactatctaaaagtaatctggtttctgaaatttttgttgctcctggaaacggaggaacggaaatagaagaatctatcaaaaatattgatatagattcaaatgatttagatgggctattagactttgctgaacaatcaagtatagatttaactattgtag

SEQ ID NO: 314319 - DNA, 835 bp, Unknown
  Bacterial polypeptide expressing nucleotide sequence isolated from the Sargasso Sea
ttagttttaggaagcggagcgagagaacactccatttgttgggctgtaaaaaagtccaaggcatgtaaaaaattattttgctcacccggcaacgcaggaattgaaaaagttgcaaattgtaaatttattaacttaaaaaaaaaacgacatattcttaacttttgtaaaaaaaactctattgatttagttatagttggcccagaagaatacttagccgatggtgttagcgattatcttcagattagaggaataaaaacatttggaccaattaaaaaagcagcaaaacttgaaacatcaaaatcatttgccaaatcctttttattaaaaaataaaatattaacgccgaaatatcgtaaatttacaacatctagtaaagctttaaattatttaaactcgctaaattttcccattgttataaaagcagacggcttagcagcaggtaaaggagttgttatatgtaaaaattttagtcaagcagaacaaacaataaaactgatgatggaaaaaaaaaaatttggtgatgctggaaaaaaaataataattgaagaatttattgatggttttgaaataagttatttttccttttttgataaaaaaacttttttaccacttggatacgctcttgatcataaaagagcttttgacaatgaccttggcccgaatactggtggtatgggttgttttaccccatcaaaaaaggttagtaaaaatttggaaaaaaaaattattaaaaatattatagaaaaaacttatttaggtttaaaaaaagagaattttacttatcgtggtattttattttttggattaatgataaaaaataatgagccctatgtaa

SEQ ID NO: 314320 - DNA, 976 bp, Unknown
  Bacterial polypeptide expressing nucleotide sequence isolated from the Sargasso Sea
attgacatgcttgatttcaaaaaactcttaaaagttattaaattttacaaaataagtttagttatcgttgggccagaagaaccattggtaaagggtgttgtagattttcttattaaaaataagattaaagttttcggaccaaacaaatatgcggcaaaacttgagggttctaaagcttttatgaaatcattatgtaaaaaaaacaacattcctacagctgaatttaaaatatgtcgaaataaaaacgacgtaaataattttttaaaaaaaaatattttccctttagtagtcaaagctgatgggttagctgctggaaaaggggttactatatgtaaaaataagaaacaggttttaaaagtttctgacgaaatctttaagggtaaatttaaatcatcgaaaaaattagtgttagaagagtttttagagggagaagaagcgagctactttctattggtagataaaaaaagttttaaattttttggatcagctcaagatcataaaaaagttggcgaaaaagataccggacctaatactggtggaatgggggcttactcaccagctaaaataattactcaagatttagaaaaaaaaattatcaaaaagatagtttcaccaactttaaaagccttaaaacaaaaaaagaaaaattatactggtttcttgtatgtaggtttaatgatcaaaaacaatgaaccttttttaatagaatataatgttagaatgggtgacccagaatgtcaggttatattacctcgactaaatacagatttagttaaaattatttcttacgctgtaaaaaataaattgaacacgtttgatattaaatggaaaaaaattaaatgtatgacaatagttctgtgttccaaaggttacccaagaaaatataaaaaattaattaagataaataatttaaagaatattaagcttaaaaaaaattcttttatttttcatgctgggactaagtatatcaataaag

SEQ ID NO: 314321 - DNA, 754 bp, Unknown
  Bacterial polypeptide expressing nucleotide sequence isolated from the Sargasso Sea
tttttcgcccgccacgcaatccccaccgcaaagtacggaaatttcagcgaggtcgaggcggccttggaatatcttgggacctgtagcttccccatcgtggtcaaggcaagcgggttggcggcagggaaaggggtattgatctgccaaacccttgaggaggcagaggcggcgacccgcgacatgctcgccggctcgagcttcggggaaagcggcagggaggttgtcatcgaggaattcctcgacggagaggaggcctccctccacctcatttgctcgggtgaaagttacctcgccctgcccatcagccaggaccacaagaaggttggagagggagaccagggcctcaataccggaggaatgggggcctatgccccgactcgtctggtcagcccggagatgttgcatggctacgaggaaacgatcgttcgccccaccctttccggtctcagggcagagggaatcgagttcagaggcaccctctacgtcgggttgatgctgaccgcggatggccccaaggtcctggagttcaacgtccgcttcggggaccccgagacccaagtcatcctaccccttctggcagacgatttagtgcccctgctacttgcctcggctaggggcgacgaacttcccgagaaggtcaatttcaaggatgcttccgccatggtggtggtgctcgccagcgccgggtatccggaaagctaccccaagggcgagcccatttccgtgcccgaagtcctgcccgaaggttcccagc

SEQ ID NO: 314322 - DNA, 322 bp, Unknown
  Bacterial polypeptide expressing nucleotide sequence isolated from the Sargasso Sea
tatgattatttgcatcataggaagtgggggtagagaacatgccatttgtaaaacaatctctacgtccccaaaagtaagcaaaatatactgtctgccgggtaatgctggaactaaagaattagcagaaaatataaatttagatattaatgattttgaaaaaattttaaaatttttaaaagaatcaaaagttgatctagttatagttggtccagaaaaaccattggtaaacggcattgtagattacctggaaagcaacaacattaaagtttttggtcctagaaaaataccatcacagttagagggttcaaaaactttcacaaaa

SEQ ID NO: 314323 - DNA, 928 bp, Unknown
  Bacterial polypeptide expressing nucleotide sequence isolated from the Sargasso Sea
attgaaattagtaaaaaaaaaatttttacaattttgtaaaaatcaaaatatttctttagttataattggccctgaacaatttcttgaagaaggtttttctgactttttaacaaataatggaattcttgtttttggtccatcaaaaaaagcttcaaaactcgaatattcaaaatcttttgcaaaaaaatttttaaagaaaaataaaataccttctgccaattttaaagaatttagtagttattcattggctgaaaaatatttaaaagaagttcagttccctattgtgattaaagctgatggattagcagctggaaaaggtgtggtcatatgtaataatttaagtgaagcaaaaaaaggcttaaaagagataatgattacaaaaaaatttggtaaagctggaaaaaaaattcttattgaagaatttcttcaaggctttgaagttagttattttgtattatttgacaaaaactcgttttcagttttaaattatgcattagatcataagcgtgcatttgatttcaataaaggtccaaatactggaggaatgggagcttttactccatcaaataaagtagataataatttggaaaaaattatttcagatagaattgtaaaaaaaactttcgaaggtttaaaaaaagacaagataatttatagaggaatactttttataggcttgatgataacaaaaaatggcccttatgttatagaattcaatgtaagatttggtgaccctgaatgccaagtcttaatgagaaatctagacactgatattttaaaaatagtaaaagcagttgcaaaagataaacttaacactgttaaaataaaaaataaaaaactatgtacaatatgtgttgtaatcgcatctaaaggatatccaaatacttacaaaataaataaacagattaaaaacataaaagaagctcaa

SEQ ID NO: 314324 - DNA, 357 bp, Unknown
  Bacterial polypeptide expressing nucleotide sequence isolated from the Sargasso Sea
tatgattatttgtatcataggaagtgggggtagagaacacgccatttgcaaaacaatctctatatcttcaaaagtaaacaaaatatattgcctgccaggcaatgctggaactcaacgattagctgaaaatatagatttagatattaatgattttgaaaaagttttaaaatttttaaaagaatcaaaagttgatttagttataattggtccagaaaaacccttggtaaatggtattgtggattacttggaaaacaataacattacagtttttggtcctagaaaaataccctcacaattagaaggttcaaaaacttttacaaaaaatatttgtaaaaaatataatattcctacagctaa

SEQ ID NO: 314325 - DNA, 331 bp, Unknown
  Bacterial polypeptide expressing nucleotide sequence isolated from the Sargasso Sea
tatgaaagttggaataattggaagtggaggcagagaacatgctatttgccaaagtttgaaaatttctaataaatttacagaaatattttgttttccaggaaatgctggaacctcccttatagctcaaaatgtaagcttagatttaaataattttgaaaaaattaaaaattttattctaaaaaaaaaaatagatttaattattattggaccagaaaaaccattagtagatggtttagttgattatcttgaaaaatttaaaataaaaatttttggacctaacaaaattgcttctcaactagagggctcaaaaatatttacaaaagaactttgt

SEQ ID NO: 314326 - DNA, 928 bp, Unknown
  Bacterial polypeptide expressing nucleotide sequence isolated from the Sargasso Sea
aaacttaatttttttaagatagatttagtcgttatgggaccagaaatacctctagcaaatggattagctgattttcttcgaaaaaaaaattttaaagtgtttggtcctaataaagatggagcaaaactagaatttagcaaatcttgggcaaaggaatttatgcaagacgcaaatattccaactgcaaacttttggaaagtaaattctctagaagaagccaaaaaaattattaattcatcatccattccacttgtagtaaaagctgatggtctagcttcaggtaaaggtgtttttattcctaattcaaaagatgaatgctttaaagcagcagaaacaatttttaatggaaaatttggcaactctgggaatgtagtcgttcttgaagaaaaaattcaaggaccagaagtttcagtttttgctttatgcgatggaaagagatatatattacttccgacggcccaagatcacaaacgacttaatgaaaaagataaaggtccaaatacaggaggtatgggagcttattctcctgccccattattaacagaagattaccttgaaagaatcattaaagagataattgaacctacaataaatgagctaaataaaagaaatattgactacagaggcgtaatttattttgggttaatgatcacaaaatctgggcccaaggttatagaatataattgcagatttggcgatccagaatgccaaacaataatgcccttaatgaatcaaaattttgtatttcttttagaaaaatgctcaatgggaagtttaactggttatgaaagaattaatacttctgataaagttagtggttgtgtaatagcgacctcagaaggatatcccaacgaatataaaactggctatcaaataaatataggtaagatcgattcaaatgattgtcaaatttttgactcaggtacct

SEQ ID NO: 314327 - DNA, 273 bp, Unknown
  Bacterial polypeptide expressing nucleotide sequence isolated from the Sargasso Sea
tatgaatttagcagtcataggaagtggtggtcgtgaacatgccatttgctttaaattgaagcaatcgcgaaaaattaaaaaattaatatgcattcctggtaatgccggtactcaaaaaatagcgaaaaatataaaagaaaatatttcaaattttaatggtatttacaaaataattaaaaaacaaaagattgatattgtgatagttggtccagaacagcccttggttgaggggttagtaaattatttaaatgaaaaaaaagttaaagtatttgg

SEQ ID NO: 314328 - DNA, 571 bp, Unknown
  Bacterial polypeptide expressing nucleotide sequence isolated from the Sargasso Sea
ccatttgtaaacaacgcactggatactacaattaaggaaaatgttatcgaacctacagttagaggtctttctaaagatggaattagttttagagggtttctatatgcaggtcttatgattgactctaatatgaatccaaaagtattagaatataactgcagatttggagatccagagactcaaccaataatgctaagactgaaatcagatcttatcgatatgattcaaacttgcttctctggatgcattagcgattataatgttgagtgggataataaatcagctatgggtgtcataatttctagtcatggttatccagaatcatacgaaactggcaaagaaattattgggctagaaactctttctgataggaatgatgttaaagtctttcattccggaacacgctcagtgaatgatagcatccttacgaatggaggaagggtattgtgtgtgacagctcttgggaatgatttaaatcaatctaatgaaaatgcataccgtgccgtagatcagattgactgggatggaaaatattttagaaaagatattggttttagagtgatgaaataat

SEQ ID NO: 314329 - DNA, 274 bp, Unknown
  Bacterial polypeptide expressing nucleotide sequence isolated from the Sargasso Sea
aatgaaaatcttagtaattggttcaggaggaagagagcatgctttggcatggaagtgctctactgataaatttgttgaaaaggtttacgttgctccaggcaatgcaggaacatttcttgaagaaaaaatagaaaatatttccttggacataaataacaatgaggatgtctctaacttctgtgtttcaaataatattgaacttgtaattgtcggtcctgaagatcctctagttaatggtttggttgactttcttgagtctaaaaatataaaagtg

SEQ ID NO: 314330 - DNA, 584 bp, Unknown
  Bacterial polypeptide expressing nucleotide sequence isolated from the Sargasso Sea
gatgaatgtaggaattattggaagtggtggaagagaacatgcgatttgttatatgcttaataaatcaaaaaaagtctccaaaattttttgttttccaggcaatggaggtactagtttaattgctcaaaacgttaatttaaaccctgacaatttttctgagcttgaaaagcattgtatagaaaaagaaataaaattattaatcgttggaccagaaaaaccattggtaaatggaatagttgattattttaaaggaaaatcaattaaagtattcggtccagataaaatttcatcaaagctcgaaggttcaaaaatttttactaagaaaatttgtcaagaaaataatattcccacatcaaattttaagatttgtaaaaatttaaatcaagcaattgattatttgaagaaatgtaattttcctattgttgttaaagctgatggtttggcatctggcaaaggtgtttatatttgtaaaaattttgatgacgcaaaaatagcctcggaagaaatttttaatggaaaatttggacctgctgaacaaattttggtagaagaatttttagagggtgaagaaatgagttacttca

SEQ ID NO: 314331 - DNA, 628 bp, Unknown
  Bacterial polypeptide expressing nucleotide sequence isolated from the Sargasso Sea
ttgtgtttaaaaataactttagctttttttttaatcatcaataaactatacaatataatatttaagatgaatattggattaataggtagtggtggtagagaacacgctctttgtcaaaaaatttttgaatcaaaatattcaaagcaaataatttgttttccaggcaatgctggcacttcaaaaattgctcgaaatgtaaatgtggatttattagattttaagaaggttttaagtttaataattttttttaaaattgacttagtaattataggtccagaggaaccattagttaaagggctgagtgactacttaagaaaaaacaatataaaagtttttggacctagtaaatactcagcaaaacttgaaggctcaaaatctttcgttaaacagttatgtaaggaaaataaaataccaacagcaaattttaaaatttgtaataaagtaaaagatgtagaaaactttttgaaaataaataaatttccaatagtagtcaaagcagatgggttggcagctggtaaaggcgtagtaatttgtaagagtaaaaagcaagtaattaaaatttcaaatgaaattttcaaagggaaatttaagtcttcgagaaaattagtactagaagagtttcttactg

SEQ ID NO: 314332 - DNA, 787 bp, Unknown
  Bacterial polypeptide expressing nucleotide sequence isolated from the Sargasso Sea
caatgatgcgattgacactattttaactaacaaaacatttggtgatgctggatctaaaattattgttgaagaaagaattgatggaattgaagcctcatacattgcattatgtgatggaaaaataggaattcctatggccacaagccaagaccataaacgaatttttgatgatgataggggtcccaacactggaggtatgggtgcatattctccaactccgataattgatgaccatcttgcatctgaaattcaagaaaaaattattgataaaacaattgtttcaatgaataaagaaggcattgaattcaagggctttctatatgcaggaataatgattaaagatggtatgccatacgttctagaatacaacgtgcgtatgggtgacccggaatgtcaaccaatcttgatgcgtcttgattctgatttgtatgaatatcttctcgcatcttatgaaggaaatctaaaagatctcccaaagatttcttggaaacaagaatatgcggtatgtgttgttctagcatcaaaaggctatcctgaatcttatccaaaaaatgataaaatcactggatttgaaaatataccagaaaattcatttgtatttcatgcaggtactaaaaaagaagatgaaaatattttgtctaatggtggcagagttcttggagttgctgcattgggtctgactctacaaaatgcaattgataatgcttattctgcatgtcaaaaacttgattggaaaaacaaataccatcgtaatgatataggaaaaaaagggctttcttacttatga

SEQ ID NO: 314333 - DNA, 730 bp, Unknown
  Bacterial polypeptide expressing nucleotide sequence isolated from the Sargasso Sea
aaaatagttatcgaagaaggacttgtcggccccgagatatcaatccttgccatcagtgacgggaaaaaagccgttgccctaagccccgcccaagactttaaacgacttcacaacaatgacttcggaccaaacacaggaggaatgggggcatactccccagtcccaatagctaccccctctctcgtggacgatgttctcaataattttatccagcccacgattaccgaacttcgccgaaggggaattgattaccggggagtgctttacgcaggtctaatgatcacagaaggtggtccaaagctcctcgaatataacgttcgatttggcgatccagaagcccaagtagttctaccccgcttcgaaagcagcttaaccgaccttctcctcgaagcttctagaggagatatcagaacaacgccggtattcacttctgatgcaatggttacggtggtttgtgcttctgagggatacccgtcatctccccgagttggtgatcgtattagaggcatggaggaagcaactaatactggcggggtggaaaaagtatacgccgccggcatcaaactcgatgaagaacaacaaccagtaactgccggaggaagagtgcttgcggtgactggtcgaggcaacacaattgaggaagcccgccaaaacgcatatacgggtgcagggaaaattcattgggaagggctacataaaagagaagacatcgcagaggccatcaaatgac

SEQ ID NO: 314334 - DNA, 274 bp, Unknown
  Bacterial polypeptide expressing nucleotide sequence isolated from the Sargasso Sea
atgaatattggtattattggaagtggtggtagagaacatgcattatgttttaaattatcaaaatcaaaaaaagtaaaacgaatattttgctttccaggaaatgctggaacagaaaaaattgcaataaatatagatgtagatttaagtgattttagacaactaaaaaaaattattttagaaaaaaaaattaaattaattgttgtcgggcctgaaaagcccttggtagatggtatagtagattatctagagaaaaataatatattagtcttcggac

SEQ ID NO: 314335 - DNA, 640 bp, Unknown
  Bacterial polypeptide expressing nucleotide sequence isolated from the Sargasso Sea
atgaaagttggaataattggaagtggaggcagagaacatgctatttgccaaagtttgaaaatttctaataaatttaaagaaatattttgttttccaggtaacgctggaacctccttgctggctaaaaatataaacttagatttaaataattttgaaagatttaaaaattatattctagaaaaaaaaatagatttaattattattggaccagaaaaaccattagtagatggtttggttgattatcttgaaaaatttaaaataaaagtttttggacctaataaaatagcatctcaattagaaggctcaaaaatatttactaaagaactttgccagaaatataaaatcccaacagcaaatttcagaatttgtaaaaataaatttgatgccaaagaatttttagaaaacacaaattatccaatagttgtaaaggctgataatttggcttctgggaaaggtgtttatatttgtgaaaataaaactgaggcttcaaacgctgttaatgaaatttttgatgggaagttcggtaaagcaaataaattattaattgaagaatttttgaaaggtgaagaaatgagtttttttacaattcatgatggtcaaatatttaaaaattttggaacagctcaagatcataaaagag

SEQ ID NO: 314336 - DNA, 746 bp, Unknown
  Bacterial polypeptide expressing nucleotide sequence isolated from the Sargasso Sea
tatgaaaattgcaattcttggaaatggtggaagagaacatgctatagcagacaaaatatcagaatcacctaagctatctaaattgtattgtttaccaggtaatgcaggaacaaatttaattgcagaaaatgttaatttagatatttacgatttcgaaaagttaggaaaatttgtcgatgaaaatcagatagatttagtaatagtgggccctgaaaaaccacttgttgacggggttgttgactttcttaaaaaaaagaaagttaaagtatttggtccaaacaaaatttcttcacaacttgagggttctaaaatatttacaaaaaaaatatgtgaaaaatacaaaataccaactgcaaaatttggtattttcgattctttgaaaagtgcaactgattatttagaaaaagtaaataagcctattgttgttaaagctgatggtttggcaggaggcaaaggtgtttatatttgcgaaaatacagcgagtgcaaaaaatgcagtaaatgaaatttttaaaggaaaatttggtatagctaatcaagttcttattgaggaatttatgcagggagaggagatgagttacttcgtaatatctgatggaaaaacatttagaaaatttaatactgcccaggaccataaaagagtaggagaaggtgataagggtaaaaatacaggaggaatgggtgcatattcaccatcaggactaataaataaagatttggacttaaaaattattgagaagattgtga

SEQ ID NO: 314337 - DNA, 163 bp, Unknown
  Bacterial polypeptide expressing nucleotide sequence isolated from the Sargasso Sea
catgaaagttggaataataggaagtggtggaagagaacatgctttatgccaaagtttaaaaaattcaaaaaaaattgatgaaatattttgctttcctggaaatgcaggaactgctcttattgcaaagaatattacaataaatttagaaaattttgaaatctaa

SEQ ID NO: 314338 - DNA, 828 bp, Unknown
  Bacterial polypeptide expressing nucleotide sequence isolated from the Sargasso Sea
gccaatcatccaatagttattaaagctgacaacttagcctctggaaagggtgtctatatttgtaaaaatttaaatgagtctactaatgctgtagaagaaatttttggtggaaaatttgggtatgctgaaaacatactagttgaagaatttttagaaggtgaggagatgagctatttcattattagtgatggaaaaaattttagaaactttggaacagcgcaagatcacaagcgagtgggagaaggtgatacagggaaaaatactggtggtatgggtgcctactctccttctagattatttaataatgaattaaatcaaaaaatattaaataaaattattaaaccaacactaaagggactttctgatttaggtactgattatataggttttttatatgctgggttgatgattaaaaataatgaaccctacctaattgaatataatgtaagaatgggagaccccgagtgtcaaacattattacctatattgaatacagactttttagatatcttaattgcttgtgttgaacaaaatctagaaaatataaatattgaatgggcaaataaaaaaagtttatgtgtagttttgtgttcaaagggatacccagataaatatgaaaaaaaaataaaaattaataatcttaatgcattaaaattagataataataatcatctttttcatgctggaactgtaataaaaaataatgaaattttagcagttggtggaagagtgctaaattttatttcactttcagaaaacttatcaaatgcacgagagaatattcataataatttaaataagcttaattgggttgaagggttttataga

SEQ ID NO: 314339 - DNA, 1165 bp, Unknown
  Bacterial polypeptide expressing nucleotide sequence isolated from the Sargasso Sea
aaatgccggaacttctcaaatagcaaaaaatataaatttaaaaacaaataattttagaaatataaaagaatatattttgcaaaatgaaattgatcttataattgtaggaccagaaaaacctttagtcgatggcattgtagattacttggaaaaatataatattaaagtttttggtccaaaccagatagcatcaaagctagagggttcaaaaatttttacaaaaaaaatttgtaaaaaatataatattcccacagctaattttggggtttttaaaaatgtaaataattcccgaaaatttttagaaatgtctaattttcctgttgttgttaaagcagacaatcttgcatctggtaagggagtctatatatgtaaaaattttgatgaatcacttgttgcaataaaagaaatttttgatggtaaatttgggaaggccaaaaaagttttaattgaagagtttcttgagggtgaagagatgagctattttattattagcgatggagtttctatcaaaaattttggcacagcacaggatcataaaaaagttttagagggcgataaaggtaaaaatactggaggaatgggagcttattccccctcaaggctgatcacaaataaactagaaaaaaaaattattaaaaaaattattaaacccactttattggcaatcaaagaactaggcactagttataaagggtttttgtatgcggggttaatgattatcaaaaatgaaccttttttaattgagtacaatgttagaatgggtgatccagaatgtcagaccatactaccaattttaaaaacagatttaactgaggtaatactggcgtgttgtgaaaaaaaattacataaaactaaaattgaatggcataaaaaaaaaagtatttgcatagtcctttgttcaaatggatatccagataaatttagtaaaaatatagagataagaggcataaataagattaaaacaaataaaaataattttatttttcatgctggaacatcaaggcaaaatggaaaaatttttgctgttggtggaagagttctaaattttatttcgatttcaaatgattttattatggcaagaaagaaaattatcaataatcttaaaaagttaaattggtcaaaaggattttatagaaaagatattgcatttaaagtaattgaataa

SEQ ID NO: 314340 - DNA, 808 bp, Unknown
  Bacterial polypeptide expressing nucleotide sequence isolated from the Sargasso Sea
catgaaagtttgcgtcgtcggatctggcggacgcgagcatgcatttgtagagaccttgtctcgcgatgcggaagtaataattactccaggctcgctagcggtgcctgaaagtactgataaaccgccaattgaagtcgacgcggacttgttcgtaataggtccggaaattccactggttgatgggttagcagatgagttgcgttcacgagggcacaaagtatttggccctggttcggatggcgctttattagaagggtcgaaggcctggatgaaagatgttgttcatgcagcgggggtgccgacagcccgctacgggtctttcgaatcgtcgcaagtggaccgagccattgagtttttatcgtcaatgagcccaccgttcgtaattaagacagacgggctcgctggcggtaaaggagttctggtaactgataattacagtgacgcaaaagcggatatcgaaacaaagttagctggcctttcctttggtgatgcgggccgtcgagtgataatcgaagaaggtttgcgaggccctgaactttctctgtttgctatttgtgacggtcagaaagcggttttagtcccgacctcggctcaagatcacaaacgcctaggtaatggagatttaggtccgaacacgggcgggatgggttgttactcaccaataccagaaatacaaagatctcagcttgacgaccttatggaaatcgcagtgcaccccacggttgaggaattaaagaaccgcaatattgattaccggggtgtgctattcgctgggttcatgatgaccgaggacggtcccaaaaataaa

SEQ ID NO: 314341 - DNA, 921 bp, Unknown
  Bacterial polypeptide expressing nucleotide sequence isolated from the Sargasso Sea
atattcccacatcaaattttaagatttttaaaagtttaaatcagacaatagattatttgaaaaatagtcattttcctcttgtaataaaagctgatggtttggcagcaggtaaaggcgtttatatatgtaaaaatttcaatgacgcaaaaatagcttctgaggaaatttttaatggaaagtttggagatgctgatcaaattttaattgaagaatttttggatggtgaggagatgagttacttcatagtaacggatggaaaaaattttaaattttttggttcggctcaagatcataaaagagttggtgagggtgatacaggtaaaaatacagggggtatgggctgttactctccatcaagacttcttagcaaaaatttagagtcaaagattaaaacaaaaataattgaaccaactttaaatgcaataaaggagtacggaggggtctacaaaggttttctatatataggccttatgattaaaaataatgatccctacttaatagaattcaacgtaagaatgggagacccagagtgtcaaacaatcttgcctaccctaaatgttgatttatttgatgtattaatttcatgctgtgatggtacattaaataaaacaaatattaatttttctaaatcaaagagtatttgtgttgttttatgttcgagaggttatccagaaaaatttgagaataatgttaaaatcaaaaatttagagcaaataaatcttctacaaaaccaaaatatttttcatgctggtacattaaaaacaaaaactggtatagtttctaatggtggaagagtattaaactttgtttcaacctcagataatttttcgaaatgtagggatgagacaattaatttgattaaaaaattaaattgggagaacggttactttagaagagatattggtcataaggtaatttaat

SEQ ID NO: 314342 - DNA, 1333 bp, Unknown
  Bacterial polypeptide expressing nucleotide sequence isolated from the Sargasso Sea
tatgggaattaatacacctagttcaaggaactttattagattagaaaatattctaataattggaaatggcgggagagaaaactctttggcctgggctattcaaaaaaatgaatttgttaaaaaagtttatttaatacctggtaacgctggttcagaaagaataaataaatgtgaaagaataaaaattgatataaataacaaaaatgaactggtcgagaagcttgatttttttaagatagatttagtcgttattggaccagaaatacctttggcaaatggattagctgattttcttcggaaaaaggattttaaagtgtttggtccaaataaagatggagcaaaactagaatttagtaaatcttgggcgaaggaatttatgcaagaggcaaatattccaactgcaaacttttggaaagtcaattctttagaagaagctaaaaaaattattaattcatcatcaattccacttgtagtaaaagctgatggtctagcttcaggtaaaggtgtttttattcctaattcaaaagatgaatgttttaaagcagcagagacaatttttaatggaaaatttggcaactctgggaatgtagttgttctagaagaaaaaattcaagggccagaagtttcagtttttgctttatgcgatggaaagagatataccctactgcctaccgcccaagatcacaaaagacttaatgaaaaagataaaggtccaaatacaggaggtatgggggcttattctcctgccccattattaacagaagattaccttgatagaattatcaaagagataattgaacctacaatagatgagctaaataaaaaaaatattgactatagaggcgtaatttattttgggttaatgatcacagaatctgggcccaaggttatagaatataattgtagatttggtgatccagaatgccaaacaataatgcccttgatggatcaagattttgtatttctcttagaaaaatgctcaatgggaagtttaactggtgacgaaaaaattactacttctgataaagttagtggttgcgtaatagcgacctccaaaggctatcctcacgaatataaaactggctatcagataaaaataggtaagattgatttaaatgattgtcaaatttttgattcaggtacttcttttagtaaaagtgggaaattattaactgctggaggaagagtcttaagtattgtctgtcaagataaagacttcgatacagcttttgaaaaagcctacaaaaatttaaaagaaatacattttgagggtatttactttagaaatgacataggtcatcaagtgagaaaaaacttttctaaggagaattaa

SEQ ID NO: 314343 - DNA, 717 bp, Unknown
  Bacterial polypeptide expressing nucleotide sequence isolated from the Sargasso Sea
tttggcatggaagtgctctactgataaatttattgaaaaggttttcgttgctccaggtaatgcaggaacactccttgaagaaaaaatagagaatatttccttagatataaataacaatgaggatgtctctagcttctgtatttcaaataatattgaacttgtgattgtcggtcctgaagatcctctagttaatggtttggttgactttcttgagtctaaaaatataaaagtatttgggcccagaaagggagctgctcagttagagggatcaaaaaccttcgcgaaggacttttttataaaatatggcatacctacagcaaattatcagtcttttgacaatcatcatgatgccctaaagtacctcgacaagattgattttccctcggttgtaaaagctgatggccttgctgctggaaagggagttattatttgtgatgatcgagaggctgcagaaaaagcccttgaagatatatttgaatcaaatgcctttggggatgctggaaatagagtagtaattgaagactttttgaatggagaggaagcaagctttattgctgttgttagtgatgatcaaattattcctcttgcaacaagccaagatcataaagctgttggagatggagatgttggattaaatactggaggcatgggtgcatactcccctgctccaattgtcacagatgagattcacaatagagttatcgatgaggttatgct

SEQ ID NO: 314344 - DNA, 532 bp, Unknown
  Bacterial polypeptide expressing nucleotide sequence isolated from the Sargasso Sea
gaaagttattgaaccgactgttagagggctctctcaagatggcattgctttcagaggattcctttatgctggactcatgatcgactatgatttaagcccaaaggtattagagtataattgtagatttggagatccagaaactcaaccaatactgttaagactgaaatcagatcttattgatatgattcaaacttgcttctctggaaatattagtaattatgacaccgagtgggatgagaaatcatctataggggttgttatgtctagcagtggttatccagaatcatatgaaactggcaaagaaatatctgggcttgacacactttatgacaaaaatgacattaaagtctttcattcgggtacgcgtatagagaatcaaaatattcttactaatggtggcagagttttgtgtgtaactgctcttggtgatgacttaagtgaatcttatcagaatgcttactctgtgattgagcaaataaattgggatggaaaatactacagaaaagatattggatttagggtgatgaaataa

SEQ ID NO: 314345 - DNA, 719 bp, Unknown
  Bacterial polypeptide expressing nucleotide sequence isolated from the Sargasso Sea
gggagaagaggctagttattttcttttagttgataaaaataattttaaattctttggaagcgctcaagatcataaacgtgtaggtgagaaagacactggcccaaatacaggtggcatgggagcatattcccctgcaccaatcattaacaaaaaccttgaaaaaaaaattttaaaaaaaattgttaaaccgactttatctgccttaagaaaaaaaaagagagcttataaaggttttttatatgttgggctaatgattaaaaataacgagccatatttaattgaatataatgtgcgtatgggtgatccagaatgtcaagtaattcttccaagattgaaaacagatttggttaaaattattttaagctcagttaatgacaaattaaaatataccaaaatactctggcacaaaaaaaagtgtatgactgtagtcctatgctcaaaaggttatccaggtaaaataaaaaagaatatagaaattgagaacctaaaaaaaataaataacgaaaaaaatacttttatctttcatgcaggtacaaagatagcttttgataaaatttatactaatgggggacgaattttgaattttactggtgttggatctaatttttcaaatattagagcgaaaattatcaaattaattaaaaaacttaattttaagaatggtttttttagaaaagacataggttggaaagtcataaataaaaatgcggattattagt

SEQ ID NO: 314346 - DNA, 309 bp, Unknown
  Bacterial polypeptide expressing nucleotide sequence isolated from the Sargasso Sea
tatgataaatgtcctaattgttggtagcggcggaagagaacatgctttcacctggaaagcgtcacaatctaatcttgtagaaaaagtctttgtagcaccaggaaatgcagggacttcacttgagccaaaagctgagaatatagatatcagtgcctctgatattgatgctttgatatctttttcaaagaaagaaaatattgatcttgtgattgttggcccagaagatccgctagtcaatggcattactaatgaattcaaaaaagttggtatcaaatgttttggtcctgaaatctcaggagcaagtcttga

SEQ ID NO: 314347 - DNA, 605 bp, Unknown
  Bacterial polypeptide expressing nucleotide sequence isolated from the Sargasso Sea
taaaaacacgggaggaatgggagcctactcaccttctcgattggaaagtgaaaaactagaaaaaaagataatagagaaaataatagagccaacattaaaaggcttaaaagatataaataataaatttaagggttttctatatgcaggattaatgattatagatgatgagccttttttgattgaatacaatgtaagaatgggtgatcctgaatgtcaaacaatacttccaagactcaaaaccgattttttagacattgtaactgctactgttaatgaaaatttaaaagatataaatttagagtggtttgaagaaaagagtatttgtattgttttagcttcaaaaggatacccggataaatatgaaaataatctagaaataaatggtcttaaagaaattaagcttaagaataatgaatacatttttcacgctggaactaaaataaataattcaaaaatacactctaatggtgggagagtattaaattttgtaattaaatcagacaatttaaaaattggtagagatcaagccataagtttaattaaaaaattaaattggcaaaatggatattttagaaaagatattggttataagattatatcatgat

SEQ ID NO: 314348 - DNA, 598 bp, Unknown
  Bacterial polypeptide expressing nucleotide sequence isolated from the Sargasso Sea
gatgcaaattgataccattttgacaaaaaaaacatttggtgatgctggctctaaaatcatcattgaagaacgaattgatggcatagaagcctcatacattgcattatgtgatggaaacgtaggaattcctatggctacaagccaagatcataaaagaatttttgatgatgataaaggtccaaacactggaggtatgggtgcatattctccgactcctataattgatgacaaacttgcatttcaaattcaagaaaaaattattgataaaacaattgcatctatgaatgaagaaggaattaatttcaaaggatttctgtatgctggaataatgataaaggacggttccccatatgtcctagaatacaatgtaaggatgggtgatcctgaatgccagccaattttaatgcgtcttgattctgatttgtatgaatatcttctcgcatcatatgaaggaaagttaaaagatcttcccaaattatcttggaaacaagaatatgcggtatgtgtagtattggcctcaaaaggttatcctaaatcttacacaaaaaatgataaaattactggctttgaaaatattcctgaaaattcgtttgttttt

SEQ ID NO: 314349 - DNA, 481 bp, Unknown
  Bacterial polypeptide expressing nucleotide sequence isolated from the Sargasso Sea
ttggttgtaggttccggtggacgtgaacatgcactaacatggaaattatcaagttctgataacgttgaacaggtattcactgcacctggcaatggtggaacgccgaacaacgtttccatttctgtagatgatattgacggactagtaaaatttgctcaagaaaaaaactgctttactgttgttggacctgaagatccacttgctaatggaattgttgatacatttcatgaaaaaaatttgcctatatttggtccatctaaaaatgctgctcagttagaatctagtaaaatttgggctaaagagtttatgaaacgaaactctattccaactgcagattttgaaatctttgatgatgcacagaaagcaaaagagtttgtaaaatcatatgataaacctgttgtaataaaagcagatggtttggctgcaggaaaaggagtaattgtatgtgatagtaaggatgaagcaaatgatgcaaattgat

SEQ ID NO: 314350 - DNA, 357 bp, Unknown
  Bacterial polypeptide expressing nucleotide sequence isolated from the Sargasso Sea
tatgaaagttggaataataggaagtggtggtagagaacatgctatttgtcaaagtttaaaaaactcaaataaaacagataaaatattctgttttccaggtaatgcgggcactaaagagatagcagaaaatattaatcttgatttagagaatttcgaaagtcttaaaaattttattttggataaaaaaattgacttaattgttgttggcccagaaaaacccttggtagatggactggtagattatttagagaatttcaaaattaaagtatttggtccaaataaagttgcttctcaactagagggttcaaaaatatttacaaaaaaactttgtgaaaaatttcaaataccaacagctaa

SEQ ID NO: 314351 - DNA, 727 bp, Unknown
  Bacterial polypeptide expressing nucleotide sequence isolated from the Sargasso Sea
ttgttgggccgagcaccactggtagatggtataacagactatttagaaaagtttaaaataaaagtttttggtcctaataaaatagcttctcaattagaaggttccaaaatttttacaaaaaacatttgtaaaaaatataatatacctactgccaattttggtgtgtttgaaaatgagactgagtcaaataaatttctagataaatcaaaattccctattgtgataaaagcagataatttagcctctggtaaaggagtttatatatgtgaaaataaaaaacaatcactcgaagcgataaaagaaatatttgatggtaaatttggaaaagcaaagaatgtgcttattgaggaatttttaaaaggtgaggaaatgagtttttttatcataagtgacggtgataattatcaaaactttggaactgctcaagatcataaaagagttttagaaggagataaaggaaaaaatactggtggtatgggggcgtattctccatcaaggttaataaataacgaattagaaaaaaaaattttagataaaattataaatccaactttaaaagcaattaaagatctcggaactgtctataaaggttttttatatgctggactaatgataattaataatgagccttttttgattgaatataatgtaagaatgggagatcctgagtgtcaaactttacttccaaaactagatactgacttatttgaaattttaaattcttgtt

SEQ ID NO: 314352 - DNA, 508 bp, Unknown
  Bacterial polypeptide expressing nucleotide sequence isolated from the Sargasso Sea
atgaaactaggaataattggaagtggcggaagagaacatgccttatgtgaagcactaagcaaatctaaaaaagttgacaaaatttattgttttccaggaaacgctggaactagtaaaattgcagaaaatattttaatcaatgctgatgattttaatgcccttaaaaaatttatactctcagaaaatatccagttaataattgttggaccagaaaaaccgttagttgaagggatagttgatttttttgaaagtataaatattccaatatttggtcctaataaatttgcatctcaactcgaaggttcgaaaatctttacaaaaaaaatttgtgaaaaatacaaaatacctactgctaaatttggaatttttgaaaacattgataaagcaaaatctttcataggtgagactaaatttcctttagttgttaaggctgatggattggctgctggtaaaggagtttatatttgtgagaataaagataatgcctcaaacgctatagaggaaatat

SEQ ID NO: 314353 - DNA, 277 bp, Unknown
  Bacterial polypeptide expressing nucleotide sequence isolated from the Sargasso Sea
gatgagagtactggtgataggatctggaggaagagagcatgctctagcgtggaagttgagtctatctgatcgggtgaccgaggttttggttgctccaggcaatgctggaacggcgctagaagcgaaggttaggaatcttgaggtcgacacgaacgattttactggtttgattgaccgtgccctggccgaaagggttgatttcactctagttgggcccgaaattccgctggtcgagggtattgttgatgcgtttcagggtgctgggttgcgaattttt

SEQ ID NO: 314354 - DNA, 937 bp, Unknown
  Bacterial polypeptide expressing nucleotide sequence isolated from the Sargasso Sea
taaaaaatataaaattccaactgcaaagtttggaatttttaaaaataaacaagacactcttcaatttataagaaataaaaaaatgcctctagtgattaaatctgatggtctagctgctggaaaaggtgtttatatatgtaaaaatctaaaatatgcaagaaaagcaattactgaaatctttggaggaaagtttggtaaagctaatcaaatattggttgaagagtttttaggtggtgaagaaatgagttattttatcatttctgacggaataaattataaatgctttaatactgctcaagatcataaaagagttggggaaaaagatacaggaaaaaatacaggcggtatgggagcctactctccatcaggattgatcaataaagttttagaaaaaaaaataattaaaaaaattataaaaccaacacttattgctattaaagaaatgaaacaacactacaaagggtttttatatgctggactaatgataaaaaataatgaaccttatttaattgaatataatgttagaatgggtgaccctgaatgccaaactattttacctctcttgaaaacagatctattagatttaattattgcttgttgtaatagtaagctattgaacaaaaaagttgagtggtataaaaaaaagagtctatgtgtcgttttatgctctaacggctatccagaaaattataaaaaaaatattgaaattccaaaattaaataaattaaaaattaaaaaaaataattatttattccatgcaggcacaaaagaaatagaaaataaggtttatgctattggaggcagagttttaaattttgtttctatttcagacgattttttaaaatcaagaaatgaaattattaatcaattaaaaaaattaaattggaatagaggtttttatagatctgatattggatataaagttataaaaaaatga

SEQ ID NO: 314355 - DNA, 1054 bp, Unknown
  Bacterial polypeptide expressing nucleotide sequence isolated from the Sargasso Sea
aaacctcttgttgatggagtcgtcgactttcttacaaataaaggaataatggtatttggacctaataaaatttcctcacaacttgaaggttctaaaatatttacaaaaaaaatatgtgaaaaatataaaattccaagtgctcaatttggtgtttttgactccagagaagatgcacacaactatttggaaaaagctaataaaccaattgttgttaaagcagacggtttagcggcaggaaaaggtgtttatatctgcgaagatacagatagtgcaaaaagtgctgtagatgaaattttcaatggaaaatttggtaaagccaatcaagttcttatagaggaatttcttaaaggcgaagagatgagctactttgtaatatctgacgggaaaacatttaaaaaatttaatactgctcaagaccataaaagagttggtgaaggtgacaagggtaaaaatactggtggtatgggggcatattctccgtcaggacttataaatgatgagttagatattaaaattattgggaatgttattaagccgaccttaaaagcaattgaggatatgggagaaaaatacaaaggatttttatatgttggtctcatgattaaagacaataatccgtatctaattgagtacaatgtgagaatgggagatccagaatgtcaaacaattttaccattattaaactcagatctattagaattaatgctctcatgctgtgaaggaaatttagaaaatcaaaaaataaactggaaaaataaaaaaagtatgtgcatcgtactttgctctgatggatatccagatacatacaaaaaaaatgtagagattcctaacttagaaaaaattacaaaaaacaatagtacttttgtttatcatgcaggaactgagttgattgataacaaagtttatgcaacaggagggcgtgtacttaactttgtaaatatttctgaagatttaaagaaatcaagagactctgtaattaatgaaattaaaaatttaggatggacaaatggtttttatagaaaagatattggttttagaattatagataaatgag

SEQ ID NO: 314356 - DNA, 1333 bp, Unknown
  Bacterial polypeptide expressing nucleotide sequence isolated from the Sargasso Sea
atgggaattcactcaccaagtcctaagagctttactagattagaaaatatcttaataattggaaatggcgggagagaaaactctttggcttgggctattcaaaaaaatgaattagttaaaaaagtttatttagtacccggtaacgctggttcagaaagaataaataaatgtgtaagaataaaaattgatataaataatgaaaatgaactggtagaaaagcttgattttcttaagatagatttagttgtaattggaccagaaatacctctttcaaatggattagctaatttacttcgcaaaaatgattttaaagtatttggacctaataaagatggagcaaaattagaatttagcaaatcttgggctaaggaatttatgcaaaaagcaaatattccaactgcaaacttttggaaagtcaattctatagaagaagctaaaaaaattatcaactcatcatcaatcccactagtagtaaaagctgatggattagcttcaggtaaaggtgtttttattcctaattcaaaagatgaatgcctcaaagcagcagaatcaatttttaatggtaaatttggcaactctggaaatatagttgttttagaagaaaaaattcaaggaccagaagtttcaatttttgctttatgtgatggagagagatacacattgcttccaaccgcccaagatcacaaaagacttaacgagaaagatacaggaccaaatacaggtggtatgggtgcttattcccctgctccattattaacagaagaataccttgataaaattatcaaagagataattgaacctacaatcaacgaactaaataaaagaaatattgactatagaggcgtaatttactttgggttaatgatcacaaaatctgggcccaaagttatagaatataattgcagatttggtgatccagaatgccaaacgataatgcccttgatggatcaaaattttgtatttcttttagaaaaatgctcaatgggaaatttaactggtgatgaaaaaattagtacttcagataaagttagtggctgtgtaatagcgacctccaaaggttatcctcacgaatataaaactggttttcaaataaaattaggtaagattgattcaaatgattgtcaaatttttgactcaggtacttctttaagtacaaatggaaaattgttaactgatggaggaagagtcttaagtattgtctgccaagataaagattttaatatggtttttgaaagagcatacaagaatttaaaggaaattcattttgaaggtatttacttcagaaatgacataggtcatcaagtcagaaaaaacttttccaaggataattaag

SEQ ID NO: 314357 - DNA, 493 bp, Unknown
  Bacterial polypeptide expressing nucleotide sequence isolated from the Sargasso Sea
tggaatttattcagaggattcctatatgctggccttatgattgactctaatctgaaaccaaaagtacttgagtataactgcagatttggagacccagagactcaaccaataatgttaagactaaaatcagatctcatagatatgattcaaagttgcttctctggggatattggtaattacgaaattgaatgggataaaagatcagcattgggtgttgtgatgtccagtaatggttatccagaatcctatgaaactggaaaagtaatctcagggctagatgcattggttggtaagaatgatactaaagtatttcactcgggtacacgcatagaaagtgaaggtgtttttacgaacggtggcagagttttatgtgtaactgcgcttggtgatgacttaaatcagtctaataagaatgcttacttggctattaatgagatagattgggatgggaagtattacaggagagatattggctttagggtgatgaaatagc

SEQ ID NO: 314358 - DNA, 793 bp, Unknown
  Bacterial polypeptide expressing nucleotide sequence isolated from the Sargasso Sea
agatgaggcagtaattgaagctaaaaaaattctcaatggtaaatttaagtcatcaaaaaaagtggtgctagaagaatttttagaaggtgaagaattaagctattttgttttggttgacaaaaattcttatagtttttttggatccgcgcaggatcataaaaaagttggcgagggggatactgggttaaatactgggggtatgggcgcttattctcctgcaagaaatttgacggatgtcttggagaccaaaataagaaataaaattatagaaccaacgcttaatgcgatgaaagctctcggatatccatatactggttttttatatgcaggtttaatgattaagaacgatgagccctatttaatagagtacaatattagaatgggagatccagaatgccaagtgttaatgatgaaattaaaaacagacttgttgagtataatagaagcaacaacaaataataatttgagtaaattaaaaattgagtgggataataaaaaatgtattactattgttttatgtgctaaaggataccctggagaatatgttaaagataaagaaatcaaaaatttatcaaaaattcatttagataaaaataatcaaatatttcatgccgggacttacgagttcaatggcaaagtattttcaaaaggtggtagagttttaaatgtaacttcctcaagcaaagatcttgatgaggctagaaatggttctttatcgaaccttaaaaaaatcaattgggatagtgggttttttagaaaagacataggttggagagctatcaaaaaaaaatga

SEQ ID NO: 314359 - DNA, 683 bp, Unknown
  Bacterial polypeptide expressing nucleotide sequence isolated from the Sargasso Sea
gggacattcactctgctataagttaaaagaatctagtttgattaatgaaatattccgttttcctggtaatgctggtacagaattaattgcagaaaatataaatttagatgtttcagattttgaaaaaattcacaaaatttgtgaagaaaagaaaattgaattgattgtagttgggcctgaaaaacctttagtgaatggtattgtcgattatttcaaaaatactaaaattaaaatttttggtccagataagattggtgcacaattagaaggatcaaaaacttttacaaaaaaattgtgcaaaaaatataaaataccaacttctagttttgagattttccaagaaaaaaaattagcattaaattatttggcatccgttaaatatccattggttgttaaagcagatggtttggcagcaggaaaaggagtttatatttgcaaaaatcaagttgatgcaaatctagcagtgaaagaaatatttggtggacgttttggtaaagctgattgtgttttagttgaagaatttttaaatggagaagaaatgagctattttattgtttctgatggagtaactcataaattttttcaaacagctcaagatcataagcgtgttggtgaaaatgatactggcaaaaatacaggtgggaatgggcgcatactctccctcaaggctttatacaaatgaa

SEQ ID NO: 314360 - DNA, 376 bp, Unknown
  Bacterial polypeptide expressing nucleotide sequence isolated from the Sargasso Sea
atgaaaattgcaattctcggaagtggtggaagagagcacgcgttggtaaatcaaatgtcattatcaaaaaaaaccactaaaatttattgtattccaggaaatgctggcacatgtcatttggctgaaaatgttaatttaaatctagacaactttgaaagcatttatgattttattttgaaaaataaaattgaattagtagttgttggtccagaaaaacctttggtagatggtatagctgattttttgcaagaaaaaaaaataaaagtttttggaccaaataaagtactatctcaatttgaaggatcaaaaacgtttactaaaaatgtttgtaaaaaatataatatacctacagcaaaatttaatattttaaaaaatt

SEQ ID NO: 314361 - DNA, 1219 bp, Unknown
  Bacterial polypeptide expressing nucleotide sequence isolated from the Sargasso Sea
atgagtgaaaacatccttttagttggctctggagctagagagcacagcatagcaaaagcaataaaccgatcaacaaatttaaatgacatgttttgtcttgcctcaaacatgaatccagggattgctagcctttgtaaagaatttattgttgatgatttcaatgatccagaaactgtatccagttacgctaccaaaaataatatttctatggcagttatcggtccagaaaaccctcttcaaaaaggagttgtagactctctttggaatttaggggtaggagttgttggccctaaaaaggatctcgctcaaattgaaacatcaaaaactttcacaaggaatctattaaagaagcacaacatccccggaggcccaaaatacaaaacattcatatctcttgatggtgtgaaagattttttaaaagagcttgatgaaaactatgttgtgaaatttgatggcctcgcgggcgggaaaggtgtgaaagtatctggtgatcacttggcttcccacgaagaggcattagaatattgtaaggagctgattagcaagagccagccattcattattgaggaaaaatttattgggcaagagttttctttgatgagttttagtgatggaaaaacattgaaacatatgcccgctgttcaggatcataaaagagcttatgaaaatgatgagggccctaacacgggtggaatgggtacctattccgatgcagatcactcactcccctttcttcaaaaaaaggacatagaagaggcacatgaaataaaccaagccacaaccaacgcactaataaaagagtttggatatggatacaaaggaattttatatggtggatttatggctaccaaagatggtgtaaaattgatagagtacaatgctcgttttggagatcctgaagccatgaatgttttatctattcttgaaacggattttataaaaatatgtcatggaataataagtgaaaagctagatcaagttgatgtgagatttaaaaataaagcaacagtgtgcaaatatgctgtgcctgaaggatacccaaatgaaccaattaaaggagccgaaataaatctttcaaaaattaaaaaccaagaatctttattctatgcttctgtggatgtgcaaaacggagttcttgtagaagccggtagccgaacgattgcggtaataggaattgacaatactattaaaggtgctgaaaaaattgccgaaaaagaaa

SEQ ID NO: 314362 - DNA, 455 bp, Unknown
  Bacterial polypeptide expressing nucleotide sequence isolated from the Sargasso Sea
caaaaacaaaaaacttaaagtcttagagtttaactgtaggtttggagaccctgaaactcaaccaatcatgatgaggctaaaatctgatttagcttctctctgtgatcaagcatgtgatgataaccttattgaacagactctagaatgggattcaagaaaggctataggtgtggttttagctgctagaggatatcctcatggatatgcaaaagggaaagatattactaatattccttcagaaaaagatgacttaaaaatctttcatgccggaacaaagattgaatcaaatagcttgaagtcaaatgggggaagagtcctatgcgtcaccagtctaggagattctgtggaatcagctaaaaataaagcttatgatgcgatttcaaaaatagtatgggaagatgcattctatagaaaagatataggctacagggctatagaaagagaaagaaaatgaa

SEQ ID NO: 314363 - DNA, 669 bp, Unknown
  Bacterial polypeptide expressing nucleotide sequence isolated from the Sargasso Sea
tatgaaagttggaataataggaagtggtggaagagagcatgctatttgccaaactttaaaaaattcagataaaatcgagaaaatattctgttttccaggaaattcagggacacaaaaaatagcagaaaatataaatattaatttagaaaattttgaaaatcttaaaaattttatatttgagaaaaaaatcgacttaattgtcataggtccagaaaagcctttagtagaaggtctagttgattttttagagagttttaatattaaagtatttggaccaaacaaagttgcctctcaacttgaaggttccaaaatatttacaaaaaaactttgtcaaaaattcaaaattccaacagctcaatttggaattttcgaaaacaaagatagtgcaaaagaatttttgaaaaaaactaaatttcctacagtagttaaagcagataaccttgcttcaggtaaaggtgtttacatttgtaataaagagagtgaagcactaattgcaattaatgagatatttggaggtaaatttggaaaagcaaaaaatttgctaatcgaggaatttttacaaggtgaagaaatgagtttttttaccattcatgatggaaatacttttaaaacttttgatactgcacaagatcataaaagagttttagagggagatatgggaaaaaacac

SEQ ID NO: 314364 - DNA, 460 bp, Unknown
  Bacterial polypeptide expressing nucleotide sequence isolated from the Sargasso Sea
gatagataagcatggaaatcccaaagttattgagtttaattgccgttttggagatccggaggcccagcctgttatgtatcgtcttcgatccgatttgttagaagcatgtgagaaagccgtctccggagagctgaaagattaccacctcgagtttgatgaaagagtggctctcggtgtagtcatggcggcgggaggttatccggttgagtacgagtccggtgatatcatcgaaggccttgacgttgcagcatcaaatactaaggtttttcatgcgggaaccattgaagtagagggtgagattaaaacaagtggcggaagggttctttgtgtagttggcgccggcgaaagtgttgcttcagcagcagagtcggcctacgctcgggttaataacatcaagtggaaagatcattattttcgcagagatattggccaccgagcgatcaagcggcaaagtgattga

SEQ ID NO: 314365 - DNA, 481 bp, Unknown
  Bacterial polypeptide expressing nucleotide sequence isolated from the Sargasso Sea
tatgaaaattgcaattcttggtagtggtggtagagaacacgctattgctttttcaatctcacaatcaaaaaaagtcaaaaaaatatactgtattccaggtaatgctggaacatctgaaatttgtgaaaatgtttttattgatattaacaaatttaaagaaatccaaaaatttttaaataaaaataatattgatcttgtaattgtgggaccagaaaatccattagtgaatgggattgtcgattatcttgaaaaatctaatattaaaacttttggtccaaacagaaatgcatcacaattagagggttcaaaaatattcacaaaaaatttatgcaaaaaatataatatcccaacagcaaattttggagtatttaaaaccattaaagactcaaaaatatttttagaaaattcacaacacccaattgtaataaaagctgataatttagctgccggaaaaggtgtttatatttgtgaaaaattttaa

SEQ ID NO: 314366 - DNA, 697 bp, Unknown
  Bacterial polypeptide expressing nucleotide sequence isolated from the Sargasso Sea
aatgagctattttgtaattagtgatggaaaaacaattaaaaattttggaaccgcacaagatcataaaagagttaatgaaggtgataaaggaaaaaatactggtgggatgggagcttactcgccatcaagattaattaataaagaactggatgggaaaataatagaaaaaattataaaacctaccttaaaaggactgcaggaccaaaacatcaaatataaaggatttttatatgcaggactaatgatagttaataatgaaccttacttaattgaatacaatgtcagaatgggagaccccgaatgtcaaacaattcttccaatgctatacacggatttactagaaattatagagtccactatagatgaaaagctagaaaatatcgaaatccaatggctaggaaaaaaaagtttatgtgttgttttgtgctctaacggttatccagatcattatgaaaaaaatattgaaataaaaaatttaaataaattaaatttagataaaaataattatctatttcatgcgggtactgaaaaaatagatgaaaaaattcttgctattggaggtagagtgctaaatttcacctcgttatcgaaagattatggtgaatcaagaaaaaatattcatgaaaatcttaaaaaattaaattggaacaatggtttttatagaaaagatattggttataaagttatagataaatga

SEQ ID NO: 314367 - DNA, 463 bp, Unknown
  Bacterial polypeptide expressing nucleotide sequence isolated from the Sargasso Sea
tgcacctgacggcagcgctaaagtgcttgaatacaactgccgctttggcgacccagaaacccagcccattatgatgcgtttacagtcagacattgttgagctttgcctggcagctactcgtggtgaattagacaaggtcagtgcagagtttgactcgcgtgcagccgtaggtgtagtgatggctgcaggtggttacccagatgcctacaacaaaggcgatgtgattgacggcttaacccttggtgatgtcaacggtaaagtgtttcatgctggcaccgagatgaaagacggccatgtggttacaaatggtggccgcgtattgtgtgctactgcgctaggtcacagcgtcaccgaagcgcaacaagcagcttacgcattagtggatgctatccattgggatgacgtttacttccgtaccgatattgcttaccgcgccattgctcgtgagcaaggcaaagcgtaa

SEQ ID NO: 314368 - DNA, 714 bp, Unknown
  Bacterial polypeptide expressing nucleotide sequence isolated from the Sargasso Sea
gtttttgtgatggctctagcttaagtcacatgcctgcagtgcaggatcataaaagagcctacgagggagacaccggaccaaatactggtggcatgggcacctactcagactctgaccacagtcttccttttttagaaaaaagtcacatcctcgcagctcaaaaaataaatcagatgaccgccgacgcactccgggataagtttgaagagggatacaaaggaatattatatggcggctttatcgcaaccaaagatggtgtcaaggtcattgagtataatgcccgctttggtgacccagaggcgatgaacgtcttatctattctcgaaactgacctgatcgatatttgtagtgcgataataaatgaggagctaaatacaattgacattcgctttaataattcagcaaccgtttgcaagtatgcagtcccagaggggtaccccgatgatccaattaaaaataaagagatcgatgtagcagaggtcgcagacacagataaattgttttatgcctcagttgagttaaaaaatgataagctctttgaaataggaagccggaccgttgccgtagttggtgcgggagattctatttgggaggcagaagaaatagcagaaaaagaagtttctaaaattaaggggcccctctttcaccggaaagatatcgggacaactgagttgatccaaaaaaagatcaacaacatgcactccttaaaatgat

SEQ ID NO: 314369 - DNA, 1150 bp, Unknown
  Bacterial polypeptide expressing nucleotide sequence isolated from the Sargasso Sea
aattgctataaatgttgatatagatattttagattttaaaaaagtcctaaaagtaattaaaaaaaatcatattgatttggttgttgtgggccccgaggaacctctcgttaaagggttaattgattttttaaaaaaaaataaagttaaagcttttggaccaaataagtttgcatctaaattagaaggatctaaagcatttatgaaaaaactatgtaaaacaaaaaaaatcccaactgcaaattttaaaatttgtaaaaataatgttcaggttttaaaatttcttaaagaaagtaagttaccaattgttgtcaaagctgatggtttggccgctggaaaaggagttttcatttgtaaaaataaaactgaagtgcttaaaataactactgaaatatttaaaggaaaatttaagtcctcaaataaacttattttagaagaatttttggagggggaagaggcaagtttttttattttagctgataataatacttttaaagtttttggtactgcacaagatcataaaagagtgggagaaaatgatacaggtttaaatactggtggtatgggagcattttcaccatccgtaattatcaataaagaaattcaaaaaaaaataatcaataaaattgtaaaacctactcttttagcactaaagaataaaaagaaaccttataaaggttttttatatgttggtcttatgattaaaaataatgaaccctaccttattgaatttaatgtaagaatgggtgaccctgagtgccaggtaatattacctagattaaaaagtgacctagttaaaatattcttaaatacaataaaaaataaactaaataaaactaatattagttggagtaagaaaaaatgtatgacaattgttttatgttccaaaggttatccgggaaaatatcaaaaggacaagcctattaaaaatttaaataaaataaaattaaaaaaaaataattttatatttcatgctggtacaaaatttaaaaatagtaaacttgtttcaaatggtggacgagttctaaatataacctctacaggctcaaattttagaaatataaggaaaggaattattaaaattataaaaaaaattaattggaaatatggtttcttcagaagagatattggttggaaagtgataaccaaatga

SEQ ID NO: 314370 - DNA, 321 bp, Unknown
  Bacterial polypeptide expressing nucleotide sequence isolated from the Sargasso Sea
agataaaattcgatagccgcgctgctgttggcgtagtgctggctgctggtggttatccggatgattaccgcaaaggcgacgtgatttctggtttgcccacagaagacagccgtgaagccaaagtattccacgctggcactgtgttaaaagatggtcaggtactgacagctggtggtcgtgtgctttgtgctacagctttaggcgccaatgtcactgcagcacaaaaagcggcctacgagctgactgataaagtgcaatgggacggtgtatttagtcgccgggacataggctaccgcgcaatcaaacgtgagaaaaattaaa

SEQ ID NO: 314371 - DNA, 501 bp, Unknown
  Bacterial polypeptide expressing nucleotide sequence isolated from the Sargasso Sea
agggcagtccatatgttggattcctatacgctggcttaatgatagataagcatggaaaccccaaagtcatagagtttaattgtcgttttggagatccggaagcccagccagtcatgtatcgtcttcgatccgatttgttagaagcatgtgagaaagcggtatccggagagctggaagattaccacctcgagtttgatgaaagagttgctctcggtgtagtcatggctgcgggaggttatcctattgagtacgagaccggtgatatcatcgaaggtcttcaccttgcatcatcaaacactaaggtttttcatgcgggaaccattgaggtagagggtgagattaaaacaaatggcgggcgggttctttgtgtggttggcgccggcgaaagtgtggcttcagcagcagagttggcctacgctcgggttaatagcatcaagtggaaagattattattttcgcggagatatcggccaccgagcgatcaagcgggaaagtgattgat

SEQ ID NO: 314372 - DNA, 648 bp, Unknown
  Bacterial polypeptide expressing nucleotide sequence isolated from the Sargasso Sea
caagtcaggatcacaagcgggtttttgataatgatgagggtccgaacactggaggtatgggtgcatattctcctacgcctataatggatgaaaaacttgaaacagaaattcaagaaaaaattattgataaaacaattcatgcaatgcgtgatgaaggatttgagtttaagggattcttgtatgctggaataatgattaaagatggcactccatatgttcttgagtacaatgtacgcatgggtgaccctgaatgccaaccaatactgatgcgtcttgattctgatttgtatgattatcttcatgcatcatctgaaggaaaattaagtgagttgcctgaaatttcttggaaaaatcaatactctgtatgtgttgttcttgcatccaaaggatatccttcatcataccctaccggagatgaaattactggatttgaaaatattccatctgacgcattagtttttcatgctggaacaaaaagacaagataacaaaataaagtctaatggtggacgtgttcttggagttactgcattaggttctagccttcaagatgcaattaacaatgcatatgatgcatgtaatcatatacgttggactaacaaatatcatagaaccgatataggaaaaaaaggtctatctaatttatgat

SEQ ID NO: 314373 - DNA, 1178 bp, Unknown
  Bacterial polypeptide expressing nucleotide sequence isolated from the Sargasso Sea
tattcctggaaatgcaggtactgctgaaattgcagaaaatatatctatagaattaaatgatttcgaaaaaatttataattttataaatgaaaacaacattgagctcgttatagttggtcctgaagaaccattagtaaatggaattgttgattttttagaaaatttaaatattaaagtttttggaccaaataaaattgcctcacaacttgaaggttctaaaatttttactaaaaatctttgtaaaaaatataaaatacctactgccgagttttctacatttaaaaatgaaaaagattctaaaaattatattgaaagagctaaacatccgctggtaattaaagcagataacctggctgcaggaaaaggagtttatatttgccaagaaaaaaaagattcatacaaagcagttgaagaaatatttgatggaaaatttggactggctaaaaatattctatttgaggaatttttagttggtgaggaaatgagttattttattataagtgatggtaaaaatattaaaaattttggaacagctcaagaccataaaagagtaggtgaaggtgataaaggtaaaaatactggaggcatgggtgcatattcgccatcaagattaataaataaagaattagaaaaaaaaatattatcaaaaattataaaaccaactttaaatgcactttatgataatggaacaagttacaaagggtttttatatgctggattaatgatagtaaataatgaaccttacttaatcgagtataatgtaagaatgggtgatccagaatgtcaaactatacttcctactttaaatacagacctagttgatatttttctatgttgtgtaaatcaaaaacttgatgatattaaaattgaatggctaaataaaaaaagcttatgtgtagttttatgttctaatgggtatccagaaaaatatgaaaaaaatattgaaattaataattttgataaattaaacttagatagtaataattatttgttccatgcaggaactaaaataaataaaagtaaagttttagcaattggaggaagagtattaaattttatttctctctcagaccattttttatcagcaagagaaaatatacataataatttagaaaaacttaactgggataaaggtttttatagaaaagatattgcatttagagtaatcaaaaaatgag

SEQ ID NO: 314374 - DNA, 771 bp, Unknown
  Bacterial polypeptide expressing nucleotide sequence isolated from the Sargasso Sea
cagtgaaagaaatatttgatggaaaatttggaaaagctgatcaaattgtaattgaggaatttcttgaaggtgaagaaatgagtttttttgtcatttcagatggaaaaagtttcaaacaatttaacaccgcacaagatcataaaagagttggtgaagatgatacaggaaaaaatactggaggcatgggtgcttattctccatcagctttaataaataaagatttagaaaaaaaaattatcgataaaattattgaacctacttttagagctataagagattttggagaggagtatatcggatttctttatgcaggtttaatgattaaaaataatgagccatttttaattgagtacaatgtgcgtatgggtgatccagagtgtcaaactattcttccattactaaaatcagattttttagatataattaatgcttgttgtgaacaaaaattaaatcaatctaacgtagattggtcagataaaaaaagtttatctattgttttatgttcaaagggttatccagaaagttacgaaaaaaacgttgaaataaaaaatcttaataaaattaaaaataacaaaaataatttcatgttccacgcaggaacaatttctaaaaatgacaaaatattcgctaatggtggaagggtattaaattttgtgagtatttcagagagttatttagaggctagaaaatcagcaattgataaaattaaggatttaaattggggtggtggattttttagaaaagacattggtttcaaggctattgattaga

SEQ ID NO: 314375 - DNA, 733 bp, Unknown
  Bacterial polypeptide expressing nucleotide sequence isolated from the Sargasso Sea
aaaatattagttgaagaatttttaaatggtgaagaaatgagtttctttattatatctgatggaaaaaattttaaattatttaaaactgctcaggaccataaaagagtttttgagggagatgaaggaaaaaacacgggaggtatgggcgcttattgtccttcaggattaataaatgacactttagaaaagaaaattatagaaaaaataattttacctacctttagagcaatcaaagaaatgggagaaaaatataaaggatttctttatgctggtttaatgatttcaaataatgaaccttttttaattgagtacaacgtaagaatgggagatccagaatgtcagactatattgccacttttaaaaactgacttaacagatatttttaaagcatgctgtgatgagaatctggataacttaaaaatagaatggaaagaagaaaaaagtttatgcgtggtattatgttctaaaggatacccagacaaatttgataataatgtgaaaattaataatcttaataatttaaaattaaataataatgattttatttttcatgcaggtactaaaaaaaatggaaatgaaatattttcaaacggaggaagagtattaaattttgtatctctttcaaaatcatataaagattcaagagaaagagctttaaaacttataaatcagttaaattgggggaacggcttttttagaaaagacattggttttaaaattatagataaatgag

SEQ ID NO: 314376 - DNA, 1000 bp, Unknown
  Bacterial polypeptide expressing nucleotide sequence isolated from the Sargasso Sea
aaaatactctatacctacagccaaatttcatatttctagcgacatgaaggatgctaaagattttattgaacaagccaagctaccaattgtactaaaagctgatggtttagcagcaggtaaaggagtttttatttgtcatgacaataaagaagtcaatgatgcactagaaaaactatttaacatagataaattcaatagcgtggtaattgaggaattccttgtcggacaagaattatctgcaatttatgtttgtaattttagagggtgcagttacgaaattggtttaccatggacaaaagattataaatctagagacgagtataattcaggtcctaatactggcggtatgggagcagtaagccatcctttttgttttcaacataaaaataatatttacaaaaatcatatagagatagagaaaattttaactaaaactattgttgctataaatgatgtcaacaaaacttctatgtctggatatctaggttttttatatttaggcttaatggttgactcagacaataatattaaagttttagaatataattgcagattgggggatcctgaaacacaaaaccttatgctctacctaacaaataaaggtataagcttattaaatttaatagaaaataatcctaaactaccagttcaagattataatcttgatagacttgactctaaaaatcaggattattgttgtactattgtgcttgctgccaaaggttatccagaatcatacaaaaaagatttctttatagatttgtctggtattaaagaaaatgagcatattaagatttttcactccggaacagtgatacaaaattctaaaataaaagctattggcggaaggattctaagcgtgaatgtttattctgaaaataaagaaaaggctgtaaaaaaggcatacaatgcgattgaagctataagatgttatgaggatgaagaattttccgttgaaaatagcgattacgttttttacagagaggacattggtcagtaa

SEQ ID NO: 314377 - DNA, 769 bp, Unknown
  Bacterial polypeptide expressing nucleotide sequence isolated from the Sargasso Sea
gatgaatgttttagttgtaggtcaaggtggcagagaacatgcattggcatggaaattatctaaatccaaaaaagtcagcaaaatttttgttgcccctggaaatggaggaacagctaatgaggcaaaatgttttaacaaaagcataaatgtaaataatttttctgccttagaagagcttgttaatagtgaaaatattgaattaatagtagtaggacctgaagatccgcttgtaaacggtatcaataactatttccaagattcaagagtaaaagtatttggacccacaaaagagggcgcccagcttgagggttctaaaatattttcaaaaaaatttatgtttgaaaataatattcctactggtgctgctaatttcttttctgaatcaaaattagccaaaaattatcttaagacagtcgaatttccaattgttcttaaagctgatggcctagctgcaggtaaaggagttttagttgcaaaagaattaggtgaggcaatgcaatggattgaagatgtcatggaaaaaaataagtttggtgatgctggtaatgaagtgttaattgaagagtgtttatttggtactgagctaagctatatgggaataatgacacctaaaggattttacccttttgaaacaagtgtagattacaaaccacttttagatggtaatagtggaccaaatacgggtggaatgggttgtatgagcccatcgccatttatgaatagtgagctcttaaaaaatataaataaacaagttgttgagccaactgca

SEQ ID NO: 314378 - DNA, 1036 bp, Unknown
  Bacterial polypeptide expressing nucleotide sequence isolated from the Sargasso Sea
cttgttgataaaatttttgtagcgcctgggaatgctggaacttcgcttgagtctaaagctgtgaatatcgaaataagtcctaatgatattgaaggcctagtttctttttctaagaaagaaaatattggtcttgttattgttggcccagaggatccattggtagatggaatcactgatgcattcatgaaagctggaatcaactgttttggacctcaatcaataggagctcaacttgagggctcaaaagattttgcaaaatcttttatgaaaaaacataacatcccaacagccagctatgaaagctttactgatgcagatcatgctaagaaatatattcaggaaaatgagttgccacttgtcattaaagctgacggtttagctgcaggaaaaggtgttgtcatagcagaaaactatgaaactgctataaaaactattgatgaatttataagcgaaacaaaatatggagaagccagtaaaaaaatcataattgaggaatttctaataggacaggaactaagttatatagttatggtagacggtactgaatatctaccccttgcaacgtctcaggatcataaaaccatcggagatggagatgttggtctcaatactggtggtatgggagcgtactctcctgttccatttgtaaataacgaactggatactacaattaaggaaaaagttatcgaacctacagttagaggtctttctaaagatggaattagtttcagagggtttctatatgcaggtctcatgattgactctaatatgaatccaaaagtattagagtataactgcagatttggagatcctgagactcaaccaataatgctaagactgaaatcagatcttatcgatatgattcaaacttgcttctctggatgcattagcgattataatgttaagtgggataataaatcagctatgggtgtcgtaatctctagtcatggttatccagaatcatacgaaactggcaaagaaattattgggcaagaaactctttctgataggaatgatgttaaagtctttcattccg

SEQ ID NO: 314379 - DNA, 835 bp, Unknown
  Bacterial polypeptide expressing nucleotide sequence isolated from the Sargasso Sea
ccaaataaagttgcttcacaactagagggttcaaaaattttcacaaaaaatctatgcaaaaaatataatataccaacagcagaatttggtatttttaaaaatgctgatgagtcttataattatattgataatgcaaagcatccattagtaattaaagcagataatttagctgctggtaaaggtgtttatatttgtagagaacaagaagaatcatatttagcagtaaaagagatatttgacggtaagtttggaattgcaaaaaatattctatttgaagagtttttagaaggtgaagaaatgagttatttcatagttagtgatggaaaaacattcaaatattttggatcagctcaagaccacaagagagttggcgaaggagacaaaggtaaaaacactggggggatgggtgcatactcaccatcaagattatttaataaagaattagagcaaaaaattttagaaaaaataataaaaccaacgttaaaaggtataaatgatttaggaacaacatataaaggttttctatatgctggattgatgattgttaaagatgaaccatttttaattgaatacaatgtaagaatgggtgaccccgagtgccaaacaattctgccaactttagatactgatatcattaaaatttttcaatcatgtgttaatgaaaaacttgatgaaatagaaataaaatggataaataaaaaaagcctgtgtgtcgtattatgctcaaatggttatccagataaatatgaaaaaaatataattatagaaaattttgaaaagttaaatttagatgaaaataattatttatttcatgcaggaacagaaataaaggaca

SEQ ID NO: 314380 - DNA, 628 bp, Unknown
  Bacterial polypeptide expressing nucleotide sequence isolated from the Sargasso Sea
aatggttaatgttttgattattggaagcggaggaagagaacatgctttcacttggaaagcttcgcaatccgatcttgttgataaaattttcgtagcacccgggaatgctggaacttcactcgagcctaaagccgagaatatcgaaatcagttcctctgatattgaaggtctggtttctttttctaaaaaagaaaatatcggtcttgtgatcgttggtccagaagatccattggtcaatggaattactgatgcattcactgaagctgggatcaactgctttggacctgaatcattaggagctcaacttgagggatctaaagattttgcaaaatcttttatgaaaaaacataacatcccaacagccagctatgaaagctttactgatgcagatcaagctaaaaattatattcaggaaaatgacttaccattagtcattaaagctgacggattagctgctggtaaaggcgttgtgatagtagaagatcacgaaactgctaataaaaccattgatcaatttattggtgaaacaaaatttggagatgcgagtaaaaaaatcattatcgaggatttcctagtaggtcaggagcttagctatatcgtgatggtggatggaactgaatatcttccc

SEQ ID NO: 314381 - DNA, 788 bp, Unknown
  Bacterial polypeptide expressing nucleotide sequence isolated from the Sargasso Sea
tatgaaaattgcaattcttggaaatggtggcagagaacatgcaatagcaaccaaaatctcaaaatctcctaaacttgaaagattatattgtataccaggtaatgctggcactgactcaatagcagtgaatgttgagctggatttttataactttgaaagtttgttgcaatttttaaaagaaaataaaattgatttggtaattgtaggacctgaaaaacctttagttgatggtgttgttgattttcttttaaaagaaaatataaaagtttttggtccaaacaaaaaagtttcacaattagaaggatcaaaaatatttacaaagaaaatatgtgaaaggtacaatattcccactgcacaatttggagtatttagaactgctgtagaagcttattcatatttaaaaaatgcaaatatgcctatagttgttaaagcagacggattagctgcgggtaaaggtgtttatatttgtgaggatttggaaagttcaaataaagctgtgcaagaaatatttaatggaaaattcggtttagctgaacaagttcttattgaagaatttttgcaaggagatgaaatgagttatttcgttctttcagatggaaaaacatataaaagatttaatactgctcaagaccataagagagttggtgagggagatagaggaaagaatacaggagggatgggagcatattcaccctctggacttataaatgcagaactagacaaaaaaataattacagaagttgttaatcctacttttcaggctattaaagagatgggtgaaaattaca

SEQ ID NO: 314382 - DNA, 613 bp, Unknown
  Bacterial polypeptide expressing nucleotide sequence isolated from the Sargasso Sea
aataccggtggtatgggtgcatattctccagcgccagtagttgatagcattgtccatgagaaaatcatgcaagatgtaatttatcctacgctaaaaggtttgcgagaagagggatataagtatgttggttttttatatgccgggatgatgatagatcaagataaaaatctaaaagtactcgaatttaattgccgttttggtgatcctgagacgcaacccataatgatgagactcaaatcggatctagctgacctttgttttaaagcatgtgaaagtgatcttagtaatgaaacgcttgagtgggatgaaaaaaaatctctaggagtggtgattgctgcagagggatatccttcaaagtatgaaataaataaaaagattaaaaacatcccttcagaaaaaaatgatcttaaggttttccatgccggtactagattccaagaagatagcttaacttcaaatggaggaagggtaatgtgcgtcactgcactgggctcttcaattcaatctgctcaaaaaaaagtttataatgcgatatctgaaattgcatatgaagatgctttttacagaaaagatataggttacagagcaatagatagagaaaaagaaaaatgag

SEQ ID NO: 314383 - DNA, 871 bp, Unknown
  Bacterial polypeptide expressing nucleotide sequence isolated from the Sargasso Sea
gctttggcatggaagtgctctactgataaatttgttgaaaaggtttacgttgctccaggcaatgcaggaacatttcttgaagaaaaaatagagaatatttccttggatataaataacaatgaggatgtctctgacttctgtgtttcaaataatattgaacttgtaattgtcggtcctgaagatcctctagttaatggtttggttgactttcttgagtctaaaaatataaaagtgtttgggcccagaaagggggctgctcagctggagggatcaaaaaccttcgcgaaggacttttttataaaatatggcatacctacagcaaattataagtcttttgataaccatcatgatgccctgaattacctcgacaagattgatttcccatcggttgtaaaagctgatggccttgctgctggaaagggagttattatttgtgatgatcgagaagctgcagaaaaagcccttgaagatatatttgaatcaaatgcctttggggatgctggaaatagagtggtaatcgaagactttttgaatggagaggaagcaagctttattgctgttgtgagtgatgatcaaattattcctcttgcaacaagccaagatcataaatctgttggagatggagatgttggattaaacactggaggcatgggtgcttactcccctgctccaattgtcacagatgagattcacaaaagagttatcgatgaggttatgctaccaacaatgaatggattaaaggctgaaggatttccctatcttggttttttatatgctggcctaatgattgaaggagatgagataaaagtcttagaatttaattgtaggtttggcgatccagaaacgcagccaattatgctcagattagaat

SEQ ID NO: 314384 - DNA, 987 bp, Unknown
  Bacterial polypeptide expressing nucleotide sequence isolated from the Sargasso Sea
ggaacccatcttgaggataaagtaagcaatattgaacttaacttaaatgaatttagctcaatagaaaaattttgtttagaagaaaaagtagggcttgtcattattggtccagaacaaccacttgttgatggtttaactgattttttacagagtaaaaatattaaaactttcggtccatctaaaaatgcagctcaattagagggttcaaaaaccttctctaaagatttctttgtaaagtacaacattccaacagccgaatacaaatcgttcgacaactttgaaagctcaatagaatatttaaatgagatttctttcccaacagtcgtcaaagctgacggtttggcagctggtaagggcgtcataatttgtcaaaactctgaagaagcaataaaagcacttgatagtatttttaatgataaggcctttgggactgctggtaatcgagtagtaatcgaagaatttttagaaggtgaggaagcatcatttattgctgtagtaagtaaagataagataattcctttggcaacaagccaagatcataaggctgtaggagatggtgatgtcggtttaaataccggaggaatgggtgcttattctccagcaccaatagtaactgaagaaattcataaaaagattcttaatgaggttatgtatcccactatgaatggtttaattaatgaaggttcgccttatttaggatttctttatgcagggctgatgattaaagataatgagattaaggttcttgaatttaattgcagatttggtgatccagaaactcaacctattttattaaggcttaactcgagtttggttgaactttgcaaagcagctattgataatgaattgcatacatattcaattcaatggactgagaaacattcatgcggagttgtaattgcctctgaaggctatcctgaagactatgaatccaataaaaaagtttctataaaagaaaataacatcaaagattcaaagtttgttcat

SEQ ID NO: 314385 - DNA, 733 bp, Unknown
  Bacterial polypeptide expressing nucleotide sequence isolated from the Sargasso Sea
atgaaaaagaatcaaagacctgaagaattaaaaaggatattaatagttggaagcggaggtagagaaaactctattgcttgggccatatcaaaaaatcaatctattgaacaaatatatgtttgtcctggcaatggtgggacagccaactttgaaaaatgtagttgcctaaaacccaaatccgaagatgcaaaaacaatcattaatgagtgtcagcgacttgaaatcgatttagtcatcattggccctgaaatccccctggctgagggcttggcaaataaaatgcgtcaggcaggattaacagtttttggtccaggcaaagatggtgctcaattagaggcaagtaaagactggtctaaggctctcatggtagagaacaatattcctacagcaaagtactggcctgcaaaaactaaagaagaagcactggaaattcttagaagatttaaccaacctcttgttgtcaaagcagatggtcttgcagcaggtaaaggtgtcactgtttgcgaaaccattgaggaatctaaggaagcaattaaggacatattttctggaaagtttggatctgcaggaaataaagttattctcgaagaaaaaattgaagggccagaagtttctatttttggcctttgtgatggagagaaattaattgttcttcctccagcccaggatcacaaaagattacttaatggagaccatggtccaaatactggcggaatgggagcttatgcacctg

SEQ ID NO: 314386 - DNA, 781 bp, Unknown
  Bacterial polypeptide expressing nucleotide sequence isolated from the Sargasso Sea
aaaattagcaatattgaggtagatattgaaaactttcaggccattgaagaattttgcatgaccgaaaaaattgatctcgtgattattggtcctgaacaacctcttgtaatggggctttctgattatctccaaagtaaaaatattaaaacttttggtccatctcaaaatgctgcccaactagaaggttcaaaaactttttcaaaagatttttttattaaatatgatattcctacagctaaatataaatcttttgatgattatgctttagctttaaaacacctcgatgaaatagaatatcctaccgttgttaaagcagatggtttagcagcaggcaaaggagtgataatctgtgaaaacataaaagaggcaagtgaggcattaaaaagtatctttaaagaaaatacatttggggctgcaggtaataaagttgtaattgaagaattcctagagggtgaagaagcttcattcatagcagttgtgagtaaggataaaattattcctctggcaaccagtcaagatcataaagctgttggagatggtgatattggcttaaatacaggcggaatgggggcttattctccagcaccaattgttacagatacaataaataaaaaaattcttgaaaaagtaatgtatccaactatgcaaggattaatccaagaaggttacccctatcttgggtttttatatgcaggccttatgataaaaggagatgaaattaaagtactagaatttaattgtagatttggtgatcccgaaacacagccaatcttacttagat

SEQ ID NO: 314387 - DNA, 760 bp, Unknown
  Bacterial polypeptide expressing nucleotide sequence isolated from the Sargasso Sea
cgcgctgaccgtggtcggccccgaggctccgctggctgccggcgtggtcgatgagttccgcgcccacggcctgcgcatcttcggcccctccaaggcggccgcccaactggaaagctccaaggccttctccaaggacttcatggcgcgccacggcatccccacggcgctctatgaaaccttcaccgacccggtggcggcccatgcctacgtggaccgcctgggtgcgcccatcgtggtcaaggccgacggcctggccgcaggcaagggcgtggtcgttgcgacaacgctgcaggaagcccacgacgccgtggacttcatgctcgtggacaacaagtacggcgtggcccacaacgacggcggcgcccgcgtggtgatcgaggaattcctcgccggcgaggaagccagcttcatcgtgctgtgcgacggcaagaacgtcctggccctggcaaccagccaggaccacaagcgcctgaaggacggcgaccagggcccgaacacgggcggcatgggcgcctactcgcccgcgcccgtggtcacggccgacgtgcatgcccgcgccatgcgcgagatcatcctgccgaccatccgcggcatggaaaaggacggcattccctacaccggcttcctctatgcgggcctgatgatcgacgcgtccggccatcccaagacgctggagttcaactgccgcatgggcgaccccgagacccagcccatcatgatgcgcctcaagagcgatctggtggacgtcatgctggcggcc

SEQ ID NO: 314388 - DNA, 941 bp, Unknown
  Bacterial polypeptide expressing nucleotide sequence isolated from the Sargasso Sea
tttagaaagacataatattccaaccgctacctacaaagattttgaagatcttgataaggctatagagtatgtgcgatcaagcaccttcccaatcgtcatcaaagcagacgggttagcagctggaaaaggtgtaattatcacagaaacacttgctgaagctgaagataccctcagaagaatgctggaaggaaaaatctttggtcaggctggctctaaggtagttatcgaagaatttctctatggcgaagaagctagttttatcgctattgtagatgatacacgaatcgttcctttagcaagctcgcaggaccataaaacccgtgacgaaggtgatcagggtcctaatactggaggcatgggtgcctactctcctgctccagtaatgacgaaaaaactatctgatcaagttatgcaggacattattttaccgactgttgagggcatgcatgctgatggcatgaattataggggtttcctatatgctggacttatgattgacccaaacggaaacacaaaagtattggagtttaattgcagatttggagatccggaaacacaaccgattttgatcaggttacgatcagaccttgctgctctgtgcctcagcgcatttgacggatccctagagtctatagaaatagaatgggatccaagggcatccctaggtgttgtaatggcaagcgatggttatcctgaaagttatagaaaaggagatccaattactggattagataatatcttaggtaagaattctaaggtgttccatgccggcaccacattagatgaaaaaaatattgttacaaacggaggaagggtcctctgcgccgttgctctaggcaaaaatgtcacagaagctgctgctaatgcttatgacattaccgaaaaaattgactgggaaggagcattttatcggcacgatatagggtatcgtgctatcaaac

SEQ ID NO: 314389 - DNA, 757 bp, Unknown
  Bacterial polypeptide expressing nucleotide sequence isolated from the Sargasso Sea
atgaatttagctattataggaagtggtggtcgtgagcatgctctatgctacaaacttaggcaatccaaagaggttaaaaaaatattctgtattcctggtaatgccggaacaaaaaatcttgctgaaaatattgaacatgacttaaaaaattttgatggtatttataaaataattaaggaaaaaaatatcgattttgtattggttggtcctgaggaaccgttggttaacggtattgtggattttttatcaaaaaataatgtaaaagtatttggtccaaataaattttcttcgcaacttgagggctcaaaagcatttatgaaaaatatttgtaaagattacaatattccaacagcaaactttggagttttcgataaattggatcaggcggtaaactttataaagaaaaataagatgccaattgttgttaaggccgatggtatagcatctggaaaaggtgtttttatatgtaaaaacaaagaggaggctataaatataactaaagaaattttaaacggcaaatttaaatcttcaaaaaaggttgttcttgaggaatttcttgaaggagaagagctgagctatttttgcgtagtggacgaaaataattaccatttttttggatcagcacaagatcataagaaagttggggaaaaagacactggtccaaatactgggggtatgggagcttattcccctgcaaaccttttaactgaagaattagaagaaaaaataaaaaaaagaattatagaaccaacttaaa

SEQ ID NO: 314390 - DNA, 940 bp, Unknown
  Bacterial polypeptide expressing nucleotide sequence isolated from the Sargasso Sea
tgagccaaaaactaagaatatagatatcagtgcctctgatatcgatgctttgatatctttttcagagaaagaaaatattgatcttgtgattgttgggccagaagatccattggtaaatggtattactgatagattcaaaaaaattgggatcaaatgttttggccctgaatcactaggagcacagcttgagggttcaaaagattttgccaaagcttttatgcaaagacataacatcccaacagcaagctatgagagctttactaatgcaaataaagcaaagaaatatattcaggaaaatgagttgccacaagttattaaagctgatggtctagcggcagggaaaggtgttgtcattgtagaagactatgaaactgcttttaaaactattgatgaatttatcagcgagacaaaatatggtgatgctagcaggaagatcataattgaggattttctaagaggtcaggaactaagctatattgtaatggtaaatggaactgaatatttacccctagcaacatcacaggatcataaaactattggagaaggagatgttgggctcaatactggtggcatgggagcatattctcctgttccatttgtaaatgatgaactagatatcataatcaagaaagaagttatagatccaactgtaagaggtctttctgaagatgggattgcattcagaggatttctatatgctggtcttatgattgacactaatctgaatccaaaagtactagagtataactgcagatttggagacccagagactcaaccaataatgctaagactaaaatcagatctaattgatttaattcagacttgcttctctggaggtattagtgattataaaattgaatgggataataaatcagccatgggtgttgttttgtctagtttaggttatccagaatcatataaaactggcaaagaaatctct

SEQ ID NO: 314391 - DNA, 866 bp, Unknown
  Bacterial polypeptide expressing nucleotide sequence isolated from the Sargasso Sea
tggagatgaagcaagtgctatagcttatttaaagacacaacagatacctatagtaatcaaagcagatggtttagctgcaggaaagggggtgactgtagctgaaagttatgcttctgcacaacaagctgttaaagaaatatttgcaggaagattcggaaaaggaatggaagttgtaattgaagagtttatggaaggagaagaggcgagttattttatatgtactgatggaattgattttctatcgcttgtcagtgctcaggatcataaaagagtgggtgaaggtgatactggtcctaatactggtggaatgggtgcttattctccagcccctatttttactcaagaaataaaagatcaagtagataaaaaaattataatacctacgttaaaagcttttcaagataaggggtgtccctataaaggaatattatatgctggcctcatgataaatgacgggattgcaaagcttgttgaatataatatccgctttggagacccagaatgtcaggtgctaatgctaagaatgaaatcagatttagtagaaatgatgttaaatacaattgaaggtaaaataaaagatacaaatcttaagtgggaagatgaccactgtgctactgttgttatagcttcagatggatatccaggaaagtttgaaaagagaacggtaataaaaaacttagataaattaagtaataataataattttcaagtctttcatgcttcaactttaaaagaaaactcaaatattaaagctgatgggggccgagtgctatcaattactgcaaagtcaaatacattacaagatgctttggataaaatttacgactcaataaatttaattgattggcctcaatggttattttagg

SEQ ID NO: 314392 - DNA, 847 bp, Unknown
  Bacterial polypeptide expressing nucleotide sequence isolated from the Sargasso Sea
gggccgctcgccgcgggaatcgtcaacctgttccgctcgcgcgggctgaagattttcggaccgagcaaggaagccgcgcagctcgaaagctcgaaggatttcgccaaggcgttcatgaagcgccatgcgatcccgaccgccgaatacgaaaccttcgccgacgtcgccgccgcgcacgcgtatctggacgccaagggcgcgccgatcgtgatcaaggccgacggcctcgccgccggcaagggcgtggtggttgcgcagacgctggaagaagcgcacgccgcggtcgacatgatgctgtcggacaacaagctgggcgatgccggcgcgcgtgtcgtgatcgaggaattcctcgccggcgaggaagccagcttcatcgtgatggtggacggcaagcatgtgctggcactcgcctcgagccaggaccacaagcgtctgctcgacggggaccagggtccgaacaccggcggcatgggcgcgtattcgcccgcaccgatcgtcacgccgcaactgcatgcccgcgtgatgcgcgaaatcatccagccgaccgtgcgtggcatggagaaagaaggcatccgcttcaccggttttctgtacgccggcctgatgatcgacgcgcaaggcaatccgaaaacgctcgagttcaactgccgcatgggcgacccggaaacgcagccgatcatggcgcggctgaaaggcgacttctcgaaggtggtcgaacaggctatcgccggcacgctcgatacgatcgaactcgaatgggaccgccgtaccgcgctgggcgtggtgctcgccgcgcacaactatccggacacgccgcgcaagggtgaccggatcagcgatatcccgg

SEQ ID NO: 314393 - DNA, 760 bp, Unknown
  Bacterial polypeptide expressing nucleotide sequence isolated from the Sargasso Sea
atgaatatcggattaataggtagtggcggtagagagcatgctctttgtaaaaaattatatgagtcaaggttatgtaagaaaatattttgtttccctggaaacgcaggaacagaaaatttagcaaaaaatatagaagtagatgtacttaattttaccaaacttcttaagttgattaaattacataaaatagatttagttttaattgggcctgaggaacccttgacactaggaattgtcaattttcttactaaaaataaagtcaaggttttcggcccttctaaatatgctgcaagattagagggatcaaaggcttttatgaaaaaaatatgtaaagaaaataatatccccactgctaaatttcgaatatgcaaaaataaaagacaagttgttaaatttttaaaaagttcaagattgccaatagtagttaaagcagatggactcgcagcaggtaaaggagtgactatatgtaaaacaaaaaaacaagttttaaacgtctctgaagaaatttttaaaggaaagtttaaatcttcaaacaaattagttattgaagaatttttagttggagaagaggcaagctatttcttaattgtcgataaaaatagttttaaattttttggcactgcacaagatcataaaagggtcggggaaaaagatattgggcctaatactggtggaatgggtgcttattcgccagcgcctattattaacaaaaatttagaaaagaaaattattaataaaattgtaaaacccacgttaaaag

SEQ ID NO: 314394 - DNA, 808 bp, Unknown
  Bacterial polypeptide expressing nucleotide sequence isolated from the Sargasso Sea
tatggttgtaataggacctgaagagcctttagtaaaaggtttggttgattttttagtcaaaaataaaataaaggtatttggtcctaacaagtatgcagcaaaattagaaggctcaaagtcatttgttaaaagaatatgcgctagaaataaaataccgactgctagttttaaaatttgtaaaaataaattacaagttgcaaagtttataaatgaaaataaatttcctattgtcgtaaaagctgatggattggctgctggtaaaggtgtccatatttgcaaaaataaaaaacaagttattaaaatttcaaacgaaatttttaaaggaaaatataaatcttcaaacaaattagtgctagaggaatttttgaaaggagaagaagcaagttattttttaatggttgataaatataattttaaattttttgggacagctcaagatcataaaagagttaaagaaaaagatatggggccaaataccggtggaatgggtgcttattcccctgctccaattataaatggtacaatcgaaaaaaagataatatcaaaaatagtaaaacctactttaagagcattaaaaaaggaaaaacattcttatactggttttctctacgtaggactgatgataaaagataacgaaccttatctcattgaatataatgtaagaatgggcgatcctgaatgccaggtgattattcctagactcaaaacagatttagttaaaatttttgacaatgcaattaaaaataaactaaatagaactcaaatcaaatggaaaaaagagaaaagtatgactgtagttctttgctca

SEQ ID NO: 314395 - DNA, 640 bp, Unknown
  Bacterial polypeptide expressing nucleotide sequence isolated from the Sargasso Sea
atgaaaatcttggtaattggttcaggaggaagagagcatgctttggcatggaagtgctctactgataaatttgttgaaaaggtttacgttgctccaggcaatgcaggaacatttcttgaagaaaaaatagagaatatttccttgaatataaataacaatgaggatgtctctaacttctgtatttcaaataatattgaacttgtaattgtcggtcctgaagatcctctagttaatggtttggttgactttcttgaatctaaaaatataaaagtgtttggacccagaaagggagctgctcagctagagggatcaaaaaccttcgcgaaggacttttttataaaatatggcatacctacagcaaattataagtcttttgataatcatcatgatgccctgaagtacctcgacaagattgatttcccttcggttgtaaaagctgatggccttgctgctggaaagggagtcattatttgtgataatcgagaagctgcagaaaaagcccttgaagatatatttgaatcaaatgcctttggggatgctggaaatagagtggtaatagaagactttttgaatggagaggaagcaagctttattgctgttgtgagtgatgatcaaattattcctcttgcaacaagccaag

SEQ ID NO: 314396 - DNA, 640 bp, Unknown
  Bacterial polypeptide expressing nucleotide sequence isolated from the Sargasso Sea
tatgaatattggtattattggaagtggtggtagagaacattcgttatgctttaagctaaaagaatcaaaaatcgtagacaaaatttattgcttcccgggtaatgccggaactgaaaaaatagctcaaaatattaatattgaaactacaaattttgaagagataaaaaaagaatgtctaaaaaaaaatattgaattattagtagttggtccagaacagcctttagtcgatgggattgtagaatattttaatgatacaaaaataaaagtttttggtcctaataaaattagtgcacaattagaaggttcaaaaacatttacaaaaaaattgtgtaaaaaatttaatataccaacatctaattttgaaattttcaaagatgaaaaatctgccttaaattatctttcaaataaaaaatatcctttagtaattaaagctgatggattagctgcaggaaaaggggtttatatttctaaaaatgaaaatgaaggcaagaatgcaattaaagaaatatttggtgggcgttttggtaaagctgattgcgttctagtagaagagtttttattaggagaggagatgagttacttcattgtatgtgatggaataaattataaattttttcaaacagcgcaagagatcacaaaa

SEQ ID NO: 314397 - DNA, 859 bp, Unknown
  Bacterial polypeptide expressing nucleotide sequence isolated from the Sargasso Sea
gaaaaaccattagtcgaaggattagtcgatttcctagagtcaaaaaatattaaagtttttggtcctagaaaaaaagttgctcaattagaaggctcaaaaatatttacaaaacaaatttgtgagaaatttaatataccaactgctaaatttaaaatttgtaaatcaaaagaagacgcatttgtatttctatcatcatctaattttcctcttgttgtaaaggcggatgttcttgctgcaggtaaaggtgtttatatttgtcaaaatgttgatgatgctaaaacagctgttaatgaaatatttgatggtaaatttgggaaagcagatcaagtgttaattgaggaatttttagaaggtgatgagatgagtttttttattatttcagatggaattagttataaaacttttaatacagctcaagaccataaaagagttggtgagggcgatactggaaagaacacgggaggaatgggagcttattcaccttcaagcttaattaataatgatttagagaataaaattttaaacaaaataattgagccaactttaaaagctataagtgaaatgaatgagaagtacgtcggttttttatatgccggcttaatgataaaaagtaatgagccgtacctaattgaatataatgtgaggatgggtgatcctgaatgccaaactatattacctttggttaacagtgatttattggaaataataaatgcttgttgtaattcaaaattaaagaaacacgaaataaaatggaaaaataaaaaaagtatgtgcattgctttatgctcaaaaggatatcctgacaaatataataagaatgttgaaattaaaaatttaaaagaatttaaatcaactaaag

SEQ ID NO: 314398 - DNA, 589 bp, Unknown
  Bacterial polypeptide expressing nucleotide sequence isolated from the Sargasso Sea
tatgaaagttggagtaataggaagcggtggtagagagcatgccatatgcatatctttaaaaaaatcaaaaaatattgacaaaatttactgctttccgggaaatgcaggcactagctttatcgcagaaaatattgagattgatctgaataattttgaggaattaaaaagagttataaaagaactaggtatagacataataatagtaggtcctgaaaaaccactggtagatggaatagtcgacttcttggaactaaacaaaattaaagtatttggtccaaatcgtatttcttcgcaacttgaaggttcaaagattttcacaaaaaatttatgtaaaaaatataatattcctactgcaaaatttggtgtcttcaataacattcaagacagtctgtcattcttaaatgagtgcaaatttcctatagttgttaaggctgatggtttagcagcgggaaaaggtgtctatatttgtgaaaccagtgatcaatcaaagaaagcagttgaggaaatttttaaaggtaagtttggagaagcaaaacaaattttaattgaggaatttttaaaaggtgaagaaatgagtttttttataatt

SEQ ID NO: 314399 - DNA, 711 bp, Unknown
  Bacterial polypeptide expressing nucleotide sequence isolated from the Sargasso Sea
tgctgctcaattagaaggatcaaaaatattcacaaaaaaaatttgtgaaaaatataacatccctacagctaaatttggaattttttataataccaatgaagctattaaatttttacaaaactctagttttccatcagttataaaagctgataatttagcatctggtaaaggagtttacatatgtaataatattaaggaagctcagaaagctatagatgaaatttttggtggaaaatttggtaaagcagaaaatttattaatagaagaatttctagatggagaggagatgagtttttttacaattcatgatggagaaaattttaaaaattttggtacagcacaagatcataaaagagctttagaaggagataagggtaaaaatacgggaggtatgggagcctattcaccgtcaagactaataaatgaagaattagaaattaaaattattaataaaattattaaaccaactttaaaaggattgtctgagttgggcactcaatataaaggatttttgtataccggtctaatgattgtaaaaaatgaaccataccttgttgaatacaatgtaaggatgggagatcctgaatgtcaaacaattttaccaaaattgaagactaatctaagtgatatttttttagcttgctgtgaaaaaaaacttaatcaaataaatattgaatgggtaaacaaaaaaagcctttgtgtagttttgtg

SEQ ID NO: 314400 - DNA, 967 bp, Unknown
  Bacterial polypeptide expressing nucleotide sequence isolated from the Sargasso Sea
ttgagtgaaagagtcgcagatcttttagataaacacggtttaaatgtaatcggacccaaaaagaaactcgcacagatggaaacatcaaagtcttttacgagaaacttacaaaaaaagtatagcatccctggtgctcccatatatcaaacctttgactcaatagacggagtagatgaatttctaaatatactcggagaagattttgttgttaaatatgacgggctggcaggcgggaaaggtgttaaggtttcaggagaacatctacactcaaaagaagaagctatagatcactgtcaagagctggtaaataaaggcgggcgttttgtaattgaagaaaagtttgttggagaagaattctccctcatgagtttttgtgatggtaaagtattaaaacacatgccggctgtccaagatcataaaagagcataccggggagacaccggtcccaatactggcggaatgggtacctactctgacgcaaaccactccctgccatttctaaatgaaaatgatatagcacgtgctagaataataaatgaaaaaaccacagaagcattacaaaaggaagtaggcgaaggatacaaagggatactctatggtgggttcatggcaactgccaatggcgtaaaactaattgaatataatgccagattgggagacccagaagcaatgaacgtgttgtctatccttaaaacagatatcattgatattttcaactcaatagggagaggaactcttaatgaattaagtatcgattttgataacaaagccactgtgtgtaaatatgcagtgcctgaggggtatcctgataaacccgtgaaaggtaaaaagattgatatctcatctgtttcaaataaggattctttattttttgcatcggttgacatggaaggtgaccatcttattgaggcaggcagcagaaccgttgcggtggtaggcattgcaagctccatatctcaagcagaaa

SEQ ID NO: 314401 - DNA, 643 bp, Unknown
  Bacterial polypeptide expressing nucleotide sequence isolated from the Sargasso Sea
tggcacaagtcaagatcataaggctgtaggagatggtgatgtcggtttaaataccggaggaatgggtgcttattctccagcaccaatagtaactgaagaaattcatcaaaagattcttaatgaggttatgtatccgactatgaatggtttaattaatgaaggttcgccttatttaggatttctttatgcagggctgatgattaaggataatgagattaaagttcttgaatttaattgcagatttggtgatccagaaactcagcctattttattaaggcttaattcgagtttggttgaactttgcaaagcagctattgatgatgaattggatacatattcaattcagtggactgaaaaacattcatgtggagttgtaattgcctctgaaggctatcctgaaaactatgaatccaacaaaaaagtttctataaaagaaaataacatcaaagattcaaagttgtttcatgcaggaacaaaatatgaaaatgaaacagtacttacaaacggaggtagggttttttgtgcaacagcattaggaagcgatttgaaagatgcacaaaaaaacgcatataatctcgtaaataatgtcgaatttgacggtgcatttttcagaaacgacattggattcaaaggaattaaatga

SEQ ID NO: 314402 - DNA, 783 bp, Unknown
  Bacterial polypeptide expressing nucleotide sequence isolated from the Sargasso Sea
tatgaaagttggaataataggaagtggtggaagagaacatgcaatttgtcaaatcttaaaaaagtcaagaaaaattagtaaaatatattgctttcctggcaatgctggaacagaaaatattgcaaaaaacataaatcttgatttacaaaattttaaaaaaatcaaaaattttattttagataatcaaatcgatctaatcgtagttggtccagaaaaaccactagttgatggtctcgtagattacttgcaaaaattcaaaattaaagtatttggtccaaataaaaaagcttctcaactggagggatcaaaaatatttacaaaaaaactttgtaaaaaatataatataccaactgcaaaatttggaatttttcaaaataagaaaaatgcaaaaaaatttttaaagacttcaaaatatcctattgtaatcaaagctgacaatcttgcatctggaaagggtgtatatatttgtgacaacagaaaagaagcaaatgttgctatagaagaaatttttaatggaaaatttggtaaagcgaaaaatttacttgttgaagaatttttaaatggtgaagaaatgagtttttttactattcatgatggaaagaattataaaatttttggaacagcacaagatcataaaagagtatttgaaggagataaaggtaaaaatactggaggaatgggagcttattcaccttccagattaattaataaaaaactagaaaaaaaaattattaataaaataattaaaccaactcttataggtttgtctgatctaaaaactaa

SEQ ID NO: 314403 - DNA, 686 bp, Unknown
  Bacterial polypeptide expressing nucleotide sequence isolated from the Sargasso Sea
tattatttcagacggagaatcttttatacccttaacatcggcacaagatcataaaagaattggagatggagatatcggattaaatactggcggcatgggagcatactcacctgcaccaattatgaataaagaattagaagaaaaaacaataaataaaattattaaacctacaattaaagctatgaacgattatggatcaccttatattggaatattatatgctggtttaatgattaaggataatgagcctaagttaattgaatataatgttagatttggcgatcctgaatgccaggtaataattcctagacttgaaaatgatttagttgaattgctagttaatgttaaagagaaaaacctagataattacacattaaaatggaaagaaaattttgcaattacagtagttttagcagctaaaggttacccagaaagctatgaaactggtgatgaaattaagggattagatgcaatagataatatagatgatgtagaaatattccatgcaggtacaaaaaccaaaaataataaaattgtcacttctggaggaagagtcttaaatataaatggttatggaaaaaatttagttgatgcaaaggaaaaagcttatagtcttgtaaaaaaaattaattggtcaggttgttattataggaaagatattggttggagagcattaagggaataaa

SEQ ID NO: 314404 - DNA, 825 bp, Unknown
  Bacterial polypeptide expressing nucleotide sequence isolated from the Sargasso Sea
aaaaatataagtttaaaattagataattttaatgaaatttataattttcttaaaaataatgaaattgatttagttatagttggtcctgaaaaacctttagttgatggaatagtagactttctaaatattaaaaatattaaagtattcggacctaatcaaaaagtttcacaacttgaaggttcaaaagtttttactaaaaaaatatgtgagaagtataatattccaactgcaaagtttggaatttttaataacaaggaagatgcttttaaatttttacagaataaaaacatgcctttagtaataaaagcagatggactagcttctggcaagggagtttatatatgcgaagatacagaaagttcaaaaaatgctgttatagaaatatttaatggaaaatttggtagtgctgatcaaatattaatagaagaatttttagaaggtgaggaaatgagttattttattatctctgacggattaaattttaaaagctttaatactgcgcaagatcataaaagggttggagaaggtgatattggaaaaaatacaggcggtatgggagcttattctccatctaaactaatcaatcctaatttagaaaaaaaaattattgataaaattataaaaccaaccttagaagcaattggagatatgggagaaaaatataagggatttctatatgctggtctaatgataaaaaataatgaaccttatttgatagaatataacgtaagaatgggagatcctgaatgtcagacaattttgcctcttttaaagacagatttactagatttaatactctcatgttgcaacaataatcttaatgag

SEQ ID NO: 314405 - DNA, 820 bp, Unknown
  Bacterial polypeptide expressing nucleotide sequence isolated from the Sargasso Sea
atgaatgtaggaattattggaagtggtggtagagagcatgctatttgctgtatgctaggaaaatcaaaaaaagtttctgaaattttttgttttcctggtaatgcaggcactagtttgattgctcataatgtaaatttaaatcccgataatttttatgaactggaaaaacattgtatagaaaaaaaaataaaattgttagtggttgggccggaaaaacctttagtcaatggaatagcagatcattttaggggaaaatcaattaaagtatttggtccagataaaatatcgtcacaacttgaaggttcaaaaatctttactaaaaaaatttgtcaaaaaaataacattccaacagcaaagttcaaaatttgtgacagtttgaatgaatcaataaattatttaaaatatagtcaattccccctagttattaaagctgatggtttagcatcaggaaaaggtgtttatgtatgtgaaaatttcaatgaagcaaaaatagcctctgaagaaatttttaatggtaaatttggtcttgctgagcaaattttggttgaggagtttttagatggtgaggaaatgagttatttcatagtgactgatggtaaaaactataaattttttggttcagctcaagaccacaagagagttggtgaaggggacacaggtaaaaatactgggggtatgggctgctactcaccatcaagacttttaagcaaagatttagaattaaaaataaaaaaaaaaataattgaacctactttaaatgcaataaaaggaagtggaggtgtctataaaggttttttatatgtaggtcttatgataaaaa

SEQ ID NO: 314406 - DNA, 805 bp, Unknown
  Bacterial polypeptide expressing nucleotide sequence isolated from the Sargasso Sea
catgatagttgggattataggaagtggtggaagagaacacgcaatttgcgaggcattaaataattcagaaagagttagcaaattatattgttttcctggaaacgctggtactgcacaaattgcgactaatatagttctggatttaaataattttgaaaaaattaaaaactttattttagaaaaaaaaatagatttggtagttgttgggccagaaaagccattggttgatggaatagtagattacttagaaaaatttaacattaaagtgtttggacctaataaagttgcgtctcaacttgaaggttcaaaaatatttacaaaaaagatttgtcaaaaatatcaaatacctacagctaattttggtatttttgaaaacgaaaatgaagcaaaaaaatttctagataattctaaatttccaattgtaataaaagcagataatttagcttctggaaaaggagtttatatatgtgaaaacaatgaacaatcaattaatgcagtaagagaaatttttggtggcaaatttggaaaggcaaaaaatgtactgattgaagaatttttaaaaggtgaagaaatgagtttttttattattagtgatggagttagtttccaaaactttggttccgctcaagatcataaaagagttttagaaggtgataaaggtaaaaatacaggagggatgggcgcttattctccgtcaagattaattaacaaagagttagaaaaaaaaattttagataagattattaatcctacattagaagctcttaataatcttggatgttcttataaaggcttcttatatgct

SEQ ID NO: 314407 - DNA, 855 bp, Unknown
  Bacterial polypeptide expressing nucleotide sequence isolated from the Sargasso Sea
ctattgttgttaaggctgacggtctagctgctggaaaaggtgttttaatttgtaattcaaaagaagaagcaataaccgaaactaaaaaaattcttaatggtaaatttaaatcatcgaataaagtggtgttagaggaatttttagaaggtgaggaattaagttattttgttttagttgatgaaaattcttatagtttctttggatctgcgcaggatcataaaaaagttggtgagggagatactggattaaatactggaggtatgggtgcttactctccggcaagaaatttgacgtatgacttagaatctaaaataagaaataaaattatagaaccaacacttcaagcaatgaaagctcttggatatccttatactggttttttatatgcaggtttgatggttaagaacggtgaaccctttttgatagagtataatattagaatgggagatccagaatgccaagtgttgatgatgaaattaaaaacagacttgttgagtattattgaagcaacaacaaataatagtttgagtaaattaaaaataaaatgggataataaaaaatgtattactattgttttgtgtgctaatggatatcctggagaatatgttaaagataaagaaattaaaaatttatcaaaaattcacttagataaaaataatcaaatttttcatgctggaacttatgagattgacaataaaatattttcgaaaggtggaagggttttaaatataacctgttcaagtaatgacctttatgaggcaagaaataattctttgtcaaatctcaaagaaattaattgggataatggtttttttagaaaagacattggttggagagctatcaaaaaaaaatgag

SEQ ID NO: 314408 - DNA, 719 bp, Unknown
  Bacterial polypeptide expressing nucleotide sequence isolated from the Sargasso Sea
gtttttaaaaggagaagagctaagttattttgctgtggtagataaaaattcttattgtttttttggaagtgctcaagatcataagagagtaggtgaaggggatacaggacctaatactggtgggatgggcgcatattcgcctacacctttattaacgaatgaattagaagataaaattaaaaaaaaaattattgagcctactcttcttgcgatgaaaaaattaggtcatccatatacaggatttttatatgctggtttaatgataaataaaaatgaaccatatttaatcgagtataatataagaatgggagatccagaatgtcaggtacttatgatgagacttcaaacggacctgctaaaaattattgatcgtgcaacaaaaaataaaataagaaatttaaaaattgagtggaaaaataaaagttgtattactattgtattgtgtgctaaaggctaccccaataattatattaaagacagtgaaataaaaaatttatctaaagtttcaatagatcaaaataatcaaatatttcatgcaggaacatataaaaaaaaaaataaatttttttctaatgctggaagggtacttaatgttacttctctcgcaaaaaatatgaatatcgcaaaaaaaaaatctttggataacttaaaaaaaataaactggaatgatggatttttcaggaaagatattgcttggaaaataataaaaactaaatagt

SEQ ID NO: 314409 - DNA, 877 bp, Unknown
  Bacterial polypeptide expressing nucleotide sequence isolated from the Sargasso Sea
tccaatgtatcaacggcaaattataaagagtttggtagtattgaggaagcaaaaaaatttgttgcgggaagccctttcccattagttattaaacttgatggccttgcggcaggaaaaggagtgacaatttgtgaaaacataagagaagcaaatgagactctagatgatatttttattccggatgaaaaaaataaaagagtattaattgaagaatttatgccaggtgaagaagctagtctttttgtaattacagatggttacaattgtttatcacttggtggagcccaggatcataaaagattaaaggatggagatagaggtcctaatactggagggatgggagcctacagccctgctcccgttttaacaattgaaatagaagacagagctctaaatgagatagttaagccaacaatcaaagaaatggcagataggggaacaccatttaagggaatattatatgctggcctaatgattaataacggtaagccatccttagttgaatataatgttaggtttggagaccctgagtgccaagtgataatgatgaggctcggaggacaaattcttgacattatcttgagctgtttggaaggcaacttattacgttcaaaagtaaactgggcgaacgatcatgccttaacagtagttttagcttctaaaggatatccttataagtacaacaaaggtagccttctgaaaaatatcaaaaaaatcaaagaagatagtaatcttaagatttttcatgcagggacaaaaaaaataaaggactcattttactcaaatggaggaagagtactcaatgtcactgctagaggaagtagcttaaaaaaggcaaaaaaatcagcctatgatactgtttcaaaaattaaatggg

SEQ ID NO: 314410 - DNA, 695 bp, Unknown
  Bacterial polypeptide expressing nucleotide sequence isolated from the Sargasso Sea
atgtgatggagaagattttataatattaaatacggcgcaggatcataaaagagcatttgaggatgatctaggtccgaatacaggaggtatgggagcatattctccaactcctttatcaacctctaatttacttaaaacagttggttcaaaaattataaagcctactttaaaagctatgaaggataagggaaatccatatacaggctttttatatgtaggaattatgcttgttgaagatgaaccttatgtaattgaatttaatgtgaggatgggggaccctgaaactcaagtggtattacctctgttaaaatctagtatatttgaattattatggaaagctactgaaggtaagcttaaggatgtagacgttttaatatctaaagaaacggccgtaactgtagttttatctgctgagggttatccggaaaaatatcaaaaaggaatggttattaaaggtttggataagaatgagaatcatcttatttatcatgccggaaccataaggaaaggtcatgatattattgctaatggtggaagagttcttaatgtagtggggtttggagaagatttgaaatctgcaattattgatgcatatcaaattgttgattctattaattttgaaggaaaattttatagaaaagatattggtgctcgtggtttacaatatttaaataaaggagcaaagcatgattgat

SEQ ID NO: 314411 - DNA, 863 bp, Unknown
  Bacterial polypeptide expressing nucleotide sequence isolated from the Sargasso Sea
aaaattactcaaaaccattaaatcatataaaatagacttagtagtcgttggtccagaggagcctctagttcgaggaatagtagattttttaaataaacataaaatcaaagtattcggaccaaataaatatgcttcaaaattagagggttctaaagcattcatgaaatcaatttgtaaaaaattcaaaattcctacagctcagtttaaaatatgtaaaaataaaaaagatgtagttaaatttttagaagataataggctcccattagttgtaaaagcagatggcctagctgctggaaaaggagtaactatttgtaaaaccaaaaaagaaatacttactatttcaaatgaaatatttaaaggtaaattcaaaacttcaaaaaagttagtactagaagaatttttaaaaggtgaagaggcaagttattttttaattgtagataaaaaaaattataaattttttggctctgcacaagatcataagcgtgtaggcgaaaatgaaaaaggccctaatactggcgggatgggagcatactcgcctgcaccaattgttaataaagatttggaagaaaaaataattaagaaaattgtaaaacctactttgctggccttaaaaaataaaaaaaaaccttacacaggattcttgtatgttggtttgatgataataaataatgaaccttatcttatagaatataatgttagaatgggagatcctgaatgccaagtaattttgcctagattaaaaactgatttagttaaaattttaaatgcaacaataaataatagacttaataaaatcaaaataaattggaagaaacttaagtgcatgactattgttttatgctcgaaaggatatccgggaaaaa

SEQ ID NO: 314412 - DNA, 713 bp, Unknown
  Bacterial polypeptide expressing nucleotide sequence isolated from the Sargasso Sea
catgaaagtaggaataattggaagcggtggaagagaacactctttatgtgaggctctaaacaaatcaaaaaaaatcactaaaatttattgttttcctggcaacgctggtacgcaacaaattgcagaaaatattaatataaatattgacgattttgagatactaaaaaaatttgttatatcaaaaaagattgaattattagttgttggaccagaaaaacctttggttgaaggaattgttgatttttttgaaaatattaatattccaatatttggaccaaacagattagcatctcaacttgaaggatctaaaatatttacaaagaaaatttgtgataagtacaaaattcctacggcaaaatttggtatttttgaaaatatcaatgaagcaaaattatttttaaaaaatacaaaattccctatggttgtaaaagctgatgggcttgcagcgggaaagggcgtctatatatgtgaaaataatgaaagtgctgaaaatgcaattgaagaaatttttaatggtaaatttggtaaggccaaaaacgttttattagaagaatttctcattggtgaagaaatgagttactttattgtaagcgatggaacaaatattaaaaaatttgagacggcacaagatcataaaagagtgggagaaggagatactggtaaaaatacaggcggtatgggagcttattctccttcacgtcttattagtgatg

SEQ ID NO: 314413 - DNA, 859 bp, Unknown
  Bacterial polypeptide expressing nucleotide sequence isolated from the Sargasso Sea
cacagtaaaagaatacaatatcgactttgttctaattggccccgaggcacctttagcggaaggcgttagtgatattttgaaaagagaaggtattttgactttcggaccttctaaagcatcgtctcagttggaaaccagcaaaaaatttacaaaagaaatctgcaatgcctccggtgcgcccactgccgagtatagaagctttgactcacttgaaacagctttaagttatataaaaactaaaggagctcccttggttgttaaagctgacgggctagctgcgggcaaaggagtgatcgtagcaacagatattgagatggccttatccgcagtacatgaaatttttggtggatcttttggaaacgccggtgcaagtgttgtgattgaagagtttatggagggcgaggaggcatccctttttgttttagttgatggggaaacaatcctacctattggtaccgcgcaagatcataagcgggtaggagatggcgacaccggattaaatactggaggcatgggagcttactcaccagctccaattttaaatgaagaagtattgaaaaagactgttgaacggatcatacgcccgactatgcgtgaaatggtcaggcgaggcatgccatttacaggcgttctttacgcaggccttatgataaaggattccaatcctcgtctggttgagtataatgtaagatttggtgaccccgaatgtcaggtcttaatgatgcggttgggtggtcaaattttagatgctttactatctactgccaaaggtaagttaagtgatgttaaaattaattgggctaatgaccactctataacagttgttatggcgagtaatggatatcccaggttcttatga

SEQ ID NO: 314414 - DNA, 895 bp, Unknown
  Bacterial polypeptide expressing nucleotide sequence isolated from the Sargasso Sea
atcagagtatttggttcaaataaatttgcttcacagttagaaggctcaaaagcatttatgaaaaatttatgtaaaaaaaataatattccaactgcaaaatttgacatttttaataattttaaagatgcttcagattttataaaaaaaaatactacgcctattgtagttaaagccgatggtctagctgcaggaaaaggagtgtcagtatgtcattcaaaagatgacgctttaaaaaaaacaaaagaaattttggacggtaaatttaaatcatcaaaaaaagtagttttggaagaatttttaaaaggagaagagttaagctattttgtaatagttgataaattctcttatagtttttttggttctgctcaagatcataaaagagctggcgaaggagatacgggcccaaatacagggggaatgggagcttattcacccgctccactacttacagataaacttgaagaaaaaattaaaaaaaaaattatagaacctactttgttagcaatgaaaaatttaggtcattcttataaaggatttttatatgctggtttaatgataaaaaatgatgagccttatctaattgaatataatattagaatgggagatcctgagtgccaagttcttatgatgagattagaaacagatttattagaaattatagatttcgcaactaaaaataaaataaatgacttaaaaataaaatggagtaacaaaaattctattactatcgttttatgtgccaaaggttatcctttaaatcacataaaaaatagtgaaataaaaaacctttctactatttcaatagataaagataatcagatatttcatgcaggtacttacaaaaaaaataataaaatttatacaagtggtggcagagtattaaatataacttctt

SEQ ID NO: 314415 - DNA, 874 bp, Unknown
  Bacterial polypeptide expressing nucleotide sequence isolated from the Sargasso Sea
gtggagagagatgcaatttgtaaaaccttactaaattcaaaaaaaataaataaaatattttgttttcctgggaatgcaggtacagaagatatagcagataatataaaaatagatttggaaaattttaaatctcttaaagattttatttttaagaataaaattgatttgattatagttggtccagaacaacctttagtagatggattggttgattatttagaggaaagtaatattaaagtttttggcccaaataaaatagcagcacaattagaaggttcaaaaatattcactaagaaaatttgtaaaaaatttaatataccaactgcaaaatttggtatttttgataataaaaatgatgcaaataaatttttaattgattcagaatttccacttgtgattaaggctgacaatcttgcttctggtaaaggagtatacatttgtaaaaatatagatgaaggaaatcttgctgtagaggaaatatttaatggaaagtttggaaaagcaaaaaacttattaatagaggaatttttagatggcgaagaaatgagtttttttactatccatgatgggaacacctttaaaaatttccaaactgctcaggatcacaagagggtttttgagggtgataaaggaaaaaatacaggtggtatgggtgcttattctccctcaagattaatcaataagaatctagaggaaaagataatcaacaaaattataaaccctacacttaaaggattatctgaacttggaactagatataaaggatttttatatgctggattaatgattgttaaaaatgaaccatatttaattgagtataatgtaaggatgggtgatccagagtgtcaaacaatacttccaaaaatcaaaactg

SEQ ID NO: 314416 - DNA, 871 bp, Unknown
  Bacterial polypeptide expressing nucleotide sequence isolated from the Sargasso Sea
atgaatatactcatcgtaggttcaggtggcagagaacatgctattgcctctacctttttaagatcccctctggtaaaaaaaattgttgtatcaccaggtaaccctggtattgaagaaattgctgaatgtagaaaagtttctgttgacgatttagatggcttggtcaagttggcaattgaaataaaagcagacctggtttttattgggcctgaattaccattagttaagggattaaaaaataaacttgacactgctaggatcaaaacatttgggccaactttggaagctgccagacttgaggggtcaaaaatattttctagaaatttctgtaagaaatataaaattcctcagccaatttactttgaatgtaaaaatactcaaactgcaaaaaaggcaattaattttttccaaggattttgtgttattaaggccgacggtttggcttctggaaaaggagtaattgtatgtgataatccagaagatgccatcaaaacatcgaattcaattttaatcgacaaaattttttctgaagctggagaaaaaattattgttgaagaaagattagaaggcgtagaggcaagtgtatttgctttgtctaatggaaaagattttattttaattggcacagctcaagatcataaaagagcttttgagaacgataagggacctaatactgggggtatgggtgcaatttcaccagcacctgcattaaataatcaaatgttagatgaaatagttaacaaggtcattaaacctacaatagatggtatgaacaaagaaaatattccatatgaaggggttttatatgctggaataatgataacaaaatctggaccaaagctaatagaatttaattgcaggactaggtgat

SEQ ID NO: 314417 - DNA, 826 bp, Unknown
  Bacterial polypeptide expressing nucleotide sequence isolated from the Sargasso Sea
aataaaaaaaatattaaagtatttggtcctagtaaatttgcatcacaattggagggttccaagggatttatgaagaacttatgtaaagaatataatattccaactgcaaaatttggaatttttgaaagttttaaagaatctgtagattttataaataaaaatggtgtaccaattgtggttaaggcagatggcttagctgctggaaaaggtgtttcaatatgtacatctataaatgaagctaagaaaaaaactaaggaaattttagagggaaaatttcaatcttcaaaaaaagtagttttggaagagtttcttgaaggtgaagaattaagctattttgttgtagttgatgaaaattcatacaatttttttggttctgcacaggatcataaaagagtcggagaaggagacgcaggacctaatactgggggaatgggtgcttactctcctacgaaaatattaacaagagagcttgaagaaaaaattaaaaaaaaaattatagagccaactttaaagggaatgaaaaatttaggccatccgtataagggttttttatatgcgggcttgatgattaaaaaaaatgagccttatttaattgaatacaacataagaatgggtgatccagaatgtcaagtattaatgatgaggttaaaaacagatcttcttaaaattatagattgtgcaactagaaattctttagataatttaaaaattgagtgggacaagaatagttgcatgactatagttttgtgttcaaaaggctatcctggtaattatattaaagatattgaaattaaaaatttatctaaaattatactagataaaaata

SEQ ID NO: 314418 - DNA, 821 bp, Unknown
  Bacterial polypeptide expressing nucleotide sequence isolated from the Sargasso Sea
aggatcaaaggcgttttcaaaggattttatgaatagacataatattcctacaggcagatcgatgactttttcagagctaacaccggctttggaatatatacaatcaattgaaatccctattgtcatcaaagcagatggtctggcagcaggaaaaggcgtgattgtagctgaaactagaattgaggctgaaaaagccgttcaagatatgctggcgggcaatgtatttggagaggcgggacacagggtaatcgttgaagagtttctggaaggcgaagaagcaagttttatagtcattgttgacggagagaaggtattgcctctagcaaccagtcaagatcataaacggattggcgataacgataccggaccgaatactggaggaatgggcgcctactctccagcaccaatagttgatgaaaaaattcattctcggataatgcaagaaatcatcctgcccacggttaagggcatgcaaattgaggggaattattaccgtggctttctgtacgctggactaatgatagatagaaatggaaatcctcgcgtcatagaatataactgtcgattaggcgaccctgagactcaaccaatattgatgcgcttgaaatctgatttagcagaaatttgtttagctgcacttgagggatctttggaaagcatttctgcttcatgggattcacgccattctattggagtagttatggcgtcccaaggatatccgggaacatataaaacaggtgtatcaatttctggtttagagatgtcttgcgaagaagatattaaagtgtttcatgcgggaactgcttttgaaaacaggtaat

SEQ ID NO: 314419 - DNA, 622 bp, Unknown
  Bacterial polypeptide expressing nucleotide sequence isolated from the Sargasso Sea
agcagttggagatggggatgttggtctgaatacaggcggaatgggagcatactcgcctgctccgattattactgattcaataaataaaaaaattcttgatgaagtgatgtatcccactatgcgaggtttaataaaagaaaactctccatatttagggtttctatatgcaggattaatgattaaagatggtgaaataaaagttctagaatttaactgtagatttggagacccagaaactcaaccaatccttttaagactaaactcgagtttagtagaattatgtatggcagctataacagataatcttgattcgtatattatcgattggacaccaaaacattcttgtggagttgttatagcttcagatggctatcctcaaagctacgaatcaaataaagaagttaacattgaagaatatgatatggatggtacgaaacttttccatgcaggtacaaaattcgaaaacaaaaaaattatcactaacgggggaagagtattttgtgctactgctttgggtgataatttgaaagaggcccagaaaaatgcatataatctagttcaaaaagtaaattttgatggtgctttttacagaaaagacataggttttaaaggaattaaatga

SEQ ID NO: 314420 - DNA, 842 bp, Unknown
  Bacterial polypeptide expressing nucleotide sequence isolated from the Sargasso Sea
gatgaagatcctggtcatcggaggtggaggaagagaacacgcgctggtctggaaactgaaccagagtgctcatgtagagaaaatattttgtgcaccggggaatcccgggatttccgaaatggccgaatgtgttcccattgtcgtcaatcaggttgatcaactggctgaatatgctgaatcccaaaaaatggatctgaccgtgatcggaccagaggaacctctggtattgggtgtggttgatgaattcaaaaaacgtggattgaaaatttatggccccgatcgtcagtctgcaaaactcgaaggaagtaaagcctatgccaaatcagtgatgaagcgtttcggcattcctaccgctagttaccaggagttcacggattttgaagatgcccttggttatctccaggaacaaggttccccgattgtgatcaaggccgatggattggctgccggtaagggagtcacggtggcagaaacccaggaagaggccgaagcggctttggatgatgccctaaggcagagaatttttggagaggctggacaaaaggtggtgatcgaagaatttcttgaaggtgaagaaatgacagtacttgccttcgtcgatggggaaacagtccttcctcttgttccctcccaggatcacaaaccgattttcgatggagaccgtggaccgaataccggagggatgggagcctattcccctgtaccccaccttgaagaatggcttagggagattcaacgtctcattctgaaacccctggcaaagggtctggctgagtctggacagccttatcgtggtttgctttatacgggtctgatgctgaatgaatcaggtcctaaggtgg

SEQ ID NO: 314421 - DNA, 916 bp, Unknown
  Bacterial polypeptide expressing nucleotide sequence isolated from the Sargasso Sea
aatgcaaattctaggaaatggtggcagagaacatgcattagccttacaaatttcaaaatctaacaaactaagtgaactttattgtataccgggaaatgcaggaactaatttaattgcaaaaaatgtagatattgaattagaaaattttgataaaatttatagttttattaaaaaagaaaaaattgatttagtagtagtgggtcccgaaaaacctttggttaatggaatagtggactatcttaacaaaagaaaaataaaagtattcggacctaatcaaaaagtttctagacttgaaggatctaagatttttacaaaaaaaatatgtaaaaaatataaaattccaacagcaaaattcaaaatttgtaaaactaaaaatgatgcatataaatttttaaaaaatacaaaaatgcctttggtaataaaagctgatggattggctgctggcaaaggagtttatatttgtaaaaatataaaaaattcaaaaattgcgatttcagaaatatttaatggaaaatttggtaaagcaaatgaaatattattggaagaatttttagaaggtgaggaaatgagttattttattatttctgatggatttacttttaaaagttttaataccgcccaagatcataaaagagttggagaaggagatactggtaaaaatacagggggcatgggagcttattctccttcaaatctaattaataaaagattggaagataaaataattagaaaaattattactccaacctttgatgcaattagagatatgaatcaaaaatatattggatttttatatgctggtttaatgataaaagataatgaaccttatttaatcgaatataatgtgagaatgggagatcctgaatgtcaaacaattttacctcttttaaaaacagaatttattagagttattagt

SEQ ID NO: 314422 - DNA, 296 bp, Unknown
  Bacterial polypeptide expressing nucleotide sequence isolated from the Sargasso Sea
tttgaatatcttaatcataggtagtggtggtcgagagcatgcactagcttggaaatgtgctcaagatcaaaatgtaaatcaggtttttgttgctcctggtaatggaggcacctcattggatcagggaattgaaaatctgaagatagatatcaagaatgctgactcgattgcaaacacatgtaatcaaaacgggattgaccttgtgataattggtcctgaacaacccttggttgatggcttaatggatgaccttcaattgaaaaatataaatgtttttggaccctctgcaaaagctt

SEQ ID NO: 314423 - DNA, 668 bp, Unknown
  Bacterial polypeptide expressing nucleotide sequence isolated from the Sargasso Sea
gatgaatgttcttatagttggtagcggcgggagagaacatgctttcacctggaaagcatcacaatctgatcttgtagaaaaaatcttcgtagcgccaggaaatgcaggtacttcacttgagccaaaagctgagaacatcaatatcagtccctctgatattgatgctttggtgtctttttcaaagaaagaaaatattgatctcgtgattgttggtccagaagatccattggtcaatggtattactgatgaattcaaaaaagttggaatcaaatgttttggtcctgaatcacttgcagcacagcttgagggctcaaaagattttgcgaaagcctttatgaaaagacataacatcccaacagcaggctataagagctttactaatgcaaataaagccaagaaatacattcgggagaatgagttgccactggttatcaaagctgatggtctggctgctggaaagggagttgtgattgcagatgactatatgacagctgataagaccattgatgaatttatcagtaagacaaaatatggtgatgcaagcaggaagataattattgaagattttctaattggccaagagctcagttatattgtgatggttgatggaactgaatatttaccgctagcaacatctcaggatcataaaactatttggagaaggagat

SEQ ID NO: 314424 - DNA, 949 bp, Unknown
  Bacterial polypeptide expressing nucleotide sequence isolated from the Sargasso Sea
catgcacagatcaaaaaacatacttgttgtaggcggcggaggacgcgagcatgccctcgcttggaaattggctcgcgacggagccaatgtcttcgccgctcctggaaatgctgggaccgcacgcgaagcgacaaacctacctattcaggcaactgacagtgacgcccttctcgcggcagtgaaacagcatgaaatcgaccttgttgttgttggccctgaggcccccttggtcaatggacttgttgacaaactcaccgacgctggtgttcgaacattcggcccaagcgctctcgcagcccaactcgagggcagcaaaattttctgcaaagagttgctccacaccaacgatataccaactgcgacctatcggcagtttgattcactcgacaaagcccgcggctttctcgagtcccgtgaagatgaacctgttgttgtgaaagccgacggactcgccgccggcaagggtgttttcgtttgcagcaaccgtgaggaagcacttgacgcaattaaccagttacagcgagatccacaatttcgtacagcagcatctggcgtgctcattgaagaacggctcgatggggttgaggtcagtgtcattgccataacagatggccgtaccatcgtgacgctaccaccgctgcaagaccataaagctgcgctcgatggtgatcgtggaccgaatactggtggaatgggtgcgttctgccctgctccctttgtgactcaggcacttatgacagagatagaggaacagattctcgtcccaactgttcacggcatgcgtcgacgtcgaacaccttttcatgggattctctacgccggactcatgctcacgtcacaaggtcccaaagtccttgaattcaacgtccgtttcggtgatcctgaatgccaggctctttgcatccgccttgaatcgagcctccttgaactcattgacgcggcccgttga

SEQ ID NO: 314425 - DNA, 460 bp, Unknown
  Bacterial polypeptide expressing nucleotide sequence isolated from the Sargasso Sea
atgaatattgctttaattggtagtggtggtcgtgaacacgcattatgtaggaagttaaaagactcgaaaaacatcaatcaaattttttgtatacctggtaacgcaggaacagctaaaatagcgactaatctaaatgtaaactttcttgatttcaatttactgctcaaaactctcaaagattacgaaattgaaattgtagttgtaggacctgaagaaccactagttaatggaatagtgaattttcttgaaaaaaatagaataaaagtatttggaccaaataagtatgcatctcagcttgagggctcaaaagcatttatgaaatcagtttgtaaaaaatataatattccgactgcaaattttcaagtttgtaaaaatcaaaaagaatttaagaactcaataaataaatttagcttgccagtagtagtaaaagcagatggtttagcagctggaaaaggtgtgg

SEQ ID NO: 314426 - DNA, 698 bp, Unknown
  Bacterial polypeptide expressing nucleotide sequence isolated from the Sargasso Sea
tatgaatgttttaattataggtgaaggtggaagagaaagcgccattcttcatcaaactcttctttctccaaaagtatctaaagtatttattgctcctggaaatggaggcacttcagaattatgtgtcaatattaatatttcttcagataatatatcagaattagcaaaatttgctgtagataataaaattgatttaactattgttggacctgaaattcctttaagtttaggcattgtagatctatttgaatccaaaggattgaaaatttttggcccatctaaaaatgcttcacgaattgaaagtagcaaaatttttgcaaaaaacttgatgaaagaattcaatattcctacagctaagttcgaggtttttgaaaatgaaagctctgctattaaatttttgaataaaactgaatttccaatagttattaaggctgatggattagctgcaggtaaaggtgtgtatatatctgataatttagatgatgctaaacttgcaattaaagatttaatgaattctcaaatttttggaaaatctggtaaaaaaatagttatagaagaatttttatcaggttctgaatttagtgttttcgcatttacaaacggtaatgatataaaagtacttttgtcagcttgcgattataaaaaagcacatgatgaagataaaggcccaaacacgggtggaatgggaagcttctcac

SEQ ID NO: 314427 - DNA, 472 bp, Unknown
  Bacterial polypeptide expressing nucleotide sequence isolated from the Sargasso Sea
tatgaatttggcagttattggaagcggtggtcgggaacatgctatttgctataaattaaaacaatctttaaaaataaaaaaattaatttgtatacctggaaatgctgggaccgagaaaatagcagaaaatataaaagaagatattttaaattttgaagccatttataaaatagttagagataaaaaagtagatgttgtaattgttggtcccgagcagcctttagttaatggtctcacagattatctgaacagcaaaaaaattaaagtacttggtcctagtaaatttgctgcacaattggaaggttcaaaagcatttatgaaaaatttgtgtaaaaaaaataatatacctacagcaaattttggtgtctttgaaaatttaaatgatgcaaaaatttttatagaaaaaaataacattccaattgtagtaaaggctgatggattggcatcaggaaaaggagtatcaatatgctcc

SEQ ID NO: 314428 - DNA, 688 bp, Unknown
  Bacterial polypeptide expressing nucleotide sequence isolated from the Sargasso Sea
catgagaattgcgataattggtagtggaggtcgagaacatgcaatttgtcaaaaaatttatgagtcaaaaaaagtaaaaaaaatattttgcattccaggtaatggcggcacaagcaaaatcgctaacaatgtagaaatcaatacaaataattttgatgaaattaaatcctttttaattaataaaaatatagatttaactattgttggtcccgaagaacctttggtaaatggtatagtagattttttaactaatgaaggattaaaagtttttggtccagataaattttgctctaggttagaaggatccaaaatttttactaaaaaaatatgtaaatcagaaaatatcccaactgcaaattttgaaattttcaaagataaattatcttctttaaattatttaaaagaaacagaatatcctacagtagtaaaggctgatggattagcggccggaaaaggtgtttatatttgtgaaaatttttctgatgcttcaaatgctgttgaagaaatttttaaaggaaagtttggaatagcagaagaagtattaattgaagattttctggtaggtgaagaaatgagtttttttgttttatatgataataattgttttaaaatttttaatacagctcaagatcataaaagagtttttgaaggtgataaaggaaaaaatacaggagggatgggtgcatat

SEQ ID NO: 314429 - DNA, 889 bp, Unknown
  Bacterial polypeptide expressing nucleotide sequence isolated from the Sargasso Sea
agatttagttgttattggtcctgaagcccctttgtgtgcgggattaacagatcgtttagaaacttatgggataaatgtttttgggccaaataaagcggctgctgaacttgagggaagcaaacagtttgcgaaagaagttatggcagcagctgaagtacctacatcagcatattcaaattttgtagatgtagaaagagcatgtgcatatgttcgtgaaaaaaacatgcctattgttatcaaggcagatggattagctgcaggaaagggagtaactgtagctgaaacaatagatcaggctgaaaaagcgatttttgatgctttagaggataatgtttttggagccgcaggctcatcagtagtaattgaagacttcttagaaggcgaggaggcatccattttagcattaattgatggagaaaatatagtcttattagcatcatcccaggatcataaacgtatttacgaaaaagatgaggggccaaatacaggaggcatgggggcatattctccagcatcgattgttaatgatatagtttgtgaaaaagtgatacatgagatttatcaacctacgcttaatgaacttaaaaaacgtggaattacatataaaggcgttttgtatgccggattaatgatcaaagataaccaaccttatgtagtagaatttaattgtagatttggagacccagaaactcaagctgtactatctcgctggaatggtgacattatccctgcattaatggcagtagtgaatggaaatctatcggatgatttaatttcatggaaaaaagaacctagtgcatgtgtagttatggttgcaggaggatatccaggttcgtataaaaaaggagatccaattggtaatatatcattagctaataaagtaaaagat

SEQ ID NO: 314430 - DNA, 894 bp, Unknown
  Bacterial polypeptide expressing nucleotide sequence isolated from the Sargasso Sea
gcatgcaatttgttcaaagttatatacttcaaaaaaaatttctaaaatatactgttttcctggcaatgcaggaacttcaaaaatcgctgaaaatgttaatttagatttaaaaaattttccagagttaaaaaaatttatatctaaatataaaatagaattattgattgttggtcctgaggagcctcttgtaaatggaataactgattttttagaaaaagaaaaaattaaagtttttggtcctaataaacaatgttcaaaacttgagggttctaaaatatttacaaaaaaaatatgtgaaaaatatagcatacctactgcaaaatttggaatattttcaaatttaaatgattcaattttttttttaaataaaaaaaaatttcctattgttgttaaagctgatggtcttgcagcgggcaagggtgtaagtatttgtcaaaacttatcagaagctaaaaaatcagttgaggaaatatttaacggaaaatttggaaaagctaaagaagttcttatagaagaatttttagaaggagaggaaatgagtttttttattattagtgatggtgtgtcttacaaaaaatttggtactgctcaggatcataaaagagtatttgatggagacaaaggtccaaatactggtggaatgggagcttatagtccctcaagattaactgacaaaaatcttgaacaaaaaatacttaaaaaaattatagaaccaactttgttagctttaaataatatgggctctaagtacattgggtttttgtatgctggattaatggtgaaagataatgaaccattcctaattgaatacaatgtacgaatgggcgatccagaatgccaaactatactaccgactcttgaaacagatcttttggaaatttttattaaagcttg

SEQ ID NO: 314431 - DNA, 926 bp, Unknown
  Bacterial polypeptide expressing nucleotide sequence isolated from the Sargasso Sea
tgtcggtcctgaagatcctctagttaatggtttggttgattttcttgagtctaaaaatataaaagtttttgggcccagtaagggagctgctcagctagagggatcaaaaaccttcgcgaaggacttttttataaaatatggtatacctacagcaaattataagtcttttgataatcatcatgatgccctgaagtacctcgacaagattgatttcccatcggttgtaaaagctgatggccttgctgctggaaagggagttattatttgtgatgatcgagaagctgcagaaaaagcccttgaagatatatttgaatcaaatgcctttggtgatgctggaaatagagtggtaatcgaagactttttgaatggagaggaagcaagctttattgctgttgtcagtgatgatcaaattattcctcttgcaacaagccaagatcataaagctgttggagatggagatgttggattaaatactggaggtatgggtgcttactcccctgctccaattgtcacagatgagattcacaaaagagttatcgatgaggttatgcttccaacaatgaatggattaaaggctgaaggatttccctatcttggttttttatatgctggcctaatgatagaaggagatgagataaaagtcttagaatttaattgtaggtttggcgatccagaaactcagccaattatgctcagattagaatctagccttacaaatttatgtcttgatgcgattaataaaaaacttaatgcccatcaaattgaatggtcatcaatgcactcttgtggagtagttttagcatcatcaggctatccagaagattatgaaatagatatgggaatagatataaaaaatcatttcagtgaaaatgagaaactgtttcatgcaggtacaaagtttgtagataataagattctcacatcgg

SEQ ID NO: 314432 - DNA, 868 bp, Unknown
  Bacterial polypeptide expressing nucleotide sequence isolated from the Sargasso Sea
aaagctgagaacatagatattagtgcaactgatattgatgctttggtatctttttcaaaaaaagaaggtattgatctggtgattgttgggccagaaggtccattggtaaatggcattactaataaattcaaaaaagctgggatcaactgttttggtcctgaatcactaggagctcagcttgagggctcaaaagattttgctaaaacttttatgaaaagacataacatcccaacagcgagctatcggagcttcactgatgcaaatgaggcgaagaaatacattcaggaaaatgagttgccacaggttattaaagctgatggtcttgcggccggaaaaggtgttgtcattgtagaggattatgaaaccgcttctaaaaccatagatgaatttatcagtgagacaaaatatggtgatgcaagcaggaagatcataattgaggattttctcaaaggtcaggaactgagttatattgtgatggtagatggaactgagtatttacagcttgcaacatctcaggatcataaaactataggagaaggagatattgggctcaacactggtggtatgggagcttattctcctgttccatttgttaatgatgaactagatatcataatcaagaaagaagttatcgaaccaactgttagagggctttctgaagatggaattgctttcagagggttcctttatgcaggcctaatgattgactctaacttaaaaccaaaggtactggagtataactgcagatttggagatccagagacccaaccgataatgttaaggctaaaatcagaccttatagatatgattcaaacttgcttctctggaaacattagtaaatatgatattgagtgggataataattcag

SEQ ID NO: 314433 - DNA, 776 bp, Unknown
  Bacterial polypeptide expressing nucleotide sequence isolated from the Sargasso Sea
ggaagagaacacgcgcttgcctggaagtgcgctgagccaccatacgtcgataaagttttttgtgctccaggaaacgctggcactgctagagaggataaggttattaatgttgctatttctccggaggatttggaaaggttggcctcgtttgccgaagaggagaatatcgcccttactatagtaggaccagaggcgcccttggtgtctggcatcgttaatgcttttgatgcgcggggtctaaagtgttttggtccaacaaaagaggcgtcggtattagaagggtcaaaagtttttaccaaggactttttacatcgacatggaattcccacaggcaagtataaaagtttctcggatatttcgggggccttaaattatataaaagattgcgagtttcctctggttattaaggctgatggcttagcatccggtaaaggggtgtttattacgtctgaccatgttgaggcagaaggggtggttaggacgatactttcaggaaataaatttggggaagctggaagccaaatagtaatcgaagaattcttagacggtgaagaagtgagctatatctgtatgacagatggatatcattgtgtaccctttgcttcttcacaggatcataaggcaagagacaacggcgattcagggccaaatacaggagggatgggggcctactcacctgcaccgctgctgaatagtgacttagagcatcgggtgttagaggaaatcatttaccctaccctatctggcttaagggaggagggtaagctatacaaagg

SEQ ID NO: 314434 - DNA, 751 bp, Unknown
  Bacterial polypeptide expressing nucleotide sequence isolated from the Sargasso Sea
tatgaatattggaattattggaagtggcggacgagaacatgcactgtgtttgaaattgaatgaatcagatctcgttaacaaaatttattgtttccctggaaacgctggaacagaattactagcagagaatattgatataaacattgacgacttcaacgagattaaaaagaaatctctagaaaaaaatattagcttattagttgtcggccctgaaaaacaactcgttaatggaatagtagatttttttaaaaatactggtattcaagtgtttggtccaaatagaatttcgtctcaacttgaaggttcaaaaatttttacaaaaaaactttgtaaaaagtttaatatcccaacttcaaaatttgagatattcataaaaaaaagggatgctattaattatttggaaaattcaaaatatcctatagtgattaaagcagatggcctagcatcaggaaaaggtgtttatatttgtaaatcaaaaaataacgcagaagaagctgtaaatgaaatatttaatggaaaattcggtaatgctgactcaattttaatagaagaatttttagaaggagaggaaatgagttattttgttatatgcgatggaaaagattataaattttttcaaactgcacaagatcataagagagttggtgaaggagatacaggtcctaatactggtgggatgggagcatactcaccatctagattgaataatgataatcttcaagacaaaatcaataaaaaaattatagaacca

SEQ ID NO: 314435 - DNA, 937 bp, Unknown
  Bacterial polypeptide expressing nucleotide sequence isolated from the Sargasso Sea
attaattgaaaccagcaagtcttttgcaagaaaaataattgatctttgctgtccagaaaaaaacccacaaagaagggagtttagttcaatagaaggggttgaaggctttatcgaacagttgggaggagaatacgtaataaagtttgacggtcttatgggaggaaaaggagttcgtgtttctggtgagcacctaaaaaacatcgatgagggaattgcctacgctaacgaaattattaacattggcggaacgtttttaattgaagaaaagttagttggagaagagttttctttaatgagttttgtagatggtaaggtctgcaaacatatgcctatcgttcaggatcacaaaagagcatatgaaggcgacactggtcctaacaccggggggatgggcacctactcttttgcaaaccactctcttccttttttaagcgacaaagatattaaagaggctcaaaaaaccaacgagcttgtagccaaacaactttttgaagcaacgggtactccctatgtgggcatactatatgggggctttatgttaacaaaaggtggtgttaaggtcattgaatacaatgctcgtttcggtgaccctgaagcaatgaatgtcttatctatattagagtcagactttttatcaatttgtatttctatggttgacggaaacctaaaaacccaagatgtctcttttgaaagactttctactgtttgtaaatatgttgttccggtgggctatccagacaaacccacaaaaaactttgaagtgttttgtgatcaaaatgacccctctctttttctcgcatctgttatgctaaaagatcaaaggctagtagcctgtgggtcaagaaccgctgcggtggttggtaaaaacaaaaatgtttttcaggctgaattgtttgctgaggctggtatagcaaacatatccggaaaactttttcac

SEQ ID NO: 314436 - DNA, 816 bp, Unknown
  Bacterial polypeptide expressing nucleotide sequence isolated from the Sargasso Sea
tatgaaagttggaataataggaagtggtggtagagaacatgctatttgtgaaactgtaaaaaaatcaaacaaaattgataaaatattctgttttcctggaaatgctggaactaaagatattgcagaaaatataaatatcgatttagacaattttgaagtccttaaaaattatattttagaaaaaaaaattgatttaatagtagttggtccagaaaaacctttggttgatggattggttgattatcttgaaaaatataaaattaaagtatttggaccaagtaaaattgcagctcaattagagggatctaaaatttttacaaaacaaatttgtgaaaaatataaaattccaacagctagttttggaatcttcgaaaacaagaaagatgcaaaaaaaaatttaaaatcaacaaattatccaatagtaattaaagcagacaatctagcttcaggcaaaggtgtttatatttgtactaatgaaaatgaagctataattgctattgatgaaatatttaatggaaaatttggtgaagcaaaaaacttacttatagaagaatttttaaaaggtgaagaaatgagtttttttactattcatgatggaataacttttaaaacttttgatacagctcaagatcataaaagagttttggaaggagataaaggtaaaaatactgggggtatgggagcctattcaccctcaaggctaatcaacgaagatttaaaaaataaaatcattaataaaattattaaaccaactcttgagggtttagccggatttggctctaaatataaaggatttttatatacaggcttaatgat

SEQ ID NO: 314437 - DNA, 724 bp, Unknown
  Bacterial polypeptide expressing nucleotide sequence isolated from the Sargasso Sea
tttggaaaaatttcttgagggagaagaattgagttattttgtaatagtagacaaaaactcttatcgtttttttggttcagcgcaagatcacaaaagagttggtgagggagatacaggacctaatactggtggtatgggagcttactcacctgcaagaatattaactgatgaactcgaagaaaaaattaaaaagaaaattatagaaccaaccttaaaagcaatgaaaaatctaggtcatccctatgaaggttttttgtatgcaggactaatgattaaaaaaaatgaaccttatttaattgaatataatatcagaatgggtgatccagagtgtcaggttttgatgatgaaattaaaaacagatcttcttgaaattgtagattctgcaacaagaaataatttaaataatttaaaaatagaatggaataaaaataaatgcatgacaattgtcttgtgtgcaaatggctatcctggtggttacgttagagacaaagaaatccataatttgtctaagatcgcttcagatgaaaataatcaaatattccatgcaggaacttatgaaaaagataataaaattttctcaaaaggagggagagttttaaatataacttgttcagccaaaaatcttcgtaaagccagagatcaatctttgattaatttaaaaaaaataaattggatcgatggtttttttagaaaagatataggttggagggccatcaaaaaataa

SEQ ID NO: 314438 - DNA, 768 bp, Unknown
  Bacterial polypeptide expressing nucleotide sequence isolated from the Sargasso Sea
gatgaatgttttagttgtaggtcaaggtggtagagaacatgcattggcatggaaattatctaaatctaaacaagttagcaaaatttttgttgctcctggaaatggaggaacagctaatgaagcaaaatgttttaacaaaagcataaacgtaaataatttttctgcattagaagaacttgttaatagtgaaaatattgaattaatagtagtaggacctgaagatccacttgtaaacggtatcaatgattatttccaaaattcaaaagtaaaagtatttggccccacaaaagagggcgcccagcttgagggttctaaaatattttctaaaaaatttatgtttgaaaataatattcctacgggtgctgctaatttcttttctgaatcaaaattagccaaaaattatcttaagactgtcgaatttccaattgttcttaaagctgatggccttgctgcaggtaaaggagttttagttgcaaaagaattaggtgaggcaatgcaatggattgaagatgtcatggaaaaaaataagtttggtgatgctggtaatgaagtgttaattgaagagtgtttatttggtactgagctaagctatatgggaataatgacacctaaaggattttacccttttgaaacaagtgtagattacaaaccacttttagatggtaatagtggaccaaatacgggtggaatgggttgtatgagtccatcgccatttatgaatagtgagcttttaaaaaatataaataaacaagttgttgaaccaactgc

SEQ ID NO: 314439 - DNA, 780 bp, Unknown
  Bacterial polypeptide expressing nucleotide sequence isolated from the Sargasso Sea
tatatgcaaaacaatttcactatcctcaaaagtaagtaaaatatattgtctgccagggaatgctggaactcaacaactggctgaaaatatagatttggatattgatgattttgaaaaagttttaaaatttttaaagcagtctaaggttgatttagttatagttggtccagaaaaaccattagtgaatggtgttgtagatttcttagaaaataatggtattaaagtttttggtcctagaaaaattccttctcaattagaagggtcaaaaactttcacaaaaaatatttgtaaaaaatataatatacccacagctaaatttggaatctttgaaaaaaaagaaaatactataaattttttaaaaaattcaaaatttcctattgttattaaagcagacggattagctgccggaaaaggggtttatataactgaaaatttatctgaagcaacagaggctgttaatgaggtttttgatggaaaatttggtatagcaaaaaaaatactggttgaagaatttttaaatggtgaagaaatgagtttttttgttatttgtgacggaaaaaattttaaaatttttgaaactgcacaagaccacaaaagagttaatgagggagatatgggaaagaatactggtggaatgggtgcatacagtccatcaggattaataaacaagaccttagaaaaaaaaattattgataaaataatttctccaaccttaaaagctatagaagaaatgggagaaaaatataaaggatttctttatgctggattaatgataagtga

SEQ ID NO: 314440 - DNA, 571 bp, Unknown
  Bacterial polypeptide expressing nucleotide sequence isolated from the Sargasso Sea
tatgggactaaagattttaatattaggatctggtggaagagaacatgcaatatcatggataatttctaagtctaaaagagaaattgaaaaaatatatgttatgcctggaaatgcaggaacattatctgaaaaaaatgttttcaacatagagtgtgatatcaataatcatcaagctgtgttgaattttgctcttgagaataatattgacttaacaatagtaggaccagaagtgccattggttgaaggcataagtgacttatttgaagaaaataatctcaatatttttggtcctaaaaaatattttgcacaattagaaggatcgaaagtattctcaaagaattttatggattctaataatcttcctacagcaagctataaggaatttaatgattctaaaaaagcaaaaggttatttaaatgataaaaaaatgccaattgtgattaaatatgatggtctagcagctggaaaaggtgtagatatttgtgaaacgattgatgctgcaaaaaattctattgataacttacttaaaccagaagaaaaaattataattgaagactttataaaaggtata

SEQ ID NO: 314441 - DNA, 736 bp, Unknown
  Bacterial polypeptide expressing nucleotide sequence isolated from the Sargasso Sea
tatgaaagttgctgtaataggaagtggtggaagagaacatgcaatttgtttatctttaaaaaaatcagaaaaagtaaaaaaagtttactgtatacctggaaatgctggtacagattcaattgcagaaaatgttgatattgaggtcagtgatcaaaataaactcaaagattatattttacttaacagaattgatttagttataatcggacctgaaaagcctctagttgatggtatagttgactaccttcaaaaatttaatattaacgtatttggtccaaataaaatagcgtcacagctagaaggttctaaaatttttacaaaacagttatgtgaaaaatataaaatccctactgccaacttcggaatctttaaatcagttaatgatgcaaaaaaatttttaaaagaaagtgattatccagttgtagtcaaagctgatgggttggctgctggaaagggggtctatatttgtgaaaatatagatcagtcaatagatgctgttaaagaaatatttgatggtaaattcggtaaaacaaaagaggttttaatagaagaatttctcaagggtgaagaaatgagtttttttataatttcagatggtgttacttttaaaacttttggaactgctcaggatcataaaagagtttttgaaggagataagggaaaaaatactggtggaatgggagcatattctccatcgcgacttgagaatgaaaaattaaacaataaaattatagaa

SEQ ID NO: 314442 - DNA, 916 bp, Unknown
  Bacterial polypeptide expressing nucleotide sequence isolated from the Sargasso Sea
taatggtatcgtagattttttaactaaaaataaaataaaagtgctaggtccaaataaatttgcatctcaacttgaagggtccaaagcgttcatgaaagatttatgcaaaaaaaataatattcccactgctaaatttgggacttttgataattatgataatgcaataaactttttaaataaaagcaaattaccaatcgtgataaaagcagacggactagctgccggaaaaggtgtttcaatatgtaaaaataaagaagaagcaaaaaaacaaatatatgaaattataaacggaaaatttaaatcatcaaagacagttatattggaagaattccttgagggtgaggaacttagttattttgttttagtagataaaaattcctatagttttttcgggtctgctcaagatcataaaagagttggcgagggggatgttggtcctaatacaggtggtatgggagcatactctccatcaaacttattaacaaaaaaactcgaaacaaaaattaaaaataaaataattgaacctacattaaatgcaatgcaggctttaggacatccatttaaaggttttttatatgctggtttgatgatttcgaagggagaaccatttttaattgaatataatataagaatgggtgatccagaatgtcaagttttgatgatgaggttaaaaacagacctattagaaatattggaagcagtaatattggataatttagaaaaaataaatattgaatggtatgaggaagattctattactattgtgttgtgtgctagaggatatccaggaaattatataaaaaatagtgaaattaaaaatataaataaaattgtaatggatgtaaataatcaagtcttccatgctggaacctatgaaaaaaataataagatattttcaaaaggtggtagagtttaa

SEQ ID NO: 314443 - DNA, 511 bp, Unknown
  Bacterial polypeptide expressing nucleotide sequence isolated from the Sargasso Sea
atgaaaatcttagtaattggttcaggaggaagagagcatgctttggcatggaagtgctctactgataaatttgttgaaaaggtttacgttgctccaggcaatgcaggaacatttcttgaagaaaaaatagaaaatatttccttggacataaataacaatgaggatgtctctaacttctgtgtttcaaataatattgaacttgtaattgtcggtcctgaagatcctctagttaatggtttggttgactttcttgagtctaaaaatataaaagtgtttggacccagaaagggagctgctcagctagagggatcaaaaaccttcgcgaaggacttttttataaaatatggtatacctacggcaaattataagtcttttgataatcatcatgatgccctgaagtacctcgacaagattgatttcccatcggttgtaaaagctgatggccttgctgctggaaagggagttattatttgtgataatcgagaagctgcagaaaaagcccttgaagata

SEQ ID NO: 314444 - DNA, 895 bp, Unknown
  Bacterial polypeptide expressing nucleotide sequence isolated from the Sargasso Sea
aaataagtacgcagctaaacttgaaggatccaaagcatttatgaaatcaatttgtaaacgccataaaataccaacagctcaattcaaaatatgtaaaaacacaaacgatgtagtaaatttttttaaaaaaacaaattttcctttagttgttaaagcagatggattggctgctggtaaaggcgttacaatttgtaaaacaaaaaaagaagtgttgaatatttcaaatgaaatatttcgaggtaaattcaaatcatccaaaaaattagtgcttgaagaatttttaataggtgaagaagcaagttattttttaattattgataataaaaattataaattttttggttctgcacaagatcataaacgagtaggtgaaaatgaaaagggtcctaacactgggggtatgggagcatactcacctgctccaattgtaaacaatgttttagaaaaaaaaataattgatagaatagtaaaaccaacattacaagcattaaaaaaaaaggggaaaccatataccggatttttgtatgtaggtttaatgatagttaataacgaaccttttttaatagagtacaatgtaagaatgggagatccagagtgtcaggtaatcttaccaagattaaagtcggacttgcttaaaatttttaatgcagcggtagaaaatagacttaataaaattaagataaaatggaaaaaagttaagtgtatgaccattgttttatgctctaaaggatatccgctaaagataaaaataaataaaccaattaggaatatcagtaaaattaaagatacaaagacttcttttattttccatgctggaacaaaatttttaaataataatttagtatctagcggtggaagagtattaaatataactgcaactggaaaaatattaaaa

SEQ ID NO: 314445 - DNA, 746 bp, Unknown
  Bacterial polypeptide expressing nucleotide sequence isolated from the Sargasso Sea
gctggtcattctggatgtgaacgatcatgcagcggtaatcggtttttgtatggccaatcagatcggcctggtcgtgatcggtcccgaagccccgttggttgatggtttgggtgacagtttgcgcgacgccgatattccggtgttcggtccctcaaaagccgcggcgcagttagagggcagcaaaggcttcaccaaagatctgtgcgcgcgagcgggaatccccaccggcgcctatatccgtacccattcgctggaacaggcgcgcaccgcgctcgccgattttgccgcgccttacgtattaaaggcagatgggctggcggcaggcaaaggcgtggtgatcgccgaagacatcgctcaagcggagatcgtgctggccgatatgtttggcggcgctcacggtgaagcgggggcgcaggtggtgatcgaggagtttctggcgggtgaggaagcaagcttctttgcaatcaccgatggcaaaacggttgtcccgttcggcacggcgcaggaccacaaacaggtcggcgaaggcgataccggccccaatactggcggcatgggcgcgtattccccggccccagtgctgactgccgaattgcagacgcgcgtgatggaagagatcataaagccaacagtcgatacgatggcagcagagggcatgccctattcaggcgttctatatgcgggcctgatgctgaccaagaccggcccccagctgatcgagtacaattgccgctttggcgatccgg

SEQ ID NO: 314446 - DNA, 906 bp, Unknown
  Bacterial polypeptide expressing nucleotide sequence isolated from the Sargasso Sea
tctggcatggaaagcagcacaatcggctcatgtgacacaagtctttgtagctccgggcaacgcaggtactgcgctggaagctaatctgaccaatgtggctattgcagcagacgatgtgtctgccctgaccgcttttgccaaaagcgaaggcatagctttgaccatagtgggcccagaagcaccactggccaaaggtgtggttgataccttccgtcagcaaggcttagctatttttggccctactcgggcctccgctcaactcgagagctccaaagcttttgccaaagactttttagcccgccataaaatccctactgcagcttatgccaactttacagagattgagccagctaaagcttatgtcaaaaccaatggcactcctatcgtcatcaaggccgatggcctggccgcaggcaaaggtgtgattatcgcccagactgaagctgaagcttttgccgctatagacgatatgctgtctggcaataagtttggctcagccggcagccgtgtggtgattgaagagtttttaacaggcgaagaagcgtcctttatcgtgatggtcgacggtactcatgccttagcttttgcttcgtctcaggatcacaaagcccgtgatgatggcgacaaaggcccaaataccggtggtatgggtgcttattccccggcaccggtggtgactcctgccgtacatgactgggtcatgcaaaatgtcatttaccccacagtcaatggtatggcctctgaaggccatatctacacaggtttcctctatgcaggtttgatggtagcacctgacggtacctgtaaagtgctggagtttaactgccgttttggtgaccctgaaacacagcctattatgatgcgtttacagtccgacttagtcgagctgtgtcaggctgctgtgga

SEQ ID NO: 314447 - DNA, 678 bp, Unknown
  Bacterial polypeptide expressing nucleotide sequence isolated from the Sargasso Sea
aggattagtggatttcctagaatcaaaaagtattaaagtttttggtcctagaaaaaaagttgctcaattagaaggttcaaaaatatttacaaaagaaatctgtgagaaatttaacataccaaccgctaaatttaaaatttgtaaatcaaaagaagacgcatttgtatttctatcatcatctaattttcccattgttgtaaaggcagatgttcttgctgcaggtaaaggtgtttatatttgtcaaaatgttgatgaggctaaaactgctgttagtgaaatatttgatggtaaatttgggaaagcagatcaagtgttaattgaagaatttctagaaggtgatgagatgagtttttttattatttcagatggaattagttataaaacttttaatacagctcaagaccataaaagagttggtgagggcgatactggaaagaacacggggggaatgggagcttattcaccttcaagcttaattaacaatgatttagaaagtaaaattttaaacaaaataattgagccaactttaaaagctataagtgaaatgaatgagaagtacgtcggatttttatatgcaggcttaatgataaaaagcaatgaaccatacctaattgaatataatgtcaggatgggtgatcctgaatgccaaactatattacctttggttgacagtgattt

SEQ ID NO: 314448 - DNA, 538 bp, Unknown
  Bacterial polypeptide expressing nucleotide sequence isolated from the Sargasso Sea
atgaaagtaggaataataggaagcggaggaagagaacacgctttatgtgtatctcttaaaaattcgaataaaatagataagatttactgttttcctggaaacgcaggcacaagcttaatagctgaaaatatagaaactgatttaactaattttgaaaagctaaaagaaattattcaaaaacttaaaataaatttagtaattgttggaccagaaaaacctttagttgatgggattgttgattttttagaggagaataaaattaaagtttttggtccaaataaattttgttcccaactagaggggtcaaagatatttacaaaaaatttgtgtcagagatataatattccaactgcaaattttggagtttttaaaaatcaagataaaagtctattatttctaaaaaaatgtaaatatcccatcgttgttaaagctgatggtttagcagcaggcaaaggtgtctatatatgccaaacatttgaacaatcatctaatgcaataaaagagatttttaatggtaaatttggagaagcaaaagaag

SEQ ID NO: 314449 - DNA, 910 bp, Unknown
  Bacterial polypeptide expressing nucleotide sequence isolated from the Sargasso Sea
aatggtttctttaccatttggtccaaaccaaaaagcagctcaacttgagggttcaaaatcatttacaaagaacatatgtaaagaatacaatattcctacagcagcttacgagactttctcaaatttagataagacaattaaatacattgataatcattctataccgcttgtcattaaggtggatggcctagctgcaggtaaaggagtaataattgcagaaactagagagcatgcaattaattctgtgaaagaaattttctcaggcaagtttggaagtgctggtaatgaaatagtaattgaggagtttctagagggcgaggaggcaagtttttttgttgtatccgatggaaattctttcattccgttaacatctgctcaggaccacaaaagaatcggtgatggcgatacaggtttaaatacagggggaatgggcgcatattcacctgcaccaataatgaattcagatttagaggaaaaaactattaataaaattatcaaaccaaccttaaaggctatgaatgattacggagagccctacattggaatattatatgctggactaatgataaaggataacgaacctaaattaattgaatataatgtgaggtttggtgacccagaatgtcaggtaataattcctagacttgaaaatgatttggttgatttactaataaatgtaaaagaaaaaaatttagataattatactttaaattggaaagacaactttgcaattactatagtcttagctgctaatggatatccagaaagttatcaaactggggatgaaattgaaggattagatcaagtagctaatatggataatgttgaaatattccatgcaggtactaaaatgatagagaataaagttgtaacatctggtggtagagtcttaaatgtaaatggatatgga

SEQ ID NO: 314450 - DNA, 754 bp, Unknown
  Bacterial polypeptide expressing nucleotide sequence isolated from the Sargasso Sea
gatttcggaaatggccgaatgtgttcccattgccgtcaatcaagttgatcaactggctgaatatgctgaatcccgaaaaattgatctgaccgtggtcggaccggaggaacctcttgtattgggtgtggttgatgaattcaaaaaacgcggattgaaaatttatggccctgatcgtcagtctgcaaaactcgaaggaagtaaagcctatgccaaatcagtgatgaagcgtttcggcattcctaccgccagttacgaggagttcacggattttgaagatgcccttggttatctccgggtccaaggtgccccgattgtgatcaaagccgatggattggctgccggtaagggagtcacggtggcagaaacccagcaagaggccaaagacgctttggatgatgccctaaggcagggaatttttggagaagctggacaaaaggtggtgatcgaagaatttcttgaaggtgaagaaatgaccatacttgccttcgtcgatggggaaacagtccttcctcttgttccctcccaggatcacaaaccgatcttcgatggagatcgtgggccgaataccggagggatgggagcctattcccccgtaccccaccttgaacaatggcttacagagattcaaagtctcatcctgaaacccctggcaaagggtctgactgagtctggacagccttatcgtggactgctttatacaggtctgatgctgaatgaatcaggtcctaaggtggtggaattcaatgtccgtttc

SEQ ID NO: 314451 - DNA, 865 bp, Unknown
  Bacterial polypeptide expressing nucleotide sequence isolated from the Sargasso Sea
taaaaataaaaaagacgttttaaattttttaaaaatgagcaagcttcctttggtagttaaagctgacggacttgcagcaggaaaaggtgtaacaatttgtagttccaaaaaaaaagtattaaatatttcagaagaaatttttaaaggtaaatttaaatcttcaaaaaaaattgttcttgaagaatttttagaaggtgaagaggctagttattttgttattgcagataaaaaaacatttaaattttttggaactgcccaagatcacaaacgagttaaagaaaacgataaaggtcctaatactggaggtatgggagcttattcaccagcaaaaataattgataaaaaactagagaaaaaaataattaacaagattataaaaccaactttttttgctcttaaaaaacaaaaaatttattacacaggatttttgtatgttggtctaatgattaaagataatgaaccttatttaattgaatttaatgtaagaatgggtgatccagagtgccaggtaatattacctaggttaaaaactgatcttataaaaatcatcaacaatgttgttaataataaattagatagaacaattataaattggcacaaaaagaaaagtatgactgtcgttttatgttcaaagggctatcctggtaaatataaaaaaaataaaactattaaaaatttagatagaattaaattaagtaaaaatgattttatttatcatgctggcactaagcttgaaaataatcaacttaaatcaaatggtggacgagtattgaacattacatcagttggaacagattttttaaagataaggaagaaaattatcaagattattaaaaatataaaattggaaaggaggtttttttag

SEQ ID NO: 314452 - DNA, 412 bp, Unknown
  Bacterial polypeptide expressing nucleotide sequence isolated from the Sargasso Sea
atgaacatactagtaattggttctggtggaagagagcatgctttggcatggaaatgtgctcaagataattttgtaaatcatgtttatgtgtgtcctggaaatgctggaacttttcttgaagacaaagtcagtaatataaatcttgatattgatgactttaaatccattgaagatttttgtttagaagaaaatattgaactagtaataattggtcctgaacaacctctggttgaggggctaactgattatttgcatagcaagaatattaaagcatttggcccctcaaaaaatgctgctcaactagaaggttctaaaactttctcaaaagatttttttgtaaaatatgacattccaactgcaggatataaatcatttattgattttgagagctccagtaaattatctcgacgaa

SEQ ID NO: 314453 - DNA, 658 bp, Unknown
  Bacterial polypeptide expressing nucleotide sequence isolated from the Sargasso Sea
gccacctctcaggatcacaaagcgcgagataatggtgataaggggccaaacaccggcggcatgggagcatattcccccgcctctgtagttactgatgaggtttatcaacgcattatggataaggtcatactacctactgttgccggtatggcagaagacggaaatgactatactggttttctctatgctggattaatggtttctcctgacggtgaagtaaatgttgtggaatttaactgccgctttggagatccggaagcacagccagtcatgatgcgcctgcaatctgacttgcccgaactctgtttggccgccctcgagcaagcattagattcaaaatctgctgaatgggattcccgttacgccgtcggagttgtgctggcatcaggaggatatccagacttatatgccaaaggagatgttatcagtggaattcctaaatcgactaaacatcaaaaagtctttcatgcaggtacctccgaacaagaaggcaacattgtcaccagtggtgggcgcgttctctgcgcaactgcattgggcattagtgtcagcgaagcccgggcagccgcttatgagctggtaaacagcatcaactggaaaaatgtctatttccgaacagatattgcctatcgcgctatagcgcgagaaaatacctgaa

SEQ ID NO: 314454 - DNA, 751 bp, Unknown
  Bacterial polypeptide expressing nucleotide sequence isolated from the Sargasso Sea
ataaaagtgtttgggcccagaaagggagctgctcggctagagggatcaaaaaccttcgcgaaggacttttttataaaatatggtatacctacagcaaattataagtcttttgataatcatcatgatgccctgaagtacctcgacaagattgatttcccatcggttgtaaaagctgatggccttgctgctggaaagggagttattatttgtgatgatcgagaagctgcagaaaaagcccttgaagatatatttgaatcaaatgcctttggggatgctggaaatagagtggtaatcgaagactttttgaatggagaggaagcaagctttattgctgttgtcagtgatgatcaaattattcctcttgcaacaagccaagatcataaagctgttggagatggagatgttggattaaatactggaggtatgggtgcttactcccctgctccaattgtcacagatgagattcacaaaagagttatcgatgaggttatgcttccaacaatgaatggattaaaggctgaaggatttccctatcttggttttttatatgctggcctaatgatagaaggagatgagataaaagtcttagaatttaattgtaggtttggcgatccagaaactcagccaattatgctcagattagaatctagccttacaaatttatgtcttgatgcgattaataaaaaacttaatgcccatcaagttgaatggtcatcaatgcactcttgtggagtagttttagcatcgtcag

SEQ ID NO: 314455 - DNA, 739 bp, Unknown
  Bacterial polypeptide expressing nucleotide sequence isolated from the Sargasso Sea
atgaatgtaggaattattggaagtggtggaagggaacatgcgatttgttttatgctaaataaatcaaaaaaagtgttcaaaatttattgctttccaggtaatgcaggcacaagtctaattgctcagaatgtcaatatagatcctgataacttttctgaattagaaaagtattgcgtagaaaatgatataaaaatgttagttgtaggaccggagaaacaattggtaaatggaattgttaatcattttaaaggtaaatctattaaagtgtttggcccagataaaatatcttcaaaacttgaaggttcaaaaatatttactaaaaaaatttgtcaaaaaaaggatattcccacatcaaagtttaagatttgtaaaagtttgagtgaaacattagaatatttaaaggacagtgatttccctctggtcatcaaagctgacggactagcatcaggaaaaggtgtttatatatgcaaaaatttcgatgaagcaaaaatagcttctgaagaaatttttaatggaaaatttggttcagctgaacaaattttagttgaagaatttttagatggtgaggagatgagttattttgtagtaactgatggaaagaattataaattttttggttcagctcaagaccacaaaagagtcggtgagggagatacaggtaaaaatacagggggtatgggttgttactcaccttcaagacttttaaatgatcatctagaatcaaaaattaaacaaagat

SEQ ID NO: 314456 - DNA, 858 bp, Unknown
  Bacterial polypeptide expressing nucleotide sequence isolated from the Sargasso Sea
caccggggaattcctgggatttccaaaatagccgaatgtgttcccattgccgtcaatcaggttgatcaactggctgaatatgctgaatcccgaaaaattaatctgaccgtggtcggaccggaggaacctctggtattgggtgtggtcgatgaattcaaaaaacgcggattgaaaatttatggccctgatcgtcagtctgcaaaactcgaaggaagtaaagcctatgccaaatcagtgatgaagcgtttcggcattcctaccgccagttaccaggagttcacggattttgaacatgcccttggttatctccgggtccaaggtgccccgattgtgatcaaggccgatggattggctgccggtaagggagtcacggtggcagaaacccagcaagaagcggaagcggctttggacgatgccctaaggcagggaatttttggagaagctggacataaggtggtgatcgaagaatttcttgaaggtgaagaaatgaccatacttgcctttgtcgatggggaaacggtactccctcttgttccctctcaggatcacaaaccgatcttcgatggagatcgtggaccgaataccggagggatgggagcctattcccccgtaccccaacttgaacaatggcttacggagattcaacgtctcatcctgaaacccctggcaaagggtctggctgagtctggacagccttatcgtggtttactttatacgggtctgatgctgaatgaatcaggtcctaaggtggtggaattcaatgtccgtttcggagatcctgaggcccaggttgtacttcccttgctggaaaatgaccttgttgaaatcctttcggcatcttgtgagggaagattgaat

SEQ ID NO: 314457 - DNA, 736 bp, Unknown
  Bacterial polypeptide expressing nucleotide sequence isolated from the Sargasso Sea
ggaggaagagaacacgcgctggtctggaaactgaaccagagtgctcatgtagagaaaattttttgtgcaccggggaatcccgggatttccgaaatggccgaatgtgttcccattgccgccaatcaggttgatcaactggctgaatatgttgaatcccgaaaaattgatctgaccgtggtcggaccggaggaacctctggtattgggcgtggttgatgaattcaaaaaacgcgggttgaaaatttttggccctgatcgtcagtctgcaaaactcgaaggaagtaaagcctatgccaaatcagtgatgaagcgtttcggcattcctaccgcccgttatgaggagttcacggattttgaagatgcccttggttatctccaggaacaaggtaccccgattgtgatcaaggccgatggattggctgccggtaagggagtcacggtggcagaaactcaggaagaggcccaagccgctttggatgatgccctaaggcagggaaatttcggagaagctggacaaaaggtggtgattgaagaatttcttgaaggtgaagaaatgaccatacttgcctttgttgatggggaaacagtcctccctcttgttccttcccaggatcacaaaccgattttcgatggagaccgtggaccgaataccggagggatgggagcctattctcctgtaccccaccttgaacaatggtttaaagagattcaacgtctcatcctgaaacccctggcaa

SEQ ID NO: 314458 - DNA, 589 bp, Unknown
  Bacterial polypeptide expressing nucleotide sequence isolated from the Sargasso Sea
tatgaaagttggagtaataggaagtggtggaagagagcatgccatatgtatatctttaaaaaaatccaaaaatattgacaaaatttactgttttccaggaaatgcgggtactagctttattgctgaaaatattgagattgatctgaataattttgaggaattaaaaagagttataaaagaactaggtatagatataataatagtaggtcctgaaaaacctttggtagatggaatagtcgacttcttggaacaaaataaaattaaagtctttggtccagatcgtgtttcttcacagctagaaggttcaaagattttcacaaaaaatttatgtaaaaaatataatatccccactgcaaaatttggtgtcttcaataccattcaagacagtctttcattcttaggtgagtgtaaacttcctatagttgtgaaggctgatggtttagcagcgggtaagggtgtctatatttgtgaaactcttgatcagtcaaaaaaagcagttgaagaaattttcaatggaaagtttggagaagcgaaacaaattttaattgaagaatttttaaaaggcgaagaaatgagtttctttataatt

SEQ ID NO: 314459 - DNA, 661 bp, Unknown
  Bacterial polypeptide expressing nucleotide sequence isolated from the Sargasso Sea
gatgatatcgtcaaacatgtttttgtctgtcctggtaacgcaggaacccatcttgaggataaagtaagcaatattgaacttaacttaaatgaatttagctcaatagaaaaattttgtttagaagaaaaggtagagcttgtcattattggtccagaacaaccacttgttgatggtttgactgattttttacagagtaaaaatattaaaactttcggtccatctaaaaatgcagctcaattagagggttcaaaaaccttttctaaagatttcttcgtaaagtacaacattccaacagccaaatacaaatcgttcgacaactttgaaagctcattagaatatctaaatgagatttcttttccaactgtcgttaaagctgacggtttggcagctggtaagggcgtcataatttgtcaaaactctgaagaagcaataaaagcacttgatagcatttttaatgataaggcctttggaactgctggtaatcgagtagttattgaagaatttttagaaggtgaggaagcatcatttattgctgtagtaagtaaagataagataattcctttggcaacaagccaagatcataaagctgttggagatggtgatgtcggtttaaataccggaggaatgggcgcttattctccagcaccaattgaactgaaga

SEQ ID NO: 314460 - DNA, 932 bp, Unknown
  Bacterial polypeptide expressing nucleotide sequence isolated from the Sargasso Sea
catcccaacagcaagctatcggagctttactaatgcaaatgaggctaagaaatacattgaggaaaatgagttgcctcaggttattaaagctgatggtcttgcggccggaaaaggcgttgtcattgtagaagactatgagacagctactaaaaccatagatgaatttatcagtgaaacaaaatatggtgaagcaagtaggaagataataattgaggatttcctagaaggccaagagcttagttatatcgtcatggtagatggaactgaatatctaccacttgcaacatcacaggatcataaaactattggagaaggtgatactggactcaatacaggaggtatgggagcttattctcctgttccatttgttaatgatgaactggatatgataatcaaaaaaaaggttatagagccaactgttataggtctttctgaagatggaattgctttcagaggattcctttatgcaggtctcatgattgactctaatttgaatccaaaagtactagagtataactgtagatttggtgatccagaaactcagccaataatgttaaggctaaaatcagaccttatagatatgattcaaacttgcttctctggaaacattagtaaatatggtattgagtgggataataaatcagcaatgggagttgttatgtctagcattggttatccagaatcatatgaaactggcaaagaaatttatgggctagataaactttttaacaaagatgaaactaaagttttccattccggcactatcattgaaaatagtaatattcttactaatggtggaagagtcttatgtataactgccctcggtgatggtttgtgtgaatgtcaagagaatgcttattctgcagttaagcaaataaattgggatgggaagtattacagaaaggatattggctttagagtgatgaaataaa

SEQ ID NO: 314461 - DNA, 895 bp, Unknown
  Bacterial polypeptide expressing nucleotide sequence isolated from the Sargasso Sea
aatgaatatcttagttgttggttcaggaggaagagagcatgccttgtgttgggctataaaaaaatcacctctggtaaaaaaattgtactgcactcctggaaacgctggaataaaaaatctcgctttttgtattgaaacaaataatcctagtaatgattttattataaaaaaatgcaaggaatataaaattaacctagttgtaattggaccagaaactaatcttgtaggaggtttagccaatgatctaatcaaagaaaaaattaaagtttttggacctacaaaagaggcagctattttagaaagttcaaaaagtttcactaaaagtctttgtactaagtataatattcccacagctaaacataaatcatttaataatagaaaagatgcatctgaatatataaaaaatcaaatgtttcccttagtaatcaaagctgatgggattgcagcaggtaaaggagtgattatagttaagtctaaaattgaagcaatctcggttattaatgaaattttcgatggtaaattcggagatgcaggaaatactattgttattgaagaatttttagagggagttgaggcaagtttttttgcaattacagacggaaaaatgattatgcctttttccacagcccaagattataaaagagcttttgatggcaatattggacccaacacaggtggtatgggagcattctcgccggcaaaaaatattagtacaaaattacaagaaaaaattatggatttgataatttatccaacatttgatgctttgaaaaaagaagatattttatataaaggaatactctatgcaggcctgatgataaaagacaataaacccaaattaattgagtataatgcaagatttggtgaccctgaatgccaagtgattttatcaaga

SEQ ID NO: 314462 - DNA, 776 bp, Unknown
  Bacterial polypeptide expressing nucleotide sequence isolated from the Sargasso Sea
aaataaaggcgggcgttttgtaattgaagaaaagtttgttggagaagaattctccctcatgagtttttgcgacggtaaagtattaaaacacatgccggctgtccaagatcataaaagagcataccggggagacaccggtcccaatactggcggaatgggtacctactctgatgcaaaccactccctgccatttctaaatgaaaatgatatagcacgtgctagaatgataaatgaaaaaaccgcagaagcattacaaaaggaagttggcgaaggatacaaagggatactctatggtgggttcatggcaactgccaatggcgtaaaactaattgaatataatgccagattgggagacccagaggcaatgaacgtgttgtctatccttaaaacagatatcattgatattttcaactcaatagggagaggaactcttaatgaattaagtatcgattttgataacaaagccactgtgtgtaaatatgcggtgcctgagggttatcctgataagcccataaaaggtaaaaaaattgatatcacatctgtttcaaataaggattctttattttttgcatcggttgacattgaaggtgaccatcttattgaagcaggaagtagaaccgttgccgtggtaggcattgcaagctccatatctcaagcagaaaagatagctgaagaagagatatctaaggtagatggccctctcttccacagagaggatattggaacagatgatttaatcagagcacgcgttgaacatatggaatcattaaggtgat

SEQ ID NO: 314463 - DNA, 925 bp, Unknown
  Bacterial polypeptide expressing nucleotide sequence isolated from the Sargasso Sea
ggttaccgcgctttattgtgccccaggaaatgctggaatttctcaagaagcagaatgtgtccaaatcgctgcggaggatatcgagggcttaattcgattcgtacaagacaaccaaatcgactttgtagtcatcggtccagaagcccccctagtcgcaggcctttccgacaagcttgccgaaatcaatgttaaatcatttgggccaagtgccgacgcggcagtgatggaaggctcaaagggtttcatgaaagatttctgcgcgcgacacgatattccaaccgctaactatggacgttttaccaatagcaagttggcgaaagattttatcgccgaaaacggtgtgccgattgttgtaaaggctgatggattagccgcggggaaaggcgtgataatcgcggagacaattgaacaagcaaatgcagccgttgacgatatgttagaaggtgatgcctttggtgcggcaggggcagagctagtaatcgaagaatttctaggtggggaagaagctagtttttttgtcctatgcgacggtgaaattgccctccccttagcttcagcccaagatcacaagcgtgtcggcgatggtgataccggacccaacacgggtggtatgggcgcatactcccctgctcccattataacgcagtcgatgaccgaaaaaatcatggagcgtattatcaagccgactatattaggtatgaaattagagggtaagccatataaaggcgttctatatgctgggttaatgatcgaaaatgatcagcctaagcttctagaatataatgtccgatttggtgaccctgaatgccaagtactaatgatgcgtctgatgtcagacctgttacccgcgctgatagcctcatccgatggcgtattaaaagactttgatttgcgctggtatgaagaaaccgcgttaacggtcgtc

SEQ ID NO: 314464 - DNA, 856 bp, Unknown
  Bacterial polypeptide expressing nucleotide sequence isolated from the Sargasso Sea
atgattatatgtgttataggaagcggtggaagagaacatgctatatgtaaatcaattcaaaaatctccaaaagtaaaaaaaatattttgtttacctggaaatgctggaacacaagagctagctgaaaatatagatttaaatattgatgatcatgatgaattaataaaatttttaaagaaatcaaaagttgatttggtaatagtaggtccagaaaaacctttggtaaatggtataacgaacgtattggaaaataataatattaaagtttttggaccaagaaaagtgccttcacaattagaaggatcaaaaacatttactaaggaaatttgtaaaaaatataatattccttcagctaagtttggagtttttgaaacaatcgatgaaactttaaattttttaaaaaaatctaattttccaattgtaattaaagctgatgggctagctgctggcaaaggtgtttatatttctaaaaattttcaagaatcagaagatgctgttaaagaaatatttggaggaaagtttggaaatgcaaaaaaaatacttgtagaagaatttcttaatggtgaagaaatgagtttttttattatttgtgacggaaaaaattttaaagtttttcaaacagcacaagatcacaagagagttggggaaggagatgtgggaaaaaatactggtggcatgggatcatatagtccttcaggattaataaataaaaatttagaaaacaaaataattaataaaattattacaccaactctaaaggcaattaatgatttgggtgagaaatataaaggatttttatatgcgggtttaatgatatcaaataatgaacctttcttaattgaatataatgtgagaa

SEQ ID NO: 314465 - DNA, 973 bp, Unknown
  Bacterial polypeptide expressing nucleotide sequence isolated from the Sargasso Sea
gttgctccgggcaacgcctggttcagccatcgaagaaaacatcgagaacatcgccatcgacgtattggacttcgatgcgctcgaaagcttcgctaaagaaaacgaagtaggcctgaccattgttggcccagaagctccgttagtcgatggcgtggttgatcagtttgaagccgctggcctgaaaatctttggccctaaaaaaggtgctgcgcagctggaaggttccaaagccttcaccaaagatttcctggcacgccaccagattcctacggcggaataccagaacttcaccgacgttgagccagcactggcttacctgcgagaaaaaggcgcgcctatcgtggttaaagccgacgggcttgctgcgggtaaaggcgtgatcgttgccgaaactcttgagcaggctgaagaggctgtgaaagacatgctgtctggcaacgcctttggtgatgcaggctgccgtgttgtaatcgaagagttcctcgctggcgaagaagcgtctttcattgtgatggtcgatggcaaaaacgtgctgccaatggccaccagccaggaccacaaacgcgttggcgataaagatactggcccgaacaccggtggtatgggtgcctattctccagcgcctgtcgtcacaccagaaattgatgcccgcatcatgaaagaagtcatcatgccgaccgttgaaggcatggccgctgaaggcaacgactacacaggtttcctgtacgctggtctgatgatcgacgagtctggtgcgcctaaggtgatcgaatacaattgccgtttcggtgatccagaaactcagccaatcatgctgcgtatgcagtccgatatggtggcccactgtctggccgctctggaaggcaagctggattcagaaactgccaagtgggacccacgtcctgcactgggtgtggttctggcagccgcaggctacccagcggactacccgaaaggtgatgtcatctctcta

SEQ ID NO: 314466 - DNA, 775 bp, Unknown
  Bacterial polypeptide expressing nucleotide sequence isolated from the Sargasso Sea
gatgattttgatgatgctttaaattatcttgatgaaattgattaccctaccgtagtaaaggctgatggattggcagctggtaaaggagtaattatctgtgagaataaaaatgaggcgatagaagctctccaaagtattttcaaagataatgcttttggttctgcaggtaataaagttgtgattgaagaatttttagaaggtgaagaagcatcgtttattgctgtcgtaagtaaagacaaaataattccactggtaacaagtcaggatcataaagctgttggagatggtgatgtgggtttaaatactggcggcatgggtgcatattctcctgctcctgtagttactgatgagataaatagaaaaattcttgatgaagtcatgtatccaactatgcatggattaattcaagaaaattcgccttatcttggatttctttatgctggcttaatgataaaagataatgaaattaaagtacttgaatttaattgcagatttggtgatcctgagactcaaccaattttattaagacttaaatcgagtttggtagaactttgtaaagcagcaattaacgataatcttgattcatataatatagagtggactgaagaacattcatgtggagtagttattgcatcaaaaggatatcctgaaaattatgaatctggaaaagaggttagtattgatcaaaataaaagtgaaaactcaaaactatttcatgctggtacaaaatttgaaaataacaaaatttttacaaatggtggaagagtcttttgtg

SEQ ID NO: 314467 - DNA, 583 bp, Unknown
  Bacterial polypeptide expressing nucleotide sequence isolated from the Sargasso Sea
tatgggggcttactcccctgctccaatagtaactgatgcaattcataaaaaaatacttgatgaagttatgtatcctactatgcagggcttaatagatgaaggtactccatacctgggttttctttatgcaggattaatgattaaagatgatgatataaaagttcttgaatttaattgcagattcggtgatccagaaactcagcctattttattaagattaaattcaagtttggttgaactttgtttatcagcaatcaatgatgatcttgattcatattctatcaagtggaccgataaacattcctgtggtgttgtaattgcatcggagggttatccagaaagttatgaatcaaataaagaggtatcattcgaatcttttgaagcagaaaatgcaaaattgttccatgcaggaactgaatataaaaacgataaagttttaacgagtggtggtagagtattttgtgccactgcattaggaaacaatttgaaagaagcacaagaaaacgcatataatctcgtgagcaaagtgagttttgaaggtgctttcttcagaaaagatattggaaataaaggaattaaatga

SEQ ID NO: 314468 - DNA, 601 bp, Unknown
  Bacterial polypeptide expressing nucleotide sequence isolated from the Sargasso Sea
atgatagttggagttattggaagtggtgggcgtgagcacgcaatatgttcaaagttatatatttcaaaaaaaatttctaaaatatattgttttcctggcaatgcaggcacttctaaaatagcacaaaatatcgacatagatttaaatgacttttcaaaattaaaaaaacttatatctaaatataagattgaattgttggttattggtccagaggaaccattggtcaatggtatgactgatttttttgaaaatgaaaaaattaaagtttttggtcctaataagcaatgctctagacttgaaggttccaagatatttacaaaaaaaatatgtgaaaagtacaatatacctactgcaaagtttggaacattttcaaacttaaatgattgtattttttttttaaataaaaataaatttccaatcgttgttaaggctgatggtcttgctgctgggaaaggtgtaagtatttgtaaaaacttaattgaagcaaaaaaatcggttcaagaaatatttagtggaaaatttggaaaagctaaagaagttcttattgaagaatttttagatagagaagaaatgagtttttttataattagcgatggtatta

SEQ ID NO: 314469 - DNA, 627 bp, Unknown
  Bacterial polypeptide expressing nucleotide sequence isolated from the Sargasso Sea
agcgggtcggagatggcgacaccggattaaatactggaggtatgggagcttattcaccggcaccaattttaaacgaagaagtattaagtaaaactattgaaaggattatacgcccgactatgcgagaaatggtaaggcgaggcttgccatttacaggcgttctttacgcaggccttatgataaaggattctaatcctcgtctggttgagtataatgtaagatttggtgacccagaatgtcaggtcttgatgatgcggctaggtggacaaattttagatgctttactgtctactgccaaaggcaatttaagtgatgtaaaaattaattgggctgatgactattctttgacagttgttatggctagtaaaggatatcccggttcttatgaaaaaggtacagagatagttggactagctgatttgccttccaatagtaattttatgtgtttccacgctggaacagctgagaagaatgaaaaattagtagcaaacggtggacgtgttttaaacataacaacaagagcagaaaccttaatcgaagctcaaaagattgcatacgaaatgattaaaaatattgattggccagaaggtttttacaggaaagacattggctggagagcgctatgac

SEQ ID NO: 314470 - DNA, 588 bp, Unknown
  Bacterial polypeptide expressing nucleotide sequence isolated from the Sargasso Sea
aatattgacataaataattttaacaaaatttatgaatttattgtcagtttaaatatagatttaattattgttggtccagaaaaacctttagttaatggaattgtagatttttttgataaaaaaaatattaaaatttttggaccaactaaaaaagcagcacaattagaaggatcaaaaatttttactaaacaaatttgtgaaaaatataatattccaactgcaaaatttggaatatttaaaagtaaagaaattgctttaaaatctttaataaatgtaaaaatgccaattgtaattaaagcagatggtttagctgaaggaaaaggagtttatatctgcaaagatctaaaggaatcaaaaattgctattaaagaaattttcgatggaaagtttggaaaagcctatcaaatattaatagaagaatttttagaaggtgatgaaatgagttattttgttatctctgatggagtcagttttaaaaatttcaatactgctcaagaccacaaaagagttgggaaaggagatacaggaaaaaatactggaggaatgggggcttattcaccatcgagtattttgaactctaatttagaa

SEQ ID NO: 314471 - DNA, 903 bp, Unknown
  Bacterial polypeptide expressing nucleotide sequence isolated from the Sargasso Sea
aaggcatcacaaattgaaggttcaaaaatatttatgaaaaaaatttgtgaagaatttaaaataccttcagcaaaatttaaagaaattaacaacataaatgatgccaaaaatataattacagaatttgaattaccaattgtagtaaaatctgacggattagcttatggaaaaggagttacaatttgcaattctagagaagaagccattgatgatattagtaaaatattaaatggtaaatttagtagttcaaaaaaagttatcatagaagaatttttaaaaggagaagaagcaagttattttgttatttctgatggtaataattttttacctattggaactgcacaggatcataaaagaattggagaaaatgacactggattaaatacgggaggtatgggtgcctattcaccatcttttctgataaacaatgaaattgaagaaaaaataaaaaataaaattatagctccaacaattgatggtatgaaaaaaaaaggtattccattcaaaggaattctttatgcgggtttaatgatttacaaatctgaacctaggcttattgaatataatattagatttggagatcctgaatgccaggtattaatgatgagattagaagaagatcttttaaatttaatactttcagctgttaataataatttacaaaaaaagaaattaaattggtctaaagagccaggaataacaattgttgctgctagtaagggatatccagaaaaatatgaaaaactttatgaaataactaatcttaaacaaataaaaaaaaatttgaaacaacagttgtttcatgcgggtacagttaaagtaaatgataatattttaaccaaatggtggcagagtattaaattcaaccggttatcgccaagttcattatctaaagcaagagaa

SEQ ID NO: 314472 - DNA, 914 bp, Unknown
  Bacterial polypeptide expressing nucleotide sequence isolated from the Sargasso Sea
ggagtttctctttaggcatgaaattccgactgctaagtataaaagctttacagaaacctcggatgctttaaattatgtgaaggaattggaatttcccttggtcattaaggctgatgggctagcatccggaaaaggcgtttttattacacccgatcttactgacgccgagcaagtgattaggacgatactttctggagacaaatttggagaggctggaaaccaaatagtagtcgaagaattcttagagggagaagaggtaagttatatctgtatgacggatggatatcattgtgtgccttttgcttcatcacaggatcataaggcaagagataatggtgatttgggaccgaatactggaggaatgggggcttactcaccagcccctttgttgaatagtgacttggaaaaacgagttctaaaagaaattatctaccctactctttctgggcttaggagagagggtaggctttataaaggcttcctgtatgcagggctaatgataagctccggaggggaaccaaaagttttagaattcaattgtcgttttggcgatcctgaggcccaacctattttatctcgtctaaacagcgatttggtggacgcttgcttaaaggccctggagggacaagttgaaggtctagagttggactttgaccccaaaactgccttaggagtcgtcttggctgctaacggataccccgaatcatatcagaccggctggcccatagaaggcttgaaaaattttcatgatcgaaagggtttaaaattatttcatgctgggacaaagctttccggtagagatgtgctttcaatgggaggaagagttttgtgtgtggttggtgttggacataatgttgaagaggcacaacgggtatcatatgaaggagtaagtttagtagaatctacgaacctgt

SEQ ID NO: 314473 - DNA, 658 bp, Unknown
  Bacterial polypeptide expressing nucleotide sequence isolated from the Sargasso Sea
tttgggttccgcacaagatcacaaaaaagttggagaaggagatacggggcctaatactggaggtatgggtgcttattctccagcaagaaacttaacaaagaatttagaaatcaaaataaagaaaaaaattatagagccaactcttcgagcaatgaaagcccttggacattcttatactggttttttgtacgcaggtttgatgattaaggacggtgaaccatatttaatagaatataatattagaatgggtgatccagaatgccaagtgctaatgatgaaattgaaaacagatttattgacgatagttgatgcagcaatagaaaatgatttggctgggttaaaaattgattgggatgataaaaaatgtatcactattgttttatgtgccaaaggatacccaggagaatatattaaagataaagaaattaaaaatttatcaaatattcatctagacaaaaataatcaaatatttcatgctggtacttacgaagataaagataaaattttttcaaaaggcggtagagttttaaatataacttcatcaggcaatgatcttaatgaagccagagataattcactaattaatctagcaaaaataaattgggatcatggtttttttagaaaagatattggctggagagccattaaaaaaaaatga

SEQ ID NO: 314474 - DNA, 727 bp, Unknown
  Bacterial polypeptide expressing nucleotide sequence isolated from the Sargasso Sea
tatgaatattgctttaataggtagcggaggtagagagcatgttttatgccaaaaaatatgtgagtcaaaatcatctaaaaacattctatgtattccaggaaatgcaggtactgcaaaaattgctaaaaatatagacatagattttctaaatttcaaaatattacttaagaccattaaaaatcataaaatagatttagtaattgttggcccagaagaacctttagtaaaaggaatggttgatttcttaaataaacataaagttaaagtttttgggccaaataaatatgcagcaaaattagagggttcaaaagcatttatgaaatctatttgcaaaaggtacaaaattccaacagccaaatttaaaacatgtaaaaataaaaaagatgtaattaaatttttaaaaaagactcaatttccattagtcgtcaaagcagatggtttagctgctggtaaaggggtaactatctgtaaaacaaaaaaagaaatattaaatgtttcaaacgagatatttaagggtaaatttaaaacatctaaaaaactagtccttgaagaatttttaaaaggagaagaggctagttattttctaattgtagacaaaaaaagttataaattttttggttcagcccaggatcataaacgtgtaggtgagagggaaaaaggacctaatactggagggatgggagcatattctccagctccaattattaataaaaatttggaaaaaaag

SEQ ID NO: 314475 - DNA, 683 bp, Unknown
  Bacterial polypeptide expressing nucleotide sequence isolated from the Sargasso Sea
catgaatgttggaataataggaagtggaggtcgtgagcatgcaatcagctatagtttaaaaaattccaaaaaagtaaatacaatttactgcatacctggtaacgcaggaactaaagaaatagcaataaatatagacattgatttaaaagactttgatcaaattaaaaatttgattattgaaaaaaatattgaatttttaattattggaccagaaaaaccattggttgatggattggtagattttttgaaagatacaaaagttaaagtatttgggcctaacaaagcagcttcacaacttgaaggatcaaaaatttttactaaaaatctttgtaaagaatttaacattccaacagctaattttggaatttttcaaaatccatcagaggctaaaatatttttagaaaaatctaattttccaatagtaattaaagcagatggattggccgctgggaaaggagtttatatttgtaaaaatattagtaatgcagttcaagcagtcaaagaaatatttaatggaaaatttggtttagcaaaaaacgtattaatcgaggaatttctagatggagaggaaatgagtttttttatcatcactgatggcaaaacaatcaaaaaatttgaaactgcgcaggaccataaaagggtctttgaaggtgataaaggtaaaaatactggagggatgggag

SEQ ID NO: 314476 - DNA, 680 bp, Unknown
  Bacterial polypeptide expressing nucleotide sequence isolated from the Sargasso Sea
tatgaacatattggttgttgggtcaggtggaagagagcatgctctttgccactttatcgctaaatctcctatgtgtacaaaactcttctgtgctcctgggaatgctgggattttggataatgcgatttgtgttaaaataaatattttagacattcatgagctagtttcttttgcgttaagtgaaaacgttgaattagttgtaattgggccagaagctcccttggttgctggattgactgatagcatgataaaagcgggaatacacgtgtttggccccactaagaaggccgcacaaattgagggatcaaaagcatttatgaaaggcttatgctcaaaatatggtattccatcagcagcatataagctttttcaagatgcaaatagtgcaaaaaagtttgcaaagttaaccagtattccaatagtcgtaaaagcaaatgggctggcagctgggaaaggagtttttatttgtgagaatgtctcagaagcttttgatgcaatagattatatcatgatagacagggcatttggtgaatctgggtctgaagttataattgaagaattcttagaaggagaggaggtaagctttttcgcattagtgtctggcaacgatacaatgcctttaatttcggtgcaggaccataaaaaagcattagatggcgacaatggcctgaatacggggg

SEQ ID NO: 314477 - DNA, 472 bp, Unknown
  Bacterial polypeptide expressing nucleotide sequence isolated from the Sargasso Sea
atgattatttgcatcataggaagtgggggtagagaacacgccatttgtaaagcaatctctaagtccccaaaagtaagcaaaatatactgtctaccaggtaatgctggaactcaagaattagcagaaaatataaatttagatattaatgattttgaaaaaattttaaaatttttaaaagaatcaaaagttgatttagttatagttggtccagaaaaaccattagtaaacggcattgtagattacttggaaaataatagtattaaagtttttggtcctagaaaaataccatcacagttagagggttcaaaaacttttacaaaaaatatttgtaaaaaatataatattcctactgcaaacttcggaatttttgaaaaaaaggaagatgctataaattttttaaaaaattcaaaatttccaatagttattaaggcagatggattagctgctggaaaaggagtttatatatcaaaaa

SEQ ID NO: 314478 - DNA, 912 bp, Unknown
  Bacterial polypeptide expressing nucleotide sequence isolated from the Sargasso Sea
tatccattatataataaagtatacatgagaattgcaataattggtagtggaggaagagagcacgcaatttgtcaaaaaatttttgaatctaaaaaagtaactaaaattttatgcctacccggcaatggaggaacagaaaaaattgctcataatattaaagtcgatattaaaaacttcgaaaaaataaaatctattttaataagtgaaaaaatcgatttaacaattgtaggtccagaggagcctttggtaaatggtattgtagactttttgcgaaaaaatggtctacatgtttttggaccagataaattttgttcaaaattggaaggatcaaaaatatttacaaagaaaatttgtgaaatagaaaaaattcctacagcagactttaaaatttttaaagatataaattcttctttaaattatcttaaaaataaaaaattcccattagtagtaaaagcagatggattagctgctggaaaaggtgtttacatttgtgaaaattatatggatgcaaaaaaaggtattaacgaaatttttaatggaaaatttggtaaagcagatgaattgttaattgaggattttttaattggtgaggaaatgagtttttttataatatcagatgataaatcttttaaagtttttaatacagctcaagatcataaaagagtattcgaaggcgatgaaggaaaaaatacaggaggaatgggtgcttattcaccatcgagactttacaataaagatttggaaagaaaaattattaataaaataattcttccaacattaaaatatttaaaaaaagaaaatggaaaatatattggttttttatatgcaggattgatggtgaaagataatgagccatatctaattgaatataatgtaaggatgggagatccggagtgccaaaccattctgcca

SEQ ID NO: 314479 - DNA, 706 bp, Unknown
  Bacterial polypeptide expressing nucleotide sequence isolated from the Sargasso Sea
gaagaattaagttatttttcaatagttgacaaaaattcatataaattttttggttcagcccaagatcacaaaagagttggtgagggtgatactggtcctaatacaggaggtatgggtgcttattctccagcagaaattttaaatgataatcttgaaaaaaaaattaaatctaaaattattgatccaacattaacggcaatgaaagagttaggacaatcatacacaggttttctatatgctggtttaatgattaaaaaaaacgaaccatacttaatagaatataatattagaatgggtgatccggagtgtcaggtgattatgacaagattaaattctgatctatgcgaaattatagacgcggcaactaaaaataatttaaataacatagagataaaatggattgctgatagttcaattacagtagttttgtgcgcaaagggttatcctggaaaatatttaaaaaatagtgaaatccaaaatataccaaaagtaatttctgataaaaataatcaagtctttcatgctggtacatatgaaaagaataataaaatttattcaaatggaggacgtgtattgaatattacttctgtgggaaaaaatataattgaagctagagataaatgtttatctaatctaaagaaaataaattggattgatggtttttatagaaaagatataggatggagagctatttcaaaaaaatgag

SEQ ID NO: 314480 - DNA, 760 bp, Unknown
  Bacterial polypeptide expressing nucleotide sequence isolated from the Sargasso Sea
aatagggagtggtggtagagaacatgctttatgtttaaaaattagagaatcacgcttagtaaaaaatattatctgtttgcccggcaatgctggtacatccaaaattgctcaaaatatacctgtaaatatttcaaattttaaagaaatactaaaaatcgttaagttctttaaaattgatttagtagttgtagggcctgaagaacccttagttaagggtgttgttaactttctaataaagaacaaaattcaagtatttggtccaaataaatatgcctctaaactagagggttctaaggcttttatgaaagaattatgtagaaaaaaaaatatacccactgcaaattttaaaatttgcactaatgcaaaagaagtcaatatttttatcaaaaaaaattcttttccaattgtggtaaaagctgatgggttagccgctggtaaaggtgtaacaatttgtaataatgaagatcaaattttaaaaattaccaatcaaattttcaaaggcaaattcaagagctcaaaaaaattagttctagaagagtttatagagggagaagaagtgagttattttttgattgttgacaaaaataatcatttgttttttggctctgctcaagatcacaaaagagtaagggaaaatgataaagggccaaacactggggggatgggagcatattcacctgcaatgattattaataaaaagttagaaaataaaattataaatcgaatagttctgcccactttaaatgagttaagaaataaa

SEQ ID NO: 314481 - DNA, 811 bp, Unknown
  Bacterial polypeptide expressing nucleotide sequence isolated from the Sargasso Sea
ctggtattgggcgtgattgatgatttcaaaaaacgcggattgaaattttatggccctgatcgtcagtctgcaaaactcgaaggaagtaaagcctatgccaaatcagtgatgaagcgtttcggcattcctaccgcccgttacgaggagttcacggattttgaagatgcccttggttatctccgggtccaaggtgccccgattgtgatcaaggccgatggattggctgccggtaagggagtcacggtggcagaaacccagcaagaggccgaagccgctttggatgatgccctaaggcagggaatttttggagaggctggacaaaaggtggtaatcgaagaatttcttgaaggtgaagaaatgaccgtacttgccttcgtcgatggggaaacagtccttcctcttgttccctcacaggatcacaaaccgatcttcgatggagatcgtggaccgaataccggagggatgggagcctattcccccgtgccccaccttgtacaatggcttacggagattcaaagtctcatcctgaaacccctggcaaagggtctggctgagtctggacagccttatcgtggattgctttatacaggtctgatgctgaatgaatccggtccaaaggtggtggaattcaatgtccgtttcggagatcctgaagcccaggtcgtacttcccttgctggaaaatgatctagtggaaatcctgtcggcatcctgtgagggaagattgaatgaggtcgaacttaaatggaagaaggaagcctcggtatgcgtgattgcagcagcgccgggctaccccggtcctcccactaaag

SEQ ID NO: 314482 - DNA, 955 bp, Unknown
  Bacterial polypeptide expressing nucleotide sequence isolated from the Sargasso Sea
tcgatttgctataaattaaaacaatctgctaaaatcaataaattgatttgtattcctggaaatgcgggtacaaaaggcttggctgaaaatatcaacattgatattaaaaactttcaagaaattcttaaaattattaaaatcaaaaatatagatattgtaataattggtccagaagaacctctagtgaatggtattgtagactttcttcataaagaaggcgtaaaagtaataggtccagacaaatttgcttcgaaactcgagggctctaaatcgtttatgaaagaattgtgtaaaaaaagaaatataccaactgcaaaatttggagtatttgaagattacgatagtgctgttaattttcttttaaataataaaacacctatagttatcaaagctgatggtctggctgcaggaaaaggtgtttcaatttgtaaagatatagaagaggcaaaaaataaaattaaagaaatcatagaagggaagtttaaatcatctagaaaagtgattttagaagaatttttagagggagaagagttaagttactttattatagcggataacaactgttataagttttttggatccgctcaagatcataaaaaagttggcgaaggagatgttggtccaaatacaggtggaatgggggcttattcaccttcaaatttattaaacgacgaacttgaaaataaaataaaaaataaaattattgaacctacaattgaagaaatgaaaaaattgggccatccatataaaggttttctatatgcaggattgatgatttcaaatggtgaaccatatttgattgagtataatattagaatgggtgatcctgaatgccaagttttaatgatgagattgaaaacagatttattagatatttttgatttagcaacaaaagatgaattaaaaaaaataagtattgaatggtataatgatgaggcaattacagttgttttgt

SEQ ID NO: 314483 - DNA, 620 bp, Unknown
  Bacterial polypeptide expressing nucleotide sequence isolated from the Sargasso Sea
tatgaatttagctatcataggaagtggtggtcgagaacatgccatttgctacaaattaaaacagtcaccaaaaattaaaagattaatctgtattcctggtaatgccggtactcagaaaatggcggaaaatataaaagaagatatttcaaattttgacgctctctataaaataattaaaaaacaaaatgttgatattgtgatagttgggccagaacagcccttggtagacggtcttgtaaattatttaaatcaaaaaaaagttagagtatttggtccagataaattttcatcacaattggagggttctaaagcgtttatgaaaaatttatgtaaaaaaaataatattcctactgcaaattttggtatttttagtaattttaatgacgcatcaagttttataaaaaaaaatggagttccaattgttgtgaaagctgatggtttagcggctggcaaaggtgtatcaatatgcacatcaattgacgaagctttaaaaaatactaaagaaattttaaatggaaaatttaagtcttcaaatcgagttgtattggaagaatttttggagggagaagagttaagttattttgttatagttgataataattcttaccatttttttggtt

SEQ ID NO: 314484 - DNA, 541 bp, Unknown
  Bacterial polypeptide expressing nucleotide sequence isolated from the Sargasso Sea
atgaatttagctgtcataggaagtggtggtcgggaacactcaatttgttataagctaaaacaatctccaaaaataaaaaaactaatatgcataccaggtaatgcgggtactgaaaaagtagcagaaaacataaaagaagatatttcaaattttgacgctatttatgaagtaataaaaaaaaaaagtatagatcttgttatcgttggtcctgagcagcccttagtggatggtttggttgattatttaaataaaaaagaaattagagtatttggcccaaatagattttgctcacaattagaaggttctaaatcatttatgaaaaacttgtgtttaaataacaatatacctacagccaaatttggaatatttaataattttgataatgcgtccaattttataaaaaagcatggagctccaatagttgtaaaagctgatggtttagcagctggaaaaggagtttctgtatgcgcgactacgaaagaagccttaaaaaacacaaaagaaattttggaaggtaaatttaaatcttcaaacaaagtag

SEQ ID NO: 314485 - DNA, 743 bp, Unknown
  Bacterial polypeptide expressing nucleotide sequence isolated from the Sargasso Sea
catgaacgttcttgtaattggtaatggtggaagagaacacgcactatgttatggtataaaacaatctcctaattgttctaatttatattgtattcctggaagtgatgctatcagtgaaattgcttcatcgattatcatagatgttaatgatcatgatgctattattcaattttgtttagaaagtaaaattgatcttgtggtgattggtcctgaacaacctttaactaaaggcttatcaaatcttttaattaataattctatattagtttttggtcctgatcagatgggagctgaattagaaaaatcaaaaaaatttacaaaagatatttgtaaaaaattaaatcttaaaacagctgcttatgacgtatttgataactatgataatgccttaaatttttgtcaaaaccaatcttatcctcttgttattaaagctgatggtttagcagcaggaaaaggtgtaattatttgtcaatcaaagggggatgcaaaagatgcactgattaaatgttttaaagataattcttttggtgatgctggttcagttgttgttattgaggagtttttagttggtgaagaggtaagtttattttcacttgtcgataaaaatggatttgtgttgccgcttacaacagcacaagatcataaaaaaatcttagaaggagaaaaagggttaaacactggcggtatgggagcttacacacctgttccttctatttcatcaaataaaatgaatgaattatcca

SEQ ID NO: 314486 - DNA, 727 bp, Unknown
  Bacterial polypeptide expressing nucleotide sequence isolated from the Sargasso Sea
aaagcaattattggaggaatttttagatggcgaagaggcaagttattttgtgatcacagatggagaaaattttaaacagattggaacagctcaagatcataaaagaattggcgaaggcgatactggattaaatacaggaggtatgggagcatattctccatctttattaataaatgaagaaattgaaaaaaaaataattaataaaataatactaccaactatccaaggtatgaaagagcttggatgtaaatataaaggaattttatatgcaggattaatgataaaaaataatgaacctaagcttatagaatacaacataagatttggtgaccctgaatgtcaggctttaatgctgcgactggaggatgacctgttagatataatcctttcctctattgatgaaaagcttgataacaaacctataaagtggagccaaaacccaagcataactattgtagcagcaagtaaaggatatcccggaatttatgaaacaaaaaaagaaataaaaaacataccaaaaacttatgacaaaaatgagtatatttttcatgcagggactacagaaattgatggaaaaatttttactaacggtggtagagttttaaactcgactgtatccctaccatccatgaaggcctcaagagatagagcgataaaactattgaatcaagttgtgtgggaaaataaatattttagaaaagatattggatggagagtaataaagtaa

SEQ ID NO: 314487 - DNA, 892 bp, Unknown
  Bacterial polypeptide expressing nucleotide sequence isolated from the Sargasso Sea
tcagctaaaaattatattcaggaaaatgacttaccattagtgattaaagccgatggtcttgctgctggaaaaggtgtagtcattgtagaagactatgtaaccgctaataaaaccattgatcaatttattggtgaaaaaaaatttggagacgccagtaaaaaaatcattattgaggattttctagtaggtcaggagctaagctacatcgtgatggtggatggatccgaatatcttccccttgcaacatcacaggatcataaaacaatcggagagggagatgtcggcttgaatactggtggaatgggggcatattcacctgttccatttgtaaatgatgagctggatataataatcaataaagaagttattgagccaactattagagggctctctgatgatggaatttctttcagaggattcttgtatgctggcctgatgattgactctaatcgtaaaccgaaggtactagagtataattgcagattcggtgatcccgagacacaaccaataatgctaagactaaaatcagatcttattgatatgattcagacttgcttctctggaagtattagtgattatgaaattgaatgggataataaatcagccatgggtgttattttggctagtgctggttatccagaatcatatgaaacgggcaaaaaaatctctgggctcgataaactctccaatatagatgatgttaaagtctttcattcaggtacttgcatagaaaataaggatattcttaccaatggcgggagggttttatgcgtaactgctcttggtaatgacttaaatttgtctaaggaaaaggcttactcagctgttaagaagataaattgggatggaaagtattacagaaatgatattggttttagggtgataaaatagc

SEQ ID NO: 314488 - DNA, 537 bp, Unknown
  Bacterial polypeptide expressing nucleotide sequence isolated from the Sargasso Sea
aatgattgttggaattattggaagtggtggaagagagcacgctatttgttataaaattaaaaaatcaaccttaacaacaaaaattttttgcatcccaggtaatgctgggacaagtaatatagcagagaatgtgaatataaaagttaatgattttaaatctattaagaatttttgtcttaataacaaaatcgaacttttaattgttgggcctgagcaaccattggttgatggtatagttgattactttgagggtactaatataaaaatatttggaactaataaattgtcttcaaaacttgagggatctaaaatatttacaaaaaaaatttgcaatgaatataatatacctacagcaaagtttaaaatatttaagaatataaatgaaactaagaaatttttaaatgaggctcagttcccattagttatcaaagcagatgggttagctgcaggtaaaggtgtttatatttgcaaaaattacagtgatggattaattgcagctaaggaagttttcggtggtaaatttggaaatgctgaata

SEQ ID NO: 314489 - DNA, 952 bp, Unknown
  Bacterial polypeptide expressing nucleotide sequence isolated from the Sargasso Sea
gtgctccccagatatcaaacctttgactcaatgagcggagtagatgaatttctaaatatactcggagaagattttgttgttaagtatgatgggttagcaggtgggaaaggtgttaaggtttcaggggaacacctacactcacaaagagaggctttagatcattgccaagatttagtaaacagtggtggccgttttgtaattgaagaaaaatttattggagaagaattctcactcatgagtttttgcgatggtaaaggattaaaacacatgccggctgtccaagaccataaaagagcatacaagggagacaccggtcccaatactggcggaatgggtacctactctgatgcaaaccactccctgccatttcttaataaaaatgatataacacatgctagaatgataaatgaaaaaaccgcagaagcattacaaaaggaagttggcgaagggtacaaggggatactctatggcgggttcatggcaactgccaatggcgtacaactaattgagtataatgccagactgggagacccggaggcaatgaacgtgttatctatccttaaaacagatatcgttgatattttcaattcaataggaagaggaactcttagtgaattaagtatcgattttgacaacaaagccactgtatgtaaatatgcggtgcctgaagggtatcctgataaacccattaaaggtaaaaagattgatatctcatctgtttcaaataaggattctttattttttgcatcagttgacattgaaggtgaccatcttattgaagcaggaagcagaactgttgccgtggtaggcattgcaagctccgtatctcaagcagaaaaaatagctgaagatgagatatctaaggtagatggccctctcttccacagagaggatattggaacagatgatttaatcagagcgcgcgttgaacatatggaatcattaaggtgat

SEQ ID NO: 314490 - DNA, 850 bp, Unknown
  Bacterial polypeptide expressing nucleotide sequence isolated from the Sargasso Sea
tggtatagcaaaaagctctggggcggactttgttgttgttggtccagaaaaccccctagaggacggccttgttgatgatatagaaaaagaagggattccttgtgttgctcccaaaaaaagcgttgcaaagattgaaacaagcaagtcttttgctagaaaaattttggacggttgttacaaagaaaaaaacccaaaaagaaaagagtttaactcaaccaagggggttgaaagctttttaagggagttgaacgaaaactatgttgttaaacatgacggcttaatggggggaaagggtgtaaaaatttcaggagaacatctgtgctctatagaaggtgctttgagtttctgcaaagaaattataaataccgggggctcttttttggtagaagaaaagcttgttggtgaagagttttccttgatgagtttctgtgacggtgaaagctgcgcacacatgcccgttgtgcaagaccacaaaagagcttttgagggagacgttgggccaaatactggcgggatgggaacgtattcttttgaaaaccactctcttccctttctttttgaagaagaggttttggatgcacaaaaaacaaatgagcttgttttgaaagagttaaaaaatataaccggcgaaaagtttaagggggttttgtatgggggttttatggcaacaaaaagcggtgtaaaggttatagaatacaacgctaggcttggcgacccagaggctatgaatgttttagcggttctaaaaactgattttattgatgtttgtgaccacattattaatgaaactttaagcttgctgcccgttgattttgaaagagcagcaaccgtttgtaagtacgctgttcca

SEQ ID NO: 314491 - DNA, 781 bp, Unknown
  Bacterial polypeptide expressing nucleotide sequence isolated from the Sargasso Sea
attagaaggatcaaaagcatttgttaaaagattgtgcagtaagttcaaaattccaacagcaaaatataaagtatgtaaaaattttaaagatgttaaattatttttaaaaaaaaataattttccagtggtggtgaaggccgatggtttagctgcaggtaaaggtgtaaaaatttgtaataataagagtgaattagactcattttgtaaaaaaattttttcaggtaaatttaaaacatctaataagctggttttagaagaatttataaaaggagaggaattaagttattttgttattgtagataaaaaaacatttatcttttttggatctgcgcaagaccataagagagttggtgaaaaagatacagggccaaatactggtggtatgggtgcttactcgccttcccctcttttgaacaaacatattgaaaaaaaaataattagtagaattattagaccgaccataaaggcgcttaaaactaaaaaaaatccgtataccggttttttatacgctggattaatgattaaagacgataatccatatttaattgaatataacgtaaggatgggagatcctgagtgtcaagttattctaccgaggttaaagactgatttaactacaatagttttagcagctctaaataataatctatcaaaattaaaaataaagtggtctacgctgaaatgtatgacgattgtattatgcgctaaaggctatccagggaagtaccaacaatctaagccaattaaaaatttaagaggattaaacttaaagaaaaattta

SEQ ID NO: 314492 - DNA, 499 bp, Unknown
  Bacterial polypeptide expressing nucleotide sequence isolated from the Sargasso Sea
atgcaaatcttaatcattggttctggtgggcgcgaacatgctttagcatggaaatgtgctcaagatattaatgttgagaatgtttatgtggcacctggcaatgctggaacagcattagaatgtaaagtcaaaaatgtacctatcgagccatcaaatcaacaactactcttagatttttgtaacactcggggcattgatctagtcattattggtcctgaagcccctctggttgaaggtttagcagactttttaggcgctcaaggggtaccgacatttggtccctcacaacacgcagcacaattggaaggttccaaaacttttgcaaaagaattctttgctaaatatcacattcctaccgcagcatttgttacctgtcataatttagaatctgcaaaacaatacttaaccaccgcaaagatgcccattgtggttaaggctgatgggcttgcagctggtaaaggtgtcatcatttgtaataattatgaggaagctgaggctg

SEQ ID NO: 314493 - DNA, 877 bp, Unknown
  Bacterial polypeptide expressing nucleotide sequence isolated from the Sargasso Sea
cgggctgctggcctttgccaaagacaatagcatcgacctgaccattgttggcccggaagcgccactggtagagggtttggtcgacaccttccaggaaaatggactgaagtgcttcggtccgagcaaggctgcagcacaactggaaggctccaaagccttcaccaaagactttctggcccggcagaacattcccaccggcgcctacggcaacttcactgacatggatgaagcgctggcctacgtgcgcgaacagggcgctcctatcgtgatcaaggccgatggtctggccgcaggcaaaggtgtgatcgtcgccatgactctgcaggaagcggaagatgccgtacgcgacatgcttgacggcaacaaatttggcgatgccggccaccgtgtagtggtcgaagagtttctcgaaggcgaagaggccagcttcatcgtcatggtcgatggcaaaaacgttctgcccatggctaccagccaggatcacaagcgagccggcgacggcgacacgggccccaacaccggcggcatgggcgcttactccccggcgccggtggtcaccgacgcggtctacaaacgcatcatggacgaagtcatcacccccaccgtagaaggcatggccgccgaaggcatgccctacaccggcttcctctacgcgggcttgatgatcaacccagacggtgcccccaaagtaatcgaatacaattgccgcttcggcgacccggaaactcagcccatcatgatgcgcctgcagtccgacctggctgcgctatgtctggccgcgctggaaggcaagctggatcaggccgagattcaatgggatccgcgtcccacgctaggtgtggtaatggccgctggcggctacccggatagctacgac

SEQ ID NO: 314494 - DNA, 883 bp, Unknown
  Bacterial polypeptide expressing nucleotide sequence isolated from the Sargasso Sea
agggagcatgctttggcatggaaagctgcacaagatcatgcagtttctgaggtatttgtttgcccaggaaatgcaggcacagcattagaaaataagttatccaatatttctatcaatattagtgattttgaggccataaaagatttttgtattgaaaaaaaggtagtcttagttattgttggtccagaacaacctctcgttgatgggctcgtagactatttacaaaatagtaatatacagacctttgggccttcaagtgctgcagcacaattagaagggtcaaaaacattttcaaaagacttttttgtaaagtatggaattccaacagctaattatgcaacatttaacaattttgagagtgcaaaagatcacttagaaaaaattccttaccccactgtagtaaaagcagacggattggctgctggaaagggagttattatttgtcaaactcaaaaagaagccttacaagctttaataagtatttttaaagataatgcgtttggagttgctggagcaagtgttgtcattgaagaatttctaattggtgaggaggcaagctttattgctgttgttagcaaagataaaattattccattggcaacaagtcaagatcataaagccgttggtgatggcgatgtgggactaaataccggtggaatgggtgcctattcaccggcacctatagtagataaaagactacataaaaaaattattgatgaagtaatgcagcctactatgcaagggttaattaatgaaggttcgccatatctaggatttttatatgcggggctgatgataaacgatggagaattaaaggtacttgaatttaattgcagattcggtgatcctgaaactcaaccaattttattaagattaaaatcaa

SEQ ID NO: 314495 - DNA, 486 bp, Unknown
  Bacterial polypeptide expressing nucleotide sequence isolated from the Sargasso Sea
aatgagagtattattaataggaagtggggggcgtgaaaatgccattgcttggtcagtttacgcttcaccacttttagaaaagctatattgcattcctggaaatcctggcattaaagaatttgcagtatgcataaatgttaatattaaaagtaatgaaaaaatatatgatattattcaacaacatgaaattgatattgtagttataggaccagaaactccattagttgatggtttgactgattttttagaaaaaaaagaggtgaaagtttttggcccaagttcttatgctgctcaacttgagggaagcaaagtttttgcaagactattttgtgaaagacattctattcctcaaccagactttaaattttattctaatccagaaattgcaattaattacttgaagtccagtaatttaaaaaatggatatgtcattaaagctgacggcttggcttcagggaaaggagtacttgttacaagaagaaattg

SEQ ID NO: 314496 - DNA, 944 bp, Unknown
  Bacterial polypeptide expressing nucleotide sequence isolated from the Sargasso Sea
aaagctaatttgcatacctgggaatgctggaactgaaagtttagctaaaaatattaatattgatatttcagacttcaattcagtttttgaaacaataaaaaattatgaaattgatatagttattgtgggtccagaacagccgttagttgatggtatagtagattttttgtcagcaaaaaatgtaaaagtttttggtcctgataaatttgcctcacagttagaaggttctaaagttttcatgaaagatctatgtaaaaaaaataatattcctacagcaaaatttggatcctttgatgatttaaatagtgcattagatttcttgaataaaaataaaatgcctattgtggttaaagctgatggtttggcttctgggaaaggagtaacgatctgtaaatctatagaagaagcaaaaataaaagttatagaaattttgaatggaaaatataaatcttctagaaaagtactgcttgaagaatttttaaatggcgaggagataagttatttttctatagttgacggaaactgttataaattttttggttctgcccaagatcataaaaaagttggtgagggagatataggtccaaacactggtggtatgggggcatattctccctcaaatttattagatgtaaaactagaagaaaaaattaaaaaaaaaattataaatccaactttgaatgcgatgaaaaatttaggtcatccttatagaggttttctttatgcgggattaatgattagtaagggagaaccatatttgattgaatataatatcagaatgggtgatcctgagtgccaggtattaatgatgagactcaagacagatttattagaaattatagatctagctactaaagataaattaaatgattttgaaattgaatggaatgaagacaattgtatgacaattgttttatgtgcaaatggttatcctggtaatcatg

SEQ ID NO: 314497 - DNA, 792 bp, Unknown
  Bacterial polypeptide expressing nucleotide sequence isolated from the Sargasso Sea
agatatttctaattttagagccatttatcaactaattaaaaaaaaaagtatagacattgtaatcattggtcctgaacagccgttggttgatggaatggttgactatctaaaaaagaaaaatatcaaggtatttgggcccgacaaattcgcatctaaattagagggttcaaaagcttttatgaaaaatttgtgtgaaaaaaataaaataccaactgcaaaatttggagtatttagtaattttaatgatgcttcggtttttattaaaaataatggagctccaatagttgttaaggctgatggtttggcagctggaaaaggagtaacagtatgtaactcagtaagtgaagcattaaaaaattcaaaagaaattttagatggcaagtttagctcctctaaaaaagtggtcctagaagaatttttagtaggtgaagaattaagttactttttagtagtcgatgataatacttaccattttttcggttccgctcaagatcataaaagagttggcgagggagacaagggaccaaacactggtggtatgggagcatattcgccagcaccacttcttactttgcaactcgaaaaaaaaattaaaaaaaaaattattgaaccaacacttaaagcaatgaaaaatttaggtcacccttataaaggttttttatatgcgggtttaatgattgttaaaaacgaaccttacttgattgaatataatattcgaatgggggatccagaatgtcaagttttaatgatgagattacaatctgatttattagaaattattaataatacaat

SEQ ID NO: 314498 - DNA, 699 bp, Unknown
  Bacterial polypeptide expressing nucleotide sequence isolated from the Sargasso Sea
aaggtgaagaggcatcttttatagctgtagtaagtaaagacaaaatcattcctcttgctacaagccaagaccacaaagctgttggtgatggagatgttggtttaaatacaggtggcatgggagcttactcacccgctccaattgtaaacgaagaaatacaccaaaaaattcttgataaagtaatgtttccaactatgcagggcttaatagaagaaggttcgccatatcttggttttctatatgcagggctaatgatcaaagatggtgaaataaaagttttagaatttaattgcagattcggtgatccagaaacacagccaatactcctaagacttaattcaagcctggttgaattatgtatggcagctataaacaataatcttgattcatattctattgaatggagtcaaaaacattcatgtggggttgttatagcttctgaaggctaccctgaaacctataaatcaaataaggaaattaatattaatgaaaataaaaatcaagatgcaaaactttttcatgcaggcactaaatatgagaatgaaaaaatcattactgctggaggcagagtcttctgtgcgactgctttaggaaatgatttgaaagaagcccaagaaaatgcatataatttagttcaaaaagtagaatttgagggtgcttttcatagaaaagatataggttttaaaggaattaaatgag

SEQ ID NO: 314499 - DNA, 913 bp, Unknown
  Bacterial polypeptide expressing nucleotide sequence isolated from the Sargasso Sea
tccaggtataaaaaaattcataatcgaagaaaaaatagacctcgttgtgataggaccagaagatccattggttaatggtcttgttgattatcttgaagatctgaatatcttggtattcggaccatgttcaaatggtgcacgacttgagggttcaaaaatattttctaaaaaatttctttttgaaaatgatattcctacaggtaaagctagttttttttctgatcctgaaagtgcatattcttttttagataattgtgaatatccgattgtactcaaggcagatggccttgctgctggaaagggagttttagtctcaaaaaacagcaaagaagcgaaagagtgggttgattcagtaatgaataattcattatttggtgttgctggtgagaatatcttaattgaagaatgcttatatggaactgaactcagttttatgggcataatgactccaagtgaatttatcccttttgaaactagcgtcgattacaagccgctttttgatggaaatatgggtcctaatacgggaggaatgggctgtatatcaccctctccatttatgaacgatgttttgagagaaaaaataatgaaaaaagtggtacaaccaacaatagatggactaaataatatggatgtttcctattatggttttatgtactttggccttatggtcaaggatgataacccaaaagttttagaatttaattgtcgcttaggtgatccagaaacccaatgtttaatgatgcaaatggattcagatcttgttgaatgtcttgaagatgctcttgataataggaaagtttcaatatcatggaaacaaggctcatctatgggcgtagttattgcatcaagtggctaccctgaaaaatatagaactagcatacctatagaaataggaaatttggatgaactaaaa

SEQ ID NO: 314500 - DNA, 405 bp, Unknown
  Bacterial polypeptide expressing nucleotide sequence isolated from the Sargasso Sea
catgataaatgttctaattattggcagtgggggaagagaacatgctttcacctggaaagcatcacaatctgatctagtagaaaaaatctttgtagcaccaggaaatgcgggcacttcgcttgagccaaaagctgagaatataaatataagtgcttctgatattgatgcgttggtatctttttcaaagaaagaaaatattgatctcgtaattgttggtccagaagatccattggtaaatggtattagtgatgaattcaacaaagctggaatcaaatgttttggtcctgaatctcttggggcacagctcgagggctcaaaagattttgcaaaagcttttatgaaaagacataacatcccaacagcaagctatgagagctttactaatgcaaataaagcgaagaaata

SEQ ID NO: 314501 - DNA, 967 bp, Unknown
  Bacterial polypeptide expressing nucleotide sequence isolated from the Sargasso Sea
gttggaccagaacagccattagtaaatggtatcgttgattattttgaaaagaaaaaagtaatgatttttgggccatctaaaaaagcttcacaactcgagggctcaaaaatttttatgaaaaatttttgtagcagatataatattccaacagcaaaatatctagaaataaatagtcttcagcaagcagaaaatggcttaaaaaattttaatacacctatagtggttaaatcagatggtttggcagcaggaaaaggtgtttctatctttaatgataagagtttagctttaaaagaaataaaagacatacttaatggaaaatttacttcttcaaaaaaactaattttggaggaattccttgaaggtgaagaagcaagttattttataattactgatgggaataatcatttgcagataggaactgcacaggatcataaaagagtgggtgaaaatgatacaggtccaaatactggaggtatgggtgcatattctccatctttcttaatttcagatgacacagaaaataaaattattaataaaattataaaacccacactaaatggaatgaaagatttgggttgcccgtataaaggaatactatatgcgggattaatgataaaaaattctgagccaaaattaattgagtataatataagatttggtgatcccgagtgccaaattttaatgatgagattgaaaaatgatttgattgagttaataatatcaactttaaatgggacgctcaaagacaaaaaagttagttggaaaaatgaacatggaataacagttgttggtgtaagtaaaggttatcctgataagtatgaaaaatttaaagagctaaaaaatataaacacttttacaaataataaaaataagcaactttttcacgcaggaacagtaaaaaaagaagatggtaaaatttattctgctggtggtagagttataaattcaaccagtcatctctggttca

SEQ ID NO: 314502 - DNA, 139 bp, Unknown
  Bacterial polypeptide expressing nucleotide sequence isolated from the Sargasso Sea
agcgagggaagaacatatactggcttcttatatgctggccttatggttactaatgatggcaatttaaaagttttagaatttaattgtcgttttggtgacccagagactcaaccaataatgatgcgtctaaaaagtgatt

SEQ ID NO: 314503 - DNA, 686 bp, Unknown
  Bacterial polypeptide expressing nucleotide sequence isolated from the Sargasso Sea
gatgaatgttctaattgttggcagtggaggaagagaacatgctttcacttggaaagcttcacaatctgatcttgtagaaaaaatctttgtagcaccaggaaatgcaggtacttcacttgagccaaaagctgagaatatagatatcagcgcctctgatattgatgccctgatatctttttcagagaaagaaaatattgatcttgtgattgttggcccagaagatccactggtaaatggtattactgatgaattcaaaaaagttggaatcaaatgttttggtcctgaatcacttggagcacggcttgaaggctcaaaagattttgccaaagcgtttatgaaaagacataacatcccaacggctggctatgagagctttactaatgcatgtaaagcaaaaaaatacattcaggaaaataagttaccactggtcatcaaagctgatggtctggctgctggaaagggtgttgtaattgcagaagactatgagacagccaataaaaccattgatcaatttatcagtgagacaaaatttggagacgccagtaaaaaaatcattatcgaagatttcttagtaggtcaggaacttagctatatcgtgatggtggatggaactgaatatcttccccttgcaacatctcaggatcataaaacaatcggagacggagatgtcggactcaatactggag

SEQ ID NO: 314504 - DNA, 952 bp, Unknown
  Bacterial polypeptide expressing nucleotide sequence isolated from the Sargasso Sea
agaaaaaataatattaaaactttttgggccaagtaaattagcttctaaacttgagggctctaaaatctttacaaaagaattatgtgataaatataatattccaacagcaaaatttggaatttttaaaaattctaatgatgcaaataattttgtagaaaaatgtcatctaccaattgtggtaaaagcagatggattagcctcaggtaagggggtctatatttgtaataaaagagatgaagcagagattgcaattaaagaaatttttaatggaaaatttggactggctaaagaaatactagttgaggaatttcttgatggagaagaaatgagtttttttataatttcagatggagaaacttattttccttttggtactgctcaagaccataaaagagtttttgaaggcgacaaaggtaaaaatactggaggcatgggtgcatattctccttcaagattagaaaatgaagatttaaataataaaattattaaaaaaattataaatcctactctaaaggcacttaaagatttaaatacaagtttcaaaggatttctttatgcgggtcttatgattgttaaaaatgaaccatttttaatagaatacaacgtaagaatgggtgatccagaatgtcagactattttgcctaaactgaaaactgatttcgtaaaattgataaatgcttgtgtaaataaaaatttgaattcaataaatctagaatggcacaatgacaagagtttatgtattgtgctttgctcaaaaggttaccctgagagttacgataataatattgaaattcaaaatctaaaaaaagttaaattgaacgaaaatgaatttatttttcatgcaggcacaaaaaaagagaaagataaaattttatcaaatggtggaagagtactcaatttcgttatcagatcaaataattttaaaaataacagaaaaacagcaataaaactt

SEQ ID NO: 314505 - DNA, 811 bp, Unknown
  Bacterial polypeptide expressing nucleotide sequence isolated from the Sargasso Sea
tgcaggaacatttcttgaagaaaaaatagagaatatttccttgaatataaataacaatgaggatgtctctaacttctgtatttcaaataatattgaacttgtaattgtcggtcctgaagatcctctagttaatggtttggttgactttcttgaatctaaaaatataaaagtgtttggacccagaaagggagctgctcagctagagggatcaaaaaccttcgcgaaggacttttttataaaatatggcatacctacagcaaattataagtcttttgataatcatcatgatgccctgaagtacctcgacaagattgatttcccttcggttgtaaaagctgatggccttgctgctggaaagggagtcattatttgtgataatcgagaagctgcagaaaaagcccttgaagatatatttgaatcaaatgcctttggggatgctggaaatagagtggtaatagaagactttttgaatggagaggaagcaagctttattgctgttgtgagtgatgatcaaattattcctcttgcaacaagccaagatcataaagctgttggagatggagatattggattaaacactggaggtatgggtgcatactcccctgctccaattgttacagacgagattcacaaaagagttatcgatgaggttatgcttccaacaatgaatggattaaaggctgaaggatttccctatcttggttttttatatgctggcctaatgattgaaggagatgagataaaagtcttagaatttaattgtaggtttggcgatccagaaacgcagccaattatgctcagattagaatct

SEQ ID NO: 314506 - DNA, 727 bp, Unknown
  Bacterial polypeptide expressing nucleotide sequence isolated from the Sargasso Sea
tataaaggaaaaaaatattgaggttgttgttgttggtcccgaagaacctttggttaatggaataactgatttcttaaagaaaaggtcggttagagtatttggtccggacaaatttgcatcacaattagaaggatcaaaagcctttatgaaaaatctttgtaaaaataataatataccaactgctagttttggaatttttgataaattaaccgatgcagaaaattttattaataaatctaaaagtccaattgtagttaaagctgatggtttggcagctggcaaaggagtggttatttgtaaatctttggaagaggctaaaatagaaacaaaagaaattttaaatggaaaatttaaatcttccagtaaagtagttttggaagaattcttaaaaggtgaagaattaagttattttgtagtggtagatgaaaattcttaccacttttttggttctgctcaagaccataaaagggtgggagaaggagacaaaggtcctaataccggaggtatgggagcttattcgcctgcaaaaaatttaactgattctcttgaaaaaaaaattaaaaaaaaaattatagaaccaactctactagcaatgaaaaagcttggtcgtccttatactgggtttttatatgctggactaatgattgttaaacaagaaccatatttaattgaatataatattagaatgggtgaccccgaatgtcaggttctgatgatgaagttagaa

SEQ ID NO: 314507 - DNA, 482 bp, Unknown
  Bacterial polypeptide expressing nucleotide sequence isolated from the Sargasso Sea
aatgattgttggaattattggaagtggtggtagagagcacgcaatatgcgcaaaaataaaagaatctcctaaaataaataaaatattttgtataccaggtaacgctggaacaaaaaaaattgcagaaaatattgatattaaaattgatgatttcaaatctatcaaagagttttgtaataaaaacaaaattgatcttttgatagttgggccagaacagcctttggttgatggaatagtcgattacatggagggttcaaaagtaaaagtttttggtccaaataaaatagcctcacaattagaaggttctaaaatatttacaaaaaaaatttgtaaaaaatataaaattccaactgcaaattttaaaatctttgaaaacttaaatgatgctaaaaagtatttaactaattcaaaatatcctattggttgtaaatctgatggattagctgcaggtaaaggtgtttatatttgtaaaactatgctga

SEQ ID NO: 314508 - DNA, 874 bp, Unknown
  Bacterial polypeptide expressing nucleotide sequence isolated from the Sargasso Sea
catgaatgtgggaattataggaagtggtggaagagaacatgcaatatgtgaagcaataaataaatctcaaaatgtaaataaaatttattgttttccaggtaatgcaggaactgctttaattgcagaaaatgttgaaattaatatagaaaattttgatgagtttaagaattttataatattaaataatattaagttaataattgttggtccagaaaaacccctagtagacggcatagttgatttattggaaaatgaaaatataaaagtatttggaccaaataaaaaagcttcacaacttgaggggtctaagatctttacaaaaaaactttgtgataaatatagaataccaactgctaaatttggaatttttaaaactgaaaaagatgctaaaaattttataaataaaacaaattttcctattgtaattaaagcagatggtctagcagcagggaaaggtgtgtatataatcaacagtaaggatgaggcaataaatgctattcaagaaatatttcagggaaaatttggtagagctgaaaaactattaattgaagaatttttaagaggagaagaaatgagttattttataataactgatggcaaaactattaaaagttttgaaactgctcaagatcataaaagagttttggagggtgatttaggaaaaaatactggagggatgggtgcttactcaccatcaagaatgattaatgttaaattagaagaaaagattttaaaaaaaataattgaaccaacaataaatggtctaaaagaaactggaattaattataaaggtttcttatatgcaggattaatgatcaaagataatgagccatatttaattgagtataatgtaagaatgggtgatcctgaatgt

SEQ ID NO: 314509 - DNA, 646 bp, Unknown
  Bacterial polypeptide expressing nucleotide sequence isolated from the Sargasso Sea
catgaggattgcgataattggtagtggcggcagagaacatgcaatatgtcaaaaaatttcagagtcaaagaaggttgataaaatattttgtatacctgggaacgggggtacagaaaaacttgcacaaaacgttacgattgattttaatgatttcgaaaaaataaaattttttttattagataataaaattgattttacaattatagggccagaagaacctttggtaaatggaatagttgattttttaaataaaaacaacctgaaagtttttggtccagataaattctgttcaaagttagaggggtcaaaaatttttacaaaaaaactttgtgaaagtgaaagtatcccaactgcaaagtttaatatttttaatgatttagataaatcaattaattttttaaaaaaaaagaaatttcctttagttgtaaaggcagatggtttggcggccggcaaaggtgtttatatatgtaataattttttagagtcaaaaatagctgttgaagaaatttttggtggtaagtttggtaaagctgatgaattattaatagaagattttctaactggtgaggaaatgagtttttttataatttatgacaataactcatttaagattttcaatacagctcaagatcataaaagagtattg

SEQ ID NO: 314510 - DNA, 694 bp, Unknown
  Bacterial polypeptide expressing nucleotide sequence isolated from the Sargasso Sea
gatagaaggtcctgaaataagcgtgtttgtattttgtgatggtagcaatatatcagatgcagtggtcgcttgcgattataaacgtataggcgatggtgatataggacctaacaccggcggtatgggtagctatagttcccctggaataatctctgactcccaattggacgaaatcaaagataggatactatcaccagtggtaaaacatatggctaaaataggtattccgtatacaggagttttatatgccggacttatgctcactaattctggtcctcaggtattagaatttaattgccggtttggagacccggaggcgcaagtgatattgccaaggctggagtctgaccttagcagtgttatgtatagttgcgcagaggggaaattgttacaaacccaagtatcctgggatgataaagcatcggtaggagtcgtgttggcgtctgatggctatccgaattcctttgaaactggatttcctgttacaggcttagaacataattcacctggaacttatgtgttttgtggaggagttacccaaggtgaagataatagtgttgttacctctggaggccgagtattgaccgtggttgggcatgctaagaatattcaagacgctcgtgatttatcctatgccagggcggaatctattaaattcactaataaatttaatagaaaagacataggctcttac

SEQ ID NO: 314511 - DNA, 703 bp, Unknown
  Bacterial polypeptide expressing nucleotide sequence isolated from the Sargasso Sea
cagtaaagaattttcaaaactctttatggaaagaaatagtattcctactgcatcttttaaatccttcatatcatataaagaagcagagtcatatataaaaaaatctgagttacctatagttataaaagctgatggccttgcctctggaaaaggcgttagagtatgctttgaaaaaatagaagcaattgatttcttaaaagacattatgctagataaagttttttcttcttccggagaaaaagttgtaatagaaagttttcttgaaggagaggaagcatccttttttgttttttctgatggtgaaaacatacagatgcttgactcatcacaagatcataaaaggcttttagataaagatgaaggcccaaacacgggtgggatgggagcttattcccctgcacctatagttgatacggagactagagctaatattatagagatggttgtgaagcccgtcttcgagggctttaagaaagaagcattaatttatactggaattttgtacataggattaatgatcaaggataaaaaacctagtgttgtcgaatttaattgcagatttggtgacccggaaactcagcccttattatttagaatagactctgatattttcgatttattttatttaactgctttaggagaactggataaatataaattgaagtggaaaaataaaacatcagtaagtgttgtacttgcatca

SEQ ID NO: 314512 - DNA, 647 bp, Unknown
  Bacterial polypeptide expressing nucleotide sequence isolated from the Sargasso Sea
tattcctacagctaaatataaatcttttgatgattatgttttggctttaaaacacctcgatgaaatagaatatccaactgttgtaaaagcagatggtttggcagcaggtaaaggagtaataatttgtaaaaatattaaggaggcaacagaagcattaaaaagtatttttaaagaaaatacatttggagctgcaggtaataaggttgtaatagaggaatttttagagggtgaagaagcttctttcatagcagttgttagtaaggataaaattattccacttgcaacaagtcaagatcataaagctgttggagatggagatattggcttaaatactggtggaatgggagcttattctccggcaccaattgttacagacacaataaataaaagaattatagaagaaataatgtatccaactatgcacggactaattcaagaaagctcaccttatcttggatttttatatgcaggccttatgataaaaggagatgaaattaaagtacttgaatttaattgtagatttggtgatccagaaacacaaccaatcttacttagattaaaatctagccttgttaaactatgtattgctgcaatagatgatagtctagactcatattctattgaatggacaaagaaacactcatgcc

SEQ ID NO: 314513 - DNA, 655 bp, Unknown
  Bacterial polypeptide expressing nucleotide sequence isolated from the Sargasso Sea
aatgaaagtacttgtggtaggaagcggtggaagagaacacgcactagcctggaagttatctaaaagtagtttagtgtcagaaatctttgttgctcctggaaacggaggaactgcgattgaagaatccatccaaaatattgctatagattccaatgacattgaaggattgtctaactttgcaaaaaaatcaggcatagatttgactatagtgggtccagaggaccctttagtaaatggaataacggataaatttcaagatgaaggtcttttgtgtttcgggccttctaaagatgcagcaagattagaaggctctaaagaatttatgaaggactttttattaagaaataaaattcctacagcttcttacaaaactttcactgatgcagaaaaagccattaactatattgaagaacaaagttgcccaatagtcataaaagcagatgggcttgcggcaggtaaaggagtaactgttgctttcgatattaatcaagccaaagaagccgttaatcaatcgctcaattcaaagatctttggtgatgcaggaactaaaatcgtggtagaagaatatctagaaggcgaagaagctagttttatagttttaactgatggcaataaagtaataccttttgcttcttctcaagaccataaagcaaga

SEQ ID NO: 314514 - DNA, 787 bp, Unknown
  Bacterial polypeptide expressing nucleotide sequence isolated from the Sargasso Sea
atgcaccgatcaaagaacgtacttgttgtaggcaatggagggcgagaacatgccctcgtatggaaactgacgcgcgacggagcaaatgtctttgccgcccctggaaatgccgggaccgcagaagaagcgacgaacctgcctattcaggccaccgacagtgacgcacttctcgatgccgtaaaacagcatgaaatcgaccttgttgttgttggccctgaagcgcctctggtcaacggacttgttgacaaacttactgaagcgggtgtcagaacctttgggccaagcgctctcgcagcccaactcgagggcagtaaaattttctgcaaagagttgctccacaccaacgacatacctacggcgacctatcggcagtttaattcactcgacaaagcccgtagcttcctcgagtcccgcgaagatgaacctgttgttgtaaaagctgacggactcgccgccggaaaaggtgtttttgtttgcagcaaccgtgaagaagcacttgacgcgattaaccaattgcagcgcgatccacaatttcggacagcggcatctggcgtacttattgaagaacggctcgatggcgttgaggtcagcgtcattgccataaccgacggccgtgccatcgtgacgctaccgccgctacaggaccataaagcagcgctcgacggtgaccgtggaccgaatacaggtggaatgggtgctttctgccctgctccctttgtcacccaatcactgatgacggaaatagaagaacagattctcgtcccaactgttcatggtatgcgtcggc

SEQ ID NO: 314515 - DNA, 586 bp, Unknown
  Bacterial polypeptide expressing nucleotide sequence isolated from the Sargasso Sea
catgattgtagggattataggaagcgggggaagagagcatgcaatttgtcatgcattaaataagtcaaaaaaaattgataaaatttattgttttcctggtaacgctggcactgatgatatagctgagaatattaacttagacataaataactttgaggaaatcaaaaatttcattatttcaaaaaaaataaaattagttgtaatcggaccagaaaaacctttggttgatggactaacagattacttagaaagttttgatattaaggtttttggacctagtaaagtcgcttcacaattagaggggtctaaaatatttacaaaaaacatctgtaaaaaatatgatattccaactgcgaatttcggtgtatttaatgatatttatcaagctaaaaattttttagataaatcaaattttccaatagtcattaaagcagataatttggctgcagggaaaggtgtttatatttgtgaaaataaagaagagtcttatcaagcaattaaggaaatatttgatggaaagtttggtgctgctgaaaatgttcttattgaagaatttttagaaagtgaagaaatgagctttttcatt

SEQ ID NO: 314516 - DNA, 772 bp, Unknown
  Bacterial polypeptide expressing nucleotide sequence isolated from the Sargasso Sea
aaagctgagaatatagatatcagtgtcactgatattgatgctttggtatctttttcaaagaaagaagatattgatctggtgattgttggcccggaagacccattggtaaatggcattactgatgaattcaaagaagctggaatcgactgttttggtcctgaatcactgggagcacagcttgaaggctcaaaagattttgctaaagcttttatgaaaagacacaacatcccaacagcaagctataagagctttgctgatgcaaatgaagccaagaaatatattcaggaaaatgaattgcctcaagttattaaagctgatggtctagctgcaggaaaaggtgttgtaatcgtagaagactatgagaccgcttataaaactattgatgaatttattagtgatacaaaatatggtgatgcaagcagaaagatcataattgaggattttctaaaaggtcaggaagtcagttatattgtgatggtaaatggaactgattatttgccgcttgcaacatctcaggatcataaaacaataggagaaggagatattgggctcaatactggtggtatgggagcttattctcctgttccatttgttgatgatgaacttgatattataataaataaagagatcattgagccaactgttagaggtctttcaaaagatgggattgattttagaggattcctttatgcaggccttatgattgactcgaacttgaacccaaaggtattagagtataattgtagatttggggatccaggagactcaacca

SEQ ID NO: 314517 - DNA, 553 bp, Unknown
  Bacterial polypeptide expressing nucleotide sequence isolated from the Sargasso Sea
tatgaatattttagttgttggaggtggaggccgtgaacatgccattgcctggaaagccgcccaatcaaccgcagtaaagcaagtttgggtcgcgccgggtaatgccggcactgcacgcgagccccgcatcaataatattaatatcaatgcaacggatattgagcaactggcacagtttgccttagacaatacaattgaattaaccattgtaggaccagagcttgcgctggctgctggcatcgttgatcattttacccgcttaggtttaaactgctttggacccactaagcaagcagcacaacttgagagctcgaaacaattttgcaaggattttttaacccaacataatattccaacagcaaagtatgctcactttacaaatactgacaaagcgatcacctatttaagttcacagtcttatcccattgtcataaaggccgatgggctggcagctggcaaaggtgtggtgatcgcagaaaattttaagcaagcaaaacaggctattaatcatatgctatcaggcaactcgttggagcagcgggtcattcaatca

SEQ ID NO: 314518 - DNA, 694 bp, Unknown
  Bacterial polypeptide expressing nucleotide sequence isolated from the Sargasso Sea
tgtttcggcccaacggggcaggcggcccaactcgaaggctcaaaagccttcagcaaagacttcatgcgtcgctacaacattcctacagctgcccatgaaacgttcagcgatgccgccaccgcaaaagcctatgtacgcgcgcaaggtgcgcctatcgtgataaaggcagatgggcttgctgcgggcaagggcgtcattgtcgcccaaaccgaagaggaagcggctgacgccattgacgatatgctcagcggcaacggctttggtgaggcaggtcatcgggtagtgattgaggaatttctgcccggcgaagaagcgagtttcatctgcttgtgtgatggtactaaggccattcccttcgcttcttcacaagaccacaaagcgcgggacgatggcgaccgcgggccaaatacaggtgggttgggtgcttattccccagccccggtggtgaccgaacaggtacacgaactcgccatgaagcaagtgatcttgccaaccctaaaaggcatggaggccgagggttcaccctatcgcggctttttgtatgccggtttaatggtgagtcccgagggcgacatcaaggtagtagagtttaactgccggtttggtgatccagaggcccagccaatcatgatgcgcctgcaaagcaatttattgcccttactccagcaagccgcgataggagattgcaaacgga

SEQ ID NO: 314519 - DNA, 865 bp, Unknown
  Bacterial polypeptide expressing nucleotide sequence isolated from the Sargasso Sea
tatgaagtcaaaaaaagtaaaaaaaatattttgcattccaggtaatggtggaacaagtaaaatcgccaacaacatagaaattaatataaataattttgaagaaattaaatcttttttaattaataaaaatatagacttaaccattgttggtcctgaagaacctttggtaaatggtatagtagattttttaaataatgcaggattaaaagtttttggtccagacaaattttgttcaagattagaaggatccaaaatttttactaaaaaaatatgtaaatcagaaaatatcccaactgcaaattttgaaattttcaaagatgaattgtcttctttaaattatttaaaagaaacaaaatatcctacagtagtaaaggctgatggattggcggctggaaaaggtgtttatatttgtgaaaatttttctgaagcttcaaaagctgttaaagaaatttttaaaggaaagtttgggaaagcagaagaagtattaattgaaaattttctcgtaggagaagagatgagtttttttattttatatgataacgatacttttaaaatttttaatacagctcaagatcataaaagagtttttgaagaagataaaggaaaaaatactggaggtatgggtgcatattctccctcaagacttaataacatcgaactagaaaaaaaaattattaataaaataattttaccaacattaaaatatttaaaaagtgaaagtggaaaatatgttggttttctatatgcaggcttaatgataaaaaataatgaaccttatttagttgaatacaacgtgagaatgggagacccggaatgtcaaactattttgccattattaaaaaatgatctgattcaagtactttga

SEQ ID NO: 314520 - DNA, 818 bp, Unknown
  Bacterial polypeptide expressing nucleotide sequence isolated from the Sargasso Sea
aactttttctagaaatttttgtaaaagacacaatattcctcaaccaggatttacatattgtaacgatatagagaccgcaaaaaaacaaattaaggttttaaatggctattgcgttgtaaaagctgatggtcttgctgctgggaagggtgttgtagtatgtgacacagtggatcaagcaatcattgcatctagagaaatgttagaaaaaaataaatttggtgatgcaggaaagtcaattttaatagaagaaagaataaatggcattgaagcaagtgtttttgcggtttcagatggcaaagatgcggttttaattggaacggctcaagatcacaaaagagcctatgacaatgatgaaggacctaatactggtggcatgggggctatttctcctgctcctgctttagatcaaaaattaaaaaaagaaatatttaatgatattattatgccaacaattaatggtatgaatttagaaggatatccttatgagggtattctatatgctggtgttatgattactgacaatggaccaaaagtaattgaatttaattgtagatttggagatcctgaaactcaagttgtacttccacgtttgaatacagatttagttagtattgtacaaaaaacaattaaaaaaaatctaaaagatataaccattgatttcattccacaaagcgcaattactgttgttatagcaagcaagggatatcctggtgaatttaaaaaagaagttttattaccatcgctaaaaaatttgaatgatgaaactgaaatatctgtgttccattccggtaccacaaaagataaaaatggaaagattg

SEQ ID NO: 314521 - DNA, 736 bp, Unknown
  Bacterial polypeptide expressing nucleotide sequence isolated from the Sargasso Sea
atgattatttgcatcataggaagtgggggtagagaacacgccatttgtaaaacaatctctacatcaccaaaagtaagcaaaatatactgtctaccaggtaatgctggaactcaagaattagcagaaaatataaatttagatattaatgattttgaaaaaattttaaaatttttaaaagaatcaaaagttgatctggttatagttggtccagaaaaaccattagtaaacggtattgtagattacttggagagtaaaaacattaaagtttttggtcctagaaaaataccttcacaattagagggttcaaaaacttttacaaaaaatatttgtaaaaaatataatattcctacagcaaactttggaatttttgaaaaaaaggaagatgccataaactttttaaaaaattcaaaatttccaatagttattaaggcagatggattagctgctggaaaaggagtttatatatcaaaaaacttatctgaggcaatagaagctgtgaatgaagtttttgatggaaaatttggagtagcaaaaaaaatacttgttgaagaatttttaaatggtgaagagatgagtttttttattgtttgtgatggaaaaaattttaaaatatttaagactgcacaagatcataaaagagttaatgaaggagatgaaggaaaaaatactgggggaatgggtgcatacagtccatcaggtttaataaacgaagccttagaaattaaaattattgata

SEQ ID NO: 314522 - DNA, 913 bp, Unknown
  Bacterial polypeptide expressing nucleotide sequence isolated from the Sargasso Sea
tacggccgattacgacacattcaccgaccccggtgccgcccacgccttcattgaccgcctgggcgcgcccatcgtcatcaaggccgatggcctggcggctggcaagggtgtggtcgtggcgatgacgctgcaggaagcccacgatgccgtggacttcatgctggtggacaacaaatacggcgtgacgcacaacgaaggtggtgcgcgtgtggtgattgagcagttcctggaaggtgaagaagccagcttcatcgtgctgtgcgatggcaagaacgtgctggcgctggccaccagccaggaccacaagcgcctgaaagacggcgacgaaggccccaacaccggcggcatgggcgcgtactcgcccgcgcccgtggtcactgccgatgtgcacgcccgcgccatgcgcgagatcatcctgcccaccattcgcggcatggaaaaggacggtattccctacaccggcttcctgtacgccggcctgatgatcgacgccaagggccatcccaagacgctcgaattcaactgccgcatgggcgaccccgaaacgcagcccatcctcatgcgcctcaagagcgacctggtggatgtgctgagcgcggcggtggatggcaagctcgaccagatcgaggtgcagtgggaccgccgaaccgcgttgggcgtggtgatggctgcgcacggctaccccgaaagcccccgcaagggcgacctcatcaccggcttgcccgccgacgcggacgatgcggtggtgttccacgccggcacgcagttaaaagacggcgtggtcagcgtgacgggtggccgtgtgctgtgcgtgaccgtgctggccgacagcgtcaagcaagcgcagcagcgtgcgtacgacgtggcgcgcggcattcacttcgaaggtgcgcagtaccgccgcgacatgctc

SEQ ID NO: 314523 - DNA, 890 bp, Unknown
  Bacterial polypeptide expressing nucleotide sequence isolated from the Sargasso Sea
atttacatcacagctcgaaggatctaaagcattcatgaaaaatttatgtaaaaaaaataatattccgactgcaaaatatatggtttttactgattatattgaggcttcaacttttataaaaaaaaacggagcacccatagttgtcaaagcagatggattagcggccggcaaaggagtgtctatatgtaaaacaatagacgaagctttaaaaaaaaccaaggaaattttagatggaaaatttaaatcttcaagtcgagtaattttggaagaatttcttgaaggtgaagaattaagttatttttgtatagttgatgacaattcatttgttttttttggatcagctcaagatcataaaagagttggtgaaaatgatactggacctaatactggtggtatgggagcgtattctccttctcctcttttaaataataagttagaaaaaaaaattttagacaaaattattaaacctactttagaagctttaaaaaatttaggtcattcgtataaaggattcttgtatgccggcttaatgattcatagagaagaaccttatttaatagaatacaacgtgagaatgggtgatcctgaatgtcaagtaataatgatgagattaaattcagatctttttcaaattataaatcatacaattgaaaataaattacataatcttaaaattgactgggataaaaaaagtgctattacaatcgtactgtgtgcaaagggttatcctaataattacataaaaaatagtgaaattaaaaatttacaaaatgtaatgcaagataaaaataatcaaatatttcatgcaggcacatacaaaaaaaataaaaaaatttattctattggtggaagggtacttaatgtaacagcaatggctaaaaatttagtcg

SEQ ID NO: 314524 - DNA, 826 bp, Unknown
  Bacterial polypeptide expressing nucleotide sequence isolated from the Sargasso Sea
gaggcgggcgtcaaggtctttggtcccaacgcgaaagccgcaatgatcgagggctcaaagggaatgatgaaggacctttgcactaagtacgatattcccaccgccacttacgcgcggttcgacgattgcgacgcagccaaagattacgtccgcctcaagggcgcgccaatcgtcgtcaaagcggatggactggcggcaggcaagggcgtgatcctttgccgcaacaaaaccgaagctcacgccgccatcgatctcatgatgacccaagacgccttcggcgacgctggagccgagcttgtgatagaggaatttatggtcggcgaagaagctagcttttttgctttggtggacggcgaaaacgcattgcccctggttgccgcccaagaccacaaggccgtcggtgacggtgacacaggtcctaatactggaggcatgggcgcctattcgccagcgtctgtggtggacgaggccatggcgaaaactattatgaaaaccattatcgaaccaacgattcggggcatggccgccgacggcatagcctacaggggtgtcctgttcgccgggctaatgattaccgacgcagggccaaagctaatcgaatacaattgccgctttggagatccggagtgccaagccctaatgatgcgtttaaagaacgattttttggaggtccttgaggcagcggtgaagggcgagctcgaccaggtggaattgaaatggagcagcgatgcggccctaacagtggtcatggccgttaacggctaccctggcagctatgagaaagggtcagaaatcaagggtatcgaagaggcggaagccaacggcg

SEQ ID NO: 314525 - DNA, 913 bp, Unknown
  Bacterial polypeptide expressing nucleotide sequence isolated from the Sargasso Sea
tgagtatcctattgttattaaagcagacggtttggctgcaggaaaaggttttaccattgcccaatcatttgaagatgctaaaactgctcttaatgattgttttgtaaataaggtgtttaaatctgctggcgattgtgtggttattgaagattttttgcaaggagaagaagcatctctatttgcttttacagatgggaagacggttgttccaatggtatccgctcaagatcataaggccattcatgatggggataagggccctaatacgggtgggatgggtgcgtattcacccgcacctgtattaactgatgatgtggaacaaaaagttatggatcaaattttgcagcccttggtggatggttttcgttcggatggcattgagtataaggggattttgtatgctgggttaatgattgatgattttggggatccgtacgtggttgaatttaatattcgctttggggatccagaaacacagattgtgttgcccaagttaaggacagatttaatttctattttagaggcaatttcaactcaaacattgagctctattgacattgaatgggatgctcgtcatacagtatgtattgtcatggcagccaatggatatcctgcggcatataataagggagatcttattgcaggtattcaagattcatcagatcctaatacatgggtgtatcatgcagggaccaagcaaaccgataagggggaatttataacaaatggtggtagggttttaaatgtatgtgcagagggagatacgttaaaggatgctattgattctgcttaccaacgtgtgaaacgaatttcatttgatggggcatattaccgaacggatattggccagaaaggtctggctcggttaacgaagtctgcttatttgaaacttcagcattatttatctaagcgt

SEQ ID NO: 314526 - DNA, 729 bp, Unknown
  Bacterial polypeptide expressing nucleotide sequence isolated from the Sargasso Sea
gtatggaaggtgtagaggagtttttaggtgaattgggtgattactatgttgtgaaatatgatggtcttgctgggggaaaaggtgttaaggtggctggagatcatcttcactctcatggtgaggcaatctcatactgcaaggagctggttgatagtggtggaacctttgtcatagaaaaaaaacttattggcgaggaattctcactaatgagtttttgtgatggctctagcttaagtcacatgcctgcagtgcaggatcataaaagagcctacgagggagacaccggaccaaatactggaggcatgggcacctattcagactctgaccacagtcttccttttttagaaaaaagtcacattctcgcagctcaaaaaataaatcaaatgaccgccgacgcacttcgggataagtttgaagaggggtataaaggaatattatatggcggctttatcgcaaccagagatggtgtcaaggtcattgagtataatgcccgctttggtgacccagaggcgatgaacgtcttatccatactcgaaactgacctgatcgatatttgtaatgcgataataaatgaggagctaaacacaattgacattcgctttaataattcagcaaccgtttgcaagtatgcagtcccagaggggtaccccgatgatccaattaaaaataaagagatcgatgtagaagatgtcacagacacagagaaattgttttatgcctcaaattgag

SEQ ID NO: 314527 - DNA, 749 bp, Unknown
  Bacterial polypeptide expressing nucleotide sequence isolated from the Sargasso Sea
aatgggaataaatgtattaataattggaagcggaggacgtgaacatgcaattgcatggaaactaacacagtcgcctaagctaaagaaattatgggtactacctggaaatgcaggaattgaagattatgcagagactgtcgatataaaagaaacagatatcaatgcaatttgtaaattcgtagagaacaatacaattgacttgacaatcgttggtccagaaatgcctttagctgcagggatcactgatactttgaaccaccaaggatttcgtgttgttggtccaacaaaggcagcagcacagttagaaacatccaaaagctttgcaaaaaaaattatgcacgaaaataacattccaacagcgcactcagaaacatttactgatgcctttttagcaaaagaatatatccataaattagaatctttggttgtcattaaagctgatggtttagctgcaggaaaaggtgtcactgtttgtgacaattcaaaagaagctgaagcagctatcgaaaaaatactaatcaagaaagcatatggtgatgctgggacaaaaatattagtcgaagaaaggatgtttggacgagaaacttctgctcatgcatttactgacggcatctcagtaaagcacatgcctttttcgtgtgatcacaagcctgtatatgacaataatttaggtcctaatacaggtggtatgggtgtctattcaccacctttatggctatcagatgaaatcagaaaagatattgaaacaa

SEQ ID NO: 314528 - DNA, 844 bp, Unknown
  Bacterial polypeptide expressing nucleotide sequence isolated from the Sargasso Sea
atgaacattggaattattggaagtggcggtagagagcatgctttatgctataaacttaagcaatctaaaatagttcataaaatttattgcatacctggaaatgcaggtactagcttaattgcagaaaaccttgatattaaaacaaatgattttgaaaaaattaaaaaaatttcaattgaaaaaaaaattgagcttcttgttgtcggtccagaaaaacccctagtcgatgggatttcagacttttttaaagatactaatattaagatatttggtcctaataaattagcatcacaattggaaggttctaaaacatttacaaaaaaattatgcaagaagtataatattccaacttcaaaattcaatatttttgaaagtaaagataatgcaaaaaaatttctagctaattcaactttcccaatagtaataaaagctgacggactagccgcaggaaaaggtgtttatatttgcagtaatgattatgaagctataactgcagtagatgaaatttttgatgggcgttttggaaaagcagattgtgtattaattgaagagtttttaacaggtgaggaaatgagctattttataataactgatggaaaaacttttaaaatgttccaaactgctcaagatcataaaagagttggtgaaggtgacattggaaaaaatacaggaggtatgggtgcatattcaccttcaagattaatcaatgatgaattacaaaataaaattaatgaaaaaattgtcaaaccaaccctaaaaggtttaagcgatttaaattctgaatatgtaggttttttatatattggactaatgataattgataatgaaccatttttaattgaat

SEQ ID NO: 314529 - DNA, 1207 bp, Unknown
  Bacterial polypeptide expressing nucleotide sequence isolated from the Sargasso Sea
tatgaaaattttagtgattggcagtggggctcgtgagcatgcgttatgttatttaatatctaagagctctctggtttcatctatttatgcaatacctggaaactacggaataagtcaacttgctgaatgcgaacaaattgatcaaacagattttgagaaaatatacgacttctgtaaaagtaaaatgatagaattagtcattgtcggccctgaagtgccattggttgcagggattgttgatttttttaaagagacagaaataaaaatttttggacctgataagtatgcatcgcagttagaagggtctaaaggctttatgaaagatctttgtaaacaaaatgagataccaacagctgattatgctcgatttgataataaagaagaagctataaactatttaaatgctcagcctttacctattgtaattaaagctgatggtcttgcggctgggaaaggcgttactgtagcggacacaaagaaaatggcagaacaagcaataaatgacatttttgatgagaagtttggggcaaatatggatgtagttattgaagaatttatggatggtgaagaagcgagttattttgtttgttgtgatggtgaagattttgtttcactagaaagtgcccaagatcataaaagaataggtgaaaatgacacagggcctaatactggaggaatgggggcatattcacctgcgcctatttttacacctaaaataaaagaacaagtagacagggaaattattacacccactctaaatgccctaaaaaaaaatgggcatccttataaaggtattctctatgctggattaatgattaaaaatggttatgcccgattggttgaatataatattagatttggcgatccagagtgtcaggtattaatgcttagaatgaaaaatgatttaattaaattagttcttaattgcttggaaggcagtctaagtaatactaaattggagtgggaagatgataatagtgctacagtggttgtggcggcaaaaggttatccaggcgactataaaaaaaatacaaaaattattggctatgaaaattttgatagtaatgatctattccaagtattccacgcaggaacgaaacatgatggaaataaccttctagctaacggaggtagagttctttccgtaacagcaaaaaataaaaatctaagagatgctcttaatatgatttatgcctacatcggtcag

SEQ ID NO: 314530 - DNA, 1276 bp, Unknown
  Bacterial polypeptide expressing nucleotide sequence isolated from the Sargasso Sea
tatgaattttgctgttataggaagtggtggaagagagcactcgatttgctttaaattgaaacaatctcttaaaattaaaagattgatctgtattcctggtaatgctggtacaagagaaattgcagaaaatataaatattaatattaataactttgatgaaattttagctgtaattaaaaaattcgaaattgatgttgttattgttggccctgaagaaccattggtaaatggtattgtagattttttaaaaaatgaagggataagagttttgggtccagataaatttagttctcagcttgaaggctcgaaggcattcatgaaaaacttatgtaaggaaaataatattccaactgcaagatttggtatattcaaagattttaaaagtgcttgtgattttttatctaaaagtaaaacacctatagttgtcaaagctgacggtttagcagcaggcaaaggagtttcaatctgcaatagtcataatgaggctaaaattaaaatcaaagagataattgagggaaaatacaaatcttcaaacaaggttgttttagaggagtttcttcatggagaagaattgagttatttcgttttagctgatgataattgttataagttttttggctctgcgcaggatcataaaaaagttggtgaaggtgatattggtccaaacacagggggaatgggtgcatactcaccatcgaacttgattacagctgaactcgaattaaaaattaaaaaagaaattatagaacctacattaaaagcaatgaaagacttgggtcacccatactcaggttttctttatgctggtttaatgatacgtgagggtaaaccttatttaatcgaatacaatataagaatgggtgatcctgagtgtcaagttcttatgatgagattaaagagtgacctagtcgaaatagctgactccacgactagaaataacttacaaaaaaccaaaattgaatggagtgaaaataaatcaattacaattgttttgtgtgcaaaaggatatccgggaaaatatattaaagatagtgaaattaaaaatttgaaagatttaaagattgataaggataatcaagtttttcatgcgggtacctacataaaggataaaaaaattttatctaatggcggtagagtattaaatataacttcatcagcaaaagaacttattgatgctcgtgaaaaaatattaacaaatttagataaaataaaatgggatgatggtttttacagaaaagatattggttggagagccataaaaaatgagaataattag

SEQ ID NO: 314531 - DNA, 1270 bp, Unknown
  Bacterial polypeptide expressing nucleotide sequence isolated from the Sargasso Sea
ttgaaaatacttgtcataggaagtggcggacgagaacattcattagtttgggctttttctcagaatcccaaatgccaagaaattcattgtatcccaggtaatgctggtatcaaaaaactagctatttgtaaggatttaaatattcttgataatgatcttataatttcatactgcaagttaaacaaaatagattttgtcgttgtaggtcctgaggctccattggctaacgggttaataaatagtctaaataaaaataatatacttagcttcggaccaactaaggaggcagcttttttagagtcatcaaaaagtttcacaaaatcaatatgtgatattaaaaacatacctactgctaattatattttagcaacttcaaaaaaagatgcccttaattttattgaaaaattcgtaccaccatttgttataaaactggatggtctggcagctggtaaaggagtattcatcttaaagaaaaaatcagaggctattgaaataattaaaaatatataccttaaaaaaaacaaaaaaatcaccttattaatcgaagagtttctggttggaaatgaggctagtttatttgtggtttgcaatgggaaaaattttaaattattaggaagtgctcaagattataaaaagatctatgacaaagatctaggtgcaaacactggtggaatgggtgcattttctcctgctttaaatatatcaccagaagtagagaaagaaattttagataaaattgtcactccaactttaatagaaatggatgaaaggggaacacctttttctggaattctttatgctggtttgatgatcactcataagggacctaaacttatagaatacaacgtaagattaggagacccagaatgccaagtaattgcaattagacttggtgcgcaactattagatgctttattttattgttctacaaatgaattcagtaaaataaaaattaattacgctgacgattttggtgttactgttgtaatggcttcaggtgggtacccaaacaaatatgaaactggttttaaaataaagggtatagagaaatttaataattcttcagatatagaaatatttcactctggaacaaaatgtatagacgaaaatattgttactaatggaggaagggttttaagcataacttcaagatcttcaaatttgaatgatgctagaaagaaaacttatgaagtggtagataaaataaattgggagaatgagtttcacagaaaggacatagcaaaaaaatatactcactcatttgactaat

SEQ ID NO: 314532 - DNA, 714 bp, Unknown
  Bacterial polypeptide expressing nucleotide sequence isolated from the Sargasso Sea
tatgaatttagctgttataggaagtggtggtcgagagcacgctctctgctataaacttaggcaatcaaaggaagtaaaaaaattatattgtattcctggaaatgctggcacaaaaaaattcgctgacaatataaatcaagatgtttcaaattttgaagaagtttatagagttttaaaagataaaaaaattgatttagtaatagttggtcccgaagagcctttggtaaatggtattgttgattttttaactgaaagaaaaattaacgtatttggcccaaataaattttcttcgcaactagaggggtctaaagctttcatgaaaaatttgtgcaaaaagtatgacatccctactgctaattttggtatttttgatgaattaaatactgcattcaatttcttagaaaaaagcgaacttccaatagtcgtaaaggctgacggtcttgccgctggtaaaggagtatctatatgtaaatcaaaagaggaagctaaaacaaaaataaaagagattattgaaggaaagtttaaatcatctaaaaaagtagtgcttgaagaatttattgagggagaagaattaagttatttttgcgtagtagataaaaatacttttcgtttttttggatctgctcaagaccataaaagagttggggagggtgatactggaccgaatacaggtggcatgggcgcatattctcctgcaagtttattaacaaaaaa

SEQ ID NO: 314533 - DNA, 709 bp, Unknown
  Bacterial polypeptide expressing nucleotide sequence isolated from the Sargasso Sea
tatgaattttgctgttataggaagtggtggcagagaacatgcaatctgttttaggttaaatcgctctaaaaagataaaaaaattaatctgtatacctggaaatgcaggcacaaaaaaagttgccgaaaacataaatgcagatatatctgattttgaaaacgtttataggataattattgaaaataaaattgattttgtagtaattggtccagaacaacctcttgtagatggaattgttgattatctatcaagaaagaaaattcgagtatttggtcccaacaaatttgcttcacaattagagggatcaaaagcatttgtaaaaaaattatgccaaaactataatattcctacagcaaactttggaatatttgataattttttgagtgcttcaaactttataaaaaaaaataaactacctatagtgataaaggcagacggtttggcatctggtaaaggagtctacatatgtaaatctgtagaggaagctgaaaacaaaacaaaagaaattttaggtggtaaattcaaaacttcaaaaaaagttgttattgaggagtttctcgaaggagaagaaatgagttattttgttatagtagataaaaataattactgtttctttggatctgcacaggaccacaaaagagttggtgagggtgatactggaccaaacacaggaggtatgggagcatattcgccatcaacattgctggat

SEQ ID NO: 314534 - DNA, 991 bp, Unknown
  Bacterial polypeptide expressing nucleotide sequence isolated from the Sargasso Sea
atgaatattttagttattggaggtggcgcacgtgagcatgctatttgctatgcagtccatcaaagttcaaaattatctaagctatatgcaatacctggaaactatgggatttctcagctagctgagtgtcatattgtagatacaaatgattttgacgaattatttagttttgcaataaaaaaggctattgatcttatcatcgttggtcctgaggtaccattagtaaacggcatagtagatttctttacttctcgaaaaattaaaatttttggcccagatcagtttgccgctcaacttgaaggatcaaaaagttttatgaaagatctatgtaacgaacatagaatacccactgcccaatatgaaaaatttcaaaattctgatgacgcaattaaatatttagagacacagagttatccaattgtaattaaagctgatggattagctgctggcaagggggtaacaattgctgaagattttaaaactgctagcatagcagtacaagatattttcaatgctaaatttggtgcaaatatggatgtagttattgaggaatttatgtatggagaagaggcaagttattttatttgctcagatggtaaaaattttatttcactaataagtgctcaagatcacaaaagaattggtgaaaatgatactggacctaatacagggggaatgggcgcttattcgccagcgccagtatttactgaaaaagtaaaaaaacaagtggatgccgaaatcataaagccaactctcaaagcaatgtttgataaaggtcacccatttaaaggtattctttatgctggactaatgattgaaaatgaaaaagcgaaattagttgaatacaatataagatttggagatccagaatgccaagttttaatgatgagtctaaaatcagatctaatagatctaataatgtattcaatcaatggatcaataaatgactatgattgtgattggtacgatgaagattgtgctaccgtagttc

SEQ ID NO: 314535 - DNA, 1258 bp, Unknown
  Bacterial polypeptide expressing nucleotide sequence isolated from the Sargasso Sea
atgaatattctagttattggccaaggtggtagagaacatgcaattgcttggaagttaagccaatctaaaaaagctagtaaaatttttgtttctccaggtaatgggggaactgaattggaaagtgattgcacaaatgtagaaattgatacaaacgatttttcttcaatcaaaaattttgttgagcataatgcaattgaggtggtaattgttgggccagaggatccattggttaatggtataaaagattacctttctgaatccaatgttcttgtatttggtcctgataaaaagggagcacgactggagggatcaaaaatcttttcaaaaaaatttttatttgaaaataatattccgactggcgatgcttcatttttttcttcttcagaagacgctattaagtacttaaaaaactcaatatttccaattgtgttgaaggctgacggtcttgcagctggaaaaggggttctggtagctaaaaaatttgatgaagcaaaaaattgggtgaatgaagtcatgaacaatcttaaatttggagatgctggcagtaatattgtaattgaggaatgtttatttggaactgaattaagttatatggggattcttacccctgattcatttataccattcgaaacaagccttgattacaaacctctactcgatggaaataaaggcccaaacacaggtggcatgggttgtattgcaccctcacctttgataaatgaaagtctaaaaaaaaatatctttgagatggttgttaaaccaacaattaatggtttgagaaatattggagtgaattattttggcttcatgtattttggattaatgattaagaatgacattccaaaagttctggaatttaattgtcgattaggcgatccagaaactcaatgtttgatgatgcagatgaagtcagacctcttagacataatccttcaagcctttgaaagaggagaaccaaaaattacttggaacaaaggagctaatcttggggtagtcattgcttcggctggatatccaaataattatcaaagaaataaacttatcaaattatctagatttgatggtgttaaattgtttcatgctggtacgaaaattgtggaaggaaaactaattacaaatggtggaagagtctttagtctcaatgcctccagtaaaactattaagtcttgtaaagaagcagtttatacaaatataaaaaatgtgtattttgaagatatgattttcagaaaagatattggagaagtttatgaatcttagt

SEQ ID NO: 314536 - DNA, 1366 bp, Unknown
  Bacterial polypeptide expressing nucleotide sequence isolated from the Sargasso Sea
aatgaatttcttggtcatagggagtggtgctcgagagcacataataggcgaaaaaattgttgagtctggaggtaatctttactcagtcttaacaaatagaaatccaggcctccttaagatttcaaggaagacggtttcagtatctgattatagttctagtgattcaaaaaagattattatggattttgctaaaacaaatgatgtggagtgcgtggttataggtccagaagatcctttagctaatggttttgcagatatgtttatgaaaactggaatatctacagtagggcctgtcagtaacttagcacaaatagaaacgagtaaaggatttactagggatttactatcaaagtatggcattgattgctcacccagataccaaagatttagttccttatctggagtaagagaatttttagacttactttctgatgattttgttgtaaaatatgatggtttaatgggaggtaagggagtaaaggtttcaggcgagcatcttcatagtcatgaagaggctttggcttattgtgagcacttaatctctaattcaggcacttttgtagttgaggaaaaaatatttggagaggagttttccttgatgagtttttgtgatggcaataaattgattcatatgccagcagtccaagatcacaagagagcttatgagggagacttaggacctaacactggagggatggggagttattctgatgcaaaccattctctaccatttttattggatcaggaagtaagagaagctcaggtgattaatgaaagagttgccacctctcttaagcaagaatttggtgttggatacaagggaatattgtatggtggttttatggcaactaaagatggtgctaagttgattgaatacaatgcacgttttggagatccagaggctatgaatttgctcagccttctagatactgatttcgctaaaatatgttttgatattggctccgggaatttagagattgcaaatttcaggaaggtggcttcggtttgtaaatacatagttccggaaggttatggttcaagtcctaatagcgaggcaactttagtggtagatgaagcgtacaatgactattccaatttgtactacgcagcagttaacctggaaaacgatgatactatctcaacaaccagttcaagggctgcaggtattgtatcaacaggagaaagtttatcagccgctgaagagtcgtgcgagatgggattgagcaaaatctcaggaaaaaatttgtttgttaggcatgacatagcaaaagctgctttaattcagaaaaagaatagacaatatggagaatattcggtcatgattatattagatgtaatcttattggctattggttttcacgttatt

SEQ ID NO: 314537 - DNA, 950 bp, Unknown
  Bacterial polypeptide expressing nucleotide sequence isolated from the Sargasso Sea
tttgattgttggtagcggaggaagggagcatgctttcacttggaaagcttcgcaatccgatcttgttgataaaattttcgtagcgcctggtaatgctggaacttcgctagaacctaaagctgagaatatcgaaatcagttgctctgatattgaaggtctggtttctttttctaaaaaagaaaatattggtcttgtaatcgttggtccagaagatccattggtcaatggaattactgatgcattcactgaagctgggatcaactgctttgggcctgaatcattaggagctcaacttgagggatctaaagattttgcaaaatcttttatgaaaaaacataacatcccaacagccagctatgaaagctttactgatgcagatcaagctaaaaattatattcaggaaaatgaattcccattagttattaaagctgatggattagctgcagggaaaggtgttgtaattgcagaagataacgaaaccgctaataaaacaattgatgaatttattggtgaaacaaaatttggagacgcaagtaaaaaaatcataattgaggatttcctactaggacaggagcttagctatatcgtgatggtggatggaactgaatatcttcctcttgcaacatcacaagatcataaaacaatcggagaaggagatgtggggctcaatactggtggaatgggagcatattcacctgttccatttgtaaatgatcaacttgatacaacaattagggaaaaagttattgagccgactattagaggactttctaaggatggaattatgtttagaggctttctgtatgccggcctaatgattgattctaattataatccaaaggtattggagtataactgcaggtttggagatcctgagactcaaccaataatgctaagactgaaatcagaccttattgatatgattcagacttgcttctctggaggtatta

SEQ ID NO: 314538 - DNA, 1264 bp, Unknown
  Bacterial polypeptide expressing nucleotide sequence isolated from the Sargasso Sea
tatgaaaattgcaattcttggaagtggtggaagagaacatgcgttaactttatcaatttcaaaatctaaaaaaattaagaaaattttttgcattccaggaaatgcgggaacatctgaattagcagaaaatgtatctttagatattaataactttaaattgcttaaaaattttctttcttcgaacggtattaaatttgttattgttggtccagaaaaaccacttgtcgatggagtagtagattttcttgaaaaatttggaataaaagtatttggaccaaataaaactgcatctcaactagaaggctcaaaaatttttacaaaaaatctttgtaaaaaatataaaattccaacagcaaattatggcgtttttaataaggagaatgaagcaataaaatttttaaagtcagcagcacaccctattgtgattaaagctgacaatttagcttcaggtaaaggagtttatatttgtcaaaatattgttgagtcagaaaaggcagtttttgaaatatttaaaggtaaatttggttttactaataaagttttaattgaagaatttctagttggagaagaaatgagttattttattatcagtgatggaaagaaaataaaaagttttgaaactgcgcaagatcacaaaagagttcaagagggagacaaaggaaaaaatactggtgggatgggtgcatactcaccctcaagattatatagcaaaaaattagagcaaaaaattttaaagaaaattattcaaccaacaataaaaggaatttcagatcttggtacaaagtataaagggtttttatatgcaggtttgatgatagttaacgatgaaccttatttaattgagtataatgtaagaatgggcgatccagaatgtcaaactattttaccaaaattaaaatctgacttatttgaaattttggatgcctgcgttgaagaaaatctttcagatataaaaattaaatgggataaaaggaagagtatatgtgtagttttatgttcgaatggatacccagatatttataaaaaagatattaaaataaataattttgaaaaattaataataaataaaaataatttcgtatttcatgctgggacaaaaattaaagaaaatgaaattattgcagtaggaggtagagttttaaattttgtttcattatctgatgatttttctaaagctagaataaatattcataataatttaaaaaaattgaattggaaaaaaggattttataggaaagatattgcttttagagtaatagactaa

SEQ ID NO: 314539 - DNA, 1198 bp, Unknown
  Bacterial polypeptide expressing nucleotide sequence isolated from the Sargasso Sea
catgaatatacttttaataggtggtggtggaagagaacacagtatagccgaggctctctcaaaaagtagtaaaattaatgagctacattgtatacctggaaatgcaggcatagaaaaaatagctaggtgtcataactataatatttcaaatcaaaaggaaattttaaatttttgtgaaaataataatattgatattgtttttataggacctgaaattcctcttgtagagggtctggctgattatcttaatagaaatagtttctttacttttggaccaaatcaaaaagcctctcaactcgaaggttcaaaatcctttacaaaggatatatgtaaaaaatacaatattcctacagcagcatatgaaactttttcaaatgcaaaagatgcgcttgcttatatcgataatcactcaataccacttgtaattaaagtggatgggcttgcagcaggtaaaggagtaataattgcagaaacaaaagatcacgcaattaattcagttaatgaaatattttctggtaaatttgggaatgctggagatgaaattgttattgaagaatttttagatggcgaagaagcaagtttttttattatttcagacggagaatcttttttacccttaacttcggcacaagatcataaaagaattggagatggagatatcggattaaatactggtggcatgggcgcatactcacctgcaccaattatgaataaagatttagaagaaaaaacaataaataaaattattaaacctacaattaaagctatgaacgattatggatcaccttatattggaatattatatgctggtttaatgattaaagataatgagcctaagttaattgaatataatgttagatttggcgatccagaatgtcaggtaataattcctagacttgataatgatttagttgaattactagttaatgttaaagagaaaaacttaaataattatacattgaaatggaaagaaaattttgcaattaccgtagttttagcagctaaagggtacccagaaagctatgaaactggtgatgaaattaaaggattagatgcaatagataatatagatggtgtagaaatattccacgcaggtacaaaaactaaaaataataaaattgttacttctgggggaagagtcttaaatataaatggttatggaaaaaatttagttgatgcaaaggaaaaagcttataat

SEQ ID NO: 314540 - DNA, 1282 bp, Unknown
  Bacterial polypeptide expressing nucleotide sequence isolated from the Sargasso Sea
atggttagtgttttgattattggtagcggaggaagagagcatgctttcacctggaaggcttcacaatctgatcttgtggataaaatttttgtagcgcctgggaatgctggaacttcgcttgagtctaaagctgtgaatatcgaaatcagtcctaatgatattgaaagcctagtttctttttctaaaaaagaaaatattggtcttgttattgttgggccagaggatccattggtaaatggaattactaatgcattcatgaaagctgggattaactgttttggacctcaatcattaggagctcaacttgagggctcaaaagattttgcaaaatcttttatgaaaaaatataacatcccaacagctagctatgaaagctttactgatgcagatcaagctaagaattatattcaggaaaatgagttgccacttgtgattaaagctgatggtctagctgcaggaaaaggtgttgtcatagcagaaaactatgaaaccgctataaaaactattgatgaatttataagcgaaacaaaatatggagaagccagtaaaaagatcataattgaggaatttctaataggtcaagaactaagttatatagttatggtagacggaactgaatatctaccccttgcaacctctcaggatcataaaacaatcggagatggagatgttggtctcaatactggtggtatgggagcgtactcacccgttccatttgtaaacaacgaactggatactacaattaagaaaaaagttatcgaacctactgttagaggtctttctaaagatggaattagtttcagagggtttctatatgcaggcctcatgattgactctaatatgaatccaaaagtattagagtataactgcagatttggagatcctgagactcaaccaattatgctaagactgaaatcagaccttatcgatatgattcaaacttgcttctctggatccattagagattataatgttgagtgggatcataaatcagcgatgggtgtcgtaatttctagtcatggatatccagaatcatacgaaactggcaaagaaattattgggctcgacactctttctgatagaaaagatattaaagtctttcattctggaacacgctcagagaatgatagaatccttacaaatggaggaagggtattatgtgtgacagctcttggggatgatttaaatcaatctaatgaaaacgcataccgtgtcgtagatcagattgactgggatggaaaatattttagaaaagatattggtttcagagtgatgaaataat

SEQ ID NO: 314541 - DNA, 721 bp, Unknown
  Bacterial polypeptide expressing nucleotide sequence isolated from the Sargasso Sea
atgaacattggaattattggaagcgggggcagagaacattccttatgctttaaactaaaagaatcaaaaaaagttgataaaatttattgttttccaggtaatgctggaactggacaaatagctgaaaatattaatatagacgtttcaagctttaaaaaaattaaagaagagtgcttgaaaaaaaatattaaattattagtagttggacctgagcaacctttagtagatggaatagtagaatattttaatgatacaaaaattaaagtttttggcccaaataaaataagttctcaattagaaggctcaaaaacttttacaaaaaaactgtgcaaaaaatataatatcccaacatctaattttgaaatctttaatgatgaaaaatctgctttaaattatcttcaagataaaaaatatcctttggttattaaagctgacggattagctgctggaaaaggagtctatatttgtaaaaatgaaaatgaagcaaatacagcaattaaagaaatatttaatggacgctttggtaatgctaaatgcgttttaatagaggaatttttatttggagaggaaatgagttattttattatatgcgatggatcaaattataaattttttcaaactgcacaggatcataaacgagttggtgagaatgacactggaaaaaatactggaggtatgggagcatactctccatcaagactttatacttctgaattagaca

SEQ ID NO: 314542 - DNA, 645 bp, Unknown
  Bacterial polypeptide expressing nucleotide sequence isolated from the Sargasso Sea
tatgaaagttggagtaataggaagcggtggtagagagcatgccatatgcacatctttaaaaaaatcaaaaaatattgacaaaatttactgttttccaggaaatgcaggcactagctttattgcagaaaatattgagattaaactgaataattttgaggaattaaaaagagttatagaagaacttggtatagacataataatagtaggtcctgaaaaaccactggtagatggaatagtcgacttcttggaactaaacaaaattaaagtatttggtccagatcgtatttcctcacaacttgaaggttcaaaaattttcacaaaaaatttatgtaaaaaatataatattcctactgcaaaatttggtgtcttcaatagcattcaagacagtctttcattcttaaatgagtgtaaatttcctatagttgttaaggctgatggtttagcagcgggaaaaggtgtctatatttgtgagaccaatgatcaatcaaaaaaagcagttgaggaaatttttaatggtaaatttggagaagcaaaacaaattttaattgaagaatttttaaaaggtgaagaaatgagtttttttataatttctgacggcatcaattataaaatatttggaactgcacaagatcacaaacgagccct

SEQ ID NO: 314543 - DNA, 1216 bp, Unknown
  Bacterial polypeptide expressing nucleotide sequence isolated from the Sargasso Sea
ttggcatggaaattatctaaatccaaacaagttagcaaaatttttgttgctcctggaaatggtggaacagctaatgaagcaaaatgttttaacaaaagcataaacgtaaataatttttctgcattagaagaacttgttaatagtgaaaatattgaattaatagtagtaggacctgaagatccacttgtaaacggcatcaatgactatttccaagattcaggagtaaaagtatttggccccacaaaagagggcgcccagcttgaaggttcaaaaatattttcaaaaaaatttatgtttgaaaataatattcctacgggtgctgctaatttcttttctgaatcaaaattagccaaaaattatcttcagacagtcaaatttccaattgttcttaaagctgatggccttgctgcaggtaaaggagttttagttgcaaaagaattaggtgaggcaatgcaatggattgaagatgttatggaaaaaaataagtttggtgatgctggtaatgaagtgttaatcgaagagtgtttatttggtacagagctaagctatatgggaataatgacacctaaaggatttttcccttttgaaacaagtgtagattacaaaccacttttagatggtaatagtgggccaaatactggtggaatgggttgtatgagtccatcgccatttatgaatagtgagcttttaaaaaatataaatgaacaagttgttgaaccgactgcacatggattgagaaaggcgaaaatagatttttatggttttatgtattttggcctcatggttaaggataatcagcctaaagttcttgaatataattgtagattgggtgacccagaaacacagtgtttaatgcttcaattagaatctgacatacttgaagtactattggatgcactttcagataatctggaaaatatttcatggagcaaagaaagctcaatgggtgtcgtaattgcatcaggtggatatcctgaaagctataaaaaagatcagcatatagaaattttagatttgaatgaagtgaaactttttcatgcaggtacaaaaaaagagaatggagaactgctcacgagtggtggaagagtttttagcctcaatgcaaaagctccagacttagaagcttgtaaaaaaactatttatacaaacataaagaatataaaatttaataatatggtttatagaaaagatataggtgatatttatgagtcttgaa

SEQ ID NO: 314544 - DNA, 1174 bp, Unknown
  Bacterial polypeptide expressing nucleotide sequence isolated from the Sargasso Sea
attggaaaattctattagcaatgtcgatataaaagctgatgatattgagggattggcacagtttgctatcaatgaacaaatcgacttaactatcattgggccagaaaatcctttggtcaatggcataactgataaattcgaagaatcaggattaaggtgttttggaccatcaaaaggagctgcgcaacttgaaggatctaaaaagtttatgaaagatttccttaaaaaatataatatccctacggcggaatattctgcgttcaccgaccccgttaaagcgattgactatgtaagagaaaaaggatgccctattgtaatcaaggctgatggtctagctgccggaaaaggtgtaacaattgtaaataatattgatgaggccaaagaggcaatagatctggcacttgaatctgaaatttttggagaagccggaagaaaaattgtaatagaggagttcctgaatggagaagaagcaagttttatcgtaatgaccgatgggataaatgctattccttttccaacttcacaagatcacaaagccagagatgaaatggacagaggaccaaatactggtggtatgggtgcatattctccagcaccagtagttgatagcattgtccataagaaaatcatgcaagatgtaatttatcctactctaaaaggcctgcaagaagagggttttaagtacgttggttttttgtatgctgggatgatgatagatcaaaataaaaatctaaaagtactcgaatttaattgccgttttggtgatcctgagacacaacccataatgatgagactcgaatctgatctagctgacctctgttttaaagcatgtgaaagtaatcttagcaatcaaacacttgagtggaatgaaaaaaaatctcttggggtggtgattgctgcagaaggatatccttctaagtatgaactgaataaaaagattaagaacatcccttcagaaaaaaatgatcttaaggttttccatgctggcactagattactagaaggcagcttaacttcaaatggaggaagggttatgtgcgtcactgcattgggttctacgatacaatctgctcaaaaaaaagtttataatgcgatatccgaaattgcttatgaagacgctttttacagaaaagatataggttacagagcaatagctagagaaaaagagaaatga

SEQ ID NO: 314545 - DNA, 1318 bp, Unknown
  Bacterial polypeptide expressing nucleotide sequence isolated from the Sargasso Sea
gatgtcaaccaacatccttttaattggttcgggtgcaagagaacatgctattgcaagatcatgctctaagtcttcattaaattataaaatcttttgcattggaagcggatataatcctgggattatgggcaaatgcgaagacctagttgttgcaaattttaacgaccctaacgttgttactaactacgctaaagaacataaaattaattatgctattattggtcctgaaaaccctctccaggctggaatagctgatgctctttggaaaattaatgttaaagtttttggaccaactcaatctcttgcacgtatcgaaacatccaaagagtttgcgcggaaaatgctgaaagattttaacattcctggaggtccaatatttaaaagttttatatcgttaaaaggagtggaagaattttgcaatgatcttcaaaatgagtttgtaattaagttcgatgggttggctggtggaaagggtgttaaagtctttggtgaacatttacatgggatgggccaagctttagattactgtaaaaatattataaataaaggtggaaaatttttaattgaagaaaaattcattggagaagagttttccttgatgagtttttgcgacggtgaaaccatccaacacatgcccattgtacaagatcataagcgcgcatatgaaaacgatacggggcccaatactggtggaatgggtacctattctaatttcgatcactcattaccgtttttagaagcgcgagacgttgaggctgcaaaaaggataaacgaacttactatgcgcgcactgaaagaaaaaacaggtatgaattacatgggggtactctacgggggtttcatggcggttagggatggtgtcaggcttatagaatacaatgcaaggtttggtgaccccgaagctatgaatgtattatcgttattagagacagacctaatcgagatctgtaaagctgtaacagaaaaaaagctttcaaacataaaaatccaatttgataaaaaagcgactgtatgcaaatatgccgttccccagggatatcctgacagccctataaaaggggaaaagatcgatacgtccaatgtgaaaaatattgattctttatattttgcatcagttgacgaagtagatggaaatcttattgagtcagggagcagaaccctcgcagctattggtgttgcagatacgatagttgtcgctgaaaaaaccgctgaagaatcgattagcaatgtcaaaggtccgcttttttataggaaagatattggaagacaaaacctattaaacagacgaattgaaaatatgagaaaacttagatgttaa

SEQ ID NO: 314546 - DNA, 1300 bp, Unknown
  Bacterial polypeptide expressing nucleotide sequence isolated from the Sargasso Sea
catgaaagtattagttattggtggcggcggccgcgaacatgccctagcttggaaagcggcacaatcacctcaggtagagctggtttatgttgcgccgggtaacgcgggcacggctctcgaaccaaagcttgaaaacttaaatatcagtgcaactgacattcctgccctgctcgattttgctaaaaccaatcagatcgaactcaccatcgttggcccagaagcgccgctggtattaggtgtggtcgatgcctttaatgctgcgggtctgcccatttttggcccaaccaaagcggctgcgcagttagaaggttctaaagccttcactaaggactttttagcgcgccacaatatcccaaccgcgggttataaaaactgtaccgaaatccaagatgctaaagccttcgtgcgtgaactgacgggcaagacgggttacccagtcgtaatcaaagccgacggtttagccgcaggtaaaggcgtgatcatcgcccaagaccaagccgaagcggatgccgccatcgaagatatgctcgcaggcaacaagtttggtgatgcgggttctcgtgtggtgatcgaagaattcttaaaaggcgaagaagccagctttatcgttatggtcgatggtaaaaatatcctcgccatggcgaccagccaagaccataaagcccgtgataacgccgaccacggtccaaacactggcggcatgggcgcttactctcctgcacctgtggtcacccaaagcgtacacgattggacaatcgctaacgttatccgcccaacggttgatggcatggcggctgaaggcaatgtgtacacaggcttcctgtatgcgggtctgatgattgcaccagacggcagcgccaaagtactggaatacaactgccgctttggcgacccagaaacccaacctattatgatgcgcttaaagtctgatctggttgaactgtgtttagccgccacacgtggcgagctggataaagtcaccgccgagtacgatgctcgcgccgcagtcggtgtcgtgttagccgctggcggttacccagacgactaccgcaaaggcgatgtgatccaggggttaagcctaggtaatcacgatgccaaggtcttccacgcgggtactgagatgaaagacggccatgtggtcaccaacggcggccgcgtgttatgtgcgacagccttaggacacacagtgaccgaagcacaaaaagccgcttatctgctggttgatgaaatccactgggatgatgtgtatttccgtaccgatattggttatcgcgccattgcccgcgaacaacagggctaa

SEQ ID NO: 314547 - DNA, 798 bp, Unknown
  Bacterial polypeptide expressing nucleotide sequence isolated from the Sargasso Sea
tatgaaaattgcaattctaggaagtggtggtagagaacatgcaattgccatgcaaatagcaaaatcacataatcttgatgagttgtactgtattccaggaaacgctggaacaaattcgattaatgaagtcgcaaaagtttataatgttaatttggatattaacaattttgagattttaggaaaatttattgacgaatataaaattaacttggtgattgtgggtcccgaaaaacctcttgtagaaggagttgtagattttctatcaaaaaaaaaaataaaaatatttggtcctaacaaaaatgtttcacaacttgaaggttcaaaaatatttacaaaaaaaatatgtgaaaaatataatatacccacatcaaaatttgggatatttgcttcaaatgaagatgcttgtagatatttggaaaatgcaaatatgcctatagtggtaaaagcagatggcttagcagcaggaaaaggtgtttacatatgtgaagatataaaaagtgcaaaaagtgcagtcgatgaaatattcaatggaaaatttggtaaagcaaatcaaattcttatagaagaatttttggaaggagatgaaatgagttattttgtaatatcagatggaaaaacatttaaaagatttaatactgcacaagatcataagagagttggggaaaaagacaaaggcaagaatactggaggaatgggtgcatattcaccatctggacttattaacgaagatttagattcaagaattcttgaaagaattgtaaaaccaacttttgctgcgattaaagatatgggagaaac

SEQ ID NO: 314548 - DNA, 1018 bp, Unknown
  Bacterial polypeptide expressing nucleotide sequence isolated from the Sargasso Sea
gatgaatgttctaattgttggtagcggcggaagagaacatgctttcacctggaaagcttcacaatcaaaccttgtagaaaaaatattcatagcacctggaaatgcaggtacttcaattgagccaaaagctgagaatatagatatcagtgcctctgatattgattctttggtaactttttcaaagaaagaaaatattgatctcgtgattgttggtccagaagatccattggtaaatggtattactgatgaattaaaaaaggttggaataaaatgttttggaccagaatcaatgggtgcacagcttgaaggctcaaaagatttttccaaagcttttatgaaaagacataacatcccaacagcaggctatgagagcttcactaatgcatatgaagctaagaaatatattcaggaaaatgagttacctaaagttattaaggctgatggtctagctgcagggaaaggtgttgttatcatagatgactatgagatcgcttttgaaaccatagatgaatttattagtgagaaaaaatatggcgatgcaagcagaaagatcataattgaggactttctagtaggccaggaactgagttatatcgtgatggtaaatggaactgaatatttgccacttgcaacatctcaggatcacaaaactataggagaaggtgatgttggactcaataccggtggtatgggtgcatattcacctgttccattcgttaatgatgaactagatactataattaagaaagaggtcatcgagccaactgttagaggcctttctgaagatggaattccttttagaggatttttgtatgctggccttatgattgactctaacttgaatccaagagtactagagtataactgcagattcggagatccagaaactcaaccgataatgttaagattaaaatcagatctcattgatatgattcaaacttgcttcacaggggatattggtaattatgaaattgaatgggatgaaagatcagctatgggtgtcgtaatgtccagtaaa

SEQ ID NO: 314549 - DNA, 793 bp, Unknown
  Bacterial polypeptide expressing nucleotide sequence isolated from the Sargasso Sea
catggccatctcgtccacccgtccccacgccctgcccgacctgcggcgggtgctcgttgttggtggtggcggccgcgaacacgccctgagctgggccctgcagcgccatgacgccattgagacggtctggatcaccccgggcaacgccgggagtgaccagcaggccctcgccatcgcggagaccgacagcgccgccctgatcgcccattgccagacgcaatccgttgatttggtcgtggtggggccggaagcccctctggctgctggggtggccgatgccctgcggcaggccggcatcgccgtgttcgggccaggggccgaaggggcgcaactggaggccagcaaggcctgggccaagcagctgatgcaggaggccggggtgcccaccgccggccattgggcggtgaccagcgaagcggaggccctggcagtgctggcggaggtgggccggccgctggtggtgaaggccgatggcctggcggcaggcaagggggtcaccgtcgccgacacgatcgagcaggcggaggcggcgatccgggacgccttcgccggccgcttcggcagcgccggctcccatctggtgctggaggagcggctgcagggccccgaggtgtcggtgttcgccctctgcgatggggagcggatggtgctgttgccaccggcccaggaccacaagcgattgctggagggtgaccggggccccaacaccggcggcatgggggcctacgcccccgcaccactgctggatgccgaaggcctggagcaggttcgccgtctggtgctggagccaacg

SEQ ID NO: 314550 - DNA, 1267 bp, Unknown
  Bacterial polypeptide expressing nucleotide sequence isolated from the Sargasso Sea
tatgaaaattgcaattctaggaagtggcggtagagaacatgcgcttgctgttcaaatttcaaaatcgaaaaagcttgataaaatttattgcatacctggaaatgcaggaacagattcgattggaaaaaatgtaaatttagaactggataacttcgatgaaatttatagatttataaaaaatgaaaaaattgacttagtcatagtaggtcctgaaaagcccttggtagatggaatagtagactatctcaatgaaaaaaatattaaagtatttggacctaatcaaaaagttgctcaactcgaaggttctaaaatttttactaagaaaatttgtgaaaaatataatatcccaactgcaaattttggaatttttagggataaagaggaaacttttaagtttttacaaaatagtaaaatgcccttggtgataaaagcagatgggcttgcagcaggtaaaggtgtgtatatatgcaaagatattgagagttcaaaaaatgcagttatagaaatatttaatggaaaatttggtaaagcagatcaaatattagtagaagagttcttagaaggtgacgagatgagttattttgttatttctgatggattatgttttaaaagttttaatacagctcaagaccataaaagagtcggcgaaggtgacactggtaaaaatactggaggaatgggatcttatgctccttcaaaacttattaataaaaatttagaggaaaaaataatcaatagaattatcaaaccaactttaagagcaataaaagatatggatcaaatatataatggatttttatatgcaggattaatgattaaggataatgaaccatatttaattgaatacaacgtaagaatgggagatcctgagtgtcaaactattttacctctattaaaatcagacttattggatttaattattgcaagttgtaacaacaatctcaaagaaaaaaatattgaatggtttgaaaaaaaaagtctatgtatcgtgttatgttcaaaaggttatcctgaaagttataaaaaaaatattgatatacctaacctacaaaagataaaatcaagcaataataactttatataccacgctggaaccaagatttcagataatgcaattcttgctgtaggaggaagagttttaaactttgtctcaatttcagataattatttagactctagaaacgaagctattaatcaaatagaaaaattaaattggaaaaatggattttatagatctgatataggtttcaaagttattgataaatga

SEQ ID NO: 314551 - DNA, 1171 bp, Unknown
  Bacterial polypeptide expressing nucleotide sequence isolated from the Sargasso Sea
atgaaaaaggttttagttttggggtctggtgcgagggaggttgcaatagctaggagtgtttcccaaagctcaatcaaaaatgctatcttttgtatttcaaaagacataaaccctcaaattaatgatctttgtgaagactaccttgtatgtgatgttaatgatgttgccagtattgtctcttatgctaaagaaaaagaaattgatttggtaattgttggacccgaaaaccccctagcaagtggggtagtaaatgctcttgaaaaaaccggcgttgggtgtgttgggcccaaaaaagaggttgcaatgatagaaactagtaaggcttttgcaagaatgataattgatctttgttgtccagaaaaaaaccctcaaaggaaagagttcgtttcaatcgcgggtgtaaaaaacttcatggaaactcttgggggagagtatgttgttaaatttgatggtctcatgggtggaaaaggtgtgcgcatttcaggagaacacctcaaaaacttgaatgagggccttgattatgccaatgaaataataaaagatggtggaaggtttttagtggaagaaaagcttgttggtgaagaattttctttaatgagctttgttgatggcaagacctgtaaacacatgcctattgtacaagatcacaagagggcgttcgagggagatgtcggaccaaacaccggggggatgggcacttactcttatggaaaccactcccttccttttctaaaaaaagaagatgttttagaggctcaaaaaactaatgagcttgttgctaaacaacttttaaaacacaccggctcgccctatgttggcgtgttgtatgggggctttatgttaaccaaagacggcatcaaggtgattgaatataatgctaggtttggagacccagaagcgatgaatgtgttgtccatactaaaatcagactttctatctgtttgtatttctatggttgagggaaggcttgataaagagagtgttttgtttgacaagctggccaccgtatgtaagtatgtagtgcctgtagggtaccctaacaatcctgcaaaggggtttgaagttttttgtgaccaagacgatccatctttgtttctagcgtctgtaatgttaaaagataaaaaactcatagcatgtgggtctagaacagctgctgtcgttggaaaaacaa

SEQ ID NO: 314552 - DNA, 1318 bp, Unknown
  Bacterial polypeptide expressing nucleotide sequence isolated from the Sargasso Sea
aatgataaacaattttttagttataggatcaggtgcaagagagcatgcaattgtaaatgctttgtattcatcaaggttagactctaaaatttattgtatcggtaatagttataatcctggcattatgaaattatgctttgaatatgtagtgggtgattataatagttcatcttttgtcgttaattatgctaataaaaacaaaatcgattatgctattattggaccagaaaacccattagaagctggcgtttcagacgcactttgggaggcaaacattaaggttgttggccctaaaaaagaattagcaaaaattgaaacctcaaaagcctttactcgaaatctgcaagttgattatggtatacctggaggaccaaaatttcaatcttttacaacattaaatggggtagcagaatattttgaagaactaaatcatgaatttgtaattaagtttgatgggcttgctggaggcaagggtgtaaaagtatatggagagcatattgaaaccatacctgatgcactggattactgtaaaagcataattgattctggaggcagtttcttaattgaagaaaagtttattggggaagaattttctttaatgagtttttgtgatggaaaaaacattcaacatatgccaattgttcaagaccacaaaagagcctatgaaaatgactcaggaccaaatactggaggcatgggaacctactcagattataatcactcattgccttttctaaatgatacggatatcgaaagcgctaaaaaaattaacctattaacgatggaagcgttaaagaataaaactggcatggattatattggtatactctatgggggattcatggcagtaaaaaatggcgtaaggctaattgagtataacgcaagatttggcgaccccgaagcaatgaatgttttatccatattaaaaacagattttattgatatatgcaaaagaatggtttcagctagcttagataaaataaagattgaatttgagaataaagcaactgtctgtaaatattctgttcccaatggttatccggataaccctgtaaaaaatcaaattatagatatatcagatataaaagataaagataagcttttctatgcatcagtaaatattgaaggtgataatcttattgaaactggtagtagaacattggcagtcatatctgttgcagaaaccattgttgatgctgaaagatctgctgaagataatatcaaaagagttaagggcccagtttttcatagatcagatataggtactaaagaattagttgatagcagaaaaagcaatatggataagattagatgttaa

SEQ ID NO: 314553 - DNA, 1285 bp, Unknown
  Bacterial polypeptide expressing nucleotide sequence isolated from the Sargasso Sea
atgaaagttcttgttataggtagtggcggaagagaacatgcgctagcttggaaattatcaaaaagtaatctggtttctgaaatttttgttgctccaggaaatgggggaactgaaatggaagaatcaatcaaaaatattgatatagattcaaatgatataaatgggttactagactttgctgaacaatcaaatatagatttaaccatagtaggtcccgaagatcctttagtatgtggcataacagataagtttcaagaaaatggcctattatgttttggaccttctaaagacgcagcaagattagagggctctaaagagttcatgaagaatttcttgcagagacataaaattcctacagctatttataaaacttttactgattcaaaaaaagctattcgttatgttaaggaaaaaggatgtcctatagttataaaagccgatggactggctgcaggtaaaggcgtaactgttgcttttaatattgatcaagctaatgaagctatcaaccaatcattaaattctcatgcctttggtgatgcaggatcaaaaattgtaattgaggaatttctggaaggtgaagaggctagttttatagtactaacggatggaaatactgtaattccttttgcctcttctcaagaccataaagctagagacgacggagatttaggtcctaatacaggaggcatgggtgcctactcacctgcacctgtcgttacagaatctgttcatcaaagaattttaaaggaagttatacatccaacaattcaaggtcttaagtctgagggtattgattattgtggatttttatatgcgggagttatggttgactcaaatgacaatatcaaagtcttagaatttaattgtagatttggagaccctgaaactcagcctattatgatgcgtttaaaaactgatttagctgaactatgcttacaagcctgtctgaaagacttatcaaatcaagatttagattgggatgatagaaaatcaataggagttgtaatggcttctggtggatatccttctgattatgaaaaaggaaaaattattgaaggcatcactgatgaatcagaagaccttaaagtatttcatgcgggtactacttatgaagaagggaaaatcataactaatggcggtcgggttctttgtgtaacaactttaggagaatcagttttgttagctcgaaaaaaagcttatgatgcaatctcgcaaattgaatggaaagactgtttttatagaaatgacattggctatagagctatagaaagggaacaaaattgaa

SEQ ID NO: 314554 - DNA, 1309 bp, Unknown
  Bacterial polypeptide expressing nucleotide sequence isolated from the Sargasso Sea
atgaacatcttgattattggctctggagcaagagagcatgctattgcaagagccttgcataaatcgcccaaatcaaaatttatttattgtttagcttcaaataataatccgggcatcaaaaagctttgttatgatatgcaagtcatcgatataaacaataatgaattagtcgtacaatattcaaaaaaaaataatatttctctagctattataggacctgaaaatcctcttgcaaatggggttgttgacatgctaggtaaggctggtgttcaagctgtagggccaacgaaggagatggcaaagattgaggcgtctaaatcctttgctagggacttattgcttgaatataatataccagcatgccctaaatacaaggtctttaaatcaacagagggagttaaagcctttttaacagatcttggtgaaggttttgttgtaaaatatgatggtctggctggggggaaaggtgtaaaggtttccggtgaccaccttaactcacacgaagaagctatgaagtattgtgatgaaattatacaaaaaggggggaagtttgttgtagaagaaaaactggtaggtgaagagttttccttgatgagctttagtgatggaaaaacccttatacatatgcctgccatacaagaccataaaagagctttagatggtgatttaggtccaaacactggcggcatgggaacatattccgccgccaaccattcattgccgttcctaaataagaatgaggttaaaaaggctcaggaaatcaattctttaacagcagctgcattaaaaaagaaatttggatatggctataaaggtattttatatggtgggtttattgcaacctctaatggtgtaaagctaattgagtataatgcgcgttttggtgaccctgaggcaatgaacgtgttgtctttattgcagtctgattttgtagacatatgtacttctatagctaatagtaatttgaaaaatactgatattagttttttaaataaggccagcgtttgcaagtacgcggttcccagcggatatccaaacaaaccaataaaaggggaagagattaatgtggataatgtttttgaacctgatatgttattttatgcttctgtaaccaaagagggggataggttaattttggctggaagtcgtgccgttgctgttgtagctgttgaagaatctatttcagaagcagaaaaggttgctgaaaatgaaatttgctctataaaaggccctttgttccatagaaaagatatcggtaaagaatcccttattcaaaatagaattaatcatatgaaaagtattcgatgat

SEQ ID NO: 314555 - DNA, 1264 bp, Unknown
  Bacterial polypeptide expressing nucleotide sequence isolated from the Sargasso Sea
ttggttaatgtcttagttgtgggcgctggaggacgcgaacacgcactgtcatggaaattatcaacttctgaaaaaattgatcaagtatatacagctcctggaaatggtggtacacttcaaaatgttgaattatctgttactgatattgaaggattagcaaaatttgctcaagaaaaaaattgttttactgtagttggtcctgaagatccacttgctgcaggcatagttgatgcctttgttgaaaaaggtcttcctatttttggaccctctaaaaatgcagcaaaattagaatcaagtaaaatttgggcaaaagaattcatgaaacgaaattcaatccctactgcagattttgaaatatttgatgatgcacaaaaagccaaagattttgtaaaatcatatgaaaaacctgttgtaataaaggccgacggtcttgcagcaggaaaaggtgttattgtttgtaaaaataaagatgaagctaatgacgctattgatacaattttaacaaaaaaatcattcggtgatgcaggatctaaaattataattgaagaaagaattgatggcgttgaagcatcatacattgcgttatgtgatggaaaaataggaattcctatggctacgagtcaagatcataagcgagtttttgataatgatgaaggtccgaacactggaggcatgggtgcatattctcctactcctataattgatgaaaagcttggaactgaaattcaagaaaaaattattgataaaacaattcatgcaatgcgtgatgaaggatttgagtttaagggattcttgtatgctggaataatgattaaagatggcattccatatgttcttgagtacaatgtacgcatgggtgatcctgaatgtcaaccaatactaatgcgtcttgattctgatttgtatgattatcttcatgcatcgtatgaaggaaaactaaatgagttgcctgaaatttcttggaaaaatcaatactcggtatgtgttgttcttgcgtccaaaggatatccatcatcatatcctactggagatgaaattactggatttgaaaatatttcctctgacgcatttgtttttcatgccggaacaaaaaaacaagatgataaaataaaatctaatggtggacgtgttcttggagttaccgcattaggttctagtcttgaagatgcaataaacaatgcatacgatgcatgtaaccacatacattggactaacaaataccatagaaccgatatcggaaaaaagggcctatctaatttatgat

SEQ ID NO: 314556 - DNA, 1171 bp, Unknown
  Bacterial polypeptide expressing nucleotide sequence isolated from the Sargasso Sea
atgaatgtacttgtaataggtagcggtggaagggagcacgccctatgttatggtataaaacgatctccaaattgttctaatttatattgcatcccaggtagtgatgctatcagtaaaattgcttcatcaataaatatagatattaatgatcaaaatgctattcttcaattttgtgcagaaagtaaaattgatcttgtggtaataggtccagaattgcctttaactaaaggattatcaaaccttttaatggacaattctatattagtttttggtcctgatcagatgggagctgagctagaaaaatcaaaaaagtttacaaaagatatttgtaaaaaattaaatattgcaacagctgtctatgaagtatttgacaactatgatgatggcttaaatttttgtcaaaaccaatcctatcctcttgttattaaagctgatggtttggcagagggaaaaggagtcattatttgtcaaacaaaggaggatgcaaaagatgcacttattaaatgttttaaagataattcttttggtgatgctggttcagttgttgttattgaggagtttttagttggtgaagaggtaagtttattttcacttgttgataaaaatggatttgtgttaccacttactacagcacaagatcataaaaaaatcttagaaggagaaaaaggtttaaacactggtggtatgggagcctacacacctgttccttctatttcatcaaataaaatgaataaattatccaaaacatttgttgagcctattattcaacatcttgctgaacaaggtatctactatcaaggaatgttttatgcaggattaattttaacggataagggtccaaatttactcgaaattaatgttcgttttggtgatcctgaaactcaagcaatcatcccactattagaaacagatttattagaactccttcatgcttcggcgataggcactttaaatgaaatagagaaaattaagtggaaaaatgattatgccatgacagtagtaatggcagctaatggctatcctgaggattataaaaaattcacatcaattaataacttggaaaatcttagtttaacaaaagatgagtatttgtttcatgcaggaacaacacttaaagaaaaccaatggctctctaatggtgggcgagtattaaatatttctagtacgggca

SEQ ID NO: 314557 - DNA, 1195 bp, Unknown
  Bacterial polypeptide expressing nucleotide sequence isolated from the Sargasso Sea
atgaatatacttttaataggtggtggtggaagagaacacagtatagctgaggctctctcaaaaagtagtaaaattaatgagctacattgtataccaggaaatgcaggcatagaaaaaatagctagttgtcataactatgatatttcaaatcaacaggaaattttaaatttttgtgaaaataataatattgatattgtttttataggaccagaaattcctcttgtcgaaggtctagctgattaccttaatagaaatagtttctttacttttggaccaaatcaaaaagccgctaaactcgaaggctcaaaatcctttacaaaggatatgtgtaaaaaatacaatattcctacagcaacatatgaaactttttcaaatgcaaaagatgcgcttgtttatatcgataatcattcaataccacttgtaattaaagttgatgggcttgcagcaggtaaaggagtaataattgcagaaacaagagatcacgcaattaattcagttaatgaaatattttctggtaaatttgggaatgctggagatgaaattgttattgaagaatttttagatggcgaagaagcaagttattttattatttcagacggagaatcttttatacccttaacatcggcacaagatcataaaagaattggagatggagatatcggattaaatactggcggcatgggagcatactcacctgcaccaattatgaataaagaattagaagaaaaaacaataaataaaattattaaacctacaattaaagctatgaacgattatggatcaccttatattggaatattatatgctggtttaatgattaaggataatgagcctaagttaattgaatataatgttagatttggcgatcctgaatgtcaggtaataattcctagacttgaaaatgatttagttgaattgctagttaatgttaaagagaaaaacctagataattatacattaaaatggaaagaaaattttgcaattacagtagttttagcagctaaagggtacccagaaagctatgaaactggtgatgaaattaagggattagatgcaatagataatatagatgatgtagaaatattccacgcaggtacaaaaactaaaaataataaaattgtcacttctggaggaagagtcttaaatatcaatggttatggaaagaatttagttgatgcaaaggaaaaagcttata

SEQ ID NO: 314558 - DNA, 1270 bp, Unknown
  Bacterial polypeptide expressing nucleotide sequence isolated from the Sargasso Sea
aatgaaagtacttgtaattggatcaggaggaagagaacatgcattagcatggaagtctgctcaggataaaagtgttgaacaggtttttgtagcacctggaaacgcaggtacagcgatggaagaaaaaatctcaaatgttcccttaaatattgataaatttgattctgtaaaagacttttgtatcaagaaagatatagaacttgtcattattggtccagagcaaccattagttaatggtcttgcagattatttacaaaataatggcattaatgcatttggtccatcaaaatatgcagctcaacttgaagggtcaaaaacattttctaagaatttcttcataaaacacggaataccaacagcacaatatgcctccttcagtaatttttatgatgctgttgatcatttaaaaaagattgactatccaaccgtggtcaaggctgatggtctagcttctggtaaaggagttattatttgtgatgatcagacccaagctgagaaggcactaaaaagtatgtttaaagaaaaagcttttggtagagctggtaatagagttgtaattgaagattttcttgaaggtgaagaagcatcttttatagctgtagtgagtaaagataaggttttacccttggttaccagtcaagatcataagcctgttggagaaggcgacattggacttaatactggtggaatgggcgcatattctcctgccccaatagtcactcaagaacttaacaaaaaaattatggatgaagttatgtatccgactgtaaatgggcttattgaagaaggtcatccatatcttggatttctttatgcaggcttgatgattaaagataatgaagttaaagtgcttgaatttaattgtcgatttggtgatcccgaaactcaaccaattatgattaggctcaaatctagcttagtccaactttgtttgtcagctcttaaggatgaattggattcacatactattgattggactgataaacattcttgtggagtagtaattgcatctaatggctatcctgaagcatatgaatcaaataaagaagtatcaattcaagattatgacgactctgacgtaaagctttttcatgcaggaacaaaaatccaagatgataaagttgttacaagtggaggaagagttttttgcgcgactgcacttggcactgatttgaaagatgcacaaaagaaagcatataatctcgtcgacaaaatcaattttgaaggcgcattttgtagaaaagatataggttataaaggaataaaatga

SEQ ID NO: 314559 - DNA, 1246 bp, Unknown
  Bacterial polypeptide expressing nucleotide sequence isolated from the Sargasso Sea
atgtacattttggttgttggatcaggcggcagagaacatgccttagcttggaaatgtgcgcaagataaatctgtatcagaggtttttgtttgtccaggaaatgcaggaactgctttagaaaataaagtatctaatgtctctattaatgttgataattttgcagtagttaaagatttttgtattgaaaaaaatattgctcttgtaatcgtaggtccagaacaacctcttgttgatggactcgtagattacttacattcaaatgatatcaaaacctttgggccttctagtgctgcagctcagttagagggctctaaaacattctcaaaagacttttttattaaatatggtattcctacagccacttatgcggccttcgataattttgatagcgcaaaagatcacttaaaaaatatttcatacccaacagtagtaaaggcagatggtttagcagcaggcaaaggagtaattatttgccaaactgaaaatgaagcattggaagctttggtcagtatttttaaagatcaagcatttggagatgctgggacaagtgtggttattgaagattttttaattggagaagaggcaagttttatagcggtggtcagtaaagataaaattatcccacttgcaaccagtcaggatcataaagccgtgggtgatggtgatgttggattaaatacaggtggcatgggtgcatactcacctgcacccatagttgatgaaaaacttcaccaaaaaattattgatgaggtgatgcatccaaccatgcaaggattaattgccgaaggctcgccctatcttggatttttgtatgctggactcatgattaatgatggtgagctgaaagttcttgaatttaattgcagatttggagaccctgagactcaacctattctgctccgattaaaatcaagtctggttgaactttgtcttgcagcaattgatgatcagttaaacgattatcaaattcagtggactgatgaacatgcctgtggagtagtgattgcgagtcaaggctacccagaagactatataaaaaataacgaggtaacgtttgaattctctaatatggagggaaagaaactattccatgcaggaacaaaacttcaagatgataaagttttgacatcaggaggcagagtgttttgtgcaactgctttaggtaaaaatctgcatgaagctcaatcaaaagcttatgatctggtagaatctgtatcattcgatggggctttttatcgaaaagata

SEQ ID NO: 314560 - DNA, 1291 bp, Unknown
  Bacterial polypeptide expressing nucleotide sequence isolated from the Sargasso Sea
atgaaagtactgatcattggcaacggcggccgtgaacacgccctggcctggaaggccaagcaatcccctctggtgacccgggtcttcgtcgcccccggcaatgccggcaccgcccatgaagggagcatcgagaacgtggccatctcggccaccgacatcccggccctgctggcgtttgccaaggagcagcgcatcggtctgaccatcgtcgggccggaagcgccgctggtgaaaggggtggtcgatgcgttccgcgccgaggggctggccatcttcggcccgaccgcggccgccgcccagctggaaggctccaaggcgtttgccaaggactttctggcccgccacgccatcccgaccgccgagtaccagaacttcaccgaggtggagccggcgctggcctacctgcgcgagaagggcgcccccatcgtcatcaaggctgacggcctggccgccggcaagggagtcatcgttgccatgaccctgagcgaagcggaagaggcggtacgcgacatgctctccggcaacgcctttggcgacgccggggcccgggtggtgatcgaggagtttctggacggggaagaggcgagcttcatcgtcatggtggacggcgagcacgtgctgccgatggccaccagccaggatcacaagcgggtgggtgatggcgataccggcctcaacaccggcggcatgggcgcctactcccccgcccccgtggtcacggccgacgtgcaccgcaaggtgatggagcaggtgatcatgccgaccgtgcgcggcatggcggccgagggcaacgtctacaccggtttcctctacgccggtctgatgatcgacggccagggcaaccccaaggtgatcgagttcaactgccgcttcggcgatcccgaaacccagcccatcatgctgcgcatgcgctccgatctggtggagctctgcctggcggcctgtgccggcaagctggatcaggtcgaagccatctatgacccccgcgtcgccatcggcgtagtgctggcggcaggcggctaccccggcgactaccagcagggcaagcccatcagcggcctgccggtggaagaggcgagcggcgagaaggtattccacgccggctcgcagctggaaggcgataccgtggtgaccgccggtggccgtgtgctgtgcgccaccgccctcggccacagcgtggccgaggcgcaaaaacgggcctatcagctggcaggtcgcatcaagtgggacggcgtcttctaccgtcacgacatcggctggcgcgccatcgagcgtgaacagcagcagtaat

SEQ ID NO: 314561 - DNA, 1168 bp, Unknown
  Bacterial polypeptide expressing nucleotide sequence isolated from the Sargasso Sea
tatgaaaattgcaattcttggaaatggtggaagagaacacgctttagcagttaatatatcaaaatcttctagagttaaaaaattatattgtataccaggtaatgcaggaaccaatttaattgctgaaaacgtaaagcttgatttttatgattttgagaaattagaaaaatttgtcaaagaaaatgatataagtttggtaattgtcggaccagagaaaccactcgttgaaggtgttgtagactttcttacaaataaaggtatcaaagtatttggacctaacaaagcttctgcacagcttgagggttcaaaaatatttacaaaaaaaatatgtgaaaaatatgaaataccaactgctcagtttggtgtttttgactcaattgaagctgctaacaaatatttagaaaaagcaaataaaccaattgttatcaaagcagatggtttagcggcaggtaaaggtgtttatatttgcgaggatactgaaagtgcaaaaaatgctgtagtagaaatttttaatggaaaatttggtaaggctgaacaagttcttgttgaggaatttttacaaggagaggagatgagttactttgtaatatctgatggaaaaacattcaaaaaatttaacactgctcaggaccacaaaagagttggtgagggtgataatggtaaaaatactggaggaatgggagcgtattgtccatctggacttataaatgaggagttagacgctaaaattgttgaaaaaataattaaaccaacttttaaagcaattaatgatatgggtgcagtatacaagggatttttatacgtgggactgatgattaaaaataataatccatatcttgttgagtataatgtaagaatgggagatccagagtgtcaaacaattttacctttattaaaatctgatcttttagaaataattttatcctgctgtgaagaaaatttagaaaatagtatagtagagtggaaaaacaaaaaaagtatttgtgttgttctgtgtgcaaaaggatatccagataattataaagaaaatattgaaatttcaaatttagataaaattaaaaatgataagaatagccttgtttatcatgctggaactcaattaattaacaacaaagtttgctcaacaggaggaagagtacttaattttgttagtatttctgatgattaa

SEQ ID NO: 314562 - DNA, 532 bp, Unknown
  Bacterial polypeptide expressing nucleotide sequence isolated from the Sargasso Sea
atgaacgtacttgtaattggcggcggtggccgcgaacacgcgttagcgtttaaagcagcgcagtcttctgatgtttcaacagtatttgtagcacctggtaatgccggtacggctacagagcctaagcttgagaacgtggctattgatgttaacgatattgctggcttggtttcttttgcacaaggcaatgatgttgagcttactatcgtaggcccagaagcgccgctagttgcaggtgttgtagatgcgttcactaacgcaggtttaatgatctttggtcccactcaagctgctgcgcagctagagggttcaaaggcatttaccaaagactttttggctcgtcacaatattcccacggctgagtatcaaaacttcacagaaattgacccagccattgcctatgtgcatgagaaaggcgcgcctatcgtagtaaaagcagacggcctagcggcgggtaaaggcgttattgttgcgatgacccttgaagaagctgaagacgctattcgcgacatgttggcaggcaacgcgtttg

SEQ ID NO: 314563 - DNA, 1234 bp, Unknown
  Bacterial polypeptide expressing nucleotide sequence isolated from the Sargasso Sea
tttggcatggaagtgctctactgataaatttgttgaaaaggtttatgttgctccaggcaatgcgggaacattacttgaagaaaaaatagaaaatatttccttggatataaataacaatgaggatgtctctaagttttgtatttcaaataatattgaacttgtaattgtcggtcctgaagatcctctggtaaatggtttggttgactttcttgaatctaaaaatataaaagtgtttgggcccagaaagggagctgctcagctagagggatcaaaaacctttgcaaaggacttttttataaaatatggcatacctacagcaaattataagtcttttgataattatcatgatgccctgaagtacctcgataagattgatttcccttcggttgtaaaagctgatggccttgctgctggaaagggagttattatttgtaatgatcgagaggctgcagaaaaagcccttgaagatatatttgaatcaaatgcctttggagatgctggaaatagagtagtaattgaagattttttgaatggagaggaagcaagctttattgctgttgtgagtgatgatcaaattattcctcttgcaacaagccaagatcataaagctgttggagatggagatgttggattaaatactgggggcatgggtgcatactcccctgctccaattgtcacagatgagattcataaaagagtgatcgatgaggttatgcttccaacaatgaatggattaaaggctgaaggatttccctatcttggttttttatatgctggcttaatgattgaaggagatgagataaaagtcttagaatttaattgtaggtttggcgatccagaaacgcagccaattatgctcagattagaatctagtcttacaaatttatgtcttgatgcaattaataaaaaacttgatgagcatcaaattgaatggtcatcaatgcactcttgtggagtagttttagcatcatcaggttatccagaagattatgaaacagatatggaaatagatataaaaaatcatttcagtgaaaatgagaaactatttcatgcaggtacaaagtttgtagataataagattctcacatcaggtggtagagttttttgtatgacggctttaggtgaaaccttagaaattgctatagataatgcgtataatgcactccctaaaattaactttgagggcatgttcttcagaagtgatattggtaaaaaaggtttgaaaaatgattaa

SEQ ID NO: 314564 - DNA, 916 bp, Unknown
  Bacterial polypeptide expressing nucleotide sequence isolated from the Sargasso Sea
tatgaaaattgcaattcttggaaatggtggcagagaacatgcaatagcatccaaaatctcaaaatcccctaaacttgaaaaattatattgtataccaggtaatgctggcactgtctcactagctgagaatgtagaactggatttttataattttgaaagtttattgcaatttttaaaagaaaataaaattgatttggtaattgtaggacctgaaaaacctctagttgatggtgttgttgattttcttttaaaagaaaatataaaagtttttggtccaaacaaaaaagtttcacaattagaaggatcaaaaatatttacaaagaaaatttgtgaaaagtacaatattcctactgcacaatttggagtatttagaactgatacagaagcttattcatatttaaaaaatgcaaatatgcctatagtggttaaagcagatggattagctgcaggtaaaggtgtttatatttgtgaggatttagaaagttcaaataaagctgtgcaagaaatatttaatggaaaatttggtttagccgaacaagttcttattgaagaattcttgcaaggagatgaaatgagttatttcgtactttcagatggaaaaacatataaaagatttaatactgctcaagaccataagagagttggtgagggagatataggaaagaatacaggagggatgggtgcatactcaccttctggacttataaatgcagaactagacaaaaaaataatttcaaaaattgttaatcctacatttcaggctattaaagacatgggagaaaattacaaaggatttttatatgttggtctaatgattaaaaacaataatccttatcttattgaatataacgtaagaatgggagatccagaatgtcaaacaattttgccactgttagctaatgatttattagatcta

SEQ ID NO: 314565 - DNA, 1228 bp, Unknown
  Bacterial polypeptide expressing nucleotide sequence isolated from the Sargasso Sea
tttggcatggaaagccgcgcaagaccaatttgttttagaggtatttgtttgcccaggaaatgcaggcacaacgttagaaaataaactgtctaatatttctattgatataaatgaatttgaagctgtaaaaaatttttgtattgaaaaagatattgccttggttattgttggtcccgagcaaccccttgtagatggactagtagattatttgcaaaaaagtaatattaaaacttttgggccttccagtgcagcagctcaattagaaggatcaaaaacattttcaaaagatttttttgtaaaatatgggattccaactgctaattatgctgcatttagcaattttgagagtgcaaaagatcacttagataaaattccctatccaactgtagtaaaagcagacggcttagctgcaggaaaaggagtaattatttgtcaaactaaagctgaagcgttgcaagctttggtaagtatttttaaagataatacgtttggtattgctggagcaagtgtagtcattgaagaatttcttagtggtgaagaggcaagttttattgctgtcgtaagcaaagataaaattattccattggcaacaagtcaagatcataaagcggttggtgatggcgatgtgggacttaatactggtggaatgggcgcatattcaccggcaccaatagtcgatgaaagactgcataaaaaaattcttgatgaggtaatgcagcctactatgcatggcttaattaaagaaggttcaccatatctaggatttttatatgctggactgatgatcaaagatggtgagttgaaggtgcttgaattcaattgcagatttggcgatcctgaaactcaacctatattgttaagattaaaatcaagtttggttgaattatgcattgctgcaattgatgatgatttagataatcatgagattgaatggaccaaacaacatgcctgtggtgtagtaattgctagcgaaggttatcccgaaaactatacaaaaaataatgaggtcaaaattcaagccacagatttagatggagtaaaactttttcatgccggtacaaagcttgatcaaaataaaatttttacatcaggcggaagagtattttgtgccaccgccctaggtaataatctcagagaggctcaacaaaaagcatataatttggtagaatccgttgcatttaatggtgctttctgtagaaaagatattggagataaaggaattagatga

SEQ ID NO: 314566 - DNA, 1279 bp, Unknown
  Bacterial polypeptide expressing nucleotide sequence isolated from the Sargasso Sea
atgaaactactcgtcgtcggttccggcggccgcgaacatgcgctggcgtggaagctcgcgcagtcgccgcgcgtccagatggtctacgtcgcgcccggcaatggcggcacggcgcaggacgagcgtctgaagaacgtcgacatcacggcgctcgacgaactcgccgatttcgcggaacgcgaaggcgtcgcgttcacgctcgtcgggccggaagcaccgctcgcggccggcatcgtcaacctgttccgcgcgcgcggcctgaaggtcttcgggccgacccgcgaagccgcgcagctcgagagctcgaaggatttcgcgaaggcgttcatgaagcgccacggcatcccgaccgccgagtacgaaacgttctccgacgtggctgccgcgcacgcgtacatcgacgcgaagggtgcgccgatcgtcgtgaaggccgacggcctcgcggccggcaagggcgtcgtcgtcgcgatgacgctcgaagaagcgcacgaagcggtcgacatgatgctgtcgggcaacaagctcggcgatgcgggcgcgcgcgtcgtgatcgaggaattcctcgatggtgaggaagcgagcttcatcgtgatggtcgacggcaagcatgcgctggcgctggcgtccagccaggaccacaagcgcctcctcgacgaagatcgcggcccgaacaccggcggcatgggtgcgtattcgcccgcgccgatcgtcacgccgcagatgcacgcacgcgtgatgcgcgagatcatcatgccgaccgtgcgcgggatggagaaggacggcatccgcttcacgggcttcctgtatgcgggcctgatgatcgacaaggaaggcaatccgcgcacgctcgagttcaactgccggatgggcgacccggaaacgcagccgatcatggcgcgcctgaagagcgatttctcgaaggtcgtcgagcaggcgatcgcgggcacgctcgacacggtcgagctcgactgggaccgccgcaccgcgctgggcgtcgtgctggccgcgcacggttatccggacgcgccgcgcaagggcgaccgcatcaacggcatcccggccgagaccgaacaggccgtcacgttccatgcgggcacgacgctcgacggcgacaagctgacgacgtccggcggccgcgtactgtgcgtggtcggcctcgccgattcggtacgcgaagcgcagcagcatgcgtacgagacgatcaaccagatcaatttcgaaggcatgcaataccgccgtgacatcggcttccgcgcgctcaaccgcaagagcgcgtgac

SEQ ID NO: 314567 - DNA, 1084 bp, Unknown
  Bacterial polypeptide expressing nucleotide sequence isolated from the Sargasso Sea
aatgaatatattaatcattggatctggtggaagagaacatgcattggcatggagatgtgcacaagataactttgtaaaaaatgtttttgtttgtcctggcaatgctggtacttatcttgaaaacaaagttagtaatgttgaaatggactcgaatgattttgacgcaattgagaaattttgtgttaaagaaaatattgaattggtaattattggtcccgaacaacctcttgtaatgggtttaacagattttctgcaaagtaaaaatataaaaacttttggtccatcaaaagatgcagcacaactggaagggtcaaaaactttttcaaaagatttttttgttaaatacaacattccaactgcaggatataagtcatttaataattatgaagaatcaattcatcatttagatttaatttcttatccaactgtggttaaagcagatggtttggctgccggaaagggggttattatttgtgaaaataaagatgaagcagttgatgcgctgaatagtatttttaaagataaagcatttgggtctgctggaaataaagtagttatagaagacttccttgatggagaagaagcatcgttcattgctgtcgtcagcaaagataaaattattcctttagtaactagccaagatcataaagcagtaggtgatggcgatgtgggtctcaacacaggaggtatgggtgcttactcccctgctccaatagtgactgatgaaattcataaaaaaatacttgatgaagttatgtatccaactatgcaaggcttaatagatgaaggtactccatacctaggttttctttatgcaggattaatgattaataatgatgaaataaaagttcttgaatttaattgcagatttggtgatccagaaactcagcctattttattaagattaaattcaagtttggttgaactttgtctatcagcaatcaatgatgatcttgatagatattctatcgagtggaccaataaacattcttgtggtgttgtaattgcatcggaaggttatccagaaagttatgaatcaaataaagaggtttcatttgaatcatttgaagaagaaaatacaaaa

SEQ ID NO: 314568 - DNA, 1261 bp, Unknown
  Bacterial polypeptide expressing nucleotide sequence isolated from the Sargasso Sea
atgaaagtattattaataggaagtggggggcgtgaaaatgccattgcttggtcagtttacgcttcaccacttttagaaaaactctattgcattcctggaaatcctggcattaaagaatttgcagtatgcatagatgttaatattaaaaattatgaaaaaatatatgatattattcaaaaatatgaaattgatattgtggtaataggaccagaagctccattagttgatggtttgactgattttttagaaaaaaaacaggtgaaagtttttggtccaagttcttatgctgctcaacttgagggaagcaaagtttttgcaagactgttttgtgaaaggcattctattcctcaaccagactttaaattttattctaatccagaaattgcaattaatgacttgaagtccagtaattcaaaaaatggatatgttataaaagcagatggtttggcttctggaaaaggagtactcgttacagaaaaaattgaagaggcaatttcatttgttgatgatttatataataaagaaatatttggacactctgggaagcaatttttaattgaagaaaaagtttttggcactgaagcctcaatatttacattaatagatggtaagaattatgtatttttgtctacagcacaggattataagagagtttttgaaaataatttaggacctaatacaggtggaatgggcgcaatatctccctcaccattggtagatgaaaaaattttagaaaaaattgaaaatgaaattatcattcctgtaattaatggaatggatcaagaaggaaaaccttttaaaggtgtcttatacacaggcgtaatgctaacagataatggacctaaagttatagaatttaatgttcgtttaggagatcctgaggctcaggtgatattgcctagattaaaatccgattttctaacagctattttagcaacaattgatggaggtttaaaacatctgaaccttagatggcatgaagaaatagcattaaatgttgtattaacatcaagtggatatccgggtaatttcataaaaggtaaaagaattacaggattaaataatattagtaataattcactaatatttcattcggggactaaaagtgataaattgggaaatttacttacaaactctggtagagtgttatctttaacatctttagcaaaaaatatagatgaggctagaaaaaaagtttatggggatataaaaaaaataaaatttgataaggctttttatcgaaaagatattgggctttaat

SEQ ID NO: 314569 - DNA, 524 bp, Unknown
  Bacterial polypeptide expressing nucleotide sequence isolated from the Sargasso Sea
gatgataaatgttctaattgttggtagcggcggaagagaacatgctttcacttggaaagcttcacaatctgatcgtgtagaaaaaatcttcgtagcgccagggaatgcaggtacttcacttgagccaaaagctgagaacatcaatatcagtgcctctgatattgatgctttggtatctttttcagtcaaagaacatattgatctggtgattgtcggcccagaagatccattggtcaatggcattactgatgaattcaaaaaagttggaatcaaatgttttggccctgaatctcaaggagcaagccttgaaggctcaaaagattttgcaaaagcctttatgaaaagacataacatcccaacagcatgctatgagagctttactgatgcaaatgaagccaagaaatatattcagaaaaatgagttgccacaagttattaaagctgatggtctagctgcaggaaagggtgttgtaattgtagaggactatgagaccgcttttaaaaccatagacgaatttatcagta

SEQ ID NO: 314570 - DNA, 496 bp, Unknown
  Bacterial polypeptide expressing nucleotide sequence isolated from the Sargasso Sea
cttgattgctgagggttcatcttatctgggatttttatatgctggattaatgataaaagatgatgagatcaatgttctcgagttcaattgcaggtttggtgatccggaaacgcaaccaataatgatgagacttgaatccagcctagtagaactttgtctggcagcgattaataatactctgggctctcataaagttcgctggtctagtaatcatgcttgtggtgtggttattgcgtcagagggttatccaggaaattatgaaactgataaagaggtggtaataaataatcactctgaagatgatgtaaagctgttccatgcaggtactaaaattcaagataatcaacttgtgacctcaggtggaagagttttttgcgcaactgggaccggagctgatttagctactgctcaaaaaaatgcttataatctcgtttctaagatttcttttaaaggcgcagttaatagaaaagatattggaaataaaggaattagttaa

SEQ ID NO: 314571 - DNA, 797 bp, Unknown
  Bacterial polypeptide expressing nucleotide sequence isolated from the Sargasso Sea
catgattaaagttctaattattggaagcggtggaagagaacatgctttcacttggaaggcttcacaatctaatcttgttgataaaattttcgtagcgcccgggaatgctggaacttcactcgagcctaaagccgagaatatcgaaatcagttcctctgatattgaaggcctagtttctttttctaaaacagaaaacattggtcttgttatcgttggtccagaggatccattggtcaatggaattactgatgcattcaccgaagctgagatcaactgctttggcccagaatcactaggggctcaacttgagggatctaaagattttgcaaagtccttcatgaaaaaacataacatcccaacagccagctatgaaagctttactgatgcagatcaagctaagaattatattcaggaaaatgacttaccattagtcattaaagctgatggattagctgctggtaaaggcgttgtgattgtagaagatcacgaaactgctaataaaaccattgatcaatttattggtgaaacaaaatttggagatgccagtaaaaaaatcattatcgaggatttcctagtaggtcaggagcttagctatatcgtgatggtggatggaactgaatatcttccacttgcaacatctcaggatcataaaacaatcggagagggagatgtcgggctcaatactggtggaatgggagcatattcacctgttccgtttgtaaatgatcaactcgatataacaattagggaaaaagttattgagcctactattagaggactttctgaggaaggaatta

SEQ ID NO: 314572 - DNA, 1270 bp, Unknown
  Bacterial polypeptide expressing nucleotide sequence isolated from the Sargasso Sea
atgaacatactagtaattggttctggtggaagagagcatgctttggcatggaaatgtgctcaagataattttgtaaatcatgtttatgtgtgtcctggaaatgctggtacttttcttgaagacaaagtcagtaatataaatcttgatactaatgactttaaatccattgaagatttttgtttagaagaaaatattgaactagtaataattggtcctgaacaacctctggttgaggggctaactgattatttgcatagcaagaatattaaagcatttggcccctcaaaaaatgctgctcaactagaaggttcgaaaactttctcaaaagatttttttgtaaaatatgacattccaactgcaggatataaatcatttattgattttgagagctcagtaaattatctcgacgaaattgattacccgactgtcgtaaaggcagatggtttagctgctggcaaaggagtaataatttgtcaaaataaaaaagaggctataaaagcattgaacagtatttttaatgacaaagcttttggatctgcaggtaataaagttgttattgaagaatttttagaaggtgaggaagcatcattcattgcagttgtaagcaaagataagattattcctttggtaactagccaagatcacaaagctgttggtgatggtgatgttggtttaaacactggtggtatgggggcatattcgcctgcaccaatagttagtgatgaaattcatcaaaaaattcttgagcaagtaatgcaaccgacaatgaaaggcttaattgaagaaggctctccttatctaggctttctttatgccggcttaatgattaaaaataatgaaattaaagtattagaatttaactgtagatttggtgatcctgaaactcagccaattttacttagattaaaatcaagtttagttaacttatgtttagcagcgattaataatactcttgattcatatgatatcgaatggactcaagaacattcttgcggagtggttattgcctcgaaaggataccccgaaaattatgaatcaaataaagagattcagattaatattaatgatgaaaatgatgctaaattatttcatgcgggaactaagtatgaaaataataaaattctcactagcggaggaagagtattttgtgcaacagctttaggtgttgatttgaaagaagctcaacaaaacgcatataatttagtaaataaagttgatttccaaggtgctttctataggaaagatataggatataaaggtattaaatgag

SEQ ID NO: 314573 - DNA, 643 bp, Unknown
  Bacterial polypeptide expressing nucleotide sequence isolated from the Sargasso Sea
atggttagtcttttgattattggtagcggcggaagagaacatgctttcacttggaaggcttcacaatctgatcttgttgataaaatttttgtagcgcctgggaatgctggaacttcgcttgagtctaaagctgtgaatatcgaaataagtcctaatgatattgaaggcctagtttctttttctaagaaagaaaatattggtcttgttattgttggcccagaggatccattggtagatggaatcactgatgcattcatgaaagctggaatcaactgttttggacctcaatcaataggagctcaacttgagggctcaaaagattttgcaaaatcttttatgaaaaaacataacatcccaacagccagctatgaaagctttactgatgcagatcatgctaagaaatatattcaggaaaatgagttgccacttgtcattaaagctgacggtttagctgcaggaaaaggtgttgtcatagcagaaaactatgaaactgctataaaaactattgatgaatttataagcgaaacaaaatatggagaagccagtaaaaaaatcataattgaggaatttctaataggacaggaactaagttatatagttatggtagacggtactgaatatctaccccttgcaacgtctcagg

SEQ ID NO: 314574 - DNA, 1270 bp, Unknown
  Bacterial polypeptide expressing nucleotide sequence isolated from the Sargasso Sea
atgaacgtattaatcataggatctggcggaagagaacatgctttggcatggaaatgcgctcaagatgattttgttgaacatgtttttgtttctccaggtaatgcaggcactcatttagaaaccaaggttagtaatattgagcttaatttaaatgaatttaactcaatagaaaaattttgtttaattgaaaaggttgggcttgttattattggtccagaacaaccgcttgttgatggtttaactgattatttacaaagtaaaaatatcaaaacatttggtccatctaaacatgcagcgcaattagagggctcaaaaaccttctctaaagatttctttgttaaatacaatattccaacagcaagatataaatcatttgataactttgaaagttctgttgagtatctaaatgagacaagttttccaacagttgttaaagctgatggcttagctgctggtaagggtgtaataatttgccaaaatattgaagaagcaaaacaggcattggatagtattttcaatgataagacttttggaactgctggcaatagagttgtaattgaagagttcttagagggtgaagaagcatcattcatcgctgttgttagtaaagacaaaataattcctctagcaacaagccaagatcacaaagctgttggagatggagatataggtttaaatacaggaggaatgggggcatattcaccagccccaattgtgaccgatgagattcatgaaaaaattttgaatcaagttatgtatccaactatgaatggtttaattgaagaaggatcaccttatttgggatttctatatgctgggctaatgatcaaagatagtgagattaaagttctagaatttaattgcagatttggtgatccagaaacacaaccaattttatttagacttaattcaagtttagttgagctttgcaacttagcaattgatgacaaactagacaactattctattgaatggactgaaaaacactcatgcggagttgtaattgcatcagctggctatccagaaaaatatgagtctaataaagaagtttcaataaaagaaaacaataatgaagatttgaaacttttccatgctggaacaaaatatgagaatggaatgatacttacaaatggaggtagagttttttgtgcaacagcattaggttgtgatttgaaagatgctcaaaaaaacgcatataatctcgtaaataatgtcaaatttgaaggtgcattttttagaagtgacattggattcaaaggaattaaatgag

SEQ ID NO: 314575 - DNA, 1258 bp, Unknown
  Bacterial polypeptide expressing nucleotide sequence isolated from the Sargasso Sea
aatgaatattttagttataggtcaaggtggtagagaacatgcaatcgcatggaagttacaaaaatcagaaaaagttactgaagtttttgtggctccaggtaatggaggaaccgaattagaagctagatgcactaatgtagatatttcttctgatgattttccaatgattaaatcatttgttgaacagaatagtattgaattagtggttgttggtcctgaggatccattagtaaatggtataaaagattatttatcagattctaatgttcttgtctttggtcctgatgctaaaggagcacaacttgaaggctcaaaaatcttttctaaagaatttttatttgagaacaatataccaactggagaagcagaatttttttcatcatcaaataaagcgctagattatcttgaaaaatctaattttcctatagtcttaaaagccgatggattggctgctggcaaaggagttttagtcactaatgaattagaagaagcgaagaactggattaaagaagttatggtggactctaaatttggagttgcaggtaaaaatattcttattgaagaatgtttatttggcactgaacttagttttatgggtatattaacccctgattttttcattccatttgaaactagcattgattacaaaccgctctatgaaggcaataaaggtccaaatactggaggtatgggctgtatgtctccctcccctttcatgaatgaagatttaaaaaataatattatagatacagttgtgaagccgacaatatctggattaaaaaataaaggaattaactattatggttttatgtattttggcttaatggtaaaagacaatgtttctaaggttctagaatttaattgtcgtttgggcgatcctgagactcaatgcttaatgatgcaaatggaatcagatcttttagatgctattttgcaagctttgaatggagaagaacctaaaataacatggaaggatggagcaacaatgggtgtagtaatagcttcaggaggttatccaaattcatataaaaatagggttcctataaatattggtgcacttaaaaatggaaagctatttcatgctggaacaaaatccataaatggtaagttagtgactaatggcggtagagttttttcattaaactactcttcagactctatggatgactgtaaaagatatatttacgataatattggagaagtaaattttaatggcatgacctttagaacagatattggagaaatttatgagtcttaa

SEQ ID NO: 314576 - DNA, 1270 bp, Unknown
  Bacterial polypeptide expressing nucleotide sequence isolated from the Sargasso Sea
aatgaatatattaatcattgggtctggtggaagagaacatgcgttggcatggaaatgtgcacaagataattctgtaaaacatgtttttgtttgtcctggtaatgctggtacttatcttgaaaataaggtaagtaatgttgaaatagactcaaatgattttgatgccattgagaatttttgtgtgaaagaaaatattgaattagtaattattggtcctgaacaacctcttgtgatgggtttaacagattttctgcaaagtaaaaatataaaaacttttggtccgtccaaagaggcagcacaacttgagggatcaaaaactttttcaaaagatttttttgttaaatacaacataccaactgcaggatataagtcttttaataattatgaagaatcaattaatcatttggatttaatttcttatccaaccgtagtgaaagcagacggtttggctgcgggaaagggagttatcatttgtgaaaataaagatgaagcaattgatgcactgaatagtatttttaaagacaaagcatttgggtctgctggaaataaagtagttatagaggatttccttgatggagaagaagcatcattcattgctgtcgtcagcaaagataaaattattcctttagtaactagtcaagatcataaagcagtaggtgatggcgatgtaggtctcaacacaggcggtatgggagcttactcccctgctccaatagtgactgatgcaattcataaaaaaatacttgatgaagttatgtatcctactatgcaaggcttaatagatgagggtactccatacctaggttttctttatgcaggattaatgattaaagatgatgatttaaaagttcttgaatttaattgcagatttggcgatcctgaaactcagcctattttattaagattaaattcaagtttggttgatctttgtctctcagcaattaatgatgaactcgatacatattctatcaagtggtctgataagcattcttgtggtgttgtaattgcatcggagggttatccagaaggttatgaatcgaataaagaagtttcatttaaatcttctgaagaagaaaatacaaaactatttcatgcaggtactatatttgataatgataaagtcttaacgagcggtggtagagttttttgtgccacagcgttaggaaacaatttgaaagaagcgcaacaaaacgcatataatctcgtgagcaaagtaaattttgaaggtgctttcttcagaaaagatattggaaataaaggaattaaatga

SEQ ID NO: 314577 - DNA, 847 bp, Unknown
  Bacterial polypeptide expressing nucleotide sequence isolated from the Sargasso Sea
tgtaaaagctgatggccttgctgctggaaagggagttattatttgtgatgatcgagaagctgcagaaaaagcccttgaagatatatttgaatcaaatgcctttggggatgctggaaatagagtggtaatcgaagactttttgaatggagaggaagcaagctttattgctgttgtcagtgatgatcaaattattcctcttgcaacaagccaagatcataaagctgttggagatggagatgttggactaaatactggaggtatgggtgcttactcccctgctccaattgtcacagatgagattcacaaaagagttatcgatgaggttatgcttccaacaatgaatggattaaaggctgaaggatttccctatcttggttttttatatgctggcctaatgatagaaggagatgagataaaagtcttagaatttaattgtaggtttggcgatccagaaactcagccaattatgctcagattagaatctagccttacaaatttatgtcttgatgcgattaataaaaaacttaatgcccatcaagttgaatggtcatcaatgcactcttgtggagtagttttagcatcgtcaggctatccagaagattatgaaacagatatggaaatagatataaaaaatcatttcagtgaaaatgagaaattgtttcatgcaggtacaaaatttgtagataataagattctcacatcgggtggtagagttttttgtatgacagctttaggtgagaccttagaaattgctatagataatgcgtataatgcaatccctaaaattaactttgagggcatgttcttcagaagtgatattgggaaaaaaggattgaagaatgattaa

SEQ ID NO: 314578 - DNA, 1251 bp, Unknown
  Bacterial polypeptide expressing nucleotide sequence isolated from the Sargasso Sea
gttcaggtggaagagaacatgctttggctggaaaatgtgctcaagatgatatcgtcaaacatgtttttgtctgtcctggtaacgcaggaacccatcttgaggataaagtaagcaatattgaacttaatttaaatgaatttagctcaatagaaaaattttgtttagaagaaaaggtagagcttgtcattattggtccagaacaaccacttgttgatggtttgactgattttttacagagtaaaaatattaaaactttcggtccatctaaaaatgcagctcaattagagggttcaaaaaccttttctaaagatttcttcgtaaagtacaacattccaacagccaaatacaaatcgttcgacaactttgaaagctcattagaatatctaaatgagatttcttttccaacagtcgttaaagctgacggtttggcagctggtaagggcgtaataatttgtcaaaactctgaagaagcaataaaagcacttgatagcatttttaatgataaggcctttggaactgctggtaatcgagtagtaatcgaagaatttttagaaggtgaggaagcatcatttattgctgtagtaagtaaagataagataattcctttggcaacaagccaagatcataaagctgttggagatggtgatgtcggtttaaataccggaggaatgggcgcttattctccagcaccaattgtaactgaagaaatccataaaaagattcttaatgaggttatgtatccgaccatgaatggcttaattaatgagggctcaccttacttaggatttctttatgcagggctgatgattaaagataatgagattaaggttcttgaatttaattgcagatttggtgatccagaaactcaacctattttattaaggctcaattcgagtttggttgaactttgcaaagcagctattgatgatgaattggatacatattcaattcagtggactgaaaaacactcatgtggagttgtaattgcctctgaaggctatcctgaagactatgaatccaataaaaaaatttctttaaaagaaaataacatcaaagattcaaagttgtttcatgcaggaacaaaatatgaaaatgaaacaatacttacaagtggaggtagggttttttgtgcaacagcactagggaacgatttgaaagatgcacaaaaaaacgcatataatctcgtaaataatgtcgaatttgacggtgcatttttcagaaaagacattggattcaaaggaattaaatgag

SEQ ID NO: 314579 - DNA, 726 bp, Unknown
  Bacterial polypeptide expressing nucleotide sequence isolated from the Sargasso Sea
tatgaaaattttagtgattggcagtggggctcgtgagcatgcgttatgttacttaatatctaagagctctctggtttcatctatttatgcaatacctggaaactacggaataagccaacttgctgaatgtgaacaaattgatcaaacagattttgagaaaatatacgacttctgtaaaattaaaatgatagaattagtcattgtcggccctgaagtgccattggttgcagggattgttgatttttttaaagagacagaaataaaaatctttggaccagataagtatgcatcgcagttagaaggatccaaaggttttatgaaagatctttgtaaacaaaataggataccaacagctgactatgctcgatttgataataaagaagaagctataaactatttaaatgcacagcctttacctattgtgattaaagctgatggtctagcagctgggaaaggcgttactgtagcggacacaaagaaaatggcagaacaagcaattaatgacatttttgatgagaagtttggggcaaatatggatgtagttattgaagaatttatgagtggtgaagaagcgagttattttgtttgttgtgatggtgaggattttgtttcattagaaagtgctcaagatcacaaaagaataggtgaaaatgatacagggcctaacactggaggaatgggggcatattcacctgcgccaatttttacaccaaaaataaaagaaca

SEQ ID NO: 314580 - DNA, 868 bp, Unknown
  Bacterial polypeptide expressing nucleotide sequence isolated from the Sargasso Sea
gcgccaattgtggtcaaggctgatggcctggctgcgggtaagggtgttattttggctgacacagttgctgaagcctgtgctgccgttgaggatatgctcgctggtaatgcctttggtgaagccggtagccgcgttgtagtggaagaatttttagttggtgaagaagccagctttattgttatggtcgatggcaaaaacattttgcctttggcttccagccaagaccataaagcgcgcgacgatggtgacacaggacccaatacgggcggcatgggtgcttattcacctgcccccgtggtagacgctcagctccatgaccgaattatggcagaagtgattcgcccaacagtggatggtatgcaagccgacggctacgaatatacgggttttttgtatgcgggtattatggtgacggccgatggcacacctaaggtactagagtttaattgtcgctttggtgatccagaaacccaacctattatgttgcgcttaaaatccagtattgttgatttatgcttatccgccgagcgcaaagagcttgaccaaattgaggctgagtgggatcctcgggctgcagttggtgtggttttggccgcgggcggttatccagatagctatgccaaaggtgatgtcattagtttgccagttagcacagcaagtggcagcaaaatattccatgctggtaccgcaaccaaagatggccaagtggtcaccaatggtggtcgtgtactctgtgccaccgcccttggcaattcggtcactgaggcacagcaagctgcctatgccttggttgaccaaatcagttggcaggatatgtattgccgtcgagatattggccatcgcgctattgggcgtgaacaaagttaag

SEQ ID NO: 314581 - DNA, 1171 bp, Unknown
  Bacterial polypeptide expressing nucleotide sequence isolated from the Sargasso Sea
taatgccggaattgaagaagaagcgcagtgcatccccatacaagtagaagacctagaaagtttggttaaattttgctcgaaggaatcaatcgattttgtcgtggtcggacccgaagcaccattggtaggaggtctcattgataaacttaccatagccggtattaaggcatttggcccgagtgctgatgcggcaaaactggaaggatctaagagttttacaaaagaattttgtttacggcacaaaatcccaacggcggcttttaaacgattcagttctgctaacgcggctattaggtatgttgaagagattggagcacctattgttatcaaagctgatggtttagcggcaggaaaaggcgtcacagttgcacaaacactgggtcaggcaaaggatgcgatagaggaggctcttaatgacaataaatttggcgaagccggaaaagaaattgttgtcgaggagtgtttaataggcgaggaggcaagcttccatgtattagtcgacggagagaatgtcataccgcttgcatctgcacaagatcataaacccgtgggggaaggcgataccggcccaaatactggcggaatgggcacctactccccagcacccattttaaacgaagatctcacccaggaaattatgcagaactttataatacccaccgtagagggtatgaagaaagaagggcatacgtacaagggtgtattgtatgctggcttgatgattaccgataatggcccgaagctaatcgaatacaacgcgcggtttggagatcctgaaacccaagtcttactaatgcgcttaaaatcagatctactgccggcgttaatagcctgcgctgatggcacgctagataagattaatttaaattgggataaatctgcagccgtttgtgttgtgatggccgcaaaaggataccccggcgattacaacaagggcacctccattaaggggctgcaccgcgttaatcaaataaaaaacacacacgtttttcatgcaggaactctgctgaatcaacatggggaattgatagcaaacggtggaagagttcttggtattacttcgatgggagaaaatatagccgacgctcaaacaaaagcttatgaagctgtagatttgatagattggacagatgggttttgccgccgtgatatagcctggcgggctatttag

SEQ ID NO: 314582 - DNA, 1279 bp, Unknown
  Bacterial polypeptide expressing nucleotide sequence isolated from the Sargasso Sea
atgaacgttcttgtcattggtaatggcggaagagagcacgcattatgttatggtataaaacaatctcctgattgttctaatttatattgtattcctggaagtgatagtatcagtgaaattgcttcttctattgtcacagatgttaatgatcatgatgctattcttcaattttgtcttgaaagtaaaattgatctcgtagtgataggtccagaattacctttaactaaaggattatcaaatcttttaatgaataattctatattagtttttggtcctgatcagatgggagctgagctagaaaaatcaaaaaagtttacaaaagatatttgtaaaaaattaaatattgcaacagctgcttatgatgtatttgacaactatgatgatgccttcattttttgtcaaaaccaatcctatcctcttgttattaaagctgatggtttagcagcaggaaaaggagttattatttgtcaaacacttgaagatgcaaaagatgcactgatcaaatgttttaaagataattcttttggtgatgctggttcagttgttgttattgaagaatttttagttggtgaagaggtaagcctattttcacttgttgataaaaatggatttgtgttgccacttacaacagcacaagatcataaaaaaatcttagaaggagaaaaagggttaaacactggtggtatgggggcctacacacctgttccttctatttcatcaaataaaatgaatgaattgtccaaaacatttgttgagcctattgttcaacatcttgctgaacaaggcatcaactatcaaggaatgttttatgcaggattaattctaacagacaagggtccaaatttactcgaaattaatgttcgttttggcgatccagaaacacaagcaattattccactattagaaacagatttattagaactccttcatgcttcggcaataggaactttaaatgaaatggagcaaattaagtggaaaaatgattatgccatgacagtagtaatggccgctgaaggctatcctgaggattataaaaaattcacatctattaataatttagaaaatcttactttaacaaaagatgagtatttgtttcatgcaggaacaacacttaaagaaaaccaatggctctctaatggtgggcgggtattaaatatttctagtacaggcaaagatttaaaaattattagagaaaatatttacaatataatcaatcaaataaattgggatgagggatattatcgaaaagatattggttggagatatattgatgagtaat

SEQ ID NO: 314583 - DNA, 1309 bp, Unknown
  Bacterial polypeptide expressing nucleotide sequence isolated from the Sargasso Sea
atgaaaaatgttttggtggtggggtctggtgcaagagaggttgcaattgctagatgtgtttcacaaagctcgataaaaaattctcttttttgcgtatcaaaagatataaacccgcaaatcctcgatctttgtaaggactactttgttactgatcttacgaacatatctgatattgtgtcatatagcagaaaaactaaggtcgatttggcaatcattgggccagaaaacccgcttgctaatggtattgtaaatgagcttgaaaatgttggggttgagtgcattgggcctagaaaagaagttgcattgattgaaaccagcaagtcttttgcaagaaaaataattgatctttgctgcccagaaaaaaacccacaaagaaaagagtttagttcagtagacggggttagaagctttatcgaacagttgggcggagaatacgtaataaagtttgacggtcttatgggaggaaaaggtgttcgtgtttctggtgagcacctaaaaaacatcgatgagggaattgcctacgctaacgaaattattaacattggcggaacgtttttaattgaagaaaagttagttggagaagagttttctttaatgagttttgtagatggtaaggtctgcaaacatatgcctatcgttcaggatcacaaaagagcatatgaaggcgacactggtcctaacaccggggggatgggcacctactcttttgcaaaccactctcttccctttttaagcgaaaaagatattaaagaggctcaaaaaaccaacgaacttgtagccaaacaactttttgaagaaacaggtactccctatgttggcatactatatggtggctttatgttaacaaaaggtggtgttaaggtcattgaatacaatgctcgtttcggtgaccctgaagcaatgaatgtcttgtctatattagagtcagattttttgtcaatttgtatttctatggttgacggaaacctaaagaaccaaggtgtttcttttgaaagactttctactgtttgtaaatatgttgttccggtgggctatccagacaaacccgcaaaaaactttgaagtgttttgtgatcaaaataacccctctctttttctcgcatctgttatgctaaaagatcaaaggctaatagcctgtgggtcaagaaccgctgcggtggttggtaaaaacaaaaatgtttttcaggctgagttgtttgctgaggctggtatagcaaacatatccggaaatctttttcacagaaaagatattggcacaaagaagttggttgagtctagaattaaaagaatgaaagagttgttgcaatgag

SEQ ID NO: 314584 - DNA, 1270 bp, Unknown
  Bacterial polypeptide expressing nucleotide sequence isolated from the Sargasso Sea
atgaatatattaattattgggtctggtggaagagaacatgcgttggcatggaaatgtgcacaagataattctgtaaaacatgtttttgtttgtcctggtaatgctggtacttatcttgaaaaaaaggtaagtaatgttgaaatagactcaaatgattttgatgccattgagaatttttgtgtgaaagaaaatattgaattggtaattattggtcccgaacagcctcttgtaatgggcttaacagattttctgcaaagtaaagatataaaaacttttggtccatccaaagaagcagcacaacttgagggatcaaaaactttttcaaaagatttttttgtcaaatacaatataccaactgcgggatataagtcttttaataattatgaagaatcaattaatcatttagatttaatttcttatccaaccgtagtgaaagcagacggtttagctgcaggaaagggagttatcatttgtgaaaataaaaatgaggcagttgatgcgctgaatagtatttttaaagacaatgcatttgggtctgctggaaataaagtagtcatagaagactttcttgatggagaagaagcatcattcattgctgtcgtcagtaaagataaaattattcctttagtaactagtcaagatcataaagcagtaggtgatggcgatgtaggtctcaacacaggcggtatgggagcttactcccctgctccaatagtgactgatgcgattcataaaaaaatacttgatgaagttatgtatcccactatgcaaggcttgatagatgaaggtactccatacctaggttttctttatgcaggattaatgatcaaagacaatgaaataaaagttcttgaatttaattgtagatttggtgatccagagactcaacctattttattaagattaaattcaagcttggttgatctttgtctctcagcaattaatgatgaactcgataaatattctatcgaatggaatgataaacactcttgtggtgttgtaatagcgtcagagggttatccagaaagttatgaatcgaataaagaagtttcatttgcatcttctgaagaagaaaatacaaaactatttcatgcaggtactatatttgataatgataaggtcttaacaagtggtggtagagttttttgtgctacagcattaggaaacaatttgaaagaagcgcaacaaaacgcatataatctcgtgagcaaagtaaattttgaaggtgctttcttcagaaaagatattggaaataaaggaattaaatgag

SEQ ID NO: 314585 - DNA, 1114 bp, Unknown
  Bacterial polypeptide expressing nucleotide sequence isolated from the Sargasso Sea
tatgattatcggagttataggaagtggtggaagagaacatgcaatttgtgaaaaaattttaaaatcaaaaaaagttgaaaaagtttattgttttcctggaaatgctggaactagtttaattgctacaaacgttgaaattaaaattaatgaatttgataaaattaaagaatttgtaataaaaaataaagtagattttttagtagttggacctgaaaaacccttagttgaaggaattgtagattactttcaaaaacatagtattaaaatatttggaccagataaaattgcttctcaattagaagggtcaaaaatatttacaaagaaaatctgtgaaaaatataatataccaacagcaaaatttggaatttttagtaaattggaagacgctaattcctttttaaaaaatagcaaattgccaatagtcataaaagcagatggattagctgctggaaaaggagtttatatttgcgaagatataaaatctgcaatcgatgctgttgaagaaatatttaatggaaaatttggaattgcaaaaaatgtacttattgaggaatttttaaaaggagaagaaatgagttattttgtaataagtgatggaaaaatttttaaaaaatttcaaactgctcaagatcataaaagggttttagaaggagacaaaggtaaaaataccggaggtatgggtgcttactctccttcaaaacttatcaataatagtctagataaaaaaattgtagaaaaaataatcaaaccaactctaaaaggtttaaatgaaatggggtcaaagtttaaaggatttctttacgcaggtttaatgatagtgaaaaatgaaccttatttaattgaatataatgtaagaatgggagatcctgaatgtcaaacaattttaccaagattaaaatcggacatagtagatatattatattcatgctgtgaagaaaaactaggttcaacaaatattgaatgggatgaaaaaaaaactatatgtgttgttttatgttccaaaggatatccagataaatttaaaaacaatttgctaatagaaaactttgaaaaaattaacttacagaaaaatgaatttatctttcatgctggtacaataataaaaaataataaa

SEQ ID NO: 314586 - DNA, 1276 bp, Unknown
  Bacterial polypeptide expressing nucleotide sequence isolated from the Sargasso Sea
catggctggcatcgaagtactcgtagtcggtagtggggggagagagcacgcgcttgctctgggactttcaaagagcgactccgtttccaaggttcactgcacaccaggaaacgccggcacttccatggtggcagtgaaccatcaagtccccgataccgatatcgaagggatagtagatctcgcgacccaactctcggtctctctggttgttgtaggtccagaagctccactggtgcatggcctttctgataggctcagagcaaattcgattcccagtttcggaccacattcggaaggggctcttctcgaaggatcgaaaatccatgcaaagatgctaatgcaatcattgggagtcccgacagggtcatttcacagggttgagaatcaggatgaaatagagggctcattagactctttcgaacctccttgggtaatcaagagagatgttctagcaggggggaagggagttaccgtgaccacatctagagaagatgcccgtgaggccctaaaatatggaattgaagaagacggtttcgtgcttattgaagagcatctctcaggtgaggaggcatcgattctagttattatggacgagtctggatatgtgatgttaccacctagtcaagaccacaagagagtggggaataacgacactgggccgaatactggtggcatgggggcatatgcacccgcccccattgtcacaccttctgtgcttgcaagggcgagggaggagattatcgaaccaatgcaccattatctaagaaactcgagcaccccctatcggggatgcctatatgtggggctaatgattgactcgcagggctctccgagcgtcgtagagttcaacgtcagactaggggatccagaagctcaggtcactattccgctagttcagtcggatctgggagaattgcttctagcagcggcagaggggagggtctcggaaactcaggtagaattcaagaagctccatgcttccactgtcgtccttgcttcagagggatatcccggagaagttgtcactggaagggaaatattcggttggaacaccgaaattgatgagggcctagttaggggttttgtccatcttgcaggagcatcaatggatgagggagacaagctaacttccaacggaggaagagttctttccgcaactggattagctccatcactcagcgagtcactagaggcgtcctaccagataattggaggcatcactctcgatggctcccactaccgcgaagatatcggtttcagggcactttcgggttag

SEQ ID NO: 314587 - DNA, 1309 bp, Unknown
  Bacterial polypeptide expressing nucleotide sequence isolated from the Sargasso Sea
atgaaaaatgttttggttttggggtcgggagccagagaggttgcaattgttagaagcatttcacaaagcttaatagaaaactccattttttgtatatctaaggacataaatccacagattagtaggctttgtaaagactattttgtttctgatgttgaggctgtctctagcattgttgcctacagtaaagaaaaagaaattgatttggcaatcattggtccagaaaaccctcttgctagcggtgttgttaacgagcttgagctggttggtgttcgttgtgttggccccaaaaaagaggttgcaatgatagaggctagcaagtcttttgccagaacaataattgatctatgttgtccagaaaaaaacccaaaaagaagggaattttcttcggctgagggtgttgaggagtttataaaacagctggggggagaatatgtaataaagtttgatggtctcatgggcggaaaaggtgttcgtgtttctggtgaacatttaaaggacataaaagaggctcttgattatgttggcgaaatagttaaggtcggtggaaaatttttaattgaagaaaagctggttggagaagagttttcactgatgagctttgtagatggaaaggtttgcaagcacatgcccgtcgttcaagaccacaaaagagcgtatgagggggattccgggccaaacactggtggaatgggaacctattcttttgaaaaccactctcttccctttttaagcaaaaaaaacattagcgatgctcagaaaactaatgagcttgttgctaaacagctttttaaagaaactggcacgccctatgttggtgtgctatatggtggttttatgttaaccaagagcggggtaaaggtaattgaatataatgctcgctttggagatccagaggcaatgaacgtattgtccatattaaaatcagactttttatctgtttgcatgtctatagttggtgggtctctagaaaaacaagaagtctgttttgaaaggcttgctactgtctgtaaatatgttgtgcccgttggctatcctaacaagccctcaaggggttttgaggttgtttgtaatcaaaatgactcgtcactttttcttgcatcggtaatgttaaaaaacaaaaagataatagcctgtggctctagaacagccgccgttgttggaaaaagcagcgacattaaacaagctgaatcttttgccgaggataaaatatcaaaaatttcaggaaatctttttcacagaaaagatattggtacaaaaaaactaattgactctagaaccaaaagaatgaaggggttgctgggttgag

SEQ ID NO: 314588 - DNA, 1309 bp, Unknown
  Bacterial polypeptide expressing nucleotide sequence isolated from the Sargasso Sea
atgaaaaatgttttggtggtggggtctggggcaagagaggttgcaattgctagatgtatctctcagagttcaataaagaattctcttttttgtgtatcaaaagatataaacccgcagatcttcgatctttgtaaggactactttgttactgatcttgcgaacatatctgatattgtgtcatatagtagaaaaaataaggttgattttgcaataattggtccagaaaacccgcttgctaacggcattgtcaatgagcttgaaaatgttggagttgggtgcgttgggcccaaaaaagaagttgcactaattgaaaccagcaagtcttttgcaagaaaaataattgatctttgctgtccagaaaaaaacccacaaagaaaagtgtttagctcaacagagggtgttgaaagctttatcaaacagttgggtggagagtacgtaataaagtttgatggtcttatgggaggaaagggcgttcgtgtttctggtgaacacctaaaaaacatcgatgagggcgttgcttacgctaacgaaattgttagcataggcggaaagtttttaattgaagaaaagctggttggagaagagttttctttgatgagctttgtagatggaaaagtttgtaaacatatgcccattgttcaagatcacaaaagagcatatgaaggcgacaccggtcctaacaccggagggatgggcacctactcttttggaaatcattctcttccctttttaagcgaaaaagacattaaagatgctcaaaaaaccaacgaacttgtagccaaacaactttttgaagcaacgggcactccctatgttggcatactgtatggtggctttatgttaacagggggtggtgttaaggtcattgaatacaacgctcgtttcggcgaccccgaagcaatgaacgtcttgtctatattaaagtcagacctcttgtcggtttgtatttctatggttgatggaagcctaaaaaaccaggatgtctcttttgaaaggcttgctactgtttgtaaatatgttgttccggtgggctacccagacaaacccacaaaaaactttgaagtgttttgtgatcaaaatgacccctctctttttctcgcatctgttatgttaaaagaccaaaagctaatagcctgcgggtcaagaaccgctgcggtggttggtaaaaacaaggatgtttttcaggctgagctatttgctgaaaccggtatagcaaacatatccggaaacctttttcacagaaaagacattggcacaaagaagttgattgaatctagaattaaaagaatgaaagagttgttgcaatgag

SEQ ID NO: 314589 - DNA, 1300 bp, Unknown
  Bacterial polypeptide expressing nucleotide sequence isolated from the Sargasso Sea
catgaaagtattagttattggtggcggcggccgcgaacatgccctagcttggaaagcggcacaatcacctcaggtcgaactggtttatgttgcaccgggtaacgcgggcacggctctcgaaccaaagcttgaaaacttaaatatcagtgcaactgacattcctgccctgctcgattttgctaaaaccaatcagatcgaactcaccatcgtcggcccggaagcgccgctggtattgggcgtggtcgatgcctttaacgctgcgggtctacccatttttggcccaaccaaagcggcagcacagttagaaggctctaaggcgttcactaaggacttcttagcacgccacaatatcccaacggcgggttataaaaactgtaccgaaatccaagacgctaaagccttcgtgcgtgaactgacgggcaagacgggttacccagtagtcatcaaagccgacggtttagccgcaggtaaaggcgtgatcatcgcccaagaccaagccgaagctgatgctgcgattgatgatatgctcgcgggcaacaagtttggtgatgccggctcacgcgtggtcatcgaagagttcttaaaaggcgaagaagccagctttatcgtgatggtcgatggcaaaaatatccttgccatggcgactagccaagatcataaagctcgcgataatgccgatcacggtccaaacactggcggcatgggcgcttactcccctgcgcccgtggtcacccaaagcgtacacgattggacgattgctaatgttatccgcccaacggttgatggcatggcggttgaaggcaatgtttacactggcttcctgtatgcaggtctaatgatcgcaccagacggcagcgccaaggtactggaatacaactgccgctttggcgatccagaaacccaacctattatgatgcgcttaaaatcagatctggttgaactctgtttagcagcaacccgcggcgagctggataaagttaccgccgagtacgacgagcgcgccgcagtcggtgtcgtattagccgctggcggttaccctgatgactaccgcaaaggcgatgtgattgacggcctaagcctaggtaatcacgatgccaaggtcttccacgccggtactgaaatgaaaggcggacatgtagtcactaatggcggccgcgtgttatgcgctacagccttaggaaacacagtgaccgaagcacaaaaagccgcttatcaattggttgatgaaatccattgggatgatgtgtatttccgtactgatattggctatcgcgccattgcccgtgaacaacagagctaa

SEQ ID NO: 314590 - DNA, 877 bp, Unknown
  Bacterial polypeptide expressing nucleotide sequence isolated from the Sargasso Sea
gatgaatgtgcttattgttggtagcggcgggagagaacatgctttcacctggaaagcttcacaatctgatcttgtagaaaaaatctttgtagcacctggaaatgcaggtacttcacttgagccaaaagctgagaacatcaatataagtgcctctgatattgatgctttgatatctttttcaaaaaaagaaaatattgatctggtgattgttggtccagaagacccgttggtcaacggtattactgatgaattcaaaaaagttggaatcaactgttttggccctgaatcaccaggagcgcagcttgagggctcaaaagattttgccaaagcttttatggaaagacatcacatcccaacagcaagctatgaaagctttactgatgcaaatgaagcaaagaaatatattcagcaaaataagttgccgcaagttattaaagccgatggtctagcagcagggaaaggagttgtcattgcagaggactatgaaactgcttataaaaccatagatgaattcatcagtgagacaaaatatggtgatgccagcaggaagattataatcgaagattttttggaaggccaagagcttagctacattgtgatggtaaatggaaccgaatatttaccacttgcaacatctcaggatcataaaaccattggagaaggagatattgggctcaatactggtggtatgggagcgtattcccctgttccatttgtaaatgatgaactagatatcagaatcaagaaagaggtcatcgatcgaactgttagggggcttgctgacgatggaattagtttcagaggatttctgtatgcaggcctgatgattgactcgaatttgaaccaaaggtacttgagtataaactgtagatttgga

SEQ ID NO: 314591 - DNA, 1279 bp, Unknown
  Bacterial polypeptide expressing nucleotide sequence isolated from the Sargasso Sea
atgaacgttcttgtcattggtaatggtggaagagagcacgcattatgttatggcataaaacaatctcctaattgttctaatttatattgtattcctggaagtgatagtatcagtgaaattgcttcttcgattatcacagatgttaatgatcatgacgctattcttcaattttgtatagaaagtaaaattgatttagtggttataggtccagaattgcctttaactaaaggattatcgaaccttttaatgaacaatgctatattagtttttggtcctgatcaaatgggagctgaactagaaaaatcaaaaaagtttacaaaagatatttgtaaaaaattaaatattgcaacagctgcctatgacgtatttgacaactatgatgatgccttaaatttttgtcaaaaccaatcctatcctcttgttatcaaagctgatggtttagcagcaggaaaaggagttattatttgtcaaaaaaaggatgatgcaaaggatgcgctaattaaatgttttaaagataattcttttggtgatgctggttcagttgttgttattgaagaatttttagttggtgaagaggtaagtttattttcacttgttgataaaaatggatttgtgttgccacttacaacagcacaagatcataaaaaaatcttggaaggagaaaaaggcttaaacactggtggtatgggagcctacacacctgttccttctatttcatcaaataaaatgaatgaattatccaaaacatttgttgagcctatcgttcaacatcttgctcaacaaggcatcaagtatcaaggaatgttttatgcaggattaattctaacagataagggtccaaatttactcgaaattaatgttcgtttcggcgatcctgaaacacaagcaattattccactattagaaacagatttattagaactcctttatgcatcagcgataggcaccttaaatgaaataaaaaaaattaagtggaaaaatgattatgccatgacagtagtaatggctgcgcatggctatcctgagaattataaaaaattgacaccaattaataatttggaaaatcttactttaacaacggatgactatctatttcatgcaggaacaatgcttaaagaaaacaaatggctctctaatggtgggcgtgtattaaatatttctaatacgggtaaagatttaaaaactattagagaaaatattcacaatataatcaatcaaattaattgggatgagggatattatcgaaaagatattggttggagatatattaatgagtaat

SEQ ID NO: 314592 - DNA, 619 bp, Unknown
  Bacterial polypeptide expressing nucleotide sequence isolated from the Sargasso Sea
tatgaatattgctttaattggaagtggaggtcgagaacattctctttgcaaaaaactcagggaatcagcaaaagtaaacaaaattttttgcatacctggaaatgcaggtacttccaaaatcgcaacaaatctaaatacagactataataacttcccaaaacttctaaaaaatttaaaagaaaataagattaaattagttgtcgttggcccggaggaaccgttggtgaatgggctagtaaattttttaaacaaaaataaaattagagcttttggtccaaacaaatttgcagcaaaacttgaaggctctaagtcattcatgaaaaaaatatgtagggattatggaattccaactgctaaatttaaaacttgtaaaaatttacaagagctcaataaatcaattaaaaatttttcatttccggtagttataaaggcagacggattagcggcaggaaaaggtgtaactatttgtaaatcaaaacaacaagtatttaaagtttcaaatgaaatatttagtggaaaatttaaaagttcaaaaaaattagttatagaagagtttcttgacggtgaagaagcaagttattttttggtagtagacaaaaagaatttcattaattttggt

SEQ ID NO: 314593 - DNA, 1153 bp, Unknown
  Bacterial polypeptide expressing nucleotide sequence isolated from the Sargasso Sea
caagatgattttgtgaaacatatttatgtttgtcctggaaatgctggaacgtatcttgaagacaaagttagcaacattgatattgatacaaaaaaatttaatcttattgaagagttctgtttaaaagagcaaattgatcttgtaatcattgggccagaacaacctcttgtagatgggttgactgattatttacaaaataaaggtattaagacctttggtccatcgaaaagtgcagcacagcttgaaggctcaaagacattttcaaaagatttttttgttaaatacgatattccaacagctgaatataaatcttttgaggattttgatagttcagtcaattatctggatgagataagttacccaactgttgtgaaagcagatggcttagctgcaggtaaaggtgtgataatttgtgaaaataaagaaagtgctattgaggctctaaatagcatttttaacgataaagcatttggcaaagctggcaacagagtagttattgaagaatttttagagggtgaagaagcatcttttattgcagttgttagtaaagataaaattattccgctggtaacaagtcaggatcataaagcagttggagatggagatgttggcctaaatactggtggaatgggtgcttattcaccagcaccaattgttactgaggagatgcaaaaaaaaatccttgaaaaagtgatgtatccaactatgaaaggattgatcaatgaaggatttccttatttgggttttttatatgctggattgatgataaaagatggtgatttaaaagtgcttgaatttaattgtcgatttggagaccctgaaactcaaccgattttaattagattaaaatcaagccttgttgagctttgtctggcagcaattgatgacaaattaaattcgtattccataaattggagtaaaaaacatgcttgtggagttgtaatcgcctctaagggttatccggagagctatgacgttgataaagaagtaaggattaagttaaacgaagacaacgacttgaaattattccatgcaggtactaaatatgttgatgataaaattattacaagtggtggaagagtattttgtgctacagctcttgggaatgatttgaaagaagctcaagaaaagcatataatctcgtcaacagtgt

SEQ ID NO: 314594 - DNA, 1267 bp, Unknown
  Bacterial polypeptide expressing nucleotide sequence isolated from the Sargasso Sea
atgaaaattgcaattattggaagtggaggacgagaacatgctctagttcatcacttaagtaattcaaaaaaaataacaaaaatatattcaataccaggtaatgctggtaccgaagaaatatctgtgaatattgatttaaatttggaaaattttcaagatttgtataaatttattaagaaagaacaaatcgaattagtgattgttggtccagaaaaaccattagtcgaaggattagtagatttcctagaatcaaaaaatattaaagtttttggtcctagaaaaaaagtagctcaattagaaggctcaaaaatatttacaaaacaaatttgtgaaaaatttaatataccaactgctaaatttaaaatttgtaaatccaaagaagactcatttatatttttatcgtcatctaattttcctcttgttgtaaaagcagatgttctagctgcaggtaaaggtgtttatatttgtcaaaatgttaatgaggcaaaaactgctgttaatgaaatatttgatggtaaatttgggaaagcagatcaagtattaatcgaagaattcctagaaggtgatgagatgagtttttttattatttcagatggaattagttataaaacttttaatacagctcaagaccataaaagagttggtgagggtgatactggaaaaaatacaggaggaatgggagcttattcaccttcaagcttaattaatgatgatttagagaataaaattttaaacaaaataattgagccaacattaaaagctataagtgaaatgaaagagaaatacgtcggttttttatatgccggtttaatgataaaaagtaatgaaccatacctaattgaatataatgtcaggatgggtgatcctgaatgccaaactatattacctttgattgacagtgatttattggaaataataaattcttgttgtatttcaaaattaaagacccacgaaataaaatggaaaaacaaaaaaagtatgtgcattgctttatgctcaaaaggatatcctgaaaaatataataagaatgttgaaattaaaaatttaaaagaattcaaatcaactaaagataattttatttttcatgctggaacaaaaagttctggaaacaaaattgtagcagttggaggtagggtaataaattttgtgaatatttcagatagttatttatcaagtagaaaagaaatcatcaatcagattaataaattgaattgggaagacggtttttatagatcagatataggtcataaagtcatagataaatgag

SEQ ID NO: 314595 - DNA, 1264 bp, Unknown
  Bacterial polypeptide expressing nucleotide sequence isolated from the Sargasso Sea
tatgaatatattgatattagggagtggaggccgtgaacattctctagcctgggctatcaaacaaaaccccaagtgtgataatatattcgtagcaccaggaaatgcaggtattgctcaaattgcgaagtgtataagcgtcgatattcttaacgctacgcagatcgtaaacactgtaaaagaatacaatatcgactttgttctaattggccccgaggcacctctagcggagggtgttagtgatattttaaaaagagaaggaattttgacgtttggaccttctaaagcatcgtctcagttggaaacaagtaaaaagtttacaaaagaaatctgcgatgcctgcggagcgcccactgccgaatatagaagctttgactcactggaaccagctttaacttatgtagaagctaaaggggcgcctttggttgttaaagctgacgggctagctgcgggtaaaggtgtgatcgtagctacagatattgagatggctatatcggcagtgcatgaaatttttagcgggtcttttggaaacgctggtgcaagtgttgtgattgaagagtttatggaaggcgaggaggcatccctttttgttttagttgatggggaaacaatcctacctattggtaccgcgcaagatcataagcgggttggagatggcgacaccggattaaatactggaggcatgggagcttactcaccagctccaattttaaatgaagaaatattgaaaaagactgttgaaaggatcattcgcccgactatgcgtgaaatggttaggcgaggcatgccatttacaggcgttctttacgcaggccttatgataaaggagtccgatcctcgtctcgttgagtataatgtaagatttggtgatcccgaatgtcaggtcctaatgatgcggttgggtgggcaaattttagatgcattactttctaccgccaaaggtaagttaagtgatgtaaagattaattgggcgactgaccactctataacagttgttatggctagtaatggatatccaggttcttatgaaacaggtacggaaatagttggattagctaatctgccttcagatagtaattttatgtgtttccacgcgggaacagaggaaaagaatggaaaagtattagcaaacggcggacgtgttttaaacataactacaagagcagaaactttagtcaaagctcaaaagaatgcttatgaaatgatagaaactattgattggccagaaggtttttataggaaagacattggctggagagcgctatga

SEQ ID NO: 314596 - DNA, 913 bp, Unknown
  Bacterial polypeptide expressing nucleotide sequence isolated from the Sargasso Sea
tatgattgttggagttattggaagtggtgggcgtgagcacgcaatatgttcaaagttatatatttcaaaaaaaatttctaaaatatattgttttcctggcaatgcaggcacttctaaaatagcacaaaatatcgatatagatttaaatgacttttcaaaattaaaaaaacttatatctaaatataagatcgaattgttggttgttggtccagaggaaccattagtcaatggaataactgatttttttgaaaaagaaaaaattaaagtttttggtcctaataagcaatgctctagacttgaaggttccaagatatttacaaaaaaaatatgcgaaaagtataatatacctacagcaaagtttggaacattttcaaacttaaatgattgtattttttttttaaataaaaataaatttccaatcgttgttaaagctgatggtcttgctgctggcaaaggtgtaagtatttgcaaaaacttagttgaggcaaaaaaatctgttcaagaaatatttagtggaaaatttggtaaagctaaagaggttcttattgaagaatttttagatggggaagaaatgagtttttttataattagtgatggtgttacttataaaaagtttggaacagctcaagatcataaaagagtatttgttggcgacaaaggtccaaatactgggggaatgggagcttatagtccatcaagattaacagacaaaaatcttgaacaaaaaataattgaaaaaattatagaaccaactttgttagctttaaataatatgggatctaagtacattggatttttgtatgctggattaatggttaaaaataatgaaccatacttaattgaatacaatgtaagaatgggtgacccagaatgtcaaactatacttcctactcttgagacagaccttttggaa

SEQ ID NO: 314597 - DNA, 1300 bp, Unknown
  Bacterial polypeptide expressing nucleotide sequence isolated from the Sargasso Sea
atgaaagtattagttattggtggcggcggccgcgaacatgccctagcttggaaagcggcacaatcacctcaggtcgaactggtttatgttgcaccgggtaacgcgggcacggctctcgaaccaaagcttgaaaacttaaatatcagtgcaactgacattcctgccctgctcgattttgctaaaaccaatcagatcgaactcaccatcgttggcccggaagcgccgctggtattaggtgtggtcgatgcctttaacgctgcgggtctgcccatttttggcccaaccaaagcggctgcacagttagaaggttctaaagccttcactaaggactttttggctcgccacaatattcctaccgcgggttataaaaactgtaccgaaatccaagacgctaaagccttcgtacgtgaactgacaggcaagacgggttacccagtcgtaatcaaagccgacggtttagcggcgggtaaaggcgtgatcatcgcccaagaccaagccgaagcggatgccgccatcgaagatatgctcgcgggcaacaagtttggtgatgccggttctcgtgtggttatcgaagaattcttaaaaggcgaagaagccagctttatcgttatggtcgatggtaaaaatatcctcgccatggcgaccagccaagaccataaagcccgtgataacgccgaccacggtccaaacactggcggcatgggcgcttactcaccagcgcccgttgtgacccaaagcgtacacgactggacaattgccaacgtaatccgcccaacggtggatggcatggccgccgaaggcaatgtttacactggcttcctgtatgcgggtctgatgattgcaccagacggcagcgccaaagtactagaatacaactgccgctttggcgatccagaaacccaacctattatgatgcgcctcaagtctgatctggttgagctgtgtttagccgccacccgtggcgagctagataaagtcaccgccgagtacgatgctcgcgccgcagtcggtgttgtattagccgcaggcggttacccagacgattaccgcaaaggcgatgtgatccagggtttaagcctaggtaatcacgatgccaaggtcttccacgcgggtactgagatgaaagacggccatgtggtcaccaacggcggccgcgtgttatgcgcgacggccttaggacacactgtgaccgaagcacaaaaagccgcttatctgctggttgatgaaatccactgggatgatgtgtatttccgtaccgatatcggctatcgcgccattgcccgtgaacaacaaggctaaa

SEQ ID NO: 314598 - DNA, 634 bp, Unknown
  Bacterial polypeptide expressing nucleotide sequence isolated from the Sargasso Sea
catgaaggttttggttgtaggtgctggaggaagagaacacgcactttcatggaaaatttctcagagtactttagttacttcagtatttgtagctcctggtaatggaggaacagaattagaagatcatttaactaatgtagacatacaggtaaatgatatagaaggtctagcaagttttgctttagaacaagggattgatctgactattgtaggtccagaagacccactggttaacggcattactgatagatttaatgatcttggtttgaaatgttttggcccatccaagggtgctgctcaactagaaggttcaaaagagttcatgaaagactttcttcaaagacatcacattccaactgctgaatattcaagcttcagtgacacagaaagagctattgaatatgttgagcaaaagggttgtccaatagttataaaagctgacggactagcagcaggaaaaggggtaaccatagctcatacggttgaagaagcaaaagaagcaatatatcaatctttagagtccgaggtttttggagaagcaggaaaaaagattgttatcgaagagtttttagatggtgaagaagctagtttcattgtcatgacggatggtacaaacgtaatcccttttgcctca

SEQ ID NO: 314599 - DNA, 1309 bp, Unknown
  Bacterial polypeptide expressing nucleotide sequence isolated from the Sargasso Sea
atgaaaaaagttttagttctgggatccggtgcaagggaagttgcaataactagaagtgtttcacaaagctcaattaaaaatactattttttgtatttcaaaagacattaaccctcaaattagtaatctttgtgaagactaccacgtgtgtgatgttaatgatgttgccagcgttgtttcttatagcaaaaaaaaagaggttgatttagtaatagttggaccggaaaaccccctagctggtggagtggtaaacgctcttgagcaggctggtattagctgcgttggacccaaaaaagaagttgcaatgatagaaacaagcaagtcttttgcaagaatgatagtcgatttttgttgtccagaaaaaaacccacaaaggaaagagttcgtttcaattgaaggtgtgaaaagcttcatggaagctcttgaaggaaaatatgttattaagtttgacggccttatgggcggaaagggtgtgcgtgtttcaggtgaacacctcaaaaatattagcgaaggtcttaattatgccaatgaaataatagaagacggtggaaagtttttaattgaagaaaagcttgttggtgaagagttttctttaatgagctttgttgatggcaagacatgtaaacacatgcccgccatacaagaccacaagagggcgtttgagggagataaaggaccaaacaccggcgggatgggcacctactcttttgaaaaccactctcttccatttctaaccgaagaaaatattttagaagcccaaaaaactaatgagcttgttgctaaacaacttttaaagcacacgggcttaccctatgttggtgtgttgtacgggggctttatgttaactaaagacggtatcaaggtaattgaatataatgctaggtttggtgacccagaagccatgaatgtgttgtccatactaaaatcagacttcctgtctatttgtatttctttagttgaaggaaaacttgaaaaagaagaggttttgtttgatgagctggctaccgtttgcaaatatgtggtgcctttagggtaccctaacaatcctatgaaggggtttgaagttttttgtgaccaaaatgattcatctttgttcctcgcctctgtaatgtttaaaaataaagaacttatagcatgtggttctagaacagccgctgttgtcggaaaaaacagagatatacagaaagctgaagcttttgcggaacagggtgtatcgaacatttcaggaaaactttttcacagaaaagatattggaacaaaagatttaattgaccttagggttaaaagaatgaaggagttgttgagttgaa

SEQ ID NO: 314600 - DNA, 1279 bp, Unknown
  Bacterial polypeptide expressing nucleotide sequence isolated from the Sargasso Sea
atgaacgttcttgtcattggtaatggtggaagagagcacgcattatgttatggtataaaacaatctcctaattgttctaatttatattgtattcctggaagtgatagtatcagtgagattgcttcttcaattatcacagatgttgatgatcatgatgctattcttcaatcttgtctagaaaataaaattgatctagtggtaataggtccagaactacctttaactaatggattatccaaccttttaatgaacaatgctattttagtctttggccctgatcaaatgggagctgaactagaaaaatcaaaaaagtttacaaaagatatttgtaaaaaattacatatagcaacagctgcttatgaagtatttgacaactataatgatgccttcattttttgtcaaaaccaatcctatcctcttgttattaaagctgatggtttagcagcaggaaaaggagttattatttgtcaaacaatggaagatgcaaaagatgcactgattaaatgttttaaagataattcttttggtgatgctggttcagttgttgttattgaagaatttttagttggtgaagaggtaagcctattttcacttgttgataaaaatggatttgtgttgccacttacaacagcacaagatcataaaaaaatcttagaaggagaaaaagggttaaatactggtggtatgggagcctacacacctgttccttctatttcgtcaaataaaatgaatgaattatccaaaacatttgttgaacctattgttcaacatcttgctgaacaaggtatcaagtatcaaggaatgttttatgcaggattaatcctaacagataagggtcccaatttactcgaaattaatgttcgtttcggcgatccggaaacacaagcaattattccactattagaaacagatttattagaactccttcatgcatcagcgataggcaccttaaatgaaataaaaaaaattaagtggaaaaatgattacgccatgacagtagtaatggctgctcatggttatcctgaggattataaaaaattaacaccaattaataatttggaaaatcttaatttaacaacagatgactatctatttcatgcaggaacaatgcttaaagaaaaaaaatggctctctaatggtgggcgtgttttaaatatctctagtacgggcaaggatttaaaaactattagagaaactattcacaatataatcaatcaaattaattgggatgagggatattatcgaaaagatattggttggagatatattgatgagtaat

SEQ ID NO: 314601 - DNA, 1309 bp, Unknown
  Bacterial polypeptide expressing nucleotide sequence isolated from the Sargasso Sea
atgaatattttacttatcggttctggcgcaagagaacatgcggtcgccagagcaatcgataattcagaacacaatactaatctttattgtatagcatcaaatatgaatccaggtatagcagaactatgctctgagatcatcattgataacataaacgacccaaaactaattgtagagtatgcaaaacattccaaggcctctcttgctattataggacctgaaaacccattaagcgtaggtgtatccgatgctctatgggatgcgaaaataaaagtggtgggcccaaagaggtccctagcacagatcgagacatccaaagcattcacccgtgaattattaagtgaatataggatccctggtggtcccaaatatcagacctttgactctatgaatggtgtgactgagtttttaaatgagctgggggaagcgtatgtcgtaaaatacgatgggcttgcaggaggaaaaggtgttaaggtggctggtgatcatttacaatcccatcaggaagcaattgactattgccaggatataataaataagaatggacagtttgttattgaagaacagttttttggcgaagaattttcacttatgagtttttgtgatggtgaaacattgaaacacatgcccgcaatccaagatcacaaaagagcatatgaaaatgatacgggcccaaacacgggcggaatgggcacatactctgatgcgaaccactctctgccctttttggattcaagtgatattgaagaagcacacaacatcaacacacaaacagctcgtgcgctaaaagataaatttgatgaaggatataaaggaatattatacggtgggttcatggctacaaaagatggggtgaggcttatagaatacaatgctcgatttggtgatcccgaggcaatgaacgctttatctcttttagagaccgaccttattgaattgtgtagtgcaatggcagatggtacacttaataatatagatattcgttttgcaaataaagccaccgtatgtaaatatgcagtgcctgaaggatacccagataaacctgtaaagggggaaaacattgacacttccaaaatatctgatccagataaattgttctatgcatcggttgatattaaagatggagcactcattgaatcagggagcagaactgttgcggtagtgggagtcgcagattctatatcggaagcagaaaaaattgcagaaaacgaaatagcttcagtgagtggccctctttttcatagaaaagatattgggacagatgcaataattcaaaggcgcgtagaacacatgagggctctaagatgat

SEQ ID NO: 314602 - DNA, 1226 bp, Unknown
  Bacterial polypeptide expressing nucleotide sequence isolated from the Sargasso Sea
ctcttacgttttcatatctaaatcaaataaagtaaaaagaatttactgtttaccaggtaatgctggaacatcctcattagctgaaaatatttctatagatataaataattttgaaacagtatatgagtttttaaaaaaaaataatattgattttgttgttgttggtcctgaagatccgcttgtaaatggaattgtggactatttggaaaagctaaatataaaagttttcggaccaaataaagttgcctcacaactagaaggttcaaaaatttttacaaaaaatctatgcaaaaaatataacataccaacagcagaatttggtatttttaaaaacgctgaagaatcttatgattatattgatagtgcaaagcacccgttagtaattaaagcagataatttagcagctggtaaaggtgtttatatttgtagagaaaaaaaagaatcatatttagcagtaaaagagatatttgacggtaagttcggcattgcaaaaaatattctgtttgaagaatttttagaaggtgaagaaatgagctatttcatagttagtgatggaaaaacattcaaatattttggatcggctcaagaccataagagagttggagaaggagacaaaggtaaaaatactggggggatgggtgcatactcaccatcaagattatttaataaagaattagagcgaaaaattttagaaaaaataataaaaccaacattaaaaggtataaatgatttaggaacaaaatataaaggttttctatatgctggattaatgattgttaaagatgaaccatttttaattgaatacaatgtaaggatgggtgaccccgagtgccaaacaattctgccaactttagacactgatatcattaaaatttttcaatcatgtattaatgaaaaacttgatgaaatagaaataaaatggataaataaaaaaagtctgtgtgtcgtattatgctcaaatggttatccagataaatacgaaaaaaatttaattatagataattttgagaagttaaatctagatgaaaataattatttatttcatgcaggaacagaaatgaagaacaataagatttatgctgttggaggtagagtattaaatttcatatcactttcaaacacatacagtgaagccaaaaaaaatatccacgaaaacttaaaaaaattgaattgggaaaaaggtttttttagaaaagatattggatacaaagtcattaataaatgag

SEQ ID NO: 314603 - DNA, 1229 bp, Unknown
  Bacterial polypeptide expressing nucleotide sequence isolated from the Sargasso Sea
ctttagcttggaatgcgcgcaggatgaatctgtatcagtggtttttgtttgtccaggaaatgcaggaactgctctagaaaataaagtatctaatgtctctattaatgttaatgacttttcagaagttaaagatttttgcattgaaaaaaatattgctcttgtaattgttgggccagaacagcctcttgttaatgggctagtagattacttgcattctaatgatatcaaaaccttcggaccttcaagcgctgctgctaagttagagggctctaaaacattctcaaaagacttttttgttaaatatggaatccctacagccacttatgcggcctttgacaattttgataatgcaaaagagcacttaaaacatattttatatccaacagtagtaaaggcagatggtttagcagcaggcaagggagtgattatttgccaaactaaaagtgaagctctggaagccttagttattatttttaaagaacaagcgtttggagatgctggaacaagagtagttattgaagatttcttagtcggagaagaggcaagttttattgcggtggtgagtaaagataaaattatccctcttgcaaccagccaagatcataaagccgtgggtaatggtgatgtgggattaaatacaggtggcatgggtgcatattcacctgcaccaatagttgatgaagcgcttcaccaaaaaattattgatgaggtgatgaaaccaaccatgcaaggcttaattactgaagattcgccctatcttggattcttatatgctggactaatgatcaataatggagaattaaaagttctcgaatttaattgcagatttggagatcctgaaactcaacctattctgctgagattaaaatcaagtctagttgaactttgtattgcagcaatcgatgataagttaaacgattatcaaatccagtggactgatgaacatgcatgtggggtggtgattgcgagtaaaggctatccagaggcctatacacaaagtcacgaggtaacatttgaatcctctgacgcggatggaaaaaaactattccatgcaggcacaaaacttcaaggtgataaagttttaacatcaggaggcagagttttttgtgcaactgctttaggcaaagatcttcgagaagctcaatcaaaagcgtataatctggtagaatctgtatccttcgatggagctttttatcgaaaagatatcggtaacaaaggattgaaatgaa

SEQ ID NO: 314604 - DNA, 1267 bp, Unknown
  Bacterial polypeptide expressing nucleotide sequence isolated from the Sargasso Sea
atgaatattgtaattttaggaagtggtggtagagagcatgctttatgcaaaaaaatatatttatcgaaaaaagttaaaaaaatttactcaattccaggtaatgcaggaacttcagatatttctgaaaatataaatttaccattaaatgacttcagcaaaattgaaaagtttataaaagataaaaatattgatttaatagttgtcggacctgaacaacctttagttgacggaatagtagattattttgaaaataagaatataaatatatttggtccaaataaaatagcatctcaactggaaggttcaaaaatttttacaaaaaaattatgtgaaaaatataatattccgtcagcaaattttggaatatttgatgatgtagaaaaagctttaaattttttatctaaagccaattttccattagttgttaaggcagatggtctagctgctgggaaaggagtttatatttgtaaggatttagaggcagctaaattgggaatttctgaaatatttaatgggaaatttggtaaagcaaataatgttcttgttgaagaatttctagagggtgaagaaatgagttatttcgtgataagtgatggaaaaacatataaaaaatttgaaactgcccaagatcacaaaagagttggtgagggtgatcaaggaaaaaatactggtggcatgggagcttattctccatcagcccttataaatgaagaattagataaaaaaattattaacaaaataattgaacctaccttaaaaggattaaaagatattggtacagattttaaaggctttttatatgcgggcctaatgattgttaaaaatgaaccatacctgattgaatacaatgtaagaatgggagacccagaatgtcaaactattctacctagactaaaaaatgatatgctggatttactattatcatgttgtaagaaagatctttcaaaaattgaattgaattggcatgaagataaaagtttatgtgttgttttatgttctaaaggctacccagaaaattatgataataatatagagataactgggttagataagatcaaagtgagtgggaaaaaaaatatttatcatgccggtacattaaaaaataataatattacttattctaatggcggaagagttttaaatttctcagttttatctgatgacttaaaggatgccagaacaaaagcgattaaaatgattcaggaattagattggaataacggttattatcgaaaagatatcggctttaaagcaataaaagattaaa

SEQ ID NO: 314605 - DNA, 706 bp, Unknown
  Bacterial polypeptide expressing nucleotide sequence isolated from the Sargasso Sea
gcttcctttatcgtgatggtcgatggtactcacgctttagcttttgcatcctctcaggatcataaagcccgtgatgatggcgacaaaggtccaaacactggtggtatgggtgcttattcgccagcaccagtagtgactcctgccgtacacgattgggtgatgcagaatgtaatttacccaacagtgaatgggatggcgtctgaaggccatatctacacaggtttcctctatgcaggtttgatggtatcgccagatggcacctgtaaagtactggaatttaactgtcgttttggtgaccctgaaactcagcctattatgatgcgtttacagtccgacttagttgagctgtgccaggctgctgtggaaggtaaattagcccagcaagagattaaattcgacagccgtgccgctgtaggtgtagtgctggctgctggtggttatccggatgattatcgcaaaggtgatgtcatttcaggtttacctacagaggacagccgtgaagccaaagtattccacgctggcactgtattaaaagacggtcaggtgctgacagcaggtggtcgggtgctttgtgccacagctttaggtgccaatgtgaccgcggcacaaaaagcagcctatgagctgactgataaagtgcagtgggacggtgttttcagcagacgtgatataggttaccgcgccatcaaacgtgaaaacagctgat

SEQ ID NO: 314606 - DNA, 742 bp, Unknown
  Bacterial polypeptide expressing nucleotide sequence isolated from the Sargasso Sea
tatgaacattggaattattggaagtggtggtcgagaacatgctttgtgttttaagcttaaacaatcaaaaataattgataaaatttactgtattcctggaaatgctggtacaaatttaattgcagaaaatatcgatattaaaataaatgattttgaaaaaataaaaaaattttcaattaaaaaaaaaattgaacttcttgtaattggtccagaaaaacccttggttgacggtatttcagattattttaaaaatagtaatattaaaatatttggacctaataaaatagcttcgaaattagaaggatctaaaacttttacaaaaaaactatgtaaaaaatataatatcccaacttcaaaatttcatatttttgaaaataaagatagtgcaaaaaaatttttagctaattcaatttttccattagtaataaaagctgatggattggccgcaggaaaaggtgtttacatctgtaatactaattctgaagccttaactgctgtagatgaaatttttgacggtcgttttggaaaagctgattgtatcttaattgaagaatttttaaatggagaagaaatgagttattttataataactgatggaaaaacttttcaaccatttcaaactgctcaagatcataaaagagttggggaaggtgatgttggaaaaaatacaggtggcatgggtgcgtactcaccatcacaattaattaataatgaactacaaagcaaaattgatgaaaaaatt

SEQ ID NO: 314607 - DNA, 810 bp, Unknown
  Bacterial polypeptide expressing nucleotide sequence isolated from the Sargasso Sea
tatgaaagttggaataattggaagtggtggtagagaacatgctttatgttatgcattcaaaaaatctaaaagagtaaaaaaaatttattgtataccaggaaatgctggaacgcatgaaatagcagaaaatgttgatttagatctaaataactttgaattattaaaaaaattcatcaaaaaaaataacattgatattataatggttggtcctgaaaaaccattggttgaagggattgtagattttttagagagagaaaaaattaaagtttttggtccaaacgaacttgcttcaaagcttgaaggatctaaaatatttactaaaaatttatgtaagcaatacaatattcctactgcaaaatttggtgtatttgaaaatagagaaaaagctttaaattttttaaatcaatgtaaatttcccttagttattaaatctgatggtcttgctgcaggtaaaggagtttatatttgtgaaactataagaaatggagaacaagcaataaaagaaatatttaatggtaaatttggtaaagctgatgaattattgatagaggaattcctaaaaggagaagagatgagtttctttgtaatttctgatggaataaatataaaaaattttggtaccgcacaagatcataaaagagttggtgaaggtgatgtaggtcttaatactggtggcatgggtgcatattctccttctcgattagaaagcgatgaattaaataaaaaaattttagataaaatcattaaaccaactctcaaagctttaaaggatttggatacaagttttagaggttttttatatgcaggtct

SEQ ID NO: 314608 - DNA, 1099 bp, Unknown
  Bacterial polypeptide expressing nucleotide sequence isolated from the Sargasso Sea
atgaaagttggtataattggaagtggtggtagagagcatgctatatgtcatagtctaaaaaaatcaaaaaaaataagagaaatttactgttttccgggaaatgcgggaacttctaaaattgctaaaaatatagacatcaatgtaaatgatttaaataaattaaaagaatttattacaagtgagaagattgaattagtggttgttggtccagaaaaaccactcgtagaaggaattgtagatttttttgaaaaaaataatattaaaaccttcgggccaaacaagattgcttctcagcttgagggttcaaagatattcacaaaaaaaatatgtgaaaaatataatataccaacagcaaaatttggaatttttaataatagtcaagatgcaatattatttactaataaaacaaaatttcctttggttgtgaaggctgatggtttagcttctggaaaaggagtttacatttgtgaaaataaaaatgaagccgataactctattaaagaaatttttgatggtaaatttggtgaggcaaaaaatattttaatagaagaatttttaaaaggtgaggaaatgagctattttgtagttagtgatggaaaaactataaaaagttttcaaaccgctcaagatcataaaagagttttggaaggtgataaaggaaaaaatacaggaggaatgggagcctattcaccatcaagattaattaattatgatctggaaaaaaaaatattgaataaaataattaatccaacaataaaaggtcttagtgatataggttgtgtctataagggttttttatacgccgggctcatgatcataaataatgaaccttatctaattgaatataatgtacgaatgggtgatcctgagtgtcaaactattttaccaaagttaaaatcagacttatttgaaattatttacgcatcatgcactgaaaatttactacacacaaaaattgaatggcatgacaaaaaaagtttatgcatagtggtttgttctaaaggttatccagaaaaatataaaaaaaatatacttttaaaaaatattgataaaataactttagataaaaatgattattgttatcatgcaggaacaaaag

SEQ ID NO: 314609 - DNA, 685 bp, Unknown
  Bacterial polypeptide expressing nucleotide sequence isolated from the Sargasso Sea
tattgctgttgtgagtgatgatcaaattattcctcttgcaacaagccaagatcataaatctgttggagatggagatgttggattaaacactggaggcatgggtgcttactcccctgctccaattgtcacagatgagattcacaaaagagttatcgatgaggttatgctaccaacaatgaatggattaaaggctgaaggatttccttatcttggttttttatatgctggcctaatgattgaaggagatgaaataaaagtcttagaatttaattgtaggtttggcgatccagaaacgcagccaattatgctcagattagaatctagccttacaaatttatgtcttgacgcaattaataaaaaacttgatgctcatcaaattgaatggtcatcaatgcactcttgtggagtagttttagcatcatcaggttatccagaagattatgaaacagatatggaaatagatataaaaaaccatttcagtgaaaatgagaaactgtttcatgcaggtacaaagtttgtagataataagattctcacatcaggtggtagagttttttgcatgacggctttaggtgagaccttagaaattgctatagataatgcgtataatgcaatccctaaaattaactttgagggcatgttcttcagaagtgatattgggaaaaaaggattgaagaatgattaa

SEQ ID NO: 314610 - DNA, 919 bp, Unknown
  Bacterial polypeptide expressing nucleotide sequence isolated from the Sargasso Sea
tatgaatattgctattattggaagtggaggaagagaacatgctttatgttttaaattatctgaatcaaaaaaagtaaaaaaaatattttgttttccaggaaatgctggaactgaaaatattgcaaaaaatataaatataaatttaagcgattttgaagagttaaaaaaaattatctttaaaaataaaattgaaatggttattgttggtcctgaaaaaccgctggtagaaggtgttgtagattacttagaaaaaaacaatatattggtttttggacctaataaaattgcagcgcaattggaaggttcaaaaacatttacaaaagaattatgtaaaaaacataatattcccactgcagagtttgaaatattttataaatccgaagatgcaaaaaaatttttaaaaacatccaagtatcctgtcgttataaaagctgataatttggctgctggaaaaggtgtttatatatgtgaaaatgaattgtccggacaaaatgcaattgaagaaatatttggaggcaaatttggaaaacctgagaaattattaatagaagaatttcttcaaggtgaagaaatgagtttttttataatctctgatggaaaaagtttcaaaatacttgaaactgcacaagatcataaaagggttggcgaaggtgacattggtaaaaatacaggcggtatgggagcttattcaccatcactactaattaatcccgatcttcaaaaaaaaattataaataagataattcaacctacattaaaatctcttaataaaattggttgttcttataaaggatttttatatgcaggattaatgattataaaaaatgaaccatatttaattgaatataatgtaaggatgggtgatccagagtgtcaaacaataattccaagattgaagacggatttatttgaaataatt

SEQ ID NO: 314611 - DNA, 856 bp, Unknown
  Bacterial polypeptide expressing nucleotide sequence isolated from the Sargasso Sea
atgaaagtacttgtgattggtggcggcggccgtgaacacgcgatggcgtggaaactgagccagtcccctaaggtgaccaaggtgtatgtggcacccggcaacggtggcacggccttgaaccccaagctcgaaaacgtcgcgatctccgacgtgcgcgagctgcgcacctgggcccagtctgaaaagatcgccctgacggtggtgggccccgaggcgcccttggccgccggtgtggtcgatgagttccgcgcccacggcctgcgtatcttcggccccaccaaggccgctgcccagctggagagctccaaggctttcagcaaggccttcatgcgccgccacggcatcccgactgctgactacgacacgttcacagacccggctgcggcccacgcctttgtggaccgtttgggcgcgcccatcgtcatcaaggccgacggcctggcggcgggcaagggcgtggtggtggcgatgacgctgcaagaggctcacgacgccgtggacttcatgctggtggacaacaaatatggcgtgacgcacaacgaaggcggcgcgcgggtcgtgatcgaggaattcctcgaaggcgaagaagccagtttcatcgtgctgtgcgacggcaagaacgtgctggccctggccaccagccaggatcacaagcgcctgaaggacggcgacgaaggccccaacaccggcggcatgggcgcctactcgcccgcgcccgtggtcacggccgacgtgcatgcccgcgccatgcgcgagatcatcctgcccaccatccgtggcatggaaaaggacggcattccttacaccggcttcctgtacgcagggctgatgatcgatgccaagggccagccgaaga

SEQ ID NO: 314612 - DNA, 1270 bp, Unknown
  Bacterial polypeptide expressing nucleotide sequence isolated from the Sargasso Sea
aatgaaagtaatggtagttggatcaggtgcaagagagcatgcaattatttggagattatccaaagatattaatgttgatgaaatcatatgcttaggtcaaaatgcaggtgtgtcagaaattgctaaaactattcaggtagatattgaagatattgcacaaataagggaaataattatcgaaaacaatccagatttagtagttattggacctgaaggccctcttagtaatggtataactgatgtcttatctgatgaaaatataaaagtatttgggcctacaaaaagtgcagctcaaatagaatcatctaaaatattttcaaaaaaattaatgctcgataacaatattccaaccgcttatgcagaattttttaataatgcagaaaaagctatttcatatggaaagaataaaggtttcaataatctagttataaaagctgatggattagctgcaggaaaaggagtttttttacccagttcaaatgaagaaatggaagaaataataaaaatgctattagttgaaaaaaaactaggtgcttcaggtgaaatgattttgctagaagataggatttatgggcctgaagttagtgttttttcttttactgacggaacaaatttttctagcccaatagcaatttgtgattataaaagagttcatgataatgatatagggccaaatactggaggtatgggatgctataccccacctgaattttgggatgaatcactaagtaatgagataattaacaaaatcatttcccctacactaaattccatgaaaaaaaatcaaacaccatttcaaggtattctttatgcaggcataatgataactgaatcaggaccccaagttatagaatttaactgtagatttggtgatccggaatgtgagttaataatgcctatgtttaaaggaaatttatcggaagtttttctagatattgccaatcaaaaatttgatagtaaaaaagttagttggaaaaataaaaaaggtgtatgtgttgttttatgctcaggtggttatcctaattcttacaaaaaaggtttagaaatatctggaatagataaaattaaatataatttattgtttcatgcagggacaaaaaaaaccgaaaataaaatcattactgacggtggaagagttttagtattatcaaatttagatgaaaatatcatgaaatctagatcaaatatttataaagaaatagataaaattaaatttgagggatcattttacagaaaagatattggtctaagagccgaaaataatgaataa

SEQ ID NO: 314613 - DNA, 1235 bp, Unknown
  Bacterial polypeptide expressing nucleotide sequence isolated from the Sargasso Sea
cggtggtacagagctagactcatcgctgctaaatgtaaatttaaatattaacgaccatgattctcttgtgaactttgcaaaacaaaataatattactatgacaatagttggtcctgaaaacccgctggcagctggaatagtgaatagtttcctgaatgcaggtcttaaaatctttggtccaaaaaagcaatatgctcttttggaaagctcaaaagtcttttcaaaagaattcatgaaaaatttcaatataccaacgtctgaatatcaaatgttttcaagcaatcaagaggctaaagatttctgttcaactaaaaaacaccctattgtaataaaagcagatggtcttgcggctggaaaaggtgtagttgtatctgcctcaatagatgagtcatatgaagctattgatagtcttctaaaatcagaacattctgattacatagttgtagaagaattcttgaatggccaagaactctcagctatctatatagtaaattatcaaggcattagttatgagataggtctaccatggacaaaagactataaatctagagatgaatacaatagcggaccaaatactggtggcatgggtgctgttagtcatcctctatcttttgagaataaaaactctttattcaaacttcatcttgacatagaaaaaatattaatcaaaacactaacatctataaacaactataacaaagatgatggtgttggatatctaggatttttatatatggggttaatgattaataacaaagacgaaattaatgtacttgaatacaactgcaggctgggtgaccctgaaacacaaaacataatgttaacactccacaataaagatgttgatttgttggatttaatactaggtagaaaaaataataaaaaagactttaatctagataggattgataatgaagataatgggtactgttgcacattagtactagcagctaaagggtatccagagtcctataaaaaaggtttctacttagatttaagttccataaaagaaacagatcaacttgttatattccattctggaactgatatcgaaaatgggaaaattgtatcaaaaggagggagaattctttctgtcaatgtatatgcaaatgaccgtcaaaaagcaattgacatggcttatgaaaaaataaaagaaattaaggtatttgaagataaagattttaaacatcaaaatcaagatttagtattttttagagaggatatagggaattaac

SEQ ID NO: 314614 - DNA, 1102 bp, Unknown
  Bacterial polypeptide expressing nucleotide sequence isolated from the Sargasso Sea
tcattaacgatcgtgggccccgaagctccacttgtaggaggaattgttgattactttcacgatcaaggtttaccttgctttggacctacttctaaagctgcaaagctagaagggtcgaaagcttttacaaaagatttttgcagtaagtatggcatcccgacagcctcttatgagacattcacaaatgttgaagcggctgctgaatatataaaaaaacagagaatgcctattgtaataaaagccgacggcttagctgctggtaaaggcgttgtaatagctgctacagtgagcgaagctttagagaccatccacgatatgttgtccggcaatgcctttggagatgctggtcaagaagtagtaattgaggagtttttaaccggcgaggaagcaagcttcatttccatcgtagatggtgaaacagtggttccgatggcgacatcgcaagaccataaggcgcaaaaggacggggatttgggtccaaacaccggtggaatgggagcctactcgccggcaccagttgtcactgggtctatccatgaaaaaataatgaatgaggtaatgcttcccacggtttcgggaatggcggccgagggaaggagatatgttggctttttatacgcgggtttaatgatctcgccgcaaggtgatgtgaacgtaattgaatttaattgccgtttcggtgatcctgaagctcaaccaataatgcttcgattaaaatcagacttaccagcgctctgtctcaaagctctctcacaagaactccggtcagaatctgcagattgggacgttcgccccgcagtaggggtagtaatggcgtctgctggttacccgggctcttatccaaaaggagaaagaattcgcgggttagaacacaaattaagagaaaatgaaaagatatttcatgccggtacagtcgaacgtaaaggcgaaatcatgaccaatggtggaagagtgttatgtgcaacctctctgggtgatacagtaactgaagctcagaaaaacgcttatgaactagctaaatatgttagctgggaaagcttgtttttcagaacagatattgcatacagggcaatagagagagaaaatacaagtaatgagtaaa

SEQ ID NO: 314615 - DNA, 598 bp, Unknown
  Bacterial polypeptide expressing nucleotide sequence isolated from the Sargasso Sea
atgattgtagggattataggaagcgggggaagagagcatgccatttgtaatgcattaaataagtcaaaaaaaattgataaaatttattgttttcctggtaacgctgggacagatgcaatagctgataatattaacttagatataaataaatttgaggaattgaaaaatttcattcttgcaaaaaaaataaaattagttgtgataggaccagaaaaacctttggttgatggactaacagattacttggaaagttttaatatcaaggtttttggacctagtaaagttgcttcacaattagaggggtctaaaatatttacaaaaaacatctgtaaaaaatataatattccaactgcaaatttcggtgtatttaatgatattaatcaagctaaaaattttttagataaatccaattttccaatagtcattaaagcagataatttggctgcaggaaaaggtgtttatatttgtgaaaataaagaagagtcttatcaagcagttaaggaaatatttgatggaaagtttggtgttgctgaaaatgttcttattgaagaatttttagaaggtgaagaaatgagctttttcattttaagtgatggta

SEQ ID NO: 314616 - DNA, 466 bp, Unknown
  Bacterial polypeptide expressing nucleotide sequence isolated from the Sargasso Sea
atttctttatgcagggctgatgattaaagataatgagattaaggttcttgaatttaattgcagatttggtgatccagaaactcaacctattttattaaggctcaattcgagtttggttgaactttgcaaagcagctattgatgatgaattggatacatattcaattcagtggactaaaaaacactcatgtggagttgtaattgcctctaaaggctatcctgaagactatgaatccaataaaaaaatttctttaaaagaaaataacatcaaagattcaatgttgtttcatgcaggaacaaaatatgaaaatgaaacagtacttacaagtggaggcagggttttttgtgcaacagcactagggagcgatttgaaagatgcacaaaaaaacgcatataatctcgtaaataatgtcgaatttgacggtgcatttttcagaaaagacattggattcaaaggaattaaatga

SEQ ID NO: 314617 - DNA, 1315 bp, Unknown
  Bacterial polypeptide expressing nucleotide sequence isolated from the Sargasso Sea
aatgaaacataaaatattagttgttggttctggcgctagagagcatgctattatacgcgcactaaatcgctctgttcataaaaaagagatttattgtattgcttctaatatgaatcctggaatcgttaactcttgtgaaaacttcactatgggtgatatcaacgatccaacatttgttacaaattatgcaagacatgtatctgcgaccatagctattattggtcctgaaaacccactggcagcaggtgtagctgatgtattatggtctattggcattaaaacagttggaccaacaagggaccttgctcagattgaatcttccaaagcattcacaagaaatttgttaaaagaatatcatatacctggtggaccagagtataagacctttagctccatgcgaggagtagaagcttttttaaatactttggaagacaattatgttgttaaatatgatgggctgatgggtggtaaaggagttaaggttgctggggaacacttacattcacatacggaagctttagcttactgtaaagaattattggatagtgatgctcagtttgtaattgaagaaaaatttattggtgaagagttttcacttatgagtttttgtgatggtgataatcttaaacacatgccagcagttcaagatcacaaacgagcctatgaaggtgatactggacctaatactggcggtatgggaacatattctgatagcaatcactccttgccttttttaactaaacaagatatagacgatgctaaaacaattaatcaagctaccgcaaaagctataaaaaataaatttgatttatcatatagaggaatactttatggcggctttatggctacagctaatggtgttaaactaattgaatacaatgccaggttcggggatccagaggcaatgaatgttttatcaatattagagtctgatttcgttgatatttgttatgccattgttaacggaaaccttgatgatgtaccagtaaaattttcaacaaaagcaacagtttgtaaatatgctgttcccaacggttatccagacaatccagttaaaggtcaagaaattgacgtttctaaaatatcaaatcataatggtctatattatgcatccgttaatattcaaaaagaaaaactagtggaatcaggaagtcgaactattgcttatgtgggcattgccgattctatttttgatgcagaaacaattgctgaaaatgaaataatatctattgagggtccactttttcatagaaaagatattggtaaaaaagaaataattcagaaaagaatagatcacatgaaaagtttacgatga

SEQ ID NO: 314618 - DNA, 1099 bp, Unknown
  Bacterial polypeptide expressing nucleotide sequence isolated from the Sargasso Sea
atggaatatagaatactgattgttggctctggtgcgagagaacatgctattgcacgatctattaacaagacacagattgaccaccagctattttgtatagcatctaataaaaatcctggaataatgaatatttgtgatgagttaattttaggagatatagagaatgttgattttatagtaaaaaatgcaattcaaaaaaaatgtaacctaacgatcattggacctgaaaaccctttatccaaaggagttgttgatagattaaaagagaataatataccatctatcggaccaaccaaagatcttgcacaaattgaaacatcaaaatcctttgcaagggacctcatgaaagaatataatattgatggactgccaatatatcaaagttttacaacaatgaatggtgtcaaagaatgcctagccagtcatggtgaaaactatgttttaaaatacgatggtttggctggtggtaaaggtgttaaggtttctggagaacacatttttaaccatgaagaagctcttgattattgccaaggcattatcagttctaacggtaaatttgtcattgaagaaaaatttattggggaggagttttcgttaatgagttttagtgatggaaaaacactgaaacatatgcctgtaattcaagatcataaaagagcctatgagggagatgaaggtcccaatacaggaggaatgggaacgtattccgataaagaccattctttaccattcttgaataaagaagacgttaataaagcaaaagagacaaatgaaaaaatcataagagcattgtataaaaaatttggagaaagatacataggtgttttatatggtggttttatggtaacagaagatggtgtaaaagtcattgaatacaatgcaaggtttggtgaccctgaagcaatgaatgctcttactttgcttgaaacagatttattaacaatttttaaatctatggtgagcggggatcttgatagtgctgatgtgaaatttaggaaccaagcaaccgtttgtaagtatgcggttccaatcggataccccaatgaccctgttaaaggttcttctattgatgtatctatgattgctgatgatgaagtaa

SEQ ID NO: 314619 - DNA, 554 bp, Unknown
  Bacterial polypeptide expressing nucleotide sequence isolated from the Sargasso Sea
aatgaatattttagttataggacaaggcggtagagaacatgcaatcgcatggaaattacaacaatcagaaaaagtgactcaagtttttgttgctccaggcaatggaggaactgaactagaagctagttgcattaatatagatatttcttctaatgattttccaatgattaaatcatttgtagaagaaaataatattgaattagtggttgttggccctgaagatccattggtaaatggtattaaagattatttatcagattctaatgttcttgtctttggtcctgatgctaagggagcacaacttgaaggttcaaaaatattttctaaagaatttttatttgaaaacaacatcccaactgggaaagcagcatttttttcatcgtcaaataaagcaatagatcatcttgaaaaatctaattttccaatagtcttaaaagctgatggattggctgcaggtaaaggagttttagtcgccaacaaattagaagaagcaaagaaatgggttaaagaagttatggaagactctaaatttggagttgcaggaaaaaatattc

SEQ ID NO: 314620 - DNA, 658 bp, Unknown
  Bacterial polypeptide expressing nucleotide sequence isolated from the Sargasso Sea
caagatcataaagcaagagatgatggagacaaaggtcctaatactggaggaatgggtgcctattctcctgccccaattgttgatgattcaattcattcaagaattatggaggaagtcattcagccaaccctaaaagggttaaatgatttaggttatcaatattgcggatttttatatgctgggatgatgataaataaacaaaaagaattgaaagttttagaatttaactgcaggtttggagatcctgaaacgcagccaattatgatgagactaaaatctgatttagccgacctttgctacaaagcttgtgaaaaaaaacttgcgggcgaatctttagaatgggatcaaagaaagtctcttggggttgttatggcagctaaaggttaccctcacaaatatgaaaaaaataatgagatacgaaacatacctgaagaaagcgaagaatttaaagtatttcatgctgggacaaaacttaaagacggatctttaaaaacaaatggaggaagagttttgtgtgtaaccgcactaggagattctgtacaatctgcacaagcaaaagtctattctgaaattgaaaacatattatgggatgatgggtttttcagaagagatataggctatagagctatagatagggaacaaaatgagtctagttgat

SEQ ID NO: 314621 - DNA, 952 bp, Unknown
  Bacterial polypeptide expressing nucleotide sequence isolated from the Sargasso Sea
gaaaagaaataatatcccaactgcttcatttgaatcatttactaactacgagaacgcaagaagttatttagagaattctccaattccaatagttattaaagccgatggattagcatcaggtaaaggtgttaaggtctgtttttcaaaagatgaagccttttcttttttgaaagaagttatgcaagataaagttttttcaacttccggagataaagttgttattgagagttttctaaaaggtgaagaggcatctttttttgttttttccgatggtaaaaatatattgactttggattcgtctcaagatcataaaagacttctggatggagataagggacctaatacaggtgggatgggtgcgtattctcctgcgccaataatagatgaaattaccagacagaatattttaaatgaaattgtatacccagtttttgaaggatttaaaaaagaagattttgaatatactggaattttatatattggtttaatgatagatgataaaaaacccagtgttgtagaattcaattgtagatttggtgatcctgaaactcaaccattactctttagaattaattccgatatctttgaccttttttattttacagcattaaagaagattagtgattataaattagagtggaaaagcaaaacagctgtttctgtggtgctggcatcaaaaggatatcctgctagcccaataacaggagatgaaataaaaaatcttaaagaaattgatctctcgagtgatgaatttatctttcatgcaggaacaaagttggatggaaataaaattattatatcaggaggcagagttttaaatgttactgctctgggagatacactagaagaggcaatagataagtcatatgaatgcataaataagattgaaactaaaaacttacagtatagaaatgacattggagttaaaggccttttaaaaaaagctaaatag

SEQ ID NO: 314622 - DNA, 1136 bp, Unknown
  Bacterial polypeptide expressing nucleotide sequence isolated from the Sargasso Sea
tggttgcactaatatagatatttcttctaatgattttccaatgattaaatcatttgttgaagagaataatattgaattagtggttgttggtcctgaagatccattagtaaatggtattaaagattatttatcagattctgatgttcttgtctttggtcctgatgctaagggagcacaacttgaaggctcaaaaatattttctaaagaatttttatttgaaaatagcatcccaactggggaagcagcatttttttcatcatcaaataaagcaatagatcatcttgaaaaatctaattttccaatagttttaaaagctgatggattagctgcaggtaaaggagttttagtcaccagtaaattagaagaagcaaaggaatgggttaaagaagttatggaagactctaaatttggagttgcaggtaaaaatattcttattgaagaatgtttgtttggtactgagcttagttttatgggcatattaactcctgactctttcattccatttgaaactagcattgattacaagccactccttgaaggcaataagggcccaaatactggaggtatgggttgtatgtctccctctcctttcatgaatgaagatttaaagaataatattgtagagacagttgtgaagccaacaatatctggattaaagaataaaggaattaattattatggttttatgtattttggcttaatggtaaagaacaatatttctaaggttctagaatttaattgtcgtttaggcgatcctgagactcaatgcttaatgatgcaaatggaatcagatcttttggatgctattttgcaagctttgaatggggaagaacctaaaataacatggaaggctggagcaacaatgggtgtagtaatagcttcaggaggttatccgaattcatacaaaaatgaagttccgataaatattggcaacattaaaaatgcgaaactattccatgctggaacaaaatctataaatgataaattggtaactaatggtggtagagttttctcattaaactattcttcagattctatagatgactgtaaaagatatatttacgataatattgaaaaaataaattttgatagcatgacttttagaacagatattggagaaatttatgagtcttaac

SEQ ID NO: 314623 - DNA, 1126 bp, Unknown
  Bacterial polypeptide expressing nucleotide sequence isolated from the Sargasso Sea
cgattttttaaattttttagaacttcttttaaaaaatataaaaaaaaataaaattaatatggtgattgttggtccagagcaacctttagtagatggaatagttgactttttaaaaaaaaataaaattaatgtttttgggccaaataaatatgctgctcaacttgaaggttcaaaagcttttatgaaatctatatgtaaaaaaaataatattcctacagcaaattttaaaatatgtaaaaaaaaatctgatgttataaattttttaaagaaaaataatatgccaatagttgtaaaagcggatggtttagctgctggtaaaggcgtagctatatgtaattcgaaaaaagaggtaataaacttatctgctgaaattttcgctggtaaatttaaaagctcaaaaaaattagttcttgaggaatttctggaaggtgaagaagcaagttattttcttatagttgataaaaaaagtttttcttttattggctctgctcaagatcataaacgagttggtgaaaatgaaacaggacccaataccggtggaatgggagcatactctccagcaccaataataaataatgagttagaaaaaaaaataataagtaaaattatcaaaccaacattatctgcgctgaaaaaaagtaggaagccatacacaggatttttgtatgcaggacttatgattaaaaatggtgaaccttatttgattgaatataatgttagaatgggtgatccagagtgtcaggttataatgccaagattaaaaactgacatagttaaactttttatcttggctactaaaaataaattaaataagattaagattaaatggaaaaatagaaagtgcatgactattgtattatgtactaagggatatcctggaaaatacaaaaaaaatttattaatcaaaaacttaaataaaatttctactcaaaagaactctcaaatatttcatgccggaactcaaatgattaataagaaatatttttctataggtggtcgagttttgaatataacttcaagcggacatagttttctcaaaattagaaaaaatatctttaaattaattaaaaaaataaattggaaatatggtttttttagaaaagatattggatggagagttatttaa

SEQ ID NO: 314624 - DNA, 728 bp, Unknown
  Bacterial polypeptide expressing nucleotide sequence isolated from the Sargasso Sea
aatagtcgaggaatttctttcaggaaaagaagcaagttactttgttataactgatggtaaaaattattttcctataggcacagctcaagatcataaaagaataggagaaaaagatactggtcctaatactggaggaatgggtgcatattctccatcaaaattaattacaagggatgttgaaaataaaattaaaaaaaaaattattgaaccaacattgaggggtctcagcaaaaaaggttgtccctataaaggaattttatatgcaggattgatgattgaaaattctaacccaaaactcatagagtataatattcgttttggagatccggaatgccaaataataatgatgagattaaaaaacgatttattagatttaattgaagcatcaatctacaaaaagttaaaaagaaaaaaaattacatggactaatgaaaaagctattacaattgtagctgcgagtaaaggatatccagggaattataaaaaatttaaagaaattaaaaatataaaaaaaataaaattaaataaaaaaaaacagttatttcatgcatcaactattaaaaaaaataacaaatatttttcaagtggtggaagagttttaaactcaacagttttaaataaaaacctaaaagtagctaggtcacaagcattgaaaattttagataatttagattgggaaaataaatattatagaagggatattggttatcaagtgattgataaatgag

SEQ ID NO: 314625 - DNA, 1200 bp, Unknown
  Bacterial polypeptide expressing nucleotide sequence isolated from the Sargasso Sea
ataaagtcaaaaaaatttactgtataccaggtaatgctggaacatcctcactagctgaaaatatttctatagatataaataattttgaaaaagtctatgagtttttaaaaaaaaataatatagattttgttgttgttggtcctgaagatccgcttgtaaatggtattgtcgactatttggaaaagtttaatataaaagttttcgggccaaataaagttgcttcacaactagaaggttcaaaaattttcacaaaaaaactatgtaaaaaatataacataccaacagcacaatttggtgtgtttaaaaatgataaggaatcttataactatattgataatgcaaagcacccgttggtaattaaagcagataatttagcagctgggaaaggtgtttatatatgtagagaaaagaaagaatcttatttagcagtaaaagaaatatttgaaggcaagtttggaactgcaaaaaacattttgtttgaagaatttttagagggtgaagaaatgagctatttcatagtgagtgatggaaaaacatttaaatattttggttcagctcaagatcataaaagagttggagaaggagacaaaggtaaaaatactgggggtatgggcgcatactcaccatcaagattatttaataaagaattagagcaaaaaattttagaaaaaattataaaaccaacgttaaaaggtataagtgatttaggaacaaaatataaaggttttctgtatgctggattgatgattgttaaggatgaaccatttttgattgaatacaatgtaagaatgggtgaccccgagtgccagacaattctgccaactttagacactgatattatcaaaatttttcaatcatgtattaatgaaaaacttgatgaaatagaaataaaatggataaataaaaaaagtttgtgtgtagtattatgctcaaatggttatccggaaaaatatgaaaaaaatataattataagtaattttgaaaaattaaatttaaatgaaaataattatttatttcatgcgggaacgcaaaaacaggatgataaaatttatgctgttggaggcagggtattaaattttatatcactttctaacacttacagtgaagcaaaaaaaaatatccataaaaacttagaaaaattgaattggcaaaaaggtttttttagaagagatattggatacaaagtcattgataaatgag

SEQ ID NO: 314626 - DNA, 637 bp, Unknown
  Bacterial polypeptide expressing nucleotide sequence isolated from the Sargasso Sea
atgaaagttctgataattggttcaggtggaagagaacatgctttggcctggaaatgtgctcaagatgatatcgtaaaacatgtttttgtctgtcctggtaacgcaggaacccatctagaggataaagtaagcaatgttgaacttaacttaaatgaatttagctcaatagaaaaattttgttcagaagaaaaagtagagcttgtcattattggtccagaacaaccacttgttgatggtttgactgattttttacagagtaaaaatattaaaactttcggtccatctaaaaatgcagctcaattagagggttcaaaaaccttttctaaagatttcttcgtaaagtacaacattccaacagccaaatacaaatcgttcgacaactttgaaagctcattagaatatctaaatgagatttcttttccaacagtcgttaaagctgacggtttggcagctggtaagggcgtaataatttgtcaaaactctgaagaagcaataaaagcacttgatagcatttttaatgataaggcctttggaactgctggtaatcgagtagtaatcgaagaatttttagaaggtgaggaagcatcatttattgctgtagtaagtaaagataagataattcctttagcaacaagcc

SEQ ID NO: 314627 - DNA, 1159 bp, Unknown
  Bacterial polypeptide expressing nucleotide sequence isolated from the Sargasso Sea
caatggaggaactgaactagaagctagttgcattaatatagatatttcttctaatgattttccaatgattaaatcatttgtagaagaaaataatattgaattagtggttgttggccctgaagatccattggtaaatggtattaaagattatttatcagattctaatgttcttgtctttggtcctgatgctaagggagcacaacttgaaggttcaaaaatattttctaaagaatttttatttgagaacaacatcccaactgggaaagcagcatttttttcatcgtcaaataaagcaatagatcatcttgaaaaatctaattttccaatagtcttaaaagctgatggattggctgcaggtaaaggagttttagtcgccaacaaattagaagaagcaaagaaatgggttaaagaagttatggaagactctaaatttggagttgcaggaaaaaatattcttattgaagaatgtttatttggtactgagcttagttttatgggcatattaactcctgattctttcattccatttgaaactagcattgattacaaaccactccttgaaggtaataaaggtccaaatactggaggtatgggttgtatgtctccctctcccttcatgaatgaagatttaaaaaagaatattatagagacggttgtgaagccaacaatatctgggttaaagaataaaggaattaactattatggctttatgtattttggtttaatggtaaagaataatatttctaaagttctagaatttaattgtcgtttaggcgatcctgagactcaatgcttaatgatgcaaatggaatcagatcttttggatgctattttgaaagctctgaacggggaaaagcctaaaataacatggaaaactggagcaacaatgggtgtagtgatagcttcaggaggttatccgaattcatataaaaatgaagttccgataaatattggcaacattaaaaatgcgaaactatttcatgctggaacaagatctataaatgataaattggtaactaatggtggtagagttttctcattaaactattcttcagattctatggatgactgtaaaagatatatttacgataatattggagaaatagattttgatgggatgacctttagaacagatattggagaaatttatgagtcttaa

SEQ ID NO: 314628 - DNA, 542 bp, Unknown
  Bacterial polypeptide expressing nucleotide sequence isolated from the Sargasso Sea
tcataaaaagattcttaatgaggttatgtatcccactatgaatggtttaattaatgaaggttcgccttatttaggatttctttatgcagggctgatgattaaagataatgagattaaggttcttgaatttaattgcagatttggtgatccagaaactcaacctattttattaaggcttaattcgagtttggttgaactttgcaaagcagctattgatgatgaattggatacatattcaattcaatggactgaaaaacattcatgtggagttgtaattgcctctgaaggctatcctgaagactatgaatccaataaaaaagtttctataaaagaaaataacatcaaagattcaaagttgtttcatgcaggaacaaaatatgaaaatgaaatggtacttacaagcggaggtagggttttttgtgcaacagcactagggagcgatttgaaagatgcacaaaaaaacgcatataatctcgtaaataatgtcgaatttgacggtgcatttttcagaaaagacattggattcaaaggaattaaatgag

SEQ ID NO: 314629 - DNA, 195 bp, Unknown
  Bacterial polypeptide expressing nucleotide sequence isolated from the Sargasso Sea
aatttaaggaagcaatgattaaagagggattggatgttgtaggtacttcaattgatggtaagctagttgagatgatagaaattcctaaacacaaatggtttctggcctgtcaattccatcctgaatttacatcaaatccaagagatggccatcctatttttaatagttatataaagagtacaattagaaaataaa

SEQ ID NO: 314630 - DNA, 132 bp, Unknown
  Bacterial polypeptide expressing nucleotide sequence isolated from the Sargasso Sea
ttgagattaaagatcatccctggtttattggctgtcaatttcatccggaattcacatcttcacctcttgcaggtcatccattattttattcttttatcgaagctgctgtagaatactctaaaaagaattaaa

SEQ ID NO: 314631 - DNA, 162 bp, Unknown
  Bacterial polypeptide expressing nucleotide sequence isolated from the Sargasso Sea
tatgggtaaagggagtagaacaaaatttatttttgtactaggtggagtgatgtctggtctaggtaagggtattgctgcatcctccataggttatcttcttaaaaattctggtttaagagttacaattttgaaattagatccatacttgaatgtagatcccgg

SEQ ID NO: 314632 - DNA, 94 bp, Unknown
  Bacterial polypeptide expressing nucleotide sequence isolated from the Sargasso Sea
gtccaatttcatcctgaatttaaatctagacctttggctccacatccattattctcgtcttttataaaagctgcaaaaaatcataagaaatgaa

SEQ ID NO: 314633 - DNA, 547 bp, Unknown
  Bacterial polypeptide expressing nucleotide sequence isolated from the Sargasso Sea
actttttctgttaaatctttggagaaaaatttataataaagtaaaacaagattgttcaaaaattcatcctggcttagttgaaataattgaaaaaaatctacatgaaatcgagaataattggcctaaaagccttccttcgggaataattcatgctgatttatttcccgataacattttttttaaggaagataaattgacaggtattattgatttttacttctcttgtcatgatttttatgcttttgaaattgccatttgtttaaatgctctttgctttgaaggaaaaaatgaaaatttgagctttaatgtcactaaagcaaaaaaatttatagatggctattcagaaataagagaaatatctgaagaagaaaaaaaatctttaaaaattttatgtcagggtgctgctatgagatttttattaacaagagtcttcgattatttaaacttaactgaaggtgctattgtaaaaattaaagatcccatagaatatctaaaaagattagaatttcataataatgtaaaaaattatgaggattattttttttaa

SEQ ID NO: 314634 - DNA, 178 bp, Unknown
  Bacterial polypeptide expressing nucleotide sequence isolated from the Sargasso Sea
gaaagtagcaggaagatctaaagataagtctttagtagaggtgattgagttgaatagtcatccttggtttattggatgtcaattccatccagagttcacatccaatcctagagctggccatccccttttttcaggttttataaaagctgccgataaatacaaaagattaaaaaaataa

SEQ ID NO: 314635 - DNA, 304 bp, Unknown
  Bacterial polypeptide expressing nucleotide sequence isolated from the Sargasso Sea
ttacacgcaatattactagatggaagtaaggttgcatcaatttatggagcatctcaaatagaagaacggcataggcatcgatatgaggtcgatacaaaataccaaaaaaagttagaaagtgcaggcctagttttctccggaatgtctccagatgggcgtctgcctgaaatcatagaatggacagatcatccatggtttataggtgttcagtttcacccagaattgaaatcaaaaccatttgacactcatccattgtttagagattttattggagccgccaaaaaaatgtcccgattggtctgac

SEQ ID NO: 314636 - DNA, 278 bp, Unknown
  Bacterial polypeptide expressing nucleotide sequence isolated from the Sargasso Sea
cagggttgcacgaatttataattcaagttccattgtggaaaggcacagacatagatacgaggtagatataaagtataaagagcaactagaaaatcatggattaaccttttcaggcatatctcccagtggtaaacttccagaaattattgaaatatcaacacacccttggtttatcggtgtacaattccatcctgaactaaagtccaagccttttgaaccccaccctttatttgcagatttcatcagagcggccctagagcaatctagattggtgtaag

SEQ ID NO: 314637 - DNA, 120 bp, Unknown
  Bacterial polypeptide expressing nucleotide sequence isolated from the Sargasso Sea
tagaaattccaaaccataaatggttcttagcatgtcagtttcatcctgaatttacttcaaatcctagagacggacatcctatctttaatagctatattaaaagtacaataacaaaataat

SEQ ID NO: 314638 - DNA, 550 bp, Unknown
  Bacterial polypeptide expressing nucleotide sequence isolated from the Sargasso Sea
catggcttccaaatatgcccgggaaaacagcattccttatttcgggctttgcctcggcatgcagatcgcggtcatcgactacgcccgcaacgtcctcgggctcgagaacgcaaacagtgaggaatttgaccccgacactcccgatccggtcattcacatcatggacgagcagaagtccatcagcgacaagggcgccaccatgcgcttgggagcctgcccttgcgccctcaaaaaaggcacggcatcctctaccgcttatgccaaggaagaagtttccgaaaggcatcgccatcgcttcgaattcaacaatgcctatcgcaaggaccttgagaaggccggtctcgtcgttgcgggagtcaaccccgaccgcgacctcgtggaaatcgtggaagtggtggaccacccatggttcgtcggggtacagtttcaccccgagttccagtccaaacccaacaaggcccacccgcttttcgcggcctatatcgaagccaccttggccaagagcctagcgggcatacaggaagcggaaaaggcagaggattcatcctag

SEQ ID NO: 314639 - DNA, 382 bp, Unknown
  Bacterial polypeptide expressing nucleotide sequence isolated from the Sargasso Sea
attgaaaacaatacagataatccaataatcgatttactgcctgaacaagatggagttacagacatgggaggttctttgagattgggagcaaacgagataaatgtcaaaccagatacaattgccaacaaaatttatggtgatgtaaaaatttcaaaaagacatagacacagatatgaatttaatacaaaatatctggatgagttttcacaaaaaggtatgattttctctggggaaagcgataatggcagacgaatggaaattttagaaatacctgatcataaattttttgtaggcgtacaattccatccagaattcaatagcagacctggatacccagaacatgtattcaaagcattcactactgctgcaaatcagaattaat

SEQ ID NO: 314640 - DNA, 331 bp, Unknown
  Bacterial polypeptide expressing nucleotide sequence isolated from the Sargasso Sea
tcttggttgcacgatgcggcttggtgcttatgagtgccacctaaccgaagggtcaatcgcccgccgtctttatggtgaaaaggctatttttgagcgtcaccgacatcgttatgaggtcaatattgcgtatcgtgatcagcttgctgatgctgggatgttgatttcggggctgtcgccggatggcagcttgccagaaattgttgaacgggccgatcacccgtttttcgtggctgtccagttccatccggagctcaaatcaaagccatttgagccgcatccgttatttacggggtttatcgcggcatcgatggagaaatcgcgactcgtttaa

SEQ ID NO: 314641 - DNA, 100 bp, Unknown
  Bacterial polypeptide expressing nucleotide sequence isolated from the Sargasso Sea
gtttataggagttcaatttcatcctgaatttaaatctagacctttaacccctcatcctttattttcatcttttattaaagcagctaaaaattataaatga

SEQ ID NO: 314642 - DNA, 220 bp, Unknown
  Bacterial polypeptide expressing nucleotide sequence isolated from the Sargasso Sea
aataaatatttaaagagattagaaaaggatggacttattttttctggtattaatcctgatttaaaagttgttgaggctattgaaatccctgggaattcatggtatgtagcaacccaatatcatccagaattaaaaagccgcattaataaagcacatcccctttttagagagtttataaaggcagcaaaaacattaaaacttaagcatgttaatcaataat

SEQ ID NO: 314643 - DNA, 341 bp, Unknown
  Bacterial polypeptide expressing nucleotide sequence isolated from the Sargasso Sea
gggttctatgagactcggatgtaaagatatctttttggaggaatcaaaactgagtagtatatataaaaagaaaaatataactgaaagacatagacatcgatatattattaataatgaatatatacaatcattaaataaacatgggtgtttaataagtggttttgccactattaaaaccgaagagaaagggaatagtcgaattatagaagcaatcgaagacgagaaacatccatggtatattggatgtcaataccaccctgaatataaatcatctccttttaatccacatccattatttgtctcatttataaaaaaatgtgttgaaaataattctatgtgaa

SEQ ID NO: 314644 - DNA, 119 bp, Unknown
  Bacterial polypeptide expressing nucleotide sequence isolated from the Sargasso Sea
aagcacacccctgtttattggagtgcaatttcatccagaattcaagtctagacctttaaatcttcatccattgtttgcatcttttataaaagcagctaaaaataaactaaatgactaga

SEQ ID NO: 314645 - DNA, 202 bp, Unknown
  Bacterial polypeptide expressing nucleotide sequence isolated from the Sargasso Sea
ccgatgttggaaggctccggtcttaaaatatcgggactgtctgaaaaagatgagtttgtggatatggtagaattggttgatcacccttggtttattgcatgtcaattccatccggaattcacttctaagccattgtctgctcatccattgtttattagttttttagaagcggcaagaaaagctcaagcttctcggaggtgat

SEQ ID NO: 314646 - DNA, 860 bp, Unknown
  Bacterial polypeptide expressing nucleotide sequence isolated from the Sargasso Sea
acaagataaaacaagaaataaaatttcaatgtttacaaatgtgacaaataatgatgtgttttcatgtcatgatgttgattcgatttttcaagtacctgaaattctatacgatcaagggttggtagatgttattttcaagaaattcaataaaatgggatatgtcaatgcatcacaaaactgggatacctggaataagatagtcaattcattacataacgaaggagacccaatcaatattgcaatggttggaaaatatgtaacacttgcagatagctatgtcagtgtaaatcatgcattaaaacatgcagctgcatcaattggaaaaaagattacaattgattggattgattcagaaaacattaatggaaatgtggatacattatcaaaatataatgggatattggtgccaggaggttttggtacacgaggctctgaaggaataataaaaactgcaaactttgcaagagaacagaatatcccatatcttggaatttgttttggattccaattagccgcagtatcatttgcaagaaatgtatgtagtcatacagatgcaaattcaacagaaattgaacaaaatacgaataatccaataatagatttactcccagaacaggacggaattacagatatgggaggatcattaagattaggtgcaaacgagattaatgtcaaaccagatacaatagcaaacaaaatttacggtcaagacaaaatttcaaaaagacatagacatcgatatgaatttaatacaaaatatttagaagaatttgcacaaaaaggaatgatcttctcaggagaaagtgacgaaggacgaagaatggaaattttagagataccatctcataaattcttgtagg

SEQ ID NO: 314647 - DNA, 694 bp, Unknown
  Bacterial polypeptide expressing nucleotide sequence isolated from the Sargasso Sea
cgtagatgttggaaatatatatgatgttcctatgaatttacatcagaatggtctggatagcgaagtattaaatatatttaatcttgagcaaaaaaataaaccaaatttcattaaatgggaaaaaatctcatcaaatgctagctcgttagaagagagtgtaaaggtatcaattgttggaaaatatattcaattacaagatgcctacaaatctcttgatgaagcgatataccatgctggattaataaacaagattaaagttaatgttgaatgggttgactctgagttgttggagagctctccaccaattgattatctagatagtacagacgcaattctggtcccaggtgggtttggccaacgtggtagtgagggtaaaataaatgcaattagatttgcacgtgagaagaaggttccatacttaggtatttgtttcggaatgcaaatggccattgtagagatgtcaagatcacttctaaaactccatggagcaaacacgacagagtttggagatacagatcatcctgttgttgatcttatgaagcaatggaaaaaaggaaaaaccactgaaaaaagagatgaaaatacggatcttggagggaccatgagattaggggcgtatgacgcagtactaaaaaaaggctcaaaaatcgaagagatatataaagcaaataaaataaatgaaagacacaggcat

SEQ ID NO: 314648 - DNA, 112 bp, Unknown
  Bacterial polypeptide expressing nucleotide sequence isolated from the Sargasso Sea
catgggtttatttggagttcaatttcatccagaatttaaatctagacctttaaatcctcatcctttattctcttcatttattaaagctgcaaaatcttttaatggaaaataa

SEQ ID NO: 314649 - DNA, 439 bp, Unknown
  Bacterial polypeptide expressing nucleotide sequence isolated from the Sargasso Sea
gcagctattgcattctggtcgtaaaatgtgtagtcttgaaaatgccaattcaactgagattactacaaatacaaaaaatccaattattgatcttttacctgaacaaaaagatgaaactgacatgggtggttcgttacgattaggtgcaaatgagattaagattagcaaaaattcattagcgcataaaatttacaattcagataaaatttccaaaagacatcggcatagatatgaattcaataccaaatatcgtgatgagtttttgaaaaaaggtatgatcttttctggtgaaagtgataatggaaaaagaatggaaattttagaggttccaacgcataaattctttttaggagtacaatttcatccagaatttaacagtaggcctggatttccagaagatgtattcaaaacatttgttacatctgcttcacaaaattaa

SEQ ID NO: 314650 - DNA, 214 bp, Unknown
  Bacterial polypeptide expressing nucleotide sequence isolated from the Sargasso Sea
cgttatgaggtaaatccaaaatataaagacgatatgatcaaaaaaggattagatgttgtagggacatccattgatggtaagctagtagaaatgattgagattcctaaacataaatggtttttagcttgtcaatttcatcctgaatttacctcaaatccaagagatggacatcctattttcaacagttatattaaaagtacattaagaaagtaaa

SEQ ID NO: 314651 - DNA, 154 bp, Unknown
  Bacterial polypeptide expressing nucleotide sequence isolated from the Sargasso Sea
aatgcttgtagaggtgatcgagattccaaatcatccgtggtttgttggttgtcagttccaccctgaatttacttcgaaaccaatcgagggacatcctttgtttaccggatttattaatgctgctattacagacaatgaatctaaatctatttaa

SEQ ID NO: 314652 - DNA, 1591 bp, Unknown
  Bacterial polypeptide expressing nucleotide sequence isolated from the Sargasso Sea
tatgaccagcattaccggtgagactggcgcggggaaatccatcgccatcgacgccctaggtttgtgcctaggcaaccgtgccgatgccagcagtgttcgccctggcgcgagcaaaaccgaagtcagtgcccgattttcactcgaggatgtgcctctggcaaaacgctggctcgaagataacgatctcgaactcgatgatgagtgtattctgcgtcgaaccattggcagtgatggccgctcacgcgcctatatcaatggcaatcccgttcctttgactcagttaaaattactgggacaattgcttgtggggatccatggccagcacgcccaccatgcaatgttaaagagtgaacaccagctcaccttactcgatagctacgctaatcacaggctactgatagacacagtggcggcaagctatcagcgctgtaaacaaattgaagccgaactcaagcaattagaagcctcacagcaggaacgtatcgcccgtaaacaactggtgcaatatcaagttgaagagttagatgagtttgatctcaaggtcggtgaatttgaagagattgaacaggaacacaaacgtctcgcaaatggcaccgagttggtcgatagctgccaagccagcctgtttttactcacggatggcgaagagagcaatatcgagtcactactgaataaagccgttggccttgcagagaatttgcaaagctatgctccagaattaaccaatgtcagcactatgctgaacgaagcgcttattcaagtgcaagagagcgctggcgaattgcaacactacctaagtaaacttgaactcgaccccgcgcattttgcttatttagaggaaaggctctctaaagccatgcaactggcccgtaagcaccatgttagcccagacaaattagccgagcatcatctcgccctcagggccgaactcaccacactcgatgatgatgaaaataagctagaagatatccaacgccaagtggaggccagtagagtagcctacctcgctaacgcgcaaaaactcagtcagagccgcgcccgttatgcgaaagagctggagaagttggtgactcaatccattcacgaactcaatatgcctaagggaaagttcaccattgaagtgaatttcaacccagaaatcatgtcgatgaatggcagcgataatatagagtttatggtcacaaccaacccaggtcagccgttacaacctatatctagagttgcctcaggcggcgaattgtcacgtataggccttggtattcaagtcattaccgcgaaaaaagttgccactccgacactcattttcgatgaggtggatgttgggatctcgggccccaccgcagccgtggttggacgtatgctacgtagccttggcgaatcgacccaagtgctgtgtgtgacccatttaccgcaagttgccggtaatggccatcaacatatgtttgtgaataaattcaacaaggcgggaagtactgaaactactatgacgcctttagatagggaacaacgcatccaagagctcgccagattactcggtggcgatacgattaccaccaacaccttagccaatgcacgggagttattacagtag

SEQ ID NO: 314653 - DNA, 284 bp, Unknown
  Bacterial polypeptide expressing nucleotide sequence isolated from the Sargasso Sea
aaaaatatatcaaaaggatattattacggaaagacatagacatcgttatgagtttaatgattattataaagaacggctaaactctaaagggtttataacttctggagtatgcccagacaataatctcgtagaaatttctgaaatctctgaccatccctttatgattggaagtcaatttcatcctgaatttggatcaaggttagatcgacctcatcctctatttgatcatttcataaaagctagtgcaaatcaaaaaaagactggtgctcaatttcagctttaga

SEQ ID NO: 314654 - DNA, 607 bp, Unknown
  Bacterial polypeptide expressing nucleotide sequence isolated from the Sargasso Sea
atgattacaatcgtcgattatgacatgggtaactcacgctcagttgtaaacatgctgcaaaggattggatttaaagcagaaattacaagagatcataaaaaacttgaatcagcagagaaattaattcttcctggagtgggttcgtttgatactgcgatgaaaaatttagaacactttgagcttaaagagcttcttgatagaaaggctcttattgagaaagtaccatttttaggtatatgtttaggaatgcaaattcttacaaatagcagtgaggaaggtaatttgagtggcttaggttggataaaaggaagtgcatcaaaatttaagagcaataatgatatcaaagtacctcacatgggatggaactatattcaaccatcttccaatagcagattatgtaaaaatctcgaggacaattcgaggttttattttgttcattcttattatgtgcaagtgcgtgaggaagaacattcatccatgaaaacaacatatagtctggagtttgattcaggcattgaaaaagataatatttttggtgttcaatttcatccagaaaaaagccataagtttggtatgcaaatactaaaaaattttgcggagttgtaat

SEQ ID NO: 314655 - DNA, 121 bp, Unknown
  Bacterial polypeptide expressing nucleotide sequence isolated from the Sargasso Sea
ataaaaaatcatccctggtttctaggctgtcagtttcatcccgaatttacttcaaatccaagagatggacatcctatctttaatagcttcatttcaagtacaataaagactaaaaaatgaa

SEQ ID NO: 314656 - DNA, 1660 bp, Unknown
  Bacterial polypeptide expressing nucleotide sequence isolated from the Sargasso Sea
tatgctttgccaactcagcattaataatttcgctatcgtccgttttctcgaactggattttcgtcccggtatgaccagcattactggtgaaactggcgcaggtaaatccatcgccatcgacgccttaggtttgtgcctaggtaatcgtgccgatgccagtagtgttcgccctggtgcaagtaaaaccgaagtcagtgctcgattttcactacacgatgttccccttgccaaacgttggctcgaagataacgatctcgaacttgatgatgagtgtattctgcgtcgaactattggcagtgatggccgctcacgcgcctacattaatggcaatcctgtgccgttaactcaactgaaattactcgggcaattgctggtcggtattcatggtcagcacgcccaccacgctatgctaaagagtgagcatcaactcaccttgctcgacagctacgccaatcacagactactgatagacacagtggcagcaagctatcaacgctgcaaacaaatcgaagccgaactcaagcaattagaagcctcacagcatgaacgtattgcccgaaaacaactggtgcaatatcaagttgaagagctagacgaatttgacctcaagatcggtgaatttgaagatattgagcaagagcataaacgcctcgccaatggcactgaactggtggatagctgccaagccagcctatatttactcacagatggcgaagagagcaatattgagtcactgcttaacaaggctgtaagccttgctgaaaatttgcaaagctatgaccccgcattaaccaatgtcagtactatgttaaatgaggccctaattcaagtacaagagagcgcgggagaattacagcattacctgagtaaactcgaactcgatcccgcgcattttgcctatttagaggaacgactctcaaaggctatgcaactggcccgtaagcatcatgttagccctgacaaattagccgaacatcatttggcgctcaaagcggaactcacaaccctcgatgacgatgaaactaagttagaggaaatccaactccaagttgaagcgagtaaaaccgcttacttagcgaacgcacaaaaactgagccagagccgcgcccgttatgcgaaagaactggataagctagtgactcaatctatccatgagctgaatatgcccaaggggaaattcactattgaagtgaattttaatcccgagataatgtcggtaaatggcagcgataacatcgagtttatggtcacaaccaaccctggccagcctttacaaccgatttcacgggtagcctctggcggtgaattgtcgcgtatcggtttaggcatccaagtgattaccgcgaaaaaggttgccactcctaccctgattttcgacgaggtggatgtgggaatttcaggcccgaccgctgctgtggttggcagaatgctgcgtagtctaggagaatcgactcaagtactttgtgtaacccatttacctcaagttgctggtaatggccatcaacatatgtttgtgaataaattcaacaaggcaggcagtacagaaaccacaatgatgcctttggatagggagcaacgtatccaagaattagccagacttcttggtggcgatacaattacttctaacactctcgccaatgcacgagaactattacagtaa

SEQ ID NO: 314657 - DNA, 154 bp, Unknown
  Bacterial polypeptide expressing nucleotide sequence isolated from the Sargasso Sea
ttagatggaaatttagtggaaatcgtagagctatcagatcatccctggttcgtgggttgtcaatttcacccagaattttcatctacgcctcgagacggacatcctcttttcaattcttttgtgcgggctagtttaaaaaatgaaaggacttagt

SEQ ID NO: 314658 - DNA, 133 bp, Unknown
  Bacterial polypeptide expressing nucleotide sequence isolated from the Sargasso Sea
atgcattttgtttttattacgggcggtgttgcatcctctcttggaaaaggtatagcctcagcttcattagcaacattattaaaaagtagaaaattcaaagtaaggataagaaagttagatccttatctaaatg

SEQ ID NO: 314659 - DNA, 160 bp, Unknown
  Bacterial polypeptide expressing nucleotide sequence isolated from the Sargasso Sea
ctatctcggaatctgtttgggcctgcagattgcggtgatcgaattcgcccgccacgtcgccggaatgaaatcagcaaacagtaccgaatttgatgaaaccggggagttcccagtagtcgcattggtaaccgagtggaccgaaggtgacggccaactgtaa

SEQ ID NO: 314660 - DNA, 292 bp, Unknown
  Bacterial polypeptide expressing nucleotide sequence isolated from the Sargasso Sea
cttggggcttatgactgtaaacttttagacaacagtttcgtaagttcaatttacaaaaaaaagaccatttcagaacgtcataggcatagatatgaggtaaataataaatatattacagattttaaaaaatatggcctaatattttcaggaatgtctcctgataactctttaccagaaatattagaagttccaaaacatccctggttcattggtgttcaatttcatccagaactaaaatctaaaccttttgaaccgcatccacttttttcttcatttataatgcaagtttaaa

SEQ ID NO: 314661 - DNA, 190 bp, Unknown
  Bacterial polypeptide expressing nucleotide sequence isolated from the Sargasso Sea
gatgaataagcctaaatatatttttgttactggtggtgttacatcatccctcggaaagggtattgtatctgcttctttagcacgtctcctccaagctcagggcttaaatgtcgctattcaaaaattagacccctatataaatgttgatccaggaactctaaatccatatgagcatggagaatgttattaa

SEQ ID NO: 314662 - DNA, 262 bp, Unknown
  Bacterial polypeptide expressing nucleotide sequence isolated from the Sargasso Sea
aatgatacattcaatttataaaaaaaatattattaatgagagacatcgtcatagatacgaggtaaatgaaaaatttatatccaaatttaaaaataagggttatattttttcaggtatgtctccagatggattattacctgaagttttagaaagtaaattgcatcgatggtttataggtgtacaatttcatccagaattgaaatctagacctttggaccctcatccattatttgtttcatttataaaaaattgtataaaatga

SEQ ID NO: 314663 - DNA, 244 bp, Unknown
  Bacterial polypeptide expressing nucleotide sequence isolated from the Sargasso Sea
gagattgttgaaaggcatagacacagatatgaggttaacccagaatttagagatggatttaatactaaaggaatgaatatagttggtacttctgtagatgatatgttggttgaaatgatcgagataaaaaatcatccctggtttcttggttgtcagtttcatcccgaatttacttcaaatccaagagatggacatcctatctttaatagcttcatttcaagtacaataaagactaaaaaatgaa

SEQ ID NO: 314664 - DNA, 418 bp, Unknown
  Bacterial polypeptide expressing nucleotide sequence isolated from the Sargasso Sea
caaaaaaatccagtaattgatatacttcctaatcaaaatttagagaaagatgatgtaggtgcttcaatgaggcttggtacttatccttgcaaaattaaagaagaaactatggcatcctatatttataacaatgaaatagtttatgaaagacatagacatagatacgaggtcaataataagtttagaaatcaattagaggaaaatggtttaatatttagtggagtttcacctgatgaagatttagttgaaatgattgagattaaagaccatccttattttgttgcttcacaatttcatcctgaatttaaatcaagaccttgggagccagcacctatgttcaactcatttattgaagcatctaaaaaaatagagataccgcaaaaaacaatagatgatgaagcaaaagttagagattaat

SEQ ID NO: 314665 - DNA, 165 bp, Unknown
  Bacterial polypeptide expressing nucleotide sequence isolated from the Sargasso Sea
gatggccaaaactaagtacattttcattactggaggagtggtttcatcactcggcaagggtatcgcagcagcatcaattggtgctcttcttgaagcaagaggcttatctgtatcacttataaaagttgacccttatataaacgttgatcctggaactatgagtcc

SEQ ID NO: 314666 - DNA, 147 bp, Unknown
  Bacterial polypeptide expressing nucleotide sequence isolated from the Sargasso Sea
agatgattgagctgaaagatcatccttggtttgttgcgggtcaattccacccagaattcacttcgaccccacgcgatggtcatccattgttcgaaggtttcgttgctgccgcaagtgcacatcaaaaacgtgatctgaagaaataaa

SEQ ID NO: 314667 - DNA, 99 bp, Unknown
  Bacterial polypeptide expressing nucleotide sequence isolated from the Sargasso Sea
aatggctagatatatatttattacaggtggtgttgtatcatcccttggaaaaggtattgcagccgcctcccttgcttctttattcaaattgagaggata

SEQ ID NO: 314668 - DNA, 301 bp, Unknown
  Bacterial polypeptide expressing nucleotide sequence isolated from the Sargasso Sea
cctacttagcgacggcagcagatctgcatcggcatatggtgcctccaatatttttgaacgtcaccgccaccgttacgaattcaatagcaactacagacaacggcttgaagaggctggtcttgtgattgctggcacgaagccagacaaaagccttgttgaaattgttgaagtagcggatcacccgtggttcgttgcagtacaatttcatccagaatttaaaagcaagccgacagctgctcatcctctctttgctgatcttgttgcagcagccgtggctcaccacgctggtgtaaaaacctga

SEQ ID NO: 314669 - DNA, 121 bp, Unknown
  Bacterial polypeptide expressing nucleotide sequence isolated from the Sargasso Sea
catggcgcgatatatatttgtcactggcggcgtggtttcatcactaggtaaaggtttgtcatcagcatcgcttggatatttgcttagatcacaaggctataaggttagaataagaaaaatg

SEQ ID NO: 314670 - DNA, 577 bp, Unknown
  Bacterial polypeptide expressing nucleotide sequence isolated from the Sargasso Sea
tttgttttgtaatgttgatattaaaaatgtaattgaaactgtcgatgttaaaactatttatgaggcaccgattagttttgctaaagaaaaattagatgttcaagttttaaattatttcaaaataaaatctaaaaaatcaaataatttaacaccatggaagaaaataactaaaattacacttaatactaaaagaaatgttaacattgcaattattggaaaatacgttgaattaaaggatgcttataaatctttagatgaagcacttactcatggaggaatatccaataatcttaaagttaatttggttagaatagattctgaaaaattaaaagtttcagaaataaaaaataaacttaaaaatgtctcaggaattctaattccaggtggttttggtaaaaggggaactgagggtaaaattgaagcgataaggtatgcaagaataaataaaattccattccttggaatttgttatggaatgcaaatggcaataattgaatttgctagaaatcaattaaagattaaaaaagcaacttcttctgagtttgataaaggtggtgttcatataattggattgatg

SEQ ID NO: 314671 - DNA, 144 bp, Unknown
  Bacterial polypeptide expressing nucleotide sequence isolated from the Sargasso Sea
aatgcattttgtttttattacgggcggtgtagcctcatctttaggaaaaggtattgcctcatctgcaattgcaacacttcttaaagcaagaaaatttaaagtaagaatcagaaaacttgatccatatttaaatgttgatcctgg

SEQ ID NO: 314672 - DNA, 397 bp, Unknown
  Bacterial polypeptide expressing nucleotide sequence isolated from the Sargasso Sea
aaaaatcctgtagtatgtttaatgacagagtggataaaaaataatactaaagtaaatagaaatatcaatagtgaaaaaggtggaacaatgagattaggttcatatccatgtaagattttaaaaaattctttagtttacaaagtttataaaaatttaagaatcaatgaaaggcatcgtcatagatatgaagttaatactaattatatagataaatttaaagaaaaaggttacatttattcaggaatgtcacctgataatatgttgcctgaaattattgaatcaaccaaacattcttggtttgtaggtgttcagtttcatcctgaattaaaatcaagacctttgaaacctcatccattattttcatcatttattaaggcatgtttggaaaaaaaatgat

SEQ ID NO: 314673 - DNA, 114 bp, Unknown
  Bacterial polypeptide expressing nucleotide sequence isolated from the Sargasso Sea
gatggcaaatactaagtatatttttattaccggaggagtggtttcatcactcggaaagggtattgctgcagcctcaattggagcattgctagaatcaagagggctttctgtttc

SEQ ID NO: 314674 - DNA, 880 bp, Unknown
  Bacterial polypeptide expressing nucleotide sequence isolated from the Sargasso Sea
catacaacattacttccatttatacatgcggcaggagaaattaaaacaaagcctactcagcatagtgtaatgagacttagagagattggattagagccagatttgcttgtatgcagaacagaagaaaatcatcatttatcaaaaaaattaaaaaagaaattaggattattctgcaatgttgaaacggattatgtttttgaatccccagatgttgaaacgatttatgagatcccacttgttttatataagcaaggttttgataatgcagtatgtgactgtctaaatattgcaaataataaaaaacataatgacatagaggttttagagaattctattgcaaaatttaagagctcaagtcatgaggttaatatcgctatatgtggtaagtataatggtctgcatgatgcatataaaagtatattagaggcttttattcattctggtatttatcactcaactcatgtaaatgtaaagtggatagatacagaagagttagaatctagcagcactcctgaatcgcattttgaaaatatcgatggggtattaatacctggaggctttggagacagaggtattgaaggtaaaattttatcatctaaaatttctagagagaaacagattccattttttggaatttgtttagggcttcagtgtgcaataattgatttttcacgtaatgtatgcggtttcccaaatgcaaatagtaccgaatttaaaaagagaattaaatatccagttgtagatttgatggatggacagaagacggtcaaagataagggtgctacaatgagactaggctcttatccatgcgaggttcaaacgggaaccaaggcctattctgcatataaaaagaaaaaaataaatgagaggcatcgtcaca

SEQ ID NO: 314675 - DNA, 124 bp, Unknown
  Bacterial polypeptide expressing nucleotide sequence isolated from the Sargasso Sea
catggcgcgatacatattcgtaactggcggcgtggtttcatcacttggaaaaggtctctcttccgcttctttagcatcattacttcaatcaagaggttttaaagttagagtaagaaaatgggat

SEQ ID NO: 314676 - DNA, 142 bp, Unknown
  Bacterial polypeptide expressing nucleotide sequence isolated from the Sargasso Sea
acctgagattattgagctaaaaaaccatccttggtttattggtgttcaatttcacccagaatttaaatctagacctttaaacccacatcctttattctcatcatttatcaaagcagcaaaaatcaaaaatgcaaaatattaa

SEQ ID NO: 314677 - DNA, 317 bp, Unknown
  Bacterial polypeptide expressing nucleotide sequence isolated from the Sargasso Sea
gagattaggtttatatgatgctgtaattaaaaataattctttaatttcaaaaatctattcagaaaaaagaataaaggaaagacataggcatcgatatgaggtaaatataaagtacaaaaaagaatttgaaaaaaagggacttattttttcagctttatcaccagatggtactttacctgaaataattgaattaaataatcatccatggtttgtaggggtacagttccatcctgaatttaaatcaagacctttcaccccgcacccgttgttctcttcgtttattaaagcagctaatctaagaaggagaataaattaat

SEQ ID NO: 314678 - DNA, 97 bp, Unknown
  Bacterial polypeptide expressing nucleotide sequence isolated from the Sargasso Sea
atggcgcgatatatatttgtcactggcggcgtggtttcatcccttggtaaaggtttatcatcagcatcacttggatatttgcttagatcacaaggtt

SEQ ID NO: 314679 - DNA, 466 bp, Unknown
  Bacterial polypeptide expressing nucleotide sequence isolated from the Sargasso Sea
atggtaattgaattttcaaagaatgttttagggctaaaagatgctaattcaacagagtttgatttagaaactagtaacccagttattgacatcatcgaatcacaaaaaggattacaagaaacaggtggaactatgagattaggtgggtacagatgttatcttgctccagaatcattagctagaaaaatttatgataaggaagaaattatagaaaggcatagacacaggtatgaatttaatgattattttaaagaaactttaaattcaaatggatttatcacatcaggcatatgtccagacaataatcttgtagaaatctcagaaataaaagatcaccctttcatgattggaagtcagtttcatccagagtttggatctaggcttgataaacctcaccctctttttgattcattcataaaagcttgtattaatcaaaaaaaaataggagctcaattcaaactttaaa

SEQ ID NO: 314680 - DNA, 337 bp, Unknown
  Bacterial polypeptide expressing nucleotide sequence isolated from the Sargasso Sea
aaaatttacggtgattataccaatgagaggcatcgccataggtacgagttcaataatttactgaaatctaggttacaagatgctggacttataattagtggtgagactgaaaatggcaacttagttgagatcatcgaagttccatctcaaaatcatccttggtttgttggtgtccaatttcatccagagttttcctctactcctaaaaatggccatcctctctttaaatcttttattgatgcatctctgtcattctcaaacagtaggatagaatcaagtaaaagtaagaaatattctaattttgataagggaatacatgaaacttctggattttaaa

SEQ ID NO: 314681 - DNA, 208 bp, Unknown
  Bacterial polypeptide expressing nucleotide sequence isolated from the Sargasso Sea
atatgaagtaaattcaaatttaagacataaatttgagcaaaaaggattatttttttcaggcatgtcaccagataatgatttaacagaaataattgagttaaaaaatcataagtggtttataggtgttcaatttcatccagaatttaaatctagaccttttcatccacatccattattttcatcttttattaaggtagctaaaaaatga

SEQ ID NO: 314682 - DNA, 193 bp, Unknown
  Bacterial polypeptide expressing nucleotide sequence isolated from the Sargasso Sea
catttttaatagttttgaaaagaaaggtatgcttttttctggaatgtcaccagatattaagcttcctgaaataattgagcttaaaaatcatccatggtttattggagtacaatttcatccagaatttaaatctagacctttaaatccacatcctttattctcttcatttatcaaagctgcaaaattttattaa

SEQ ID NO: 314683 - DNA, 691 bp, Unknown
  Bacterial polypeptide expressing nucleotide sequence isolated from the Sargasso Sea
aaatctaaaaaagagcctgacctaaatatttggaatgatgttagctcaagatatcgtagttcagagggatcagtcaaaattgctgttgttggaaagtatacaaaacttgaagatgcctataagtctctttcagaggctcttattcatggaggtttagctaataaaacaaatgtagaggtaacatggctggaatctgaagagtttgaaaaatcggctcaaacaaagcgattaaataagtatgacgggatattgataccaggtggatttgggaaaagaggaaccgaagggaaaattaaagttataaaatatgcaagagaaaaacaaattcccttcctcggaatttgtttaggcatgcaattattagtaatagagtacgcaagaaattgtgctggccttaaagaggcaagttctgaagaattcgatgagaaatcagatagctctgaagatcacttaatctatcatctttccaaatggattaaagatcagaaagttgaaattagaagtaaggtccaaaataaaggtgggactatgaggttaggagcctaccctgcaaaaattaaaaaagggacaatggcttattcgatttataaaaaagcaatagtttcagaaaggcatcggcatcggttcgaggttaatgtcaattaccaagaagctctagaagacaatggtctaactttctctggattttctc

SEQ ID NO: 314684 - DNA, 251 bp, Unknown
  Bacterial polypeptide expressing nucleotide sequence isolated from the Sargasso Sea
caatataagcgagaggcatagacatagatatgaggttaacattgattataaagacaaatttgaggataagggcctaattttttctggaatttcaccggataataaattacctgagattatagagcttaaaaatcatccttggtttgtcggtgttcaattccatccagaatttaaatctagacctttaaacccacatccattattctcatcatttatcaaggcagcaaaaatcaaaaatgcaaaatattaaa

SEQ ID NO: 314685 - DNA, 109 bp, Unknown
  Bacterial polypeptide expressing nucleotide sequence isolated from the Sargasso Sea
aatggctagatatatttttattacaggtggtgttgtatcatcccttggaaaaggtatagcagccgcctcccttgcatctttatttaaattaagaggatatcaagtttca

SEQ ID NO: 314686 - DNA, 370 bp, Unknown
  Bacterial polypeptide expressing nucleotide sequence isolated from the Sargasso Sea
catgaagtacgtcgtcgtctccggaggcgtcgtcagcggtctggggaagggcgtcaccgcctcctccatcggtgtcctcctcaaagccagtgggttacgggtgacgagcgtgaagatcgacccgtacatcaacatcgacgcggggacgatgtcgccgttcgaacacggggagacgtacgtgttggacgacggaggggagagcgatttggatctcgggaattacgagcggttcgtggacgtgtcgctgacgagagatcataacgtcaccacggggaaggtgtatcaggtgcgagaggcgaggcgacggggacgcggatcgcgcggcggggacgcggcggcgtttttgaattcgagacgcgcgaatgaatga

SEQ ID NO: 314687 - DNA, 520 bp, Unknown
  Bacterial polypeptide expressing nucleotide sequence isolated from the Sargasso Sea
taccttgggatctgcctaggcatgcagatggcagtgattgaggctgcgagaaatgtagttggttataaaaatgccggatctgaggaatttgatcatgaggcaggcaagaaacgatttgagcctgttgtttatcatctgaaagagtggatacaaggcaaccaaactatagaacgatctgttagcgatgataaaggtggaacaatgcgtttgggcgcttacaacgcaatattgttagacaaaagcaaagttgcatccatctatggagtgtctcaaatagaagaaaggcacaggcatagatatgaggttgatacaaaatatcaaaaaaagttagaaagtgcaggtctaattttctcaggaatgtcaccagatgggcgtctgcccgaaatcatagagtgggcagatcatccatggtttataggggtacagtttcacccagaactgaaatcaaaaccatttgaacctcatccattgtttagagattttattggggcagccaaaaaaatgtcccgattggtttgat

SEQ ID NO: 314688 - DNA, 346 bp, Unknown
  Bacterial polypeptide expressing nucleotide sequence isolated from the Sargasso Sea
gaaaagagaacaatagatagtgatttaggcggaacaatgagattaggagcttatgaagcaaaattgaaaaataattcaaaagttagagaaatttatgattcagaattgattagtgagagacacagacacaggtatgaagttaataacaattacgctaaagattttgaaattaatggagttcatttctcgggttattccccagacggcttattacctgaaatagtggaattaaaagatcacccatggtttataggtgttcaattccatcctgaacttaaatcaaaaccatttgatccacatccattatttaaatcatttatcgaagctgcaaagaataaaacgtaaa

SEQ ID NO: 314689 - DNA, 280 bp, Unknown
  Bacterial polypeptide expressing nucleotide sequence isolated from the Sargasso Sea
aagggttcaataatagaaaaaatatactcaaaaaataaaattaatgaaagacatcgtcatagatatgaagttaatactagttattttgaaaaatttgaaaaaaatggttatgaatttacaggcatgtcaccagataaattattgccagaagtattagaatttaccaagcatccatggtttattggtgttcaatttcacccggaattaaaatctagacctcaaagcccccatcctctttttgtttcttttattaaacattgtataaagactcatgaataaa

SEQ ID NO: 314690 - DNA, 421 bp, Unknown
  Bacterial polypeptide expressing nucleotide sequence isolated from the Sargasso Sea
gcatttagatggagcgaatagtacggagtttaataaaaaaaccccctaccctgtgatagatcttatggagtcacaaagggcaataaaagcaaaaggtggaactatgaggttgggcgcctatgattgtacattaaaaaaaggaacaaaagcattttcagcttaccgtaaaaataatatttctgagcgtcatcgacatagatgggaagtaaataatagatatagagatagattggaaaaaaatggattaattatttctggagagaattcggaactgaatttagttgagattgttgaattaaaagatcacccatggtatatcgctgcacagtttcatcctgaattaaaaagcagggtaagtaaagctcatcctttatttagagattttataaaagcatctgtcaaacaattaaaaaagaaataa

SEQ ID NO: 314691 - DNA, 143 bp, Unknown
  Bacterial polypeptide expressing nucleotide sequence isolated from the Sargasso Sea
gatggctcaaactaagtatattttcataactgggggggttgtttcctcacttggaaaaggcattgcagctgcttcaataggagctcttcttgaatctagaggcctgtctgtttctttaattaaagttgatccatacataaatg

SEQ ID NO: 314692 - DNA, 188 bp, Unknown
  Bacterial polypeptide expressing nucleotide sequence isolated from the Sargasso Sea
gatgagtaaaccaaaatatatatttgtaacaggaggtgttacttcttcattaggtaagggtataatttcagcatcattagctaagcttcttcaatctcaaggatataattctgcaattcaaaaacttgatccatatattaatgtagatcctggtacccttaatccatatgagcatggtgaatgttacg

SEQ ID NO: 314693 - DNA, 229 bp, Unknown
  Bacterial polypeptide expressing nucleotide sequence isolated from the Sargasso Sea
tgaaaggcatagacatcgatatgaagttaatccaaagtataaaaacgaaatgataaataatggcttagatgttgtcggcatgtcgattgatggcaagcttgtagagatgatagaaattccaaagcataaatggttctcggcatgtcagtttcatccagaatttacttcaaaccctagagacgggcaccctatctttaatagctatattaaaagtacaataacaaaataa

SEQ ID NO: 314694 - DNA, 334 bp, Unknown
  Bacterial polypeptide expressing nucleotide sequence isolated from the Sargasso Sea
gacaaacattctgatcttggaggatccatgagacttggtggtcaggtatgtaaactgaagaaaaaatcaaattcgtataaaatgtataaaaacttagaaatcgtagaaagacatagacatcgttatgaagttaatccaaagtttaaagacaaaatgataagtgcagggcttgacgttgtaggcacatcgattgacggaaatttagtagagatgatagaaataccaaatcataaatggtttcttgcgtgtcaatttcatcctgagtttacttcaaatccaagagatggacatccaatttttaatagttatataaaaagtactttaaaaaaatagt

SEQ ID NO: 314695 - DNA, 523 bp, Unknown
  Bacterial polypeptide expressing nucleotide sequence isolated from the Sargasso Sea
accttatcttgggatttgccttggtatgcaaatggcagtgattgaagctgcgagaaatgtagttggctataagaatgctggatctgaggaatttgaccatgaagccggcaagaaacgatttgaacccgttgtttatcatttaaaagagtggatacagggtaaccaaactatagagcgatctgtcagcgatgataaaggcgggacaatgcgattaggggcttacagcgcaacattaattgatgggagcaaggttgcatcaatttatgaaacatcgcaaatagaagaacggcataggcatcgatatgaggtagatacaaaatatcaaaaaaagttggaaagtgcaggcctagttttttccgggatgtctccagatgggcgtctgcctgaaattatagaatgggcagatcatccatggtttataggtgtccaatttcatccagaattgaaatccaaaccatttgatcctcatcccttgtttagagattttatcggggctgccaaaaaaatgtcccgattagtttaa

SEQ ID NO: 314696 - DNA, 196 bp, Unknown
  Bacterial polypeptide expressing nucleotide sequence isolated from the Sargasso Sea
tgattttgaaaaaaaaggtctaattttttctgctatatctccagacgggaccttacctgaaataattgagttaagagatcacccgtggtttattggtgtacaatttcatcctgaatttaaatcaagaccttttactcctcatccattattttcatcttttattaaagcagcaggagcaaatgagaggaaaaattaa

SEQ ID NO: 314697 - DNA, 280 bp, Unknown
  Bacterial polypeptide expressing nucleotide sequence isolated from the Sargasso Sea
aaagataaatctaaaattagagatatttataaatctagattaatcaaagagagacatagacatagatatgaagtggatatttcatataaagaaaaatttgagaagaaaggattaatgttttctggtttatctccagatcataaacttccagagataattgaacttaaaaatcatccttggtttataggagttcagtttcatcctgaatttaaatctagacctttgaagccacatcctttattctcttcttttatcaaagcggcaaaaaatcatagatgag

SEQ ID NO: 314698 - DNA, 244 bp, Unknown
  Bacterial polypeptide expressing nucleotide sequence isolated from the Sargasso Sea
taaagagagacatagacatagatatgaagtgaacattaaatataaaaatgattttgaaaaaaaaggattaattttttctgctttatctcccgatggtatgcttcctgaaataattgaattaaaaaatcatccatggtttgttggtgttcaatttcatcctgaatttaagtcaagaccttttacacctcatccattattttcttcatttgttaaagcagcagaaatcaatatgaggagaaattaa

SEQ ID NO: 314699 - DNA, 121 bp, Unknown
  Bacterial polypeptide expressing nucleotide sequence isolated from the Sargasso Sea
gaaattaaaaatcatccatggtttataggtgttcagtatcatcctgaatttaaatctagacctttaactccacatcctttattctcatcatttatcaaagctgcaaaattctataaatgat

SEQ ID NO: 314700 - DNA, 436 bp, Unknown
  Bacterial polypeptide expressing nucleotide sequence isolated from the Sargasso Sea
gagtttgatgcacaaacaaagcaccctgtcatcgctctgattacggaatggacgacgccagatgggggggtggaaacgcgaacgggtgagagcgatatcggaggctcgatgcgattgggggctcagtcttgtaagttggctcgaggaagtatcgtagcggaggcctatcagtccgaattgattagcgagaggcaccgacatcggtacgagtttaataatacttatacgatggaattagaagccgctggattgcgtgtagctggacggtccttagacggaaacttggtagaaatagttgagatacctagtcatccatggtttgtaggttgccaattccacccggagtttgcttcaacccccagattaggtcacccattgtttatatctttcgtaaatgcgggaattgcaaagaaagaaggtagttgtcgggaatgac

SEQ ID NO: 314701 - DNA, 187 bp, Unknown
  Bacterial polypeptide expressing nucleotide sequence isolated from the Sargasso Sea
aagaaaatttgaaaataaaggcatgattttctctggtatgtcacctgatggtaaattgcctgaaatcattgaacttaaaaaccatccatggtttataggtgtccaatatcatcctgaatttaaatctagacctttaactccacatccattattctcttcatttgtcaaggcagcgaaattctattaa

SEQ ID NO: 314702 - DNA, 264 bp, Unknown
  Bacterial polypeptide expressing nucleotide sequence isolated from the Sargasso Sea
ataaaaaaacaaaaatctttgaaagacataggcatagatatgaagtaaattataattatttaaaatctattgtaaaaagtggtataacactgtctggtatgtcaccaaatagaaagcttgttgaaataattgaaagagaaaaacatccatggtttattggtgttcagtttcaccctgagttaaaatctacaccttttaatcctcatccaatttttaattcatttatttcagcagtattaaaatttaaaaatcataataactgaa

SEQ ID NO: 314703 - DNA, 133 bp, Unknown
  Bacterial polypeptide expressing nucleotide sequence isolated from the Sargasso Sea
catggcgcgatatatatttgtcactggcggcgtggtttcatcattaggtaaaggattatcatctgcatcgctagcttatttgttaaaatcacaaggctacaaagtcagaataagaaaaatggatccttattaa

SEQ ID NO: 314704 - DNA, 576 bp, Unknown
  Bacterial polypeptide expressing nucleotide sequence isolated from the Sargasso Sea
caggaggttttggaaatagaggtataagtggcaaaatagaggctattaggcatgctagagagaatcaaattcctttcttgggtatttgtttaggtatgcaattatctattattgaattcaccaaaaatgtattaaaaatgaaaaactctggaagttctgaatttggtaaacacacaaataatgttatatcattaatgactgaatggagtaaaaaaaatcaaaaggttataaggaccaaagagaatgatttaggagctacaatgagattgggttcatatccctgttatataaaagagaaatctttagcttcaaaagtttataaaaaaaaattaatttacgaaagacatagacataggtatgaagtaaaccccaaatatagatcatttatcgaaaaaaaaggtttggttttttcgggtttttctaaagataaaaaattattggaaattatcgaaattaaaaatcataaatggttcttaggtgttcagtttcatccagaactaaaatcaaagccatttaagcctcatccaattttcttctcatttatcaaaaatagtttaattaataaaaatgcctaaa

SEQ ID NO: 314705 - DNA, 244 bp, Unknown
  Bacterial polypeptide expressing nucleotide sequence isolated from the Sargasso Sea
tttgagcgtcatagacatagatatgaggttaataacatattcatttcagattttaaaaaaaatgggatgattttctcaggaatgtcaccagacaatttactgcctgaaatttttgaattacaagaacatccatggtttataggtgttcaatttcacccagaactaaaatctaaaccttttgaccctcatccacttttttcttcatttattaatgcaagtttaaagcaatcaagattattatgat

SEQ ID NO: 314706 - DNA, 175 bp, Unknown
  Bacterial polypeptide expressing nucleotide sequence isolated from the Sargasso Sea
tttgatgttttcaggaatttctcctgataataaattacctgaaattattgagcttaaaaatcatccatggtttattggtgtacaatttcatccagaatttaaatctagacctttaaatcctcatcctttattctcttcatttattaaagctgcaaaatcttttaatggaaaataa

SEQ ID NO: 314707 - DNA, 124 bp, Unknown
  Bacterial polypeptide expressing nucleotide sequence isolated from the Sargasso Sea
atggcgcgttttatttttgtcacgggcggcgtggtatcatcccttggaaaaggtctctcctcagcatcgctagcatatttacttcaatcaagaggctataaagtaagattgagaaaattagatc

SEQ ID NO: 314708 - DNA, 696 bp, Unknown
  Bacterial polypeptide expressing nucleotide sequence isolated from the Sargasso Sea
gaagtgatccctttgatagatgtagataatgtctacagagtgcctatgattttagaaggatatggtcttggaaatagcataactaagactcttggattgcctcctggctcaatatctaataacaattcatggtcgtctgctatttctgaaatggatgctctagaggaagtagtttctatagctttagtgggcaaatatgtggaatatcctgatgcctatatgtctgtcaaagaggctataactcatgcaggattacgtgtaggacgcagaacccaaataaagtgggtccattcagaagatttagaacgtgacggcgcggagcagcatttgtcggatgttagcggcattgtggttcctggaggttttgggaaacgtggagtcgaaggaatgatcttggctgccgaatatgctcgaactaacaacattccttatttaggcttgtgtctaggtatgcaggttatgattatagaatggtgcagaaatgtactaaatttgttccaagcagattctgaagaattccaaccagatactcctaatcctgtaatccatgtgatgcctgatcaaatcgatgtcaccaataaaggaggcacaatgaggttgggaatgtacccttgtagtttagatttgcaatctaaatcacatggattttacgaatcaaattcggttgaagagcgtcacagacatcgatttgaataa

SEQ ID NO: 314709 - DNA, 161 bp, Unknown
  Bacterial polypeptide expressing nucleotide sequence isolated from the Sargasso Sea
ttcaggaatgtcaccagataataaattaccagaaataatagagcttaaaaatcatccatggtttataggtgttcaatttcatccagaatttaaatctagacctttggctcctcatcctttattctcttcattcattcaggcatcaaaaaaccataaatgag

SEQ ID NO: 314710 - DNA, 607 bp, Unknown
  Bacterial polypeptide expressing nucleotide sequence isolated from the Sargasso Sea
gttcgaacgcgcgcgcgagttcaacgccgacctctccaagtgggacgtggcccagggaacgaacttccgtggcatgttcgaaaccgcgctctcgttcgacgccgacctctccaagtggaacgtggccaaggggacggacttccgtttcatgttcggcttggcgtcctcgttcaacgccgacctctccgagtggaacgtggccaagggaacgagcttctctcacatgttcaccggcgcgcacgagttcaacgccgacctctcccagtgggatgtggccaaggggacggacttcgaggccatgttcgtcaacgcgaagtcgttcaacgccgacctctccgagtggaacgtggcccaggggacggacttcgagcacatggtgcgcggcgcccggccccgcggcggcgtcatctcaaaccagctcgcccgcgcggccaacggcgccgtgtcgatcgctcaccgccgcgcgccggccgcgtcgcagttcctcaacgcgaactcgttcgacgccgacctctccgagtggaacgtggcccaggggacgaacttcaatggcatgttctacaacgccggctgcacgactaccaagtgcgggtgcacgagctgcgcg

SEQ ID NO: 314711 - DNA, 166 bp, Unknown
  Bacterial polypeptide expressing nucleotide sequence isolated from the Sargasso Sea
tttgcttaaagatacgcgatttatttttgttactggtggagttgtttcttctctagggaaaggaatcgcttcagcatctataggttcattacttgaatcaaaaggatatacagtaactgttataaagcttgacccttattttaatgtcgatcctggaactatgagc

SEQ ID NO: 314712 - DNA, 259 bp, Unknown
  Bacterial polypeptide expressing nucleotide sequence isolated from the Sargasso Sea
aatgtattctaagactagtataaaagaacgtcaccggcataggtatgaagttaatggaaatcttgttgtagacttcgaaaaaaacggtttagcattcagtggtcagtctaaagagggtaatttaatggaaatgatagagctaaaaaatcatagttggtatgttggatgtcaatttcaccctgaatttacctcctcaccaataaatggccatccattatttaatggttttattaatgcagcatctaagaggaagatctaa

SEQ ID NO: 314713 - DNA, 157 bp, Unknown
  Bacterial polypeptide expressing nucleotide sequence isolated from the Sargasso Sea
aacgatcgaagtatttcatctgcattaatacatatgacatatatcccttatttaagttctgcaggagagttaaaaactaaaccaactcaacattcagtcaaagaacttcttaatgctgggattcagcctgatataataatgtgcagatctgagagaa

SEQ ID NO: 314714 - DNA, 214 bp, Unknown
  Bacterial polypeptide expressing nucleotide sequence isolated from the Sargasso Sea
gtacagagaacgcttagagcaagcgggtctagtatttagtggtttatcttctgaccgtaaactggttgagatgattgagctgaaagatcatccttggtttgttgcgggtcaattccacccagaattcacttcgaccccacgcgatggtcatccattgttcgaaggtttcgttgctgccgcaagtgcacatcaaaaacgtgatctgaagaaataa

SEQ ID NO: 314715 - DNA, 745 bp, Unknown
  Bacterial polypeptide expressing nucleotide sequence isolated from the Sargasso Sea
taaaacagaaagaaaaaaaatatcattgttttgtaatgtaccaatagacaatgttatagagacagttgatgtaaaaactatatacgaagcaccaatcagttttcataaagagaagttagatgaaagagtgctctcttatttccgtattaaaagcaaaaaatcacctgacttaagtaaatggaaaaatattacctcaagagttttaaatccaaaaaaagacgtaaatataggtattataggaaaatatgttgatctcaaagatgcttataagtctctagacgaagctttaattcatggcgggatatcaaataatgtgaaggtaaacttaaagagaatagactcggaaaatttaaaacctgaaaatattaaatctatactaaaagatgttacgggagttttaattcctggaggttttggaaaaagaggtacagaaggcaaaattgctgccataaaatacgcaagattgaatcatatacctttctttggtatttgctttggtatgcaaatggcggtaattgaagctgctagaaacttactaaatataaaaaatgcatctactagtgaatttggaaacaattgtacaccagttgttggattgcttgaagaatggcaaaaaggaaagaaaaaaattaaaggaacaaaaatgaatttaggtggaacaatgagattaggtttatacgatgcggtattgaaaaataattctctgatatccaaaatatattctggaaaaaaaatcaaagaaaga

SEQ ID NO: 314716 - DNA, 287 bp, Unknown
  Bacterial polypeptide expressing nucleotide sequence isolated from the Sargasso Sea
tttaaaaaagggctctaatgtttttaaaatgtataaaaagaaagagattgttgaaaggcatagacacagatatgaggttaacccagaatttagagatggatttaatactaaaggaatgaatatagttggtacttctgtagatgatatgttggttgaaatgatcgagataaaaaatcatccctggtttcttggttgtcagtttcatcccgaatttacttcaaatccaagagatggacatcctatctttaatagcttcatttcaagtacaataaagactaaaaaatgaa

SEQ ID NO: 314717 - DNA, 160 bp, Unknown
  Bacterial polypeptide expressing nucleotide sequence isolated from the Sargasso Sea
agtgctgataaatcgttggtagaggtcatagagtataaggaccatccctggtttgttgccagccagttccatcctgagtttacttcctctccaagagatggacacccgttgtttacgagtttcatcgaggctgctcttatttgccaaactggaaagtgaa

SEQ ID NO: 314718 - DNA, 100 bp, Unknown
  Bacterial polypeptide expressing nucleotide sequence isolated from the Sargasso Sea
atggcgcgatatatatttgtcactggcggcgtggtctcatcacttggaaaaggactatcatctgcttcgctagcttatcttcttcaatcaagaggtttaa

SEQ ID NO: 314719 - DNA, 665 bp, Unknown
  Bacterial polypeptide expressing nucleotide sequence isolated from the Sargasso Sea
agaattaagatcaattggaattcagccagatttacttgtatgccgaagtgataaatctatcaatgaagctcttaaaaagaagcttagtggtttttgcggtgtcagtatcaactctgtaattgaagctttagacgcagacagtatttattctgtacctctttctttaaaaaaagaaggtttatgcaaagaaaccctgaagtatttagaccttgaagataaaaaatgtgatttgaaaaattgggagcaactaatacacaacctaagaaatcctggagctccaatcaaagttgctttagtaggtaaatatattgaacttggagatgcatatttatcagttgttgaagctttaagacatgcatgcattgaacaaaaggctttattagatttacattgggtaagtgctgaaatgatagaaaaaaattcatcagaaacttacttaaatgaagttgatgcaattgtcgtacccgggggatttggcaatagaggagtaaatggaaaaatttcggctataaaattcgcaagagaaaataaagttccatttttaggtttgtgccttggtatgcaatgtgcagttatagaatgggctaggaatgtagctaatcttccagatgcatctagttcagaactagacccaaatactcccaatccagtgatacatttattac

SEQ ID NO: 314720 - DNA, 457 bp, Unknown
  Bacterial polypeptide expressing nucleotide sequence isolated from the Sargasso Sea
atgatagaaaaaaattcagcaaaaacttacttaaatgaagttgatgcaattgtcgtacctgggggatttggcaatagaggagtaaatggaaaaatttcggctataaaattcgcaagagaaaataaaattccctttttaggtttgtgccttggcatgcaatgtgcagttatagaatgggccaggaatgtagctaatcttccagatgcatctagttcagaactagatccaaacactccaaatccagtgatacatttattaccagaacaggaagatgtagttgatttaggtgggacaatgagacttggagtttatccatgtagactgacaaaaaatacaactggaaaaaacttatatgatgaggatgttatttatgagagacatcggcatagatacgaatttaataattactacaaacaaagttttttagattctggatacaaaattagtgtacatcacc

SEQ ID NO: 314721 - DNA, 331 bp, Unknown
  Bacterial polypeptide expressing nucleotide sequence isolated from the Sargasso Sea
caaaggtggaactatgaggttgggcgcttataattgtacattaaaaaaaggaacaaaagcattttcagcttaccgtaagaataatatttctgagcgtcatcgacatagatgggaagtaaataatagatatagagatagattggaaaaaaatggattaattatttctggagagaattcggaactgaatttagttgagattgttgaattaaaagatcacccatggtatatcgctgcacagtttcatcctgaattaaaaagtagggtaagtagagcgcaccctttatttagagattttataaaagcatctgttaaacaattaaaaaagaaataa

SEQ ID NO: 314722 - DNA, 292 bp, Unknown
  Bacterial polypeptide expressing nucleotide sequence isolated from the Sargasso Sea
gaaaaattctaaaactgaaaaaatatataataaaaaagtaatatcagagagacacagacataggtatgaatttaataacaaatatttaacccaacttcatgaaggagaccttattccatctggaattaatccagaaacaaatttagttgagatcattgaacataaagaacatccctggtttattggagttcaatttcatcctgaatattctagcacagtcttagaacctcatccattatttaaaagtttcataaattcatcaattgaaaatttaaaaaataacactaattag

SEQ ID NO: 314723 - DNA, 141 bp, Unknown
  Bacterial polypeptide expressing nucleotide sequence isolated from the Sargasso Sea
tatgaagtttatatttattacaggaggggttgtttcttctttgggtaaagggattacagctggctctttgggtgctttgttagaatcttgtggttatagggtgacgtgtatgaaactcgacccgtatattaatattgaccc

SEQ ID NO: 314724 - DNA, 649 bp, Unknown
  Bacterial polypeptide expressing nucleotide sequence isolated from the Sargasso Sea
acatgcagcagcatcaattggaaagaaaattacaatagattggattgattcagagaacattaatggaaatgcggatacattatctaaatacaatggaatactagttccaggaggttttggaaccagaggttcagaagggataattaaaacggcaaactttgcaagagagaataatataccatatcttggaatttgttttggttttcaattagcagccgtatcatttgcaagaaatgtgtgcaatcatacagatgcaaactctacagaaattgaaagtgaaacaaacaatccaataattgatttactgcccgaacaagatggagtcacagatatgggaggctcactaagattgggcgcaaatgaaatagatgtcaaatcagatacaattgcaaacagaatttatggtcaaacaaaaatttcaaaaagacacagacatagatatgaattcaatactaaatatttagacgaatttgcccaaaaaggaatgatattttcaggagagagtgataatggaagaagaatggagattttagagatcccagatcataaattcttcgtaggagtgcaattccatccagagttcaacagtagaccgggatatccagaagatgtattcaaagcattcactactgctgcaaatcagaattaa

SEQ ID NO: 314725 - DNA, 826 bp, Unknown
  Bacterial polypeptide expressing nucleotide sequence isolated from the Sargasso Sea
atgtggaagacgttgcgcccgaaccgggcgaacctggtgatctggcagtggctgctgctcgtgctgtgtttcgtgctctggtacgcgctgaccagtccgacgctgctgccgccgttctatttcgacgatccgaacaaggccgcgttcttcttcggcgagccgcagaaggtgctgcagcgcatctgggagtggttcacgggcggcgaaatctatctgcacctgtggatcaccctggtcgaaacggtgctcgcgttcgcgctcggcaccgccttcggactcggcgtcggtctgtggctcgcgctgtcgccgctcgcgagcgcgctattcgatccgtatatcaaggcggccaattcgatgccgcgcgtgattctcgcgccgattttcggcgtgtggttcggcctcggcatctggtcgaaggtggcgctgggcgtcacgctggtgttctttatcgtgttcttcaacgtctatcagggcgtgaaggaagtgagcccggtggtactcgccaacgcgcgcatgcttggggcgaaccgcaagcagttgctgcgttttgtttatctgccgagcgcgatgagctgggtgttttcgagcctgcatacgtcggtggggctggcgtttgtcggctcggtggtgggggagtatctcggctcggcgcgcggcgtcggctatctgattctgcaagccgagggcaccttcgatatcaatacggtgttcgcggggattctggtgctgacggcgttcgcgctgattctcgatgcgattgtcgggattggcgagcgtcggttgatgaagtggcagccgaagtcgggcgatacggaaaaactgtagt

SEQ ID NO: 314726 - DNA, 122 bp, Unknown
  Bacterial polypeptide expressing nucleotide sequence isolated from the Sargasso Sea
gatggctaatactaagtatatcttcataactggcggtgtagtttcctctttaggaaagggtatagcagccgcttcaattggagcactattagaatcaagaggcctttctgtttctttaatca

SEQ ID NO: 314727 - DNA, 250 bp, Unknown
  Bacterial polypeptide expressing nucleotide sequence isolated from the Sargasso Sea
gtatcagagagacatcgtcatcgatttgaggtaaataatcgctacagaaaaaagcttcaaaaaggaggccttatcatttccggtgtcaatgaaaaccttggtgttgtggaaacaatcgagatagccggtcatccttggtttgtagcagcccaatttcatccagaattaaagagcagggtgaataaatcccatcctctttttagagaatttattaaagcatcaaaaaaatacaataaacgcaggagctaga

SEQ ID NO: 314728 - DNA, 404 bp, Unknown
  Bacterial polypeptide expressing nucleotide sequence isolated from the Sargasso Sea
agaagaaataatttatcacttaagtcattggtttaaagatcaaaaacttgaggtgagagaaaaaattcaagataagggtggcacaatgcgattaggcgcctatccagctaagataaaaaaaggatcgattgctcactctatctataagacggatacaatttcagaaagacataggcatagatatgaagtcaatttaaaatataaaaaaaatctagaaaacaagggtctatgcttttcagggttttctatcgacgggcaacttcctgaaatagttgaaatccccagccactcgttttttataggagttcaatttcatccggaactcaagtcaaaaccatttcaacctcaccctcttttttcaagctttataaaagcagcattagagcaaactagattggtataaa

SEQ ID NO: 314729 - DNA, 223 bp, Unknown
  Bacterial polypeptide expressing nucleotide sequence isolated from the Sargasso Sea
catcgacatagatatgaagtaaatcctttcttcaaagatatgatggtaaatgctggattaaatatcgctggaacctcaattgacaataagcttgttgaaatgatagaaattaataatcataaatggtttttagcatgtcagttccatcctgaatttacctccaatccaagagatggacatcctatttttaatagttatattaagagtacaataataaagtaat

SEQ ID NO: 314730 - DNA, 166 bp, Unknown
  Bacterial polypeptide expressing nucleotide sequence isolated from the Sargasso Sea
aggttttgttttttctggtatgtctcctgataatgtgctgcctgaaatattagaaagtataaaacataaatggtttattggtgtgcagtatcatccagaattaaaatctagacctttagcgccacatcctttattttcctcttttattaaacattgcataaaatga

SEQ ID NO: 314731 - DNA, 136 bp, Unknown
  Bacterial polypeptide expressing nucleotide sequence isolated from the Sargasso Sea
catggcgcgatatgtatttgtcactggcggcgtggtttcatctttaggaaaaggtttatcatctgcttcgttagcagctctattacaatctagaggttttaacgtaagaattagaaaactagacccctatttaaat

SEQ ID NO: 314732 - DNA, 130 bp, Unknown
  Bacterial polypeptide expressing nucleotide sequence isolated from the Sargasso Sea
atggcgcgatttatttttgtcacgggcggcgtggtttcatcattaggaaaaggactctcttcagcatccctagcttatcttctgcaatcaagaggttacaaagtaagattaagaaagttagatccttact

SEQ ID NO: 314733 - DNA, 148 bp, Unknown
  Bacterial polypeptide expressing nucleotide sequence isolated from the Sargasso Sea
taataaattgcctgaaataattgagttaaaaaatcatccttggtttataggtgttcaatttcatccagagttcaaatcaagaccattatcaccacatccactatttaaatcatttataaaggctgcaaagaactatcatggaaaatag

SEQ ID NO: 314734 - DNA, 502 bp, Unknown
  Bacterial polypeptide expressing nucleotide sequence isolated from the Sargasso Sea
gataattgaatttgcccgtaatgttgtaggcattgaagaagcaaattcaggagagtcaagacctgatcacaaggaaaatgttattgatttgatgcccgaacaaaaagggcatcaggaaacgggtggtaccatgcgcctaggaagccagattacggtccttaaaaaaggatcaagaattgccgcgatgtataataaaacgaccatttcagaacgccatcgacaccgttatgaggtaatgaatgaatttgttcccaagctagaagaggcaggattaaaaattactggacatcatcctgaaagaaatttagtagagacgtttgaacttcctgaacatccctggtttataggttgtcaatatcatcctgaacttcaatcaaagccccttaaacctcatccaatgtttacttcttttatcaaagcagcatttgataatcgacagtcacgtctgggtcatgtcccaacctcatcgaaaaaagcttcagttccgcagcaaaaaacatga

SEQ ID NO: 314735 - DNA, 142 bp, Unknown
  Bacterial polypeptide expressing nucleotide sequence isolated from the Sargasso Sea
aatcaattacctgaaattattgagcttaaaaatcacccatggtttattggggtacagttccacccggaatttaaatctagacctttatcaccccatcctttattctcttcatttatcaaggcagcaaaaaatcataaatgaa

SEQ ID NO: 314736 - DNA, 313 bp, Unknown
  Bacterial polypeptide expressing nucleotide sequence isolated from the Sargasso Sea
atgagattgggttcctatgatgctgaattatcaaacaattctttaattaaaaaaatatataaatctaaaataattaaagaaagacacagacatagatatgaagttaatattaattacaaaaatcaatttgaaaaaaaaggcttaatattctctggtaactcacctgataaaaatttacctgaaataattgaactaaaaaatcacccgtggtttattgctgttcaatttcaccctgaatttaaatctagacctttgtctccacatcctttattctcatcttttataaaagctgccaaaaatcataaaaaatgaa

SEQ ID NO: 314737 - DNA, 436 bp, Unknown
  Bacterial polypeptide expressing nucleotide sequence isolated from the Sargasso Sea
ttaaagattaaaaaagcaggatcaactgagttggatagaaaatgttatccagttattggtctaatcaacgaatgggataaagatggaaaaataataaaaggaacagataaagatttaggtggaacaatgagattaggcttatacgaagctaaattaagaaataattctgccataaatagaatttataaatctagttctattaaagaaagacataggcacagatatgaagttaacaataaacttaaaaatcaatttgaaaataaaggattaattttttcaggaatgtcaccagataataaattaccagaaataattgagcttcaaaatcatccatggtttataggagttcaatttcatcctgaatttaaatctagacctttatctcctcatcctttattctcttcatttatcaaagcatcaaaaaattataaatgag

SEQ ID NO: 314738 - DNA, 427 bp, Unknown
  Bacterial polypeptide expressing nucleotide sequence isolated from the Sargasso Sea
atgactacaaggtatatcttcgttactggtggtgtggtttcatcactaggtaaaggcattgcagccgcttcattagccgcaattttagaggcccgtggtctcaatgtaaccatcatgaaactggacccatacattaacgttgatccaggtaccatgagcccaacgcaacatggtgaagtgtttgtgactgaggacggcgcagaaacagaccttgaccttggccactatgagcgtttcatccgtactaagatgaaccgtcgcaacaacttcactacgggtcgtatttacgaggaagtgttgcgtaaagagcgtcgcggtgactatttaggtgcgacgattcaggtgatcccacacatcactaacgcgataaaagaaaaagtgattgcaggcggtgaaggtcacgatgtggctatcgtgaaatcggcgg

SEQ ID NO: 314739 - DNA, 966 bp, Unknown
  Bacterial polypeptide expressing nucleotide sequence isolated from the Sargasso Sea
agaattaaagagtttataaaaaaagatataacaaaggaagattttgtaatttgtgaaattggaggaacagttggtgatattgagagtttaccatttttagaagctatacgacagttttcaaatgataatggaagatcaaaatcattgtttattcatttaacatttgttccatttttaaaatcttcagatgaaattaaaacaaagccaacacagcattctgttaaagaattaagaagtataggaattcaacctgatatagttatctgtaggtctcaacagtctattcctatagatcaaagaagaaaaatatccttattttgtaatgtggacattgataatgttatagaaacagttgatgtaaaaaccatttatgaagccccaataagtttctttaatcaaaaattagataagcaagttttaaaattctttaagataaaatctagaaaaagaccaaacttgctaccttggaaaaaaattacaaatatagttttaaaaaccaaaagaacagtgaatattgctattattggcaaatatgtaaacttaaaagatgcttataaatcacttgatgaagctcttacgcatgggggaatttcaaataaagtcaaagttaacttagtaagaattgagtcagataaacttggatcaaaagaaattaaatcaaaattaaagaatgtgtcaggaatactgataccaggaggatttggtaaaagaggaacagagggaaaaattgaggcaattaaatatgctagagagaaaaaaataccttttctaggtatatgctttggaatgcaaatggcaatgattgagtttgcaagaaatattttaaaaattaaaaaagctggctctagtgaattagataaaaactgctttcccgtaataggattaattgatgaatggaacaaagatggaaaaataataaaaggaactgataaaaaccttggaggaacaatgagattaggtttatat

SEQ ID NO: 314740 - DNA, 651 bp, Unknown
  Bacterial polypeptide expressing nucleotide sequence isolated from the Sargasso Sea
aatgtcaaaatttgtatttgtcaccggaggagtagtttctagcattggtaaaggaattgtagctgcaagcttaggaagattattaaagtctagaggatatactgtttcaatattaaaactagatccatatttaaatgttgatccaggcacaatgagcccctttcaacatggagaagtatttgtaacagaagatggggctgaaaccgatctagatttaggtcactacgaaagatttactgatactgcaatgactaggttgaatagtgtaacaacgggatctatttatcaagcagtcattaataaagaaagaagaggcaattataacggtggaactgtgcaagtaatacctcacataacgggagaaattagagaaaggattcatagagtagccgctaatagcaatgcagatattattattactgaaattggtggaacagttggtgatattgaatctctaccttttttagaggcaataagagaattcaaaaatgatgtcaataggaacgatgttgcatacatacacgtaacattacttccttacatcaaaacctctggcgaaataaaaactaaaccaacacaacattcagtgaaagaattaagatcaattggaattcagccagatttacttgtatgtcgaagtgataaatctat

SEQ ID NO: 314741 - DNA, 898 bp, Unknown
  Bacterial polypeptide expressing nucleotide sequence isolated from the Sargasso Sea
tatgtcagattatatttttgttacaggtggagttgtttcagcactcggtaagggtgtcacatccgcttctctaggcgctatcttagagtctcgagggcttaaagttggaatgatgaagcttgatccatacctcaatgttgatccgggcacaatgagcccatatcaacacggggaagtctttgtaaccgaagatggaactgagactgatttggatttaggccattatgagaggtatgtttccaccataacgggaaagcatagtaactacacagctggaaagatttacgaaactgtcattgcaaaagaaagaagaggcgattacctaggagcaaccgttcaagtgatccctcatgttacagatgaaatcagaaaaagcattgtcaaaggatcgcaaggttatgacgtaacaattgttgaaattggcggaacggttggagacattgaatctcttccattcattgaagccataagacaaatggggatctataaagatggttatgaagttgcatacgttcatttaacattggtgccatatatcaaagcatcttcagaaattaaaaccaaaccaactcaacattcggtcagagaacttcgagcaatcggaattcaacccgatgctttggtctgccgctctgaactaccactcccaaaagaacattttgataagattgctctttttacaaatgttgaaaagaaagcagtcatttctgcacatgatgctgaagacatctatcagataccactgatcctaagagagcaatgcttggatgatatcattgttgagaaattgaaactggatgtaccaaaagcagatttgacaccttgggaaaatgtctttaaagaatcaaaaaatagcgattccaaggtaacaatagcaatggttgggaaatatgtagac

SEQ ID NO: 314742 - DNA, 276 bp, Unknown
  Bacterial polypeptide expressing nucleotide sequence isolated from the Sargasso Sea
aatgcattttgtttttattacgggcggtgtcgcatcttctcttggaaaaggtatagcctcagcctctctagcaactcttctaaaaagtagaaaattcaaagtaagaataagaaagttagatccatatctaaatgtggatccaggaacaatgagcccatatcaacatggagaagtttacgttactgatgatggtgcagaaacagatttagatcttggtcattacgaaagatttacaaatcagtcagctaaaaaatcagatagtggtcttcaggtaag

SEQ ID NO: 314743 - DNA, 856 bp, Unknown
  Bacterial polypeptide expressing nucleotide sequence isolated from the Sargasso Sea
ttttaaatattttaaaataaaaccaaaaaaaaaaattaatctctctccatggaaaaatgtaacaaaaattgtaactgataaaaatttaaaagtaataaatattgcaattgttggtaaatatgtagatttaaaagatgcatataaatcattagatgaagccttagttcatggtggaataaaaaataacgtaaaaataaaaataataagaatagagtctgataaacttaaaatatcggaaattagaaagaaattaattgatgcatctggaattttgatacctggtggctttggcaaaagaggcactgaaggtaaaatagcgtgtataaattatgcaagaaaaaataatataccttttcttggtatatgttttgggatgcaaatggctgtaatagagtttgctagaaatgttttaaaaataaaaaaagcaggatctagtgaattagataaaaaatgtttttcagttgttggcttaatcgaagagtggagcaaaaatggcaaaattgttaaaggtacttctactaaattaggtggaactatgcgtctaggtttatatacagcaaaattacaacacaattcacgaataaaagatatttataaatctaaaattattcatgagagacatagacaccgatacgaggtaaatattaagatgaaaaagaaatttgaaaaaaaaggtatgttattttcaggattgtcaccagataataatttacctgaaataattgaattaaaaaatcatccttggtttattggagttcaatttcaccctgaatttaaatctagacctttaaatccacatccattattctcatcatttatcagtgcagcaaaaaataatgaaaaatctaacaattaa

SEQ ID NO: 314744 - DNA, 256 bp, Unknown
  Bacterial polypeptide expressing nucleotide sequence isolated from the Sargasso Sea
atatatggtagaagcttaattaaagagagacatcgacatagatacgaagttaatataaattttaaagaaaaatttgagaaaaaaggtttgattttttcaggattatctccagatggcaaattacctgaaattattgagcttaataatcatccatggtttattggagttcaatttcatcctgaatttaaatctagacctttatcacctcatccattattctcctcttttatcaaggcagccaaaaatcataaatgag

SEQ ID NO: 314745 - DNA, 919 bp, Unknown
  Bacterial polypeptide expressing nucleotide sequence isolated from the Sargasso Sea
acatggtgaagtttttgtaactaatgatggaactgaaacagatcttgatcttggtcattatgaaagatttgtaagatttcaagcttcaaagaaaaataattttacagctggtaaggtttatgaaacagtcattagaaatgaaagaaagggagaataccttggtggtacagtccaagttattccacatataactaacgaaataaaaaaaagaatcaaagagggcggtcaaaacaaagatgttgccattgtagaggttggcggtactgtcggggacattgaaagtcagccctttgttgaagctttaagacaaatggcgttggaacttcctggctcttcatgggcttttgttcacttaacacttgtgccatatatcaatgcatcaggtgagcttaaaacaaaacctacacaacattcagttaaagaattaagatcattgggtataagtcctgatgttttaatttgcaggtctgatcaagaattacctagtgatgagaaaaataagatagcgcttttttgttcagtgcctaatgatagtgttatctctatgcatgacgttgaaactgtatattctgtgcctcttcttcttcatagccaaaaagttgataaaactattttaaaaaaattaaaaataaatactaaacaagcccagttaaatgactggaaaagagttgtaaaagctaaattgcttcctgaaaaagaagtaactgtttctttcgtaggtaaatatacagaattgaaagattcatataaatcaattaatgaagctttagagcatgctggaataaaaaataaaacgagggttaatataaattttgttgaagcggaaactttaactccaaaaaacatacataaaactttgaaaaattctgatgctattcttgttccaggtggttttggagaaagaggcatagagggaatg

SEQ ID NO: 314746 - DNA, 907 bp, Unknown
  Bacterial polypeptide expressing nucleotide sequence isolated from the Sargasso Sea
aggccggacgctgtcatcgcggccttggatgttggatcaatttatgatgtccctttgagttatcatgaacaaggttttgatactgaagtttgcagacactttggtctcttggaaaaagaagtcggtccagatcttggggtttggcaacgaatttcagatattgtggcaaaacccgaaggtagtgtgaaaatagccatagttggaaagtacacgagcctgttggattcttacaaatcgcttgctgaggcactcactcatggaggaatagccaataagatcaaagtagagttagtttggatagactctgaaatctttgaaagagaagatacggttcagcatctggaaggggtaaacggcattttggtccctggtggatttggcgaacggggggctgaaggtaaaatttcagcagttaaatttgctagagagagaaatgtaccatattttgggatttgttttggtatgcaaatggcagttattgaagcggctagaaacttaggtggtttggagggcgccggctcatcagagttcggagaatgtgaacaagcagtggttggtcttttaacggaatgggttaagggaaatgaaaaggaacagcgatctgacaaggatgacttaggcggcaccatgcggttgggagcttacgaatgtttacttgctaagaattcgaaggtccgagaagtttatggttctgaaaaaatatccgaacggcatcgtcatcgatatgaagtcaacatcgattaccggtcggagttagaaaaagtgggattaaatttttctggtatgtctcccgatcagaggcttccggaaattgttgaaattccaaatcatccttggttcgttggcgtgcaatttcatcctgaattaaaatccaaaccattcgatccccatccactttttacaagct

SEQ ID NO: 314747 - DNA, 589 bp, Unknown
  Bacterial polypeptide expressing nucleotide sequence isolated from the Sargasso Sea
tatgtcagattatatttttgttacaggtggagttgtttcagcactcggcaagggtgtgacatccgcttctctaggcgctatcttagagtctcgagggcttaaagttggaatgatgaagcttgatccatacctcaatgttgatccgggcacaatgagcccatatcaacacggggaagtctttgtaactgaagatggaaccgagactgatttggatttaggccattatgagaggtatgtttccaccataacgggaaagcacagtaactacacagccggtaagatttacgaaactgtcattgcaaaagaaagaagaggagattacctaggagcaacagttcaagtgatccctcatgttaccgatgaaatcagaaaaagcattgtcaaaggatcgcaaggttatgacgtaacaattgttgaaattggcggaacggttggagacattgaatctcttccattcattgaagccataagacaaatggggatctataaagatggttatgaagttgcatatgttcatttaacattggtgccatatatcaaagcatgttcagaaattaaaaccaaaccaactcaacattcagtcagagaa

SEQ ID NO: 314748 - DNA, 187 bp, Unknown
  Bacterial polypeptide expressing nucleotide sequence isolated from the Sargasso Sea
atggcgcgatatgtatttgtcactggcggcgtggtttcatcactaggaaaaggtctctcttcagcttcgcttgctgcactgcttcagttaagaggctttaaagttagaataagaaaacttgatccctatttaaatgttgatcctggaacaatgaatccttttcagcatggagaagtttttgttacag

SEQ ID NO: 314749 - DNA, 196 bp, Unknown
  Bacterial polypeptide expressing nucleotide sequence isolated from the Sargasso Sea
atggcgcgatatatattcgtaactggcggcgtggtttcatccttaggaaaaggtttatcatcagcatctcttgcttatttattaaaatctcagggctataaagtacgattaagaaaaatggacccttatttaaatgtagaccctggtacaatgagtccttttcagcatggtgaagtttttgttactgatgatggtg

SEQ ID NO: 314750 - DNA, 813 bp, Unknown
  Bacterial polypeptide expressing nucleotide sequence isolated from the Sargasso Sea
aatgggaatctataaagatggttatgaagttgcatacgttcatttaacattggtgccatatatcaaggcatcttcagaaattaaaaccaagccaactcaacattcagtcagagaactccgagcaatcggaattcaacccgatgctttggtctgtcgctctgaactacctctcccaaaagaacattttgataagattgctctttttacaaatgttgaaaagaaagcagtcatttctgcacatgatgctgaagacatctatcagataccactgatcctaagggagcaatgcttggatgacatcattgttgagaaattgaaactggatgtaccaaaagcagatttgacaccttgggaaaatgtctttaaagaatcaaaaaatagcgattccaaggtaaaaatagcaatggttgggaaatatgtagactttaaggattcatacatttcattgagtgaagcccttaggcatgccggctttaaaaacagcaagggtgttgagattgtttatgtcgaatccgaagatattcaagagaatggcaccgattgtctttctggaatggatgccattctgattcctgggggatttggagatcgaggcatagagggaatgatccaatccattgaatatgcaagaaagaatgatattccttttcttggtatctgtcttggaatgcaagcagctgtaattgaatatgctcgaaatgttttgaatcataaggatgcgaatagcactgagtttaactcaagtacttctgcgcctgtcattgcaatgattacagagtggatgaatgatgacggctcaaaagagaatagaga

SEQ ID NO: 314751 - DNA, 556 bp, Unknown
  Bacterial polypeptide expressing nucleotide sequence isolated from the Sargasso Sea
agggggagtgagggcaaaattgccgccataaaatacgcaagattgaataatatacctttttttggaatctgttttggtatgcaaatggctattattgaagctgctagaaatcttttaaatataaaaaatgcttcaactagcgaatttggaaacaattgtaccccagtagttggtttattggaagaatggcaaaaaggaaaaagaaaaatgaaaggtagtgaaaaaaatttaggcggaactatgaggctaggtttatatgacgctatattaaaaaataattctcttatttcaaaaatatactccgataaaaaaattaaggaaagacatagacatagatacgaagtcaatattgattacaaggaacaatttgaaaaaaaaggtctaattttttcagccttatctcctgacggatcattaccagagattatagagttaaaaaatcatccatggtttgtcggcgttcaatttcatccagaatttaaatcaagaccattcaccccacatcctttatttgcatcatttgtaaaagcagctaacaataggaggtctaattaat

SEQ ID NO: 314752 - DNA, 896 bp, Unknown
  Bacterial polypeptide expressing nucleotide sequence isolated from the Sargasso Sea
aaagaagaaaggagaatatctcggtaagactgtacaagtaataccgcatataacagatagaattaaagaatttattaaacatgatacttcaaaagaagattttgttatttgtgagataggagggatcgttggagatattgaaagcttaccatttgtagaagcaataagacaattttcaaatgatgttggtaaaaaaaatacattatttattcatttaactctagtcccttatttgaaagcatccgatgagataaaaacaaaaccaacacaacattctgttaaagaattgagaagtattggtatacagccagatattattatttgtagatctgaaagatcaatacccctagagcatagaaagaaaatttctttattttgtaatgttgatattaaaaatgttattgaaacagttgatgtaaaaacaatatatgaggctccaattagttttgctagagagaagttagatattcaagtattaaattattttaaaattaaatcaaaaaaatcatgtaatttaactccgtggagaaaaattaataaaattattcttgaaaccgacaaagaggcaaatattgctataattggtaaatacgtagaattaaaagacgcatataaatctttagatgaagcacttactcatggaggtattgcaaataatattaaagttaaacttgttcgaatagactcagaaaagcttaaagcttcagaaataaaagctaaattaaaaaatatatctggaattttaatacctggtggatttggaaaaagaggcaccagtggaaaaatcgaggcaattagatatgctagagttaataaaattccattcttaggaatttgttatggcatgcaaatggccataatcgaatttgcaagaaataaattaaaaattaaaaatg

SEQ ID NO: 314753 - DNA, 985 bp, Unknown
  Bacterial polypeptide expressing nucleotide sequence isolated from the Sargasso Sea
cagcatggagaagtttttgtcttagatgatggctctgaaactgatcttgatttaggccattacgaacgattcattgatgttgacatgacaaagaacaacaatgcgactgccggccagatttatgggactgtattagaccgagaaagaaaaggagaatatcttggtgagaccgtgcaagttatcccacatattactgatgagattaaaaatcgtattaaaacacttaatgtaccaagaaaaaaatatgatgttgtgatagttgaagtagggggcactgttggcgacattgagagccttccatttatggaagctattaggcagctttctttggaagttggatatcacaatcatatgatagtacatgtaacgcttctaccatttgtaaaagctagtggggagttaaaatcaaaacctacacaacattcagtgatgaaactccgagaaataggtcttgctccagatatgattttatgtagatctgagcactcgattgatcagtctgtgagggaaaagattgcactattttgtaatgttagggcagaccatgttattgaagggcgagatgtaccaagtatctatgaagtccctttagcaatgcatgagcaaaatgcggggcacttaattaaagagcgattgaagattgaaaagacacctaaactaaatgatcttgagagatttattcatagctataaaaatccaaaacatgaaattaccattgcgatgtgtggtaagtatacggagctcattgactcatataagagcgttatggaagcttttgtacatgctggtgttgagaatgattcaagggtaaatattaagtgggttcaaactgaaaaaattaaaaataaaaagtctgctgattctgctttttcaaatgttcaaggtatcttacttttgcctgggtttggttcacgtgggggtgaagggaaggttctttcatctgaatatgctagggaaaataaaatcccatttttaggtatatgtc

SEQ ID NO: 314754 - DNA, 968 bp, Unknown
  Bacterial polypeptide expressing nucleotide sequence isolated from the Sargasso Sea
taaaatatatcaaaatgtaattgaaaaggagaggaaaggagagtttttgggtaaaacagttcaggttatacctcatataacaaatgagattaaagaaaatataagaaatcttgactataaaaataatctagatattattattacagaaataggaggtactgtaggtgatattgaatctttaccatttatagaggcagttagacaagttatttatgaagaaggccctgaaaactctatggtaattcacttaactttaattccatacttatctgcaacaggtgaacttaaaactaagcctactcaacattcagtaaaaacattgatggagcttggtctaaaagcagatgttttagtttgtagatcagaaagagatctctcagatgaagtcaagaataaacttgcgcttttctgtaatgtaaaactagattgtgtaattcagtctattgatgttgaaactatttatgatgttcctataaagatgagagatgaaggccttgataaagtaactcttcaaaaattgaaaattaaagaatctgaaccagacttagataaatggaaaaactttttacataaactaaaaaatcctactcatcagattaatattggtttagttgggaaatacgttgagttgaatgattcatataaatcaattcttgagtcattaattcatgctggaactgaaaatgaagtaaaagtcaatgttaagtctattcactctgaatatcttgataaagaaaatattaataaaaagttagttgatctcgatgggataattgttgctccaggttttggccaaagagggttagatggtaaaatattagctgtagaatatgctagagtaaataaaattcctttcctagggatatgtttaggtatgcaaatggcagtaatcgaatatgctagaaatgtaaaaaaaataaggtacgctaattcaacagaaatttcagaaaaatgtaaagatccagtta

SEQ ID NO: 314755 - DNA, 895 bp, Unknown
  Bacterial polypeptide expressing nucleotide sequence isolated from the Sargasso Sea
gagtccctaccttttttggaagctataagacaaattagaaataataaaaatatttcttcttctatgattcacatgacctatgtaccatatatttcttctgctgatgaaattaaaacaaaaccaactcaacattcagtaaaagaattgcttaacgcaggcatacaaccagatattataatgtgtagatgtgaaaaagaaattagtattgaagcaaaaaataaaatttcacttttttgtaatgtaattaagaaaaatgttatttctgctttaaatgctgaatctatatatgaagtaccatctctttattataaagcaggtttggacaaagctttattggaacaattaggatatgattataagaaatttcctttgaatttatctccatggaataaagttgtaaaaaaaataaataattacaaaaaagaagttacgataggagtagttggaaagtatactgatttgaaagatagttataaatctttaaatgaagctttagttcatggcggaattaataataatatcaaagtacatattaaatggattaatgcagaaaaattgaaacaaaaagatataataaaagaattaaaaaaaattgatggaatattagtaccaggtggttttggtgatagaggagttgaaggaaaaatttctagcattaaatttgctcgtgaaagaaatattcctttttttggtatttgtctgggtatgcaactagcagtaattgaaattgcaagaaatgtattaaaaattagagatgctaattcaactgaatttaaaaaaactaaaaatcctgttgttggattaatgacagaatggaatcaaaataatataaagattaaaagaacgaaagacagtaataaaggtggaacaatgagattaggttcttatccatgca

SEQ ID NO: 314756 - DNA, 274 bp, Unknown
  Bacterial polypeptide expressing nucleotide sequence isolated from the Sargasso Sea
atgcgtaagaaagtaacaaaatatatatttgtaacaggaggagtaatgtcttcccttggtaaaggtctggctagtgcatgtattggtgctttgttggaagcacgtggaatgagagtttcactccaaaagcttgacccataccttaatattgatccaggtactatgaacccatatcaacacggagaagtttttgttacaaacgatggggctgaaaccgatttagacttggggcattatgaaaggtttactaatgcacccctttctcaggaaaata

SEQ ID NO: 314757 - DNA, 1062 bp, Unknown
  Bacterial polypeptide expressing nucleotide sequence isolated from the Sargasso Sea
actgatttagatcttggtcattatgaaaggtttacaggtgttaatttaagaaaagactccaacgttaccacaggaagtatttatagaaaagtaattgaaagtgagagaaaaggagattacttaggtgcaactgttcaagttattccccatattactgatgaaataaaaagaagaattaagggaatttcaaatgatgtagatgttcaaatcacagaaattggcggaaccgttggagatattgaaattcttccatttcttgaagctgcaagacaaataagaaaagaattaggaactgaaaacgtaatgtttattcatgtcacattggtaccttttatcggtccaagtaccgaattaaaaacaaaacctactcaacattccgtatctttgttaagagcagcaggtatctctccagatttaattgttttgagatcagacagagaacttaatgatgagataaagagcaaagtttcattattttgcgatgttgcagtaaataatgtaattaatgctccagatttagatgatatctatgccgttcctttaaggatgcgtgatgaaggactcgataaagcagtggatgagagattgaatctacaaactaatgaaccgtcattagatgaatggaagacaatggtaaatctaaaacttgaagcaaatgattcagttaagattgcaatcctcggaaaatattttggattgccagatagctacctctctgttgtagagtcacttaatcatgcatgtcttcataataaagtaaaacttgatcttcactggatagatgcagataattttgaagtagaaaacctacaagatatggacggagttattgttccaggaggatttggatacagggggatagaaggaaagatttcagcaatagagtacattagaaaaaatgacattccatttttaggtatatgtttaggattgcaatgtgctgtaatcgaatttgcaagaaatgtttgtggaattgatgatgcaaactcttcagaattttcaaaaaacacaaaaaattatgtgattgatttactaccaaatcaagatctagaaaaagatgat

SEQ ID NO: 314758 - DNA, 106 bp, Unknown
  Bacterial polypeptide expressing nucleotide sequence isolated from the Sargasso Sea
ttgacaaagtatatctttgtaacaggcggagttgttagttcccttggaaagggaatcgtttcagcatctattgggaggatacttaaaaataaaggtataaatgttc

SEQ ID NO: 314759 - DNA, 538 bp, Unknown
  Bacterial polypeptide expressing nucleotide sequence isolated from the Sargasso Sea
gatgattcaagctgcaagattttgtagggagaatcaacttccatatttaggactttgtttaggaatgcaaataatggtaattgagttttctaaaaatgttttaaatttatcagatgctaattctactgaatttgatcctgaaacttctaatccagtcatagatatcatagaatcccaaaaaggtttggaagaaactggaggaacaatgagattaggaggatatagatgtaatttatcctcagggacattagcaaaaaaaatatatcaaaaggatattattaccgaaaggcataggcatcgttatgagtttaacgattattataaagaagagttaaactctaaaggatttataacttcgggggtatgtccagacaataatctagtagaaatttcagaaatttccgatcatccctttatgataggaagccaatttcaccctgaatttggatcaaggttagatcgacctcatcctctatttgatcatttcattaaagctagtgcaaatcaaaaaaagactggtgctcaatttcagctttaa

SEQ ID NO: 314760 - DNA, 1073 bp, Unknown
  Bacterial polypeptide expressing nucleotide sequence isolated from the Sargasso Sea
tgatgaaataaaaactaaacctacacaacattctgttaaagaattaagaagcatggaatttcagccagatatagttatttgcagatcacaacaatctatacctcttgatcaaagaaaaaaaatttcattgttttgtaatataccaataaaaagggttatagagactgtagatgttaaaacaatttatgaggcaccaataagtttctttaatgagggcttagataaacaagtctttgaatattttaatattaagccgagaaaaaaaattaatttgaaaccgtggaaagaggtaactaaaattgtaacaaacaaaaatattaggactgtaaacatagcaattgttggaaaatatgtagatttaaaagatgcatataaatcgttagatgaagcactagttcacggaggcattcataataatgtaaaagttaatttaattagaatagaatcagatttattgaaagtctcagatgttcaaaaaaaattaagtaatgtttctggaataataattcctggaggctttggaaaaagaggcactgaaggtaaaatagcatgtataaattatgcaaggactaaaaaaattccctttttaggaatttgttttggcatgcaaatggcagtaattgaatttgctagaaatgtactaaaaattaaaaatgctggctctagtgagtttgataaaaattgctacccggtaattggccttattgaagaatggaacaaaaacggtagaaaaattaaaggaactttgaaaaatttaggtggaactatgcgattaggtctttatccagctaaattacaacacaattccttaataaaagaaatttataagtctggtcaaattaaagaaagacatagacataggtatgaggttaatatcaatttgagaaaaaaatttgaaacacacggtttaaatttctcaggaatgtctcctgacaacagcttacctgaaattgttgaaattaaaaatcacccttggtttattggagttcaatttcaccctgaatttaaatctagacctttacaacctcatccattattctcatcatttattggagcggcaaaaaataaataat

SEQ ID NO: 314761 - DNA, 952 bp, Unknown
  Bacterial polypeptide expressing nucleotide sequence isolated from the Sargasso Sea
catcactaggaaaggtctctcttcagcatccctagcttacttgctacaatcaagaggatttaaagttagattaagaaaattagatccttatctaaatgttgatcctggaacaatgagtccatttcaacatggagaagtttttgtaacagatgatggtgctgaaacagatttagatttaggtcattacgaaagattttcaggagtaacagctaagaaaacagacaatattacaactggaaaaatttataacgacgtattgagaaaagagagaaaaggaaaatatcttggaaaaactgtacaagtcatcccacacataaccgataggataaaagaatttattaaacacgatacttcaaaagaagactttgttatttgtgaaataggtggaatagtaggtgatattgaaagcttacctttcgtagaagcgataagacagttttcaaacgatgtaggtaaaaaaaatgcattatttattcatttgacattggtaccatatctaaaagcatctgatgaaataaaaacaaaaccaacacaacattctgtaaaagaattaagaagtataggcatacagcctgacataatcatttgtagatcagaaagatctattcctttagagcacagaaaaaaaatatctttattttgtaatgttgatataaaaaatgtaattgaaaccgtagatgtaaaaacaatatatgaggcaccaattagttttgctaatgagaaattagatgtacaagtattaaattattttaaaataaaatcaaaaaaaactaacaatctaactccttggcgaaaaattaataaaattattctcaacacaaaaaaacaagtcaatattgctattattggcaaatatgttgaattaaaagatgcttataaatctttggatgaagcacttacacatggtggtattgcaaacaatattaaagtaaaacttgtcagaatagattca

SEQ ID NO: 314762 - DNA, 139 bp, Unknown
  Bacterial polypeptide expressing nucleotide sequence isolated from the Sargasso Sea
catggcgcgatatatatttgtcacgggcggcgtggtttcttcattaggtaaaggtttatcttcagcttcactagcatatctacttcagtcaagaggttttaaagttaggattagaaaacttgatccatatttaaatgta

SEQ ID NO: 314763 - DNA, 790 bp, Unknown
  Bacterial polypeptide expressing nucleotide sequence isolated from the Sargasso Sea
atttatctcaaatgatctagatgatgaagattttgtgatatgcgaaataggtggaacaataggggatattgaaagtcttccatttattgaagcgataagacaattccataatgataacggccatcaaaattcaatatttattcatgttaccttagtcccttatattgcaagttcaggtgaactaaaaacaaaacctactcaacactcagtaaaagaattaagaagtttaggaattcaaccaaatattttattatgtagatcagatagaattattcccgaaggtgagagaaaaaaaataggcttattttgcaatgttcaaaataattgtgttatacaagcgattaatgcgaattctatatatgaagtacctataaatttttataatgaaggcttagataaaagagtcctagaatattttaatctagatacaaataaaaatattgatttaaaaatgtggtcacaggtttctaaacatgttcttgagccagatggtaaagtcttaataggaatagttggtaaatatacgggacttgcagacgcatataaatccttaaatgaagctttatctcacggcggaattttcaataatgtaagagttgaattaaaatggattgagtctgaagagcttgatcatttaaatgcatcgacattattatctgattgtaatggtatactcgttcctggagggtttggtgaaagaggatcagaaggaaaaataaccgcaattaggttcgcaagagagaataatataccttattttggaatttgctttggaatgcaattagctgta

SEQ ID NO: 314764 - DNA, 768 bp, Unknown
  Bacterial polypeptide expressing nucleotide sequence isolated from the Sargasso Sea
ggcgcattatatattcgttaccggcggcgtggtttcatcattaggcaaaggcttatcctcagcttctttagcttatcttttaaaatcacaaggatataaagtcaggattagaaaaatggatccatatttaaatgttgatccgggaacaatgagcccctttcaacatggagaagtatttgtaactgatgacggagcagaaacagatctagatcttggtcactatgaaagatttacaaatatatcttcaaaaaaatctgacaacattacaactggtaaaatttatagtgatattataaaaaaagaacgtaagggagaatatttaggaaaaactgttcaagttataccacatgttactgatagaattaaaaaatttattagcggtgatataacaaatgaagatttcgtaatttgtgaaataggagggacagttggagatattgaaagcctgccatttgttgaagcaataagacaattttcaaacgaagtaggaagaaagagaagtttattcattcacttaacttttgtgccatttttaaaatcatctgatgaaattaaaactaaacctacacaacattctgtgaaagaattaagaagtcttggtatacaaccagatataattatttgtagatcacaaaaatcaatacctcttgatcaaaggaaaaaaatatcattattttgtaacgtctcaattgacaatgtaatcgaaacagttgatgtaagaactatctatgaagcaccaataagtttttataatgaaaaattagataa

SEQ ID NO: 314765 - DNA, 467 bp, Unknown
  Bacterial polypeptide expressing nucleotide sequence isolated from the Sargasso Sea
aatgaatgatacgaccacgccagacttaccgacccgcccggtgaaatatatttttgtaacgggtggtgtcgtctcctctctcggcaaggggcttgcagcggcatccatcggtgctttactagaaggccacggctaccgggttacactgcaaaaacttgatccctacgtcaacgtcgatcctggcaccatgagtccctatcaacacggagaggtctacgtcacaacggatggcgcagagacagacctagacctcggccattacgaacggtttacgaatacgatcaccacaaaaaaccataattggacaaccggaaagatctacctttctgtaatccaaaaggaacggcgcggtgactaccttggccgtaccgtgcaagtcatcccgcacgtgacgaacgaaatcaaggagagcatgcaactggttgcgtctgatggagacgttgatatcgtacttattgaggtcggtg

SEQ ID NO: 314766 - DNA, 685 bp, Unknown
  Bacterial polypeptide expressing nucleotide sequence isolated from the Sargasso Sea
aatatcgacatcgaatggatacaggctgaagaggtcgaagggcttttagctgccggaagactgaaagatctagatgggatagttatcccaggaggtttcggtgagcgaggggtagagggcaagatcgccgctgtcgggtttgctcgagagaacgaaattccatgtcttggattgtgtcttggaatgcaggtcatgacaatcgaatatgcacgaaacgtgctgggaatgacaggggcaaattcaaccgaattcgacccaacaacgtcctatcctgtcattgacttaatggaatctcagagagatatcaccgatatgggaggaaccatgcgattgggggcgtacgttgccgagcttctggaagattctcaggtagctgaagcctatgggagaactgtagtttcggaacgccatcgacacagatacgaatttaatcctaaattcagatcaaagtttgatgattcagagttcctatgctctggcgaaagcccagacgggcggctcgtagaatttattgagcttccgactcacccattctgggtagggacgcaagcccacccagagttcaaaagtcggccggaccgtcctgcgccgttatttgccggcctcgtaacagcagcgataacccgtgctagcggaagaaacccacagcttctagatatcacagaaccttctatggccgattagc

SEQ ID NO: 314767 - DNA, 238 bp, Unknown
  Bacterial polypeptide expressing nucleotide sequence isolated from the Sargasso Sea
catggcgcgatatatatttgtcactggcggcgtggtttcatctttaggaaaaggtttatcttcagcttcactggcctatttgttaaaatcacaaggatataaagtaagattaagaaaaatggacccatatcttaatgttgatccaggaacaatgagtccctttcagcatggagaagtttttgttactgacgatggagccgaaactgatttagaccttggtcattacgaaagatttaca

SEQ ID NO: 314768 - DNA, 682 bp, Unknown
  Bacterial polypeptide expressing nucleotide sequence isolated from the Sargasso Sea
aatgactagatatatttttattactggaggagttgtttcttcacttggtaaaggtattgtcacctcttctttagcatcattattaaaactatctaaatttaaattaagaataagaaaactggatccttatttaaatattgatcctggaactatgaacccagctcaacatggcgaagtttttgttacagacgacggagcagaaactgatatggatttaggacattatgagagatttacaggaataatttccaaaaaaaatgataatattacaactgggaaagtttattctgaagttttaagaaaggaaagaaaaggagattatttaggctctactgttcaagtgatacctcatgtaacagaggaaataaaaaaatttattaaaaaagatcttagaaatgaggacttcgtaatttgtgaaatcgggggaacggttggagatatagaaagtcttccatttttagaagctctaagacaattgagaaatgaactcggtacagagcgatcactttttattcacattactcttgtacctttcatatcatctgcaaatgaatttaaaacaaagcctactcaacactctgttaaagaattactagggttaggaatttcaccagatttattaatttgtagaactgaaaaaaagttttcattagattctaaaaaaaaaaatatctcttttttt

SEQ ID NO: 314769 - DNA, 715 bp, Unknown
  Bacterial polypeptide expressing nucleotide sequence isolated from the Sargasso Sea
gccaaaactaagtacattttcattactggaggagtggtttcatcactcggcaagggtatcgcagcagcatcaattggtgctcttcttgaagcaagaggcttatctgtatcacttataaaagttgacccttatataaacgttgatcctggaactatgagtccttttcaacacggagaggtttttgtaacaaatgacggaactgaaactgatttagaccttggtcattatgagagatttgtgagattccaagcctcaaagaaaaacaactttaccgcaggtaaagtatatgaagccgttattcgtaatgaaagaaaaggtaaatatcttggagggactgtacaagtaattccacatataacaaatgaaataaaaaaaagaataaaagagggcggtcagaataaagatgttgctattgttgaaattggtggaactgttggagatattgaaagccaaccttttgtagaggcaataaggcagatggccttagagcttccaaattcgtcttgggcttttgttcatcttactttagttccttttattaatgcttctggagaacttaaaacaaaacctacccaacattctgttaaagaacttagatcattaggaatcagtcctgacgtattagtttgcagatctgaacaggagttaccaaaagatgaaaaaaagaagatcgcacttttttgttctgtacccaatgaaaaagtgttatatcaat

SEQ ID NO: 314770 - DNA, 942 bp, Unknown
  Bacterial polypeptide expressing nucleotide sequence isolated from the Sargasso Sea
aatcgtcagatgaaataaaaactaaaccaacgcaacattcagtaaaagaattaagaagcattggtattcaaccagatattattatttgtaggtcacaacaatcaataccattagatcaaaaaaagaaaatatcattattttgtaatgtcccaatagaaaatgtaattgaaacagttgatgtgagaactatttatgaagcaccaataagtttttttaatcaaaaattagataaacaagtgttgaaatattttaaattaaaatcaaaaaaaaaacctaatttatctccatggaaaaaaattacaaaaattactttaaatacaaagaaatttgtaaacatagcaataattggtaaatatgttaatttaaaagatgcttacaaatcattagatgaagctttaatacatggtggaatttcaaataagataaaagttaatttagtaagaattgagtctgacaaattaaaagtcaatgagattaagaaaaaacttaaaaatgtttcaggtcttctaattccaggaggatttggaaaaagaggcactgagggtaaaatttctgcaataaaatttgctagagaaaacaatataccatttcttgggatttgctttggaatgcaaatggcaatacttgaatttgcacgtaatatattaaaaataaaaaaggctggatctagtgaattagataaaaattgttacccagttataggattaatcacagaatggaacaaaaatggaaagataattaaaggaacagataaaaatttaggtggaactatgagattagggtcttatgaggctaaattaagaaataattctgccataaagaaaatttataaaacaaatttaattagagaaagacatagacatagatatgaagttaataataacctaaaaaatgaatttgaaagaaaagggattaattttttcaggaatgtcgccaaataat

SEQ ID NO: 314771 - DNA, 574 bp, Unknown
  Bacterial polypeptide expressing nucleotide sequence isolated from the Sargasso Sea
atggcgcgatttatttttgtcacgggcggcgtggtttcatcattaggaaaaggtctctcttcagcttctttagcttatctcttacagtcaagaggatataaagtaagattaagaaaactagatccatatttaaacgtagacccaggaacaatgagcccatttcaacatggtgaggtatttgtaacagatgatggtgccgaaacagatttagatttaggccattatgaaagattttcaggtgtaattgcaaagaagaccgacaacattacaacaggaaaaatttataatgatgttcttaaaaaagagagaaaaggtgaatatttaggtaaaacagttcaggtcattcctcatatcacagatagaattaaagagtttattaaatacgatacgtcaaaagaagattttgtaatttgtgaaattggaggcattgttggagatattgaaagccttccatttgttgaagctataaggcagttttctaatgatattggaaaaaagaatactttatttattcatataacattagttccatatttaaaagcctcagatgaaatcaaaactaaaccgactcaac

SEQ ID NO: 314772 - DNA, 772 bp, Unknown
  Bacterial polypeptide expressing nucleotide sequence isolated from the Sargasso Sea
catggcgcgatatatatttgtcactggcggcgtggtatcatctttaggaaaaggattgtcatcagcatcactagcatatttattaaaatcacaaggctataaagttagattgagaaaaatggatccttatctaaatgtagacccaggtacaatgagtccatttcaacacggggaggtatttgtaacagatgatggcgctgaaactgatttagatcttggtcattatgagcgattcactaatatatcttcaaaaaaatctgacaatattacaactggtcgtatttatagtgacattataaaaaaagaaagaagaggaggttatcttggaaaaactgttcaagtcattccccatataacagatagaattaaagaatttattaaaaaagatattactaatgaggattttgttatatgcgaaattggtggaacagttggagatatagaaagccttccatttgttgaagccataagacaattttcaaatgagcacggtaaattaaaaactttatttgtacatttaacttttgttccatttttaaaatcttctgatgaaataaaaactaaaccaacccagcattcagtaaaagaattaagaagtataggtattcagccagatataattatttgtagatcacaaaaatcaataccatttgatcaaagaaaaaaaatatctttattttgcaacgttcctatagaaaatgtaattgaaaactgtgatgtaagaactatttatgaagccccaattagttttttttatcaaaaaactgataaa

SEQ ID NO: 314773 - DNA, 208 bp, Unknown
  Bacterial polypeptide expressing nucleotide sequence isolated from the Sargasso Sea
atggcgcgatttatatttgtcacgggcggcgtggtttcatctctaggcaaaggtctctcttcagcatcgctagcatacttattacaatccaggggatacaaagtcagattaagaaagttagatccctatttaaatattgacccaggtacgatgagtacttttcaacatggagaagtttatgttacagatgatggagctgaaactgatt

SEQ ID NO: 314774 - DNA, 858 bp, Unknown
  Bacterial polypeptide expressing nucleotide sequence isolated from the Sargasso Sea
atctttctgcatctcaccctcgttcctgccctccagacggcaggcgagatcaaaaccaaaccgacgcagcattcggtcaaggaattgcgcagcatcggtattcaacccgacatcgtcctgtgtcgtgcgcacgatcccctgccggccgatgcgaggcgaaagatatcccttttcacgaacgtagaagaagcgtctgtcatctccgctgaggatgtcgacaatatctactcgattcctcgtcgttaccacgagcagagcctggacgatgcggtcgtcaaacatcttgcccttggcggcagggagtcagacctcgaggaatgggatgaggtcgtgggcattatgcagtcgcctgaggcggaactcacgatagccatggtgggtaagtatgtttcgctgaccgaatcctataagtccctctcggaggccataattcatgcggggatccggaatcatgttcggcccgtcgtgaaatatgttgacgcggaagaactgacgagttttgaagaggcgaccgaggttttgtcagatgtcgatgcggtgctggtgcctggggggttcggtgcgcgagggaccgagggaatgatcaacgcggcccgtttcgcccgcacctccggtactccctacctgggcatctgtctcggcctacaaattgcggtgatcgagtttgcccgtcacgttgctggcatggaatcggcaaacagtaccgaattcaacgacaaggggaatttcccggtcgtagcgctggtgaccgaatggactgcaggcgacggtcaactaatggagcgcagcgacggtgatgatctggggggcacgatgcggcttggagctcaggaggcccatctgaacccagagtcattg

SEQ ID NO: 314775 - DNA, 556 bp, Unknown
  Bacterial polypeptide expressing nucleotide sequence isolated from the Sargasso Sea
tatgagtactaaactaaaagatactaaatacatctttgttcttggaggtgttatgtctgggctgggtaaaggcattgcagcttcctctataggatatattttaaaaaattctggattgaaggtcactatattaaagctagatccatatttaaatgttgacccagggacaatgaatccttaccagcatggtgaggttttcgttttggatgacggctctgaaactgatttagatttgggccactatgaacgttttattgatgttagcatgaccaggaacaataatgcaaccgcaggacaaatatatagtacagttttagaaaaagaaagaaaaggtgaatatttaggccaaactgttcaagttattcctcacgtaacagatgaaatcatcaaaagaattaaaagtgtaaataaacctaaaaaatatgacgttgtgatttgtgaggtaggtggaacggtcggagacattgaaagcttgccatttatggaggctattcgccagctttctattaatgttggtcctcaaaatcatctaataatgcatgtgactctattgccg

SEQ ID NO: 314776 - DNA, 841 bp, Unknown
  Bacterial polypeptide expressing nucleotide sequence isolated from the Sargasso Sea
atgacagctttcgtatttgtgactggtggtgttgtttccaatcttgggaaaggcataacttctgcatgtttgggtgcaattctcgaatctagaggattgtcaatcagtatgataaaactcgatccatatataaatgttgatccgggaacaatgagccccttccaacatggagaggtatttgttacatctgatggaactgagactgatcttgatcttggtcattatgagcgttttgttagaactgaaacaggcaggaacagtaattatactgctggaagaatttatgagtctgtgatcgctaaagaaaggagaggtgattatcttggtgcaactgtacaagtgattcctcatatcactgatgaaataaaaaatggcataaaaaaaggatctaatgatgccgatatatgtcttgtagagattggaggaaccattggagatattgaatctcttccatttatggaggcgatcagacaaatgggtattgagcttggtccagaaaaagtagtttatgttcatctgacactcgtcccatacattgcttcatcatcagagataaagacaaaaccgacacagcactcagtgaaagaaatgagatcgattggtattcagccagatattttagtatgccgctcagaacaagaactacccgacgagcaaagaaaaaagatagcgctattcactaatgttaatgaggaagctgtaatttcagcttacgatgttgatgatctctacaaaattcctgagatgatgcatcaacagtctttagatagtatcgtgatcaaaaaactaaaactcaaaacacctgaagctaatctaaatgaatggaagtccatgttagtgc

SEQ ID NO: 314777 - DNA, 799 bp, Unknown
  Bacterial polypeptide expressing nucleotide sequence isolated from the Sargasso Sea
ggtggtatttacagtgatataataaaaaaagaaagaaaaggtgattacttaggaggtacagttcaggtagttcctcatgtaaccgatagaattaaaaaatttatttcacataatgtaaagaacgaagattttattatttgcgagataggaggaacagttggtgatatagaaagcttaccttttcttgaagccataagacaattttcaaatgatgtaggaaaaaaaaatagcttatttattcatttaacacttgttccttatttaaagtcttcaggtgaactaaaaactaaaccaactcaacattcggtaaaagaattaagaagtcttggtatacagccagatataataatttgcagatcagaaagagaaataccaaaagcagaaagaaaaaaaatatctttgttttgtaatgttgatatagataatgtaattgaaactgtcgatgtaagaactatttatgaagctccaatcagttttcacaaagaaaaattagatggaagagttctttcatattttaatattaaaaataaaaaaacaccaaatcttagtaagtggaaaaatattacttcaaaagttttaaatccaaaaaaagatgttaatataggtattattggcaagtatgttaatcttaaagatgcttataaatctttagatgaggcgttaattcatggtgggatatcaaacaatgttagagttaatttaaaaaggatagattctgaaaatttaaaacccgaaacaataaaaaaattgctacacaatgtatcaggcgttttaattcccaggaggtttggaaaaagag

SEQ ID NO: 314778 - DNA, 897 bp, Unknown
  Bacterial polypeptide expressing nucleotide sequence isolated from the Sargasso Sea
tgactttaattcctacttatctgcaactggtgaacttaaaactaagcctactcagcattctgttaaaaccttgatggagcttggtcttaaagcagatgttttagtttgtagatcagaaagagatctctcagatgaggtcaagaataaacttgcacttttttgtaatgtaaaactagattgtgtaattcagtctattgatgttgaaactatttatgatgttcctataaagatgagagatgaaggtcttgataaagtaacccttagaaaattgaaaattaaagaatcagaaccagatctagataaatggaaaaactttttacataaactaaaaaatcctactcatcagatcaacattggtctaattggaaaatatgttgagcttaatgactcgtataaatctattcttgagtcattaattcatgctggaactgaaaatgaagtaaaagtcaatgttaaatccattcattctgaatatctcgataaagaaaatattaaaaaacagttaattgatcttgatggagtaattgttgcaccaggttttggtcaaagaggtttagatggtaaaatacaagctgtagaatatgctagagtaaataaagttccttttctaggtatatgtctaggtatgcagatggcagtaattgaatatgctagaaatgtaaaaaagttaaggtatgctaactcaacagaaatttcagaaaaatgtaaagatccagttattgatttaatgatatctcaaaaagaaattagcaataaggggggtacaatgagattaggggcatgggattgtgaaattctaaagaatactatttcttataaaatttatagtaaaaaagtaatttctgaaagacataggcacagatatgagtttaataatgaatactcaaaaaagatttt

SEQ ID NO: 314779 - DNA, 148 bp, Unknown
  Bacterial polypeptide expressing nucleotide sequence isolated from the Sargasso Sea
atgtccaagtttatttttattacaggtggcgtggtttcctcgcttggaaaaggtttagcctccgctgcgttgggggctctattgcaatcgcgcggatacaaggtgcggcttaggaaacttgatccgtatctcaacgttgatccaggaa

SEQ ID NO: 314780 - DNA, 736 bp, Unknown
  Bacterial polypeptide expressing nucleotide sequence isolated from the Sargasso Sea
catggcgcgatatatatttgtcactggcggcgtggtttcatcacttggaaaaggcttatcttcagcatctcttggatatttgcttagatcacaaggttataaggttaggattagaaaaatggatccatatttaaatgttgatcctggaacaatgagtccatttcagcatggtgaggtttttgttactgatgatggagctgaaactgatctagatttaggtcactatgagagatttacaaatatctcagctaggcaatcagataatattacaactggcagaatttacagtgatattttaaaaaaagagagaaaaggtggttatctaggaaaaactgttcaagttatccctcatgtaactgacagaataaaagaatttattaaaaaagatattacaaatgaagactttgtaatttgtgaaattggaggaacagttggtgatattgaaagtttacctttcttagaagctattagacaattttctaatgataaagggaggtcaaaatctttatttattcatttaacatttgttccatttcttaaatcatctgatgaaattaaaacaaaaccaacacaacattcagtcaaagaattaaggagcataggcattcagcccgatatagtaatttgcagatctcagcaatctatacctatagaccaaagaaaaaaaatatcattattttgtaacgtagatattgataatgttatagaaactgtagatggtcaaaacgatttatga

SEQ ID NO: 314781 - DNA, 725 bp, Unknown
  Bacterial polypeptide expressing nucleotide sequence isolated from the Sargasso Sea
atctttacttgagagtaaaaaaattaaggtaactatcatgaagcttgatccttatataaatttggatccaggcacaatgagtcctttccagcatggtgaagtttttgttaccgaagatggagcagaaacagatcttgatcttggccactatgaaagatttttagatgagaaaatgtcacagaataataattttaccgctggtcaggtgtatgacagtgttttaaaaaaagagagaaaaggtgaatttttaggagcaacagttcaagtaattcctcacataactgatgagataaaaaagagaattatgaaaggtgccaagggatatgatttagcaattgtagaaattggaggaactgtaggagacatagaatcgcaacctttcttggaagctataagacaattgaaaatagaactgggagatcaaagaactctttttctccaccttaccttggtgccatttctatctacatctggagagactaaaactaaaccaactcaacactcagtcaaaaatcttctttcctatggtcttcagcctgatatcctgatttgtagatcagagaaagaacttcaaagctccgataaaagaaaaattgccttgtttacaaatgttggcttggactctgttttctcacttccagaccttccttcaatttatgctattccagtctttttatctaaagaaaagcttgatgaagttgttacgagaaaaatgggtattaaat

SEQ ID NO: 314782 - DNA, 670 bp, Unknown
  Bacterial polypeptide expressing nucleotide sequence isolated from the Sargasso Sea
gaagcttgtgatcgactggatcgagtcgtctgctttggatgaagaaaccaagaagtcagattccgattctcacaatgcggcctgggaattactcagatctgctgatggaatcctggttcctgggggattcggaatcagaggcattgaggggaaaatcaaggcagcggagtatgcgagagagaataaaatcccctacctcggtgtctgtctgggactacaggtcgctacaatcgaattctgtcgcaatgtgctcggaatggagggagccaactctgctgagttcgatgaggaagcagcacatgcagctgttgttttcatgcccgagatttccaagacccatatgggggggacgatgagattggggacgaagcctaccccattccttgtggatgattgcaagattaggaggttgtatggcgggggagaacacgtcgatgagaggcacaggcacagatatgaggtaaatcctgagctgataggagagattgagggggccgggctagtctatgttggaaaggacgagacgggggagcgttgtgagatcatggagctcgatgggcatccatactacgttggcactcagtaccatccagaattcaagtctaggccagatcgtcctagtccaccattcctaggtcttctgatggccgcatcgggaatggaaatctaa

SEQ ID NO: 314783 - DNA, 771 bp, Unknown
  Bacterial polypeptide expressing nucleotide sequence isolated from the Sargasso Sea
catggcgcgatacatatttgtcacgggcggcgtggtttcttcattaggtaaagggttgtcatctgcttcgttagcatatttgttaaaatctcaaggctataaagttaggttaagaaaaatggatccttatttaaatgttgatccaggaacaatgagtccatttcaacatggtgaagtttttgtaactgatgatggtgctgaaactgatttagatttaggtcattatgagagatttacaaacatatcttcaaaaaaatctgacaatataacaactggtcgtatttatagtgacattataaaaaaagagagacaaggtggataccttggaaaaactgttcaagtaatcccacatataacagatagaataaaagattttattaagaaagatattacaaatgaggattttgttatatgcgaaattggagggacagtaggtgatattgaaagcttgccttttgtagaggcaattagacaattttcaaatgaacatggtaaatcaaaaactttgtttattcatttgacatttgttccttttttaaaatcatctgatgaaataaaaacaaaaccaactcagcattctgttaaagaattaagaagcattggtattcagcctgatataattatttgtaggtcgcaacagtcaatacccatagaccaaaaaaaaaagatatctttattttgtaatgttccaattgataatgttattgaaacagttgatgtaagaactatctatgaggcacctattagtttttttaatcaaaaacttgataa

SEQ ID NO: 314784 - DNA, 799 bp, Unknown
  Bacterial polypeptide expressing nucleotide sequence isolated from the Sargasso Sea
aaattagatgttcaagttttaaattattttaaattaaaaactaagaagccagtaaatttaaatccatggaaaaaaataactaaaataattttacaaaataagaggcaagtgaacattgctattattggaaaatatgttgagcttcaagatgcttacaagtcattagatgaagcattaactcatggtggaatagacaataaaattaaagttaacttagttaggattgactcagaaaaattaaaaatttccgaaattaagaaaaaactaaaaaatatctctggaatattaatacctggtggatttggcaaaagaggtactgatggaaaaatagaagcaataaaacatgcaagaataaacaaaattccattccttggaatatgttatggaatgcaaatggcaattattgaatttgctagaaatcaactcaatttaaaaaatgctacctcaagtgaatttgataaaaaaggtcttccaattattggtttactaaacgaatggtctaaagacggtaaaactattaagggcactgataaagatcttggtggtaccatgagactagggtcttatgatgctaaattacaaaataacacaaagatcagaaaaatttataagtctaagttaattaaagaacgacatcgtcatagatacgaggtgaatattgcttacagagaaaaatttgaaaaaaaaggtatgattttttcaggtttatcacctgataatcaattacctgaaattattgagcttaaaaatcacccatggtttattggggtacagttccaccctgaatttaaatctagac

SEQ ID NO: 314785 - DNA, 535 bp, Unknown
  Bacterial polypeptide expressing nucleotide sequence isolated from the Sargasso Sea
aatgcaatatgtatttattacgggcggagttgcctcatctctaggtaagggcatagcatctgcagcactggcatccttacttcaacaaagaaagtttaaggtcagaataagaaaacttgacccttatctgaatgttgatcctggcactatgagtccatatcagcacggagaagtatttgttacagatgatggtgctgaaactgatcttgatttaggacattatgagagatttacaaacaggtcagcaaaaaaaactgacagtacttcatctggaaaaatttattctaatgttttgaaaaaagaaagaaaaggtgattatcttggagcaaccatacaagtcatccctcatgtgactgatgaaataaaactttttattaaatctaattttgaggatgaggatataataatttatgaaataggtggtactgttggtgatatagagtctttaccatttttagaagctataaggcagattagaaatgataaaaatatttcttcagcattaatccatatgacttatgttccttatttaagt

SEQ ID NO: 314786 - DNA, 833 bp, Unknown
  Bacterial polypeptide expressing nucleotide sequence isolated from the Sargasso Sea
aatttgtcgatcggaaagagaaattccaaataatgaaagaaaaaagatatctttattttgcaatgtaccaatagataatgttattgagactgttgatgtaagaaccatatatgaggcaccaataagttttcataaagaaaaattagatgatagggtgctttcttatttcaatatcaaaagtaaaaaatcacctaacctgagcaaatggaaagatattacttccagagttttaaacccgaagaaagatgttagtattggtattataggtaagtatgttgatcttaaggacgcttataaatctttggatgaggctttaattcatggtggcatatcaaacaatgtaaaagtcaatttgaagagaatagactcagaaaatttaaaacctgaaaacgtaaaatcattgcttaatgatgtaactggcgttcttattcctggaggttttggtaaaagaggcaccgagggtaaaattgctgccataaaatacgcaagattgaatcatatacctttcttcggtatttgctttggtatgcaaatggcggttattgaagctgctagaaacctgctaaatattaaagatgcttcaacaagtgaatttggaaataactgtacacctgttgttggattgctcgaagaatggcaaaaaggagaaaaaaaaattaaaggaactaaaaagaatttaggtggaacaatgagattaggtttatacgatgctataataaaaaataattctttgatatcaaaaatatattctgaaaagaaaatcaaagaaagacacagacacagatatgaagtgaatattaaatataaaaatgatttgaaaaaaaaggattaat

SEQ ID NO: 314787 - DNA, 622 bp, Unknown
  Bacterial polypeptide expressing nucleotide sequence isolated from the Sargasso Sea
agatatcaaatctgatcaagatgctgaaaaaacttttaaaaatatggatggattattacttcttcctggatttggatccagaggatccgaagggaaaatactttcctgtaagtttgctcgtgaaaatgagattccatttttaggaatttgtcttggtttgcaatgtgctgtaattgagtttgctagaaatatttgtggtttaaaaaatgcgaatagcactgagtttaataaaaatacacctcatcctgtaattgaattaatggaatcacagaaagcaataaaacgaaagggtggaacaatgcgtcttggtgcttatgattgtaaaattgaacctggcacaaaaacctacgctgcatatagaaaaaaacaaatttcagaaagacatcgtcatcgctgggaagtgaacaatcgttatcgtgatcgactagaaaaaaacggaatgaaaatttccggtttaaatgaggaacttaatttagtggagatcattgaattaaccgatcacccttggtatgttgctggccaatttcatcctgaattgaaaagtcgtgtaagtaaggcacatccgttatttagagaatttatcaaggcatcagttaacaacttgaagagaaaaaataaatga

SEQ ID NO: 314788 - DNA, 731 bp, Unknown
  Bacterial polypeptide expressing nucleotide sequence isolated from the Sargasso Sea
catgcaaacaaaatatatctttattacaggtggtgtggtttcaggacttggtaaaggaattgcggcagcctccattggagctttactggaagcaagagggctaacagttagtctaatgaagcttgatccatacatcaatgttgatgctggtaccatgaaccccttccagcatggagaggtttttgtaaccgtggacggtgcagaaacagacctagatcttggacattatgagcgctacacaaatgcagtgttgactcgcaagcataatcgtacaactggccagatttatgacacagttattcgaaaggagcgtgccggtgattatcttggagcgactgtgcaggtagttccacatgttattgatgaaataaaaaatactattacagaagcttcaagaatttttgacaaagaaacaaaaacatttactgctccaaatgccgacatttgtattgttgaaatcggtggaactgtaggtgacattgaatcacttccttttctagaagctattcgccagtttaggcatgatcatggaaaagaacatactttgtttgttcacctaacactgattgtacagactgcagaaatgaaaaccaagcctacccagcatagtgtaggtaaactccgtgaaatcggaatacagccagatattcttatatgccgtactcctgaaatgctttcagaaaaagtaagaagcaagatttctctattcactaacgttcctgaagattccg

SEQ ID NO: 314789 - DNA, 790 bp, Unknown
  Bacterial polypeptide expressing nucleotide sequence isolated from the Sargasso Sea
atggccaaaactaagtacattttcatcactggaggagtggtttcatcactcggcaagggtatcgcagcagcatcaattggtgctcttcttgaagcaagaggcttatcagtatcacttataaaagttgatccttatataaacgttgatcccggaacgatgagtccttttcaacacggagaggtttttgtaacgaatgatggaactgaaactgatttagaccttggtcattatgagagatttgtgagatttcaagcctcaaagaaaaacaattttaccgcaggtaaagtatatgaagccgttattcgtaatgaaagaaaaggtaaatatcttggagggactgttcaagtaattcctcatataacaaatgaaataaaaagaagaataaaagagggcggtcagaataaagacgttgccattgttgaaattggtggaactgttggagatattgaaagtcagccttttgttgaggcaatacggcagatggccttagagcttccaaattcttcttgggcttttgtacatcttactttagtcccttttattaatgcttctggagaacttaaaacaaaacctactcaacattctgttaaagaacttagatcattaggaatcagtcctgacgtattagtttgtagatctgaacaggagttaccaaaagatgaaaaaaagaagatcgcacttttttgctctgtacctaatgaaagcgttatatcaatgcatgatgttgacacagtatattcagtaccgattttactaaataagcaaaaagttgataaaacccattattgaa

SEQ ID NO: 314790 - DNA, 316 bp, Unknown
  Bacterial polypeptide expressing nucleotide sequence isolated from the Sargasso Sea
aatgcaatatgtatttattacgggtggggttgcctcttctttgggaaaaggtattgcttctgcagcagtagcctctttacttcagcaaagaaattttaaagttagaataagaaagctcgacccttatctgaatgtagatccaggaacaatgagcccttaccaacatggagaggtatttgttactgatgatggtgcagaaactgatcttgacttggggcactatgaaagatttacaaatagatcggctaaaaaaacagatagcacatcatcaggtaaaatatattcaaatgttttaaaaaaagagaggaagggtgat

SEQ ID NO: 314791 - DNA, 841 bp, Unknown
  Bacterial polypeptide expressing nucleotide sequence isolated from the Sargasso Sea
gttaaatttatctacaaatgaaccagattttgaaaaatggaaaaatatgcttcatttaaaatctgatataaaaaagactgtagaaattgcaattttaggaaaatatttcggccttcctgatagttatttatcagttgttgaatctttaaatcacgcatctttacataatcaagttaagttaaatcttcattgggaagattctgataattttaatattgaagatttaaataaatttgatggggtagttattcctggcggatttgggtatagagggattgaaggaaaaatagcagctattgaaatactgagaaaacaaaaaatacctttcttagggatatgtcttggtttgcaatgtgctgttattgaatttgctaggaatgaatgtggtattaaagatgcgaattcttcagaattttcacaaaatactaataattttgttattgatttacttccaaatcaaaatttggaaaaagatgatgtaggagcatctatgaggctagggacttatccatgtaaaattaaagaaggcacaaaaacatcaacaatttataaagatgaaattatttatgaaagacataggcatagatatgaagtaaataataagtttaaagaagagttagaaaaagcaggattaataattagtggaatgtctccagataataatttaattgaaatgattgaagtaaaagatcatcctttttttattgcatctcaatttcatccagaattcatatcaagaccatgggaacctgctcctatgtttaattattttatagaagctgccactaatcatgaaaaaattaataaaaattctgacaaagtacaaaaggtaagagattaa

SEQ ID NO: 314792 - DNA, 676 bp, Unknown
  Bacterial polypeptide expressing nucleotide sequence isolated from the Sargasso Sea
atggcccaaactaaatacatttttattacaggcggagtggtttcgtcacttggaaaaggtattgctgctgcttcaataggagctcttcttgaatcaagaggtttatcagtatcattaattaaagttgatccatatataaacgtagaccctggcacaatgagcccttttcagcatggcgaggtatttgttaccaatgatggaactgaaacagatttagatcttggtcattacgaaagatttgtaagatttgaggcatcaaaaaaaaataatttcacagcaggtaaggtttatgaaactgtaattagaaatgaaagaaaaggaaagtatctaggtggaacagttcaggttatacctcatattacaaatgagataaagaaaagaattaagtctggtggccaaggtaaagacgtagccatagttgaagttggaggaaccgtaggtgatattgaaagtcaaccttttgtagaggcattaagacaaatggcattagagcttccaaattcttcttgggcatttgttcacttaacccttgttccttttataaatgcttcaggtgagcttaaaactaagcctacacagcattcagttaaagagctaagatcacttggaatcagcccagatgttcttatttgtagatcagataaagaattaccaaaagagaaagaaataagatagc

SEQ ID NO: 314793 - DNA, 436 bp, Unknown
  Bacterial polypeptide expressing nucleotide sequence isolated from the Sargasso Sea
atggcgcgatatatatttgtcactggcggtgtggtttcatctcttggcaaaggtttatcatccgcatctcttggatatttacttagatctcaaggtttcaaggttagaataagaaaaatggatccatatttaaatgttgatccaggtacaatgagtccttttcaacatggtgaagtttttgtaagtgatgatggtgccgaaacagatttagatttaggacattatgaaagatttacaaatatatcagctaaacaatctgacaatattaccacaggtagagtttatagcgatattataaaaaaagagagaaaaggaggattccttggaaaaactgttcaagttattcctcatgtcacagatagaattaaagagtttattaaaaaagatattacaaatgaagattttgtaatttgtgaaattggaggaacggttggtg

SEQ ID NO: 314794 - DNA, 172 bp, Unknown
  Bacterial polypeptide expressing nucleotide sequence isolated from the Sargasso Sea
atggcgcgatatatatttgtcaccggcggcgtggtttcatcactcggtaaaggattatcatcagcatcgcttggatatttgcttagatcgcaaggctataaggtaaggataagaaaaatggatccatatttaaatgtagatccaggaacaatgagtccttttcaacatggtg

SEQ ID NO: 314795 - DNA, 474 bp, Unknown
  Bacterial polypeptide expressing nucleotide sequence isolated from the Sargasso Sea
aatgcattatgtatttattacgggaggggtagcttcatcattaggcaaaggtatagcatcagcttccctagcatcattattgcagctcagaaattttaaagttagaattagaaaattagatccctatttaaatgtagatccagggaccatgagcccttatcaacatggcgaagtatttgttactgatgatggagcagaaacagacttagatctaggacattatgaaagatttacaaatcaatctgcaaaaaaaagtgatagtatttcatcaggaaaaatttactcaaatgtacttacaaaagaaagaaaaggtgattatttaggttctacaattcaagttattccacatgtaacaaatgaaattaagctttttataaatagcgatctaaataacgaagaaatcgttatttatgaaattggaggaactgtaggagatatagaatcccttccttttttagaggcaataaggcaaat

SEQ ID NO: 314796 - DNA, 572 bp, Unknown
  Bacterial polypeptide expressing nucleotide sequence isolated from the Sargasso Sea
catggcgcgatatatattcgtcactggcggcgtggtttcatcattaggaaaaggtttatcatctgcttcactagcttatcttttaaaatcacaaggttacaaagttagagttagaaaaatggatccatatttaaatgttgacccaggaacaatgagtccatttcaacatggcgaagtttttgttacagacgatggagctgaaacagatttagatcttggtcactatgaaagatttacgaacatctctgcaaaaaaatctgacaatattacaactggaaaaatttatagtgatataattaaaaaagaacgtaagggtaaatatttaggaaaaactgttcaagtcataccacatgttaccgatagaataaaagaattcataaaaggtgatatatcaaatgaagattttgttatttgtgaaataggtgggacagtcggtgatattgaaagcttaccttttgttgaagcaattagacaattttcaaatgaagttggtagaaataatagtttgtttattcatttaacttttgttccatttttaaaatcatcagatgaaattaagacaaaacctactc

SEQ ID NO: 314797 - DNA, 572 bp, Unknown
  Bacterial polypeptide expressing nucleotide sequence isolated from the Sargasso Sea
aatgcattatgtttttattacgggtggtgtagcttcctcattaggaaaaggtttagcttctgcatctttagcctctttacttcaattaagaaattttaaagttagattaagaaaactagatccttatttaaatgtagaccctggaactatgagtccataccaacatggagaggtttatgtaacagatgatggagctgaaacagaccttgatctgggacattatgaaagatttactaatcaatctgcaaaaaagagtgatagtatttcttccggtaaaatctattcaaatgttttaagtaaagaaagaaagggagattatttaggagccacaattcaagtcatacctcatgttacaaatgaaataaaactttttattaatagtgatataaaaaatgaagatataataatttatgaaattggtggaactgttggagatatagaatctttaccttttttagaagctattagacaaataagaaatgacaaatctatctcttcagccctaattcatatgacttatgttccattcctcagttctgccggtgaattaaagactaaacccacgcaacatt

SEQ ID NO: 314798 - DNA, 855 bp, Unknown
  Bacterial polypeptide expressing nucleotide sequence isolated from the Sargasso Sea
tagatgttcgagttttagactatttcaaacttaagtctaaaaaatctaataatttatcaccttggaaaaaaataactcagattacacttaatgcaaaaaaacaaattgatattgcaattattggcaaatatgttgaattaaaagatgcatacaaatcactagatgaggcactgactcatggaggaattagtaataatcttaaggtaaatttagtaagaattgactcagaaaaattaaaagttttacaaataaaaagtaaacttcaagatgtttcaggaattctgattccaggtggatttggcaaaagaggtacaataggaaaaatagaggctattaaatatgcaagagttaataaaattccatttcttggaatttgttacggaatgcaaatggcaatcatagaattcgccagaaatcagcttaaaattaaaaatgcaacttcatctgagtttgataaaacaggtgttcatattattggcttaatgcatgaatgggaacaaagtggaagaaaagttaaagggacagataaagatcttggtggaacaatgagactcggttcttatgatgcgattttaaaagataatacaaagattagaggtatttataaatctagattaattaaagaaagacatagacatagatacgaagtggatatttcatataaagaaagatttgagaaaaaaggattaatattttctggcttatcaccaaataataagcttccagagataattgaacttaaaaatcatccatggtttataggagttcaatttcatcctgaatttaaatctagacctttgagcccacatccattattctcttcttttatcaaagcagcaaaaaatcatagatgag

SEQ ID NO: 314799 - DNA, 813 bp, Unknown
  Bacterial polypeptide expressing nucleotide sequence isolated from the Sargasso Sea
catacatttaacgcttcttccttatattgctgctgttggagaaataaaaacaaaaccaactcaacattcggttaaggaattacgttctataggtattcagccagattgtcttatttgtcggactgataaggttattcccgagaatgaaaaaaataaaatggcattattcacaaatgtcgaagaatcagcaattatatcggcaattgatgttgatagtatctataaaatacctaaacttttacatcaacaaaatcttgatgagattgtaattaaaaaatttaatttagatttgccaagtgctgacctaactgagtggaacaacgttgttgacgcaatagataatccaaaagatgaggttaatatagcaatggtaggaaagtatattggtttagctgattcttacaaatcgctttcagaggcattaattcatgcaggtatacagactagaacaaaaattaatattaattatattgattctgaagaaattgaaaataaagggatgaattgtttacagggtatggatgctattttagttccaggcgggtttggtaatcgtggaattggaggaaaaataaatgcagttaaatatgcaagagaaaatggagttccatatcttggtatatgcttgggtatgcaagttgctgttattgagattgcgcgtaatctagccggtctttccgatgcagatagtacagaattcaataaggatacgaattatccagttattgctttaattacagaatggcaggatgcaaagggcactaaagaaaaacgcacaaaagcatctgatcttggtggaacaatgcgtctagg

SEQ ID NO: 314800 - DNA, 820 bp, Unknown
  Bacterial polypeptide expressing nucleotide sequence isolated from the Sargasso Sea
aaaaataaaattttaaagggtgcaggaagcgctgatgttgctattgtagaaattggagggactgtaggagatatagagtctcaacctttcttagaagctattaggcaaatgaaactggagctaggatccaaccagactttatttatacatttaactttagttccttttctaaagtcagcaggcgaaacaaagactaagccaactcaaagatctgtaaaagagatgttatctcacggactgcagccagatatattgatttgtagatccgatggagttctcgcagatgaagagagaggaaagatagctttatttactaacgtagaagagggctctgttatatctatgccggatgttaattctatttacaaaataccagttgaattaaataaccaaaaggtagatgaaatagtagtaaataaacttaatttgatctgtcgtaaagcttctttggtagattggaagagggttattagtgaagatttaaatccaaaagattctgttactgtatccatggtaggaaaatacacagaattagcagatgcttataaatccttaaatgaagctctaagacatgggggattaaagaatagtttaaaagttaacatcaaatatgtagattctgaattgataaatgcaagaaatgctaaatctttattaaaaaattcacatgctattcttgtgcctggaggttttggagaaaggggcatagaggggatgatagctgcagtcaagtatgcaagaattaataagataccatacttgggaatatgtttaggtttgcaaatagcagttattgagtatgcaagaaacgtagtcggtt

SEQ ID NO: 314801 - DNA, 755 bp, Unknown
  Bacterial polypeptide expressing nucleotide sequence isolated from the Sargasso Sea
catggcgcgatatgtattcgtcactggcggcgtggtttcatcattaggaaaaggtctctcttcagcttctttagctgcattactccagttaagaggatataaagttagaattagaaaactagatccttatttaaatgttgatccaggaacgatgaacccctttcaacatggtgaagtttttgtaacagacgatggagctgaaactgatttggatataggtcactacgaaagatttacaggaatttcagccaccaaatcagacaatattactactggaggtatttatagcgatataataaaaaaagaaagaaaaggagattatttaggaggaacagtacaagtagttccgcatgtaactgaccgtattaaaaaattcatatcacatgatgtaaaaaaagaggattttataatatgtgaaattggaggaacagtaggagatatagaaagtcttccttttcttgaagcaattagacaattttcaaatgatataggaaaaaataatagtttatttattcacttaacattagtcccatacatgaaagcttcgggagagctcaaaacaaagccaactcaacattctgtaaaagaattaagaagtttaggaattcagccggatataattatatgtagatcagaaaaaaaaataccactagctgaaagaaaaaaaatatcattattttgcaatgtagatatcaaaaatgtgattgagacagttgatgtacgaacaatttatgaagctccaattagttttcaca

SEQ ID NO: 314802 - DNA, 332 bp, Unknown
  Bacterial polypeptide expressing nucleotide sequence isolated from the Sargasso Sea
agatcacaccagtgaaaaaggtggcactatgaggcttggagcgtataaagctattctaaaaaagaattctaaagtaagtgaaatttataatacaaatgaaattgcagaaaggcatcgtcatagatacgaagttgatttatctttaacgaaagattttgaaaaaaaaggttttgttttttctggcatgtcccctgataacgtgttgcctgaaatattagaaagtatgaatcataaatggtttatcggtgttcagtatcatccagaattaaaatctagacctttagcgccacatcctttattttcctcttttattaaacattgcataaaatgaa

SEQ ID NO: 314803 - DNA, 331 bp, Unknown
  Bacterial polypeptide expressing nucleotide sequence isolated from the Sargasso Sea
catggcgcgatatatatttgtcactggcggcgtggtttcatcactaggtaaaggtttgtcatcagcatcgcttggatatttgcttagatcacaaggctataaggttagaataagaaaaatggatccatatttaaatgttgatcctggaacaatgagtccatttcaacatggtgaagtttttgtaactgatgatggcgctgaaacagatttagatttaggacattacgaaagatttacaaatatttcagccaaacaatctgataacattactacaggtagaatttatagtgatataataaaaaaagagagaagaggaggttatctggaaaaa

SEQ ID NO: 314804 - DNA, 559 bp, Unknown
  Bacterial polypeptide expressing nucleotide sequence isolated from the Sargasso Sea
catggcgcgatttatttttgtgacaggcggcgtggtctcatcactagggaagggtttgtcgtctgcttcgttagcttatctattaaaatctcagggttataaagttagagttagaaaaatggatccatatttaaatgttgatcctggaacaatgagtccatttcaacacggtgaagtttttgttacagatgatggcgctgaaactgacttggatttaggtcattatgaaagatttacaaatatttcagcaaaaaaatcagacaatattacaacaggaaaaatttacagtgatattattaaaaaagaacgtagaggaaaatatttgggtaaaacagtacaggttataccccatgttacagacagaatcaaagaattcattaagggagatgtaaccaacgaagattttgtaatatgcgaagtaggaggtacagtcggtgacattgaaagcttaccatttgtagaagcaataagacaattttctaatgaggttggaagaaataaaagtctgtttattcatttaacacttgtgccatttttaaaatcgtcagatgaaataaaa

SEQ ID NO: 314805 - DNA, 722 bp, Unknown
  Bacterial polypeptide expressing nucleotide sequence isolated from the Sargasso Sea
cgatatatatttgtcacgggcggcgtggtttcatcattaggtaaaggtttatcctcagcttcattagcatacctacttcaatcaagaggttttaaagtaaggatcagaaaacttgatccgtatttaaatgtagacccaggaacaatgagtccatttcagcatggtgaagtttatgtaactgatgatggtgctgaaacagatttagaccttggtcattacgaacgattttcaggagtatcagcaaaaaagtcagataatatcactacaggcaaaatatataatgatgttttaaaaaaagaacgtaaaggagagtaccttggaaaaactgttcaagtaattccacatattacagatcgaataaaaaaatttattaaaaacgattcatccaaagaggactttgttatttgtgaaatcggagggatagttggagatatagaaagtcttccatttgtcgaagcgataagacaatttgcaaatgatgttggtaagaaaaatgctttatttattcatttaactctagttccgtacttaaaagcatcggatgagataaaaacaaaaccaactcaacattctgtaaaagagttaagaagcataggtattcagccagatataatcatttgtagatctgaaaggtctataccattagagcatagaaagaagatttctttgttttgtaatgtggatattaaaaatgtaattgaaactgttgatgtcaaaactat

SEQ ID NO: 314806 - DNA, 751 bp, Unknown
  Bacterial polypeptide expressing nucleotide sequence isolated from the Sargasso Sea
tcaatttacgaagttccttcattatattccaaatatggtttggatgaagctctccttaaacaattgggttataaaccaaaaaatcacaaactaaatttaaagccttggattaatcttcaagaaaaaataaaaaaaagaaaacataaagtaaaaattgcagtagtaggaaaatacacaaatcttaaagacagttataaatcactcaatgaagcattggtgcatgggggaatagaaaactttgctgatgtagatattcaatggattaattctgaaaaagaaaaaaacctcagtttaatgaaaaaattaaaaggctgtgatggaattctaattccaggaggcttcggtattcgtggtataaatggaaaaattaatgccatcaaatatgcgagagaaaacaatattcctttttttggaatatgtcttggcatgcagttagctgttattgaaatagcgcaaaatgtaataaaaattaaaaatgctcattcttcagaatttaagaatactactaaatcagtagttggattaatgacagaatgggtaaataaaaataagatcgaaaaaagagataaaaatagtgataagggtggaacgatgcgtcttggagcatacaaagctattttgaaaaaaaattcaaaaatcttttctatatataaaaatacagtaattagtgagagacatagacatagatacgaagtaaaccagaaatttctatcaaaatttgaaaacaaaggttattattttagtggtatgt

SEQ ID NO: 314807 - DNA, 916 bp, Unknown
  Bacterial polypeptide expressing nucleotide sequence isolated from the Sargasso Sea
catctttagcttatcttttaaatctcagggttacaaagtaagaattagaaaaatggatccatatttaaatgttgacccaggaacaatgagcccatttcaacatggagaagtttttgtaacaaatgatggagccgaaacagatttagatcttggacattatgaaagatttacaaatatatcagcgaaaaaatctgacaatattacaaccggaaaaatttatagcgatataattaaaaaagaacgtaaaggtaaatacttaggcaaaacagttcaagtaataccccatgttactgatagaataagagagtttataaaagatgatatatctaatgaagactttgttatatgtgaaataggaggaacggttggtgatatagaaagtttgccatttgttgaagctataagacagttttcaaatgaagttggaagaaataaaagtttatttatacacttaacgtttgttccttttttaaagtcatcagatgaaattaaaacaaaaccaacccaacattcagttaaagagttaagaagccttggtatccaaccagatataattatttgtagatctcaaaaatctatacctctagaccaaagaaaaaaaatatcactattttgtaatgtagatataaataacgttatagaaactgttgatgtaagaacaatttatgaggcgccaataagtttttataatgaaaaattggacaaacaggttttgaaatattttaaattaaaaccaaggaaaaaagttaatttgttgccttggaaaaaaattacacaaacagttttaaatacaaagaaaataatcaatattgcaattattggaaaatatgtaaattttaaagatgcttataaatctctagatgaagcatttattcacggaggaataaagcataatgtaaaagtcaattttatttag

SEQ ID NO: 314808 - DNA, 601 bp, Unknown
  Bacterial polypeptide expressing nucleotide sequence isolated from the Sargasso Sea
caaaaaactaaaaaaagcttctgctattttaatccctggtggatttggaaaaagaggaacagaaggaaaaatttctgcaataaattttgctaggagaaaaaagataccttttttgggtatatgttttggtatgcaaatggctgttattgagtttgctagaaatgttttaaaaatgaaaaaagcaggatctactgaatttgacattaattgttatccagtaattggattaatagatgaatggaataaaaatggaaaaataatcaaaggcacaagaaaagatttaggaggaactatgaggttaggtctttatgaggctaaattaaaacataattcgatgataaaaaatatctataaatcaaactcgattaaagaacgacacagacatagatacgaagtgaataataatttaaaaaataaatttgaagataaagggatgattttttcaggtatgtctccagataataacctacctgaaattatcgagcttaaaaatcatccatggtttgtaggagtgcagtttcatccagaatttaaatctagacctttatcaccgcatcctttattctcatcatttgttaaggcagcaaaaaattataaatga

SEQ ID NO: 314809 - DNA, 634 bp, Unknown
  Bacterial polypeptide expressing nucleotide sequence isolated from the Sargasso Sea
aatgcattttgtttttattacgggaggagttgcctcatcacttggcaaaggtattgcctcagcgtctttagctgcacttttaaaatccagaaattttaaagtaagaattagaaaacttgatccttatttaaatgttgatccaggtactatgagcccttatcaacatggagaagtttatgtgacagatgatggagctgaaacagatttagatttagggcattatgaaaggtttactaatcaatcgtcaaaaaaaaatgatagtatttcttctggtaaaatatattcaacagttttgtcaaaagaaagaaaaggtgactacttaggagcaactattcaagttattcctcatgtaacaaatgaaattaaatcatttataaatagtgatttaaaaaatgaagattttgcaatttatgaaattggaggaacagttggtgatatcgagtcactaccttttttagaagcgataagacaaataagaaatgataaaaaaatatcttctgcgttaatacatatgacttatataccttatttaagttttgctggagaattgaaaactaaaccaactcaacattctgtaaaagagcttcttaatgcaagaattcaaccagatataataatgtgtaggtcagaaaaa

SEQ ID NO: 314810 - DNA, 838 bp, Unknown
  Bacterial polypeptide expressing nucleotide sequence isolated from the Sargasso Sea
cgttttatttttataacaggtggtgtggtatcttccctaggaaaaggactatcttcagcatcacttggtgcactgcttcagtctcacggatataaggtaaaacttcgtaagcttgatccatatttgaatgtggatcctggcactatgaatccaatacagcatggtgaggtatttgtgaccgatgacggtgccgaaacagatcttgatcttggccattatgagcgctttaccgatgtatccgcaactaaatttgataacattaccagtggcaagatttaccaggatattatccaaaaagaaagaaagggagattatctagggggtacagttcaggtaattccacacgtaacggatgcgattaaagaattcattacccaatacacagatgacgttgactttcttttgtgtgagattggaggcactgtcggtgatattgaggccttaccattttttgaagcaattagacaattaagaaatgaattgaacccagaaaattgtttattcattcatttaactttattaccattcattgcggcagcgggtgaactcaagaccaagccaacacaacattcagtaaaagaattaacttcaatcggtatccagccggatattatcatattacgctgtgacagagacattccagaagatgagagaaaaaaaatctcatcattttgcaatgttccattcagtagaataattccagcagtagatgttggtaatatatatgatgttccgatgaatttacatcagaacggcctggatagcgaagtattaagtatatttaatcttaagcaaaaaaataaaccaaatttcattaaatggaaaaaaatctcatcaa

SEQ ID NO: 314811 - DNA, 607 bp, Unknown
  Bacterial polypeptide expressing nucleotide sequence isolated from the Sargasso Sea
atgtcagattatatttttgttacaggtggagttgtttcagcacttggcaagggtgttacatccgcttctctgggcgctatcttggagtctcgagggcttaaagttggaatgatgaagcttgatccatacctcaatgttgatccgggcacaatgagcccatatcaacacggggaagtctttgtaaccgaagatggaactgagactgatttggatttaggccattatgagaggtatgtttccaccataacgggaaagcacagtaactatacagccggtaagatctacgaaactgtcattgcaaaagaaagaagaggagattacctaggagcaaccgttcaagtgattcctcatgttaccgatgaaataagaaaaagcattgtcaaaggatcgcaaggttatgacgtaacaattgttgaaattggtggaacagttggagacattgaatctcttccattcattgaagccataagacaaatgggaatctataaagatggttatgaagttgcatatgttcatttaacattggttccatatatcaaggcatcttcagaaataaaaaccaagccaactcaacattcagtcagagaactccgagcaatcggaatca

SEQ ID NO: 314812 - DNA, 878 bp, Unknown
  Bacterial polypeptide expressing nucleotide sequence isolated from the Sargasso Sea
aatgagtccatatcaacatggagaagtgtatgttacagatgatggtgcagaaacagatttagatcttggtcattatgaaagattcacaaatcaatctgctaaacaaacggatagcgtttcgtctgggaaaatatattcaaatgttcttctaaaagaaagaaagggagattaccttggctcaacaattcaggtaattcctcatgttaccaatgaaataaaatcatttattaatagtgatttaaaaaatgaagatatcgcaatttatgaaatagggggaacagttggagatattgaatcacttccttttttagaagcaataagacaaattagaaatgataaaaatatttcatcagcattaattcatatgacttatattccatatttaagttcagcaggtgagttaaaaacgaaacctactcaacattcagttaaagaacttctcaatgccggtattcaaccagatataattatgtgtagatctgaacaaccaatagataatgattcaatttctaaaatatctttattttgtaatgttaaaaaagagtcggtaatcccagcattaaatgctaaatcaatttatgaagttccttcattatattctaaatatggtttggatgaagctctccttaaacaattgggttataaaccgaaaaatcataaactaaatttaaagccttggatcgatcttcaaaaaaaaattaaaaaaagaaaacataaagtaaaaattgcagtagtaggaaaatacacaaatcttaaagatagttataaatcacttaatgaagcattggttcacggaggtatagaaaattctgccgatgtagatattcaatggattaattctgaaaaagaaaacaacgctagtttaataaaaaaataaa

SEQ ID NO: 314813 - DNA, 886 bp, Unknown
  Bacterial polypeptide expressing nucleotide sequence isolated from the Sargasso Sea
taaatcttcatgggcatttgttcacttgacactagttccatttataaacgcatcaggagaattaaaaacaaagccgactcaacattcagtgaaggaattaagatctttgggcattagtcctgatgttttggtttgcagatctgaacaagagcttccaaaagatgaaaaaaataaaattgctttattttgttctgttccagctaaaagcgttatttcaatgcatgatgtcgacacagtttattcgattcctattttgctcaacaaacaaaaagtcgatgacacgattcttaaaaaattaaatttaaaaataaaaaagccaaacttgaatgattggaaaagagttgtcaaagcaaagttacttcctgaaaaagaagtaaatgtttcttttgtaggaaaatatactgagttaaaagattcttataagtcaattaatgaagctttagagcatgctggaattcaaaataaagcaaaagtaaatattaattttgtagaagccgaacaaattacttcaaaaaacgtcagaagagtattgaaaaaatctcatgctattttagttcctggtggattcggagaaagagggatagaaggaatgatcctggcttgcaaatatgcaagagagaataatgttccttaccttggcatttgtcttggaatgcagattgctataatcgagtatgcaagaaatgtacttaagcttaaatctgcaaatagtacagaatttgattcaagtactaaatttccagttattggactgattacagaatggagtgacatatcaggtaagaaagaaaaacggaccaaaaattctgatcttggaggtacgatgcgattaggtggacaggtttgtaaattaaagaaaaaatcaaattcatataaaatgtataaa

SEQ ID NO: 314814 - DNA, 500 bp, Unknown
  Bacterial polypeptide expressing nucleotide sequence isolated from the Sargasso Sea
tctctgtctcggcatgcagaccgccgtgatcgagtgggcgaggaacctggctggcctcacggaagcgacgagcgctgaactcgatgccggcacgcctcacccggtgatccatctgtgcccggaacagcaggatgttgtggacttggggggcaccatgcgtctcggggtttatccatgccgcattgcaccggaaaccctggcgcatcgcctctacgacgatgaagtggtctacgagagacatcgtcatcgttatgagttcaacaatgcttaccgcaacctgttcctcgaatccggttacgtggtgagcggcacctcaccggacggtcgcctggtggaactgatcgaactgaaaggacatcccttcttcacagcctgccagtaccacccggaattcctttcacgccctggtcggccccatccactgttccgaggcctgattgaggcagctcaacaacgcctgccagcatctccagtggaggcactgaagactcagcgatgag

SEQ ID NO: 314815 - DNA, 618 bp, Unknown
  Bacterial polypeptide expressing nucleotide sequence isolated from the Sargasso Sea
tggagaagtatttgtaacagaagatggggctgaaaccgatctagatttaggtcactatgaaagatttactgatactgcaatgactaggttaaatagtgtgactacgggatctatctatcaagcagttatcaataaagaaagaagaggtagttatgacggtggaactgtgcaagtaatacctcacataacaggagaaataagagaaagaattcatagagtagccgcaaacagtaatgcagagattataattactgaaattggtggaacagttggtgatattgaatctctaccttttttagaggcaataagagaattcaaaaatgatgtcaatagaaacgatgttgcatacatacacgtaacattacttccttacatcaaaacctctggcgaaataaaaactaaaccaacacaacattcagtaaaagaattaagatcaattggaattcagccagatttacttgtatgccgaagtgataaatctataaatgaagctcttaaaaagaagcttagtggtttttgcggtgtcagtatcaactctgtaattgaagctttagacgaagacagtatttattctgtacctctttctttaaaaaaagaaggtttatgcaaagaaaccct

SEQ ID NO: 314816 - DNA, 895 bp, Unknown
  Bacterial polypeptide expressing nucleotide sequence isolated from the Sargasso Sea
tatcatatctgcttcattagcaagacttcttcaagctcaaggtttaaaagtatcaatccaaaagttagatccatatattaatgttgatccaggcacactcaacccatacgagcatggggaatgttatgttaccgatgatggagctgaaacagatcttgatttaggtcattatgaaaggtttttaagtataaatacttcacaaaaaaataatattacaaccggaaaaatttatcaaaatgtaatagaaaaggaaagaaaaggagagtttcttggaaaaacagttcaggtaatcccgcatattactaatgagattaaggaaaatattagaaatattaatcacaaaaataatttagatataataattactgaaattggtggaactgttggtgatattgagtcattaccgtttctagaagcagttagacaggttatttatgaagaaggtcctgaaaactcaatggtcattcatttaacattaatcccttatttatctgcaacaggtgaattaaaaactaaaccaactcaacattcagttaaaactcttatggaattaggtttaaaagcagatgttatcgtttgtagatcagaaagggagttaactgacgagataaaaaataaattagcattattctgtaatgttagatttgattgtgtaatccaatcaatcgatgtagaaactatctatgatgttcctattaaaatgatggatgagggtctagacaaggtaacattagaaaaatttaaaattaaagaatctgagcctgaccttgataaatggaaaaattttcttcataaattaaagaatccaacacatcaaataaatataggcctagttggtaaatatgtggagttggatgattcatataaatcaattttagaatctcttattcatgct

SEQ ID NO: 314817 - DNA, 616 bp, Unknown
  Bacterial polypeptide expressing nucleotide sequence isolated from the Sargasso Sea
aatgagtccttttcaacatggagaagtttttgtaactgatgatggtgctgaaacagatttggatttaggtcactatgaaagattttcaggtgtaactgcaaagaaaactgacaacattacaactggaaaaatttatagcgatgttcttagaaaagagagaaaaggtcagtatttaggtaaaacagttcaagttattccacatattacagatagaattaaagaatttataaaacacgatacatctaaagaagactttgtgatttgtgaaataggaggaatagtaggtgatatagaaagtcttcctttcgtagaggcgataaggcaattttcaaatgatattggtaaaataaatgcattatttattcatctaactttagttccttatttaaaagcatctgatgaaataaaaacaaaaccaactcaacactcagtgaaagaattaagaagcattggtattcaaccagatataataatttgtagatctgaaagaccaatacctttagagcatagaaagaaaatttcattgttttgtaacgttgatataaaaaatgtaattgaaaccgttgatgttaaacaatttatgaagcaccgattagttttgcaaaagaaaaattag

SEQ ID NO: 314818 - DNA, 744 bp, Unknown
  Bacterial polypeptide expressing nucleotide sequence isolated from the Sargasso Sea
caataataggtaaatatgtaaatttaaaagatgcttacaagtctttagatgaagcacttgttcatggtggaataaataataatttaaaagtaaatttaattcgtattgaatcagataacttaaaaccttcggaaattaagaaaaaactaaaaaatgtttctggtattttgatacctggtggctttggaaaaagaggaactgaaggcaaaattgaagcaattaaatacgcaagaaaaaataaaataccattcctaggtatttgttatggaatgcaaatggctataattgaatttgctcgcaatgtattaaaaataaataaagcatcatcaacagaattaaatccaaaatgtgttccagtaatcggtcttatacatgaatggaaaaaaaatggaaaaaccattaaaggaacagacaaagacctcggaggaacaatgagactaggtctatatgaggcagaattattaaataactctttaataaaaagtatatataaatctaaaagtattaaagagaggcatagacatagatatgaggtaaatgttaactataaaaatcaatatgaaaaaaaaggtttattattttcaggtaactcgccagataaaaacttgccagagattatagagttgaaaaatcacccttggtttataggagtacaatttcatccagaatttaaatctagacctttgtcgccacatccattattctcatcatttattaaagctgcaaaaaatcataaaaaatgaa

SEQ ID NO: 314819 - DNA, 733 bp, Unknown
  Bacterial polypeptide expressing nucleotide sequence isolated from the Sargasso Sea
gctccaataagtttttataatcaaaagttagataaacaagttttaaaattctttaaaataaattctaaaaaaagaccaaatttactaccatggaaaaaaattacgaagatagttttaaatacaaaaaaaatagttaacattgctattattggcaaatatgtgaatttaaaagatgcttataaatcacttgatgaagctcttacacatggaggaatttcaaataaagttaaagtaaacttaataagaatagagtctgataaactaaaatcaaaagaaattaaatctatattaaaaaatgtatcaggaatactgatacctggaggatttggcaaaagaggaaccgaaggaaaaatagaggctataaaatatgccagagagagaaaaataccttttctaggtatttgttttggaatgcaaatggcaatgattgaatttgctaaaaatatattaaaaattaaaaaagctggatctagtgagttagataagaattgttttccaataataggtttaatagatgaatggaataaagatggaaaaattataaaaggaacagataaaaaccttggtggaacaatgagactgggtctttatcaggcaaaacttagaaataattctgccataaaaaaagtctataaatcaagtgtgattaaagaaagacacagacacagatatgaagtcaatataaacttaatgcaaaaatttgaaaaaaaaggattaatgttctcaggaattt

SEQ ID NO: 314820 - DNA, 783 bp, Unknown
  Bacterial polypeptide expressing nucleotide sequence isolated from the Sargasso Sea
aaatatgaagctgtgattcaatcaattgatgtagatactatatatgatgttcctctaaaaatgctagaggaaggacttgataaggttgttattgatcgactaaatctaaaaccaaaagaaaaaattaacttgacccaatggaatgagtttttaagtaaatacaaaaatcctaaaagtaaaatcaaaattggtttagttggaaaatacgttgagttacaagattcttacaaatcaattctagaagcctttattcattctggagctgtcaatgaggttgagattgaggttgtttcaattcactccgagcatatttccaataaaaattatgaaacattattagatggtttgcatgggcttctggtagcccctggttttggggaacgtggaattgaaggaaagattaaatcagtggaatatgttagaaaaaataaaattccattttttgggatttgcctcggaatgcaaatggctgtgattgagtactctagaaatgttttggggttacatggcgcaaattctactgagatgaccaaagatgcaacttaccctgtaattgatctcatggaaagtcaaaaaaaaataaagaataaaggtggaactatgaggttaggttcatggaagtgttctttgtctgagaataccttagtatatgatatttatggtaaatccaatattagtgaacgtcaccgtcacagatatgaatttaataataagtttagcaaaattattttttctgaaagttttaagccaagtggaattaatcctgatactggtttaattgaa

SEQ ID NO: 314821 - DNA, 820 bp, Unknown
  Bacterial polypeptide expressing nucleotide sequence isolated from the Sargasso Sea
atggcgcgatatatttttgtcactggcggcgtggtatcatctcttggtaaaggtttatcatcagcatcactagcttatctacttaaatcacaaggttttaaagttagagtaaggaaaatggatccctatttaaatgttgatccaggtactatgagtccatttcaacatggcgaggtttttgtaacagatgatggagctgaaaccgatttagatttgggccattatgaaagatttacagatatatcatctacaaaaaatgataatattaccactggaaaaatttatagcgacatcatagctaaagaacgaaaaggtgattatctcggcaaaactgttcaagtaattcctcatgttacaaatagaattaaagagtttattaaaaatggaattaaaaatgaagattttgttatttgtgaaatcggaggaacagtcggtgatattgagagtctgccttttttagaggctataagacaatttgcaaacgatataggcaaagaaaaaactttgtttatacatttaacattagtcccatttttaaaatcatctgatgaaataaaaactaaacccacacaacattctgttaaagagttaagaagtattggaattcaaccagacatggtcatttgcagatcccaacaatccataccccttgatcaaagaaaaaaaatctcattgttttgtaacataccaattaaaagggttatagagactgttgatgttaaaacaatttatgaagcaccaataagtttttttaacgaaggcttggataaacaagtctttgaatatttcaatattaagccgagaaaaaaaattaattgaa

SEQ ID NO: 314822 - DNA, 1010 bp, Unknown
  Bacterial polypeptide expressing nucleotide sequence isolated from the Sargasso Sea
cgctcatcccctattgtctgctgcaggtgagctaaaaactaagccaactcaacattcagttaaatcattacaagagtcaggcgtatttccagatgttttggtttgtagaaccgaatataaattaaatgaaggtattcgaagaaaattagctttgttctgcaatgttcaaacagattcggttattcaatctatagatgcagctaccatttatgatgtacctaaacttatgaaggaggaacaattggataaagtggttcttaaaaaattaggtttaagtcactcaggagaggccgatattacgaattgggaagaatttgtttaccaccttaataatccaaaacatactgttgatattgctttggttgggaaatatgttgaattaaaagattcttataaatctatttctgaatcttttattcatgctagttcattttctaggtgtaaagttaatttacattggatttgttctgaaaagttagatgctgcttctgcaatagaatctttaaagaatatggatggtgttttggtagctcctggttttggtcctagaggtattgaaggtaaactttatgctgttcagtatgcaagagaaaataagattccattttttggcatttgcttaggaatgcaagcttccgttattgaatatgccagaaatgttctacattatgaatcggctcattctactgaaatgaatccaaaaagctcttatcctgtaattgatattatggaaacgcaaaagaaggttacaaatatgggaggtacaatgcgattgggctcttgtgcatgcaaattaaaaaagggttctattgcacatgctgtttatggatcagatataattgatgagcgacatcgtcatcgttatgaattcaataattcgtatttaaatgattttgaaaattcaggtatgaaagctactggaattaacccacaaactggattggttgaaattattgaaatccctaatcatacatggtttgttggcgttcagtttcatcccagaatataaa

SEQ ID NO: 314823 - DNA, 703 bp, Unknown
  Bacterial polypeptide expressing nucleotide sequence isolated from the Sargasso Sea
catggcgcgatatatatttgtcacgggcggcgtggtttcatctttaggtaagggcctttcttctgcttcactagcatatttacttcaatccagaggatataaagtaagactaagaaaattagatccatatttaaatgttgatccaggaacaatgagtccatttcaacatggtgaagtttttgtaactgatgacggtgctgaaactgaccttgatttaggacattatgaaagattttcaggagtatcagcaaaaaaatctgataatataactacaggtaaaatttatagtgatgttcttaaaaaagaacgtaaaggaaaatatttaggtaaaacagttcaggtcatacctcatattactgatcgtataaaagaatttataaaaaatgattcttcaaaagaagattttattatttgtgaaattggaggaacagttggtgatattgagagtttgccgtttgttgaagcgataagacaatttgctaatgatattggaaaaaaaaatgcattatttattcatcttactttagttccatatttaaaatcatcagatgaaattaaaacaaaaccaactcaacattctgtcaaagaattaagaagtattggtattcaaccagatattataatttgtagatcagaaagaccaattcctttggagcatagaaaaaaaatatcattattttgcaatattgatattaaaaatata

SEQ ID NO: 314824 - DNA, 700 bp, Unknown
  Bacterial polypeptide expressing nucleotide sequence isolated from the Sargasso Sea
aagtattttaaaattaaatcaaaaaaaagagcaaatttgaatccttggaaaaaaataactaagatagtgctgaatacaaaaagaacagttgatattgcaataattggtaaatatgtaaatttaaaagatgcttataaatctttggatgaagctttaatacatggaggtatttcaaataaagtaaaagttaatttaattaggatagagtctgacaatttaaaaactaatgaaataaagaaaaaacttaaaaatgtttctggattattaataccgggtggttttggtaaaagagggacagaaggtaaaatttctgcgataaaatatgctagagaaaacaaaataccttttcttggtatttgttttggaatgcagatggccattattgaatttgcaagaaacaaattgaatataaaaaaggccggatcgagtgaactcgataaaaaatgttacccagtaataggcttaatcgatgaatgggataagaatggaaaaataattaagggaacagataaagatttaggtggaacaatgagactgggtttgtatgaagctaaattacgaaataattctgccataaataggatctataattcaaagactattaaagagagacatagacatagatatgaagttaataataatcttaaaaatcaatttgaaaaaaaaaagttagttttttcaggaatgtcaccagataata

SEQ ID NO: 314825 - DNA, 343 bp, Unknown
  Bacterial polypeptide expressing nucleotide sequence isolated from the Sargasso Sea
agttaaaggaacagataaagatctcggtggaaccatgaggcttggttcttatgatgcaatattaaaagataaatctagaattaaagatatttataagactagattaataaaagagaggcatagacacagatatgaggttgatatttcatttaaagaaaaatttgagaaaaaagggttaatattttcaggcttatctccagatcataagcttccagagataattgaacttaaaaatcatccatggtttataggagttcagtttcatcctgaatttaaatctagacctttgagcccacatcctttattctcttcttttatcaaagcagcaaaaaatcatagatga

SEQ ID NO: 314826 - DNA, 831 bp, Unknown
  Bacterial polypeptide expressing nucleotide sequence isolated from the Sargasso Sea
gaaaaatttatagtgatatcatagctaaagaacgaaaaggtgactaccttggtaaaactgttcaggtaattccacatgttacaaatcgaattaaagagtttattaaaaatggaattaaaaatgaagattttgttatttgtgaaattggaggaacagttggagacatagagagtctgccctttttagaggccataagacaatttgcaaatgatataggcaaagaaaaaactttatttatacatttaacactagttccttttctaaaatcttctgatgaaataaaaactaaacctacacaacattctgttaaagaattaagaagtatcggaattcaaccagatatggtcatttgcaggtcccaacaatccatacctcttgatcaaagaaaaaaaatttcattgttttgcaacataccaattaagagggttatagaaacagttgatgttaaaaccatttatgaagcaccaataagtttttttaatgaaggcttggataaacaagtctttgaatatttcaacattaagccgagaaaaaagattaatttaaaaccgtggaaagatgtaactaaaattgtaactaacaaaaatattaggactgtaaatattgcaattgttggaaaatatgttgatttaaaagatgcatataaatcattagatgaagcgctagttcacggaggtattcataataatgtaaaaattaatttaataagaatagaatcagatttattgaaaatttcagatgttcaaaaaaaattaagtaatgtttctggaataataattccagggggttttggaaaaatgaggtaccgtaaggtaagattgcatgtataaa

SEQ ID NO: 314827 - DNA, 916 bp, Unknown
  Bacterial polypeptide expressing nucleotide sequence isolated from the Sargasso Sea
atgaaggcttcagatgaaataaaaacaaaaccgactcaacactccgtaaaagaactaagaagcattggtatccaacctgatataataatttgtagatctgagagaactatcccattagatcaaagaaagaaaatttctctattttgtaatgtggcaattgaagatgttatagaaacagtcgatgttaaaactatttatgaagcaccgataagtttcaataaagaaaaattagacgaaagagttttaaaatattttaagattaaatcaaaaagcaaagttaatcttaaaccttggaaaaaaattactaatcttgttctaaaagctaaaaaaattgttcatattgcaatcataggaaaatatgttgaattaaaagacgcttataaatctttggatgaagctttaacacatggtggtattgataataatttaaaagtgaatttgattagaatagaatccgataaattaaaaccagttgagattaagaataaatttaaaaatgcatcaggcattcttataccaggtggttttggtaaaagaggcactgaaggaaaaatagcagctattaattttgcaagaaaaaacaatattccttttttaggtatatgtttcggaatgcaaatggctgtaattgaatttgctagaaacaagctaaatattaaaaatgcaacttcaagcgaatttggcccttccaaagcttctgttgttggcctgatgagtgaatggacaaaagatggaaaattaatgaaaggttctgataaaaatttgggtgggactatgcgtttaggtagttatgaagcaagacttaaaaaagacacaaaggtaagtaaaatatataattctttaaaaataaatgaaagacatcgtcacagatatgaagttaatattaattataaagaggacttgaaaataaaggtat

SEQ ID NO: 314828 - DNA, 494 bp, Unknown
  Bacterial polypeptide expressing nucleotide sequence isolated from the Sargasso Sea
catggcgcgatatatctttgtcaccggcggcgtggtctcttcccttggtaaaggtctctcttcagcatcccttgcatatttattacaatcaagaggttacaaagttcgtttaagaaaattagatccatatttaaatgtggatccaggaacgatgagtccatttcaacatggagaagtttttgtaacagatgatggtgctgaaactgatttagatctaggtcactatgaaagattttcaggagtgacggcaaagaaaacagataacattacaactggaaaaatctatagcgatgtacttaaaaaagagagaaaaggagaatatcttggaaaaacagttcaagttattcctcatattaccgatagaataaaagaatttattaaacacgatacttcaaaagaagattttgtaatttgtgaaataggtggcatcgttggtgatatagaaagtctaccatttatagaagcaataagacagttttccaatgatattggaa

SEQ ID NO: 314829 - DNA, 637 bp, Unknown
  Bacterial polypeptide expressing nucleotide sequence isolated from the Sargasso Sea
gtcagattatttaaaaccaaaacaaattaaaaataaattaaaaaatgtatcgggtattctaatacctgggggttttggcaaaagaggaactgaaggcaaaatagcagctattaattatgcgagaaaaaataaaatccctttttttggaatttgttttggaatgcaaatggccgtcatagagtttgcaagaaataaacttaagataaaaaaagctacttcgagtgaatttggaccatcaaaagcatcagttgtaggtttaatgagtgaatggtcaaaagatggaaggttaattaaaggtactgataaaaatctaggaggaactatgcgacttggaagttatgaagccagacttaaaaaagacacaaaaataagtaaaatttacaaatctttgataatagaagaaagacatcgtcacagatatgaagtcaacattaattttaaggaaaaatttgaaaataaaggtatgattttttcaggcttatcaccagacaacaagttgccagaaaccattgaattaaaggatcatccttggtttattggtgttcagtttcatccggaatttaaatctagacctttagttccacatcctttattctcatcatttattagagcggcaagaatcaattcaaaaaaatga

SEQ ID NO: 314830 - DNA, 660 bp, Unknown
  Bacterial polypeptide expressing nucleotide sequence isolated from the Sargasso Sea
aatgaccaggtttatctttataactggaggggtggtttcttcactaggaaagggcctaacaacggctgctttaggagctttacttcaagcacgcggatataaagttagattgagaaaattagacccttatcttaatgtagatcctggaacaatgtccccctttgaacatggtgaagtttttgtaacagatgacggtgcagaaactgatttggatcttggacattatgaacgttttacaggagtagcagctaaaaaaactgattctatttcatcagggaaaatatactcgaatgttcttgataaagagagaaaaggtgattatttaggtaaaacaattcaagttataccacatgtaacagatgaaataaaaaaatttattgaaataggcgaagaagaagttgattttatgttatgtgaaatcggggggactgttggagatatagaaggtctaccattctttgaagctataagacaattttcacaagaaaaaggagtaggatcttgcatatttatgcatttaacattagtgccatttatacaaacttctggtgaattaaaaacaaaaccaacacaacattctgttaaagaacttaggtctattggtcttactccagatattcttgtatgcagagcaaaggaaagaatacctgaagaagaaaa

SEQ ID NO: 314831 - DNA, 199 bp, Unknown
  Bacterial polypeptide expressing nucleotide sequence isolated from the Sargasso Sea
atgggtaaaggggatccaacaaaattcatttttgtactaggtggagtgatgtctggtttgggtaagggtattgctgcatcttccataggttatcttcttaaaaattctggtttaagagttacaattttgaaattagatccatacttgaatgtagatccagggactatgaatccttatcagcatggtgaggtttttgttt

SEQ ID NO: 314832 - DNA, 652 bp, Unknown
  Bacterial polypeptide expressing nucleotide sequence isolated from the Sargasso Sea
tgcaagagtgaatgttcattgggtggcaactgaagatataaaatcagataaagatgcagaacagatttttggcaaaatggatggaattctactccttcctggttttggttctagaggatcagagggaaaaattttatcatgtaaatatgcccgtgaaaataatattccttttttaggtatatgcctaggtctgcagtgtgctgtgattgaatttgctcgcaatgtttgcgggttaaaaaatgcaaatagtacagaattcaataagaagactccatatccagttattgatcttatggaatcacagcgtgcgattaaggcaaagggtggtactatgcgattaggtgcttatgattgtgaaattaaacctggcacaaaaacttatactgcctatcgtcaaaaaaagatttcagaacgtcatcgtcatcgttgggaggttaataaccggtaccgcgaacgcttagaaaaaaatggactcaaaatttctggaaaaaacagggaactcaatttggttgaaatcattgaattaccagatcatccttggtatgttgcaggccaatttcatcctgaattgaaaagtagagtgagtaaggcacatccattatttcgggattttattaaagcttcagtgaagaatttgaaaaagagaacttag

SEQ ID NO: 314833 - DNA, 214 bp, Unknown
  Bacterial polypeptide expressing nucleotide sequence isolated from the Sargasso Sea
gatggcgaaaactaaatatatctttatcaccggtggagttgtttcttctcttggaaaaggtattgctgctgcatcaattggggctcttctcgaagctcgcggcctaaaggtctccttattaaaattagatccttatatcaatgttgatcctgggactatgagtccatttcagcatggagaagtatttgttacgaatgatggaacagaaacggat

SEQ ID NO: 314834 - DNA, 637 bp, Unknown
  Bacterial polypeptide expressing nucleotide sequence isolated from the Sargasso Sea
atgacgcgatttatatttgtaacaggcggcgtggtatcatctcttggtaaaggtttagcttcagcctctttagcatcactacttcaacatcatggttataaagtaagaattagaaaattagatccttatctaaatgttgacccgggaacaatgagtccatatcagcatggtgaagtttatgttacagatgatggcgctgaaacagatttagacctaggtcattatgaaagattcaccggtgtagtttctaaaaaatctgacaacatcacatctggaagagtgtatcaaaaaattataacaaaagagagaaaaggcgagtacctaggtgctacagtgcaagttattccacatgttacaaatgaaattaaagaatttatttcatacgatcttgagcaagaagattttgtgatatgtgagataggtggaacaattggagatattgaaagcttaccttttatagaagctataagacaatttcataatgataatggtcatgagaattcattatttattcatgttactttggtaccatacattgcaagctcaggtgaattaaaaacaaaacctactcaacattctgtaaaagaattgagaagcttgggtatacaaccaaaatattttattgtgcagatctgac

SEQ ID NO: 314835 - DNA, 389 bp, Unknown
  Bacterial polypeptide expressing nucleotide sequence isolated from the Sargasso Sea
atatcttggtaaaacggttcaagtgataccccatattacaaatcgaattaaagaatttattaaaaaagactccactaatgaagattttattatttgtgaaataggggggatagttggagatattgaaagcttaccctttatcgaggcaataagacaatttgcaaatgatgttggtaaaaaaaatactttatttgttcatttaactctagtcccatatttaaaagcttcagatgaaattaaaactaaaccaactcaacactcagtgaaacaacttagaagtattggtattcaacctgatataatcatatgtaggtcagaaagatcaatcccactagaacacagaaaaaaaatctcattattttgtaatgtagatattaaaaatgtaatag

SEQ ID NO: 314836 - DNA, 668 bp, Unknown
  Bacterial polypeptide expressing nucleotide sequence isolated from the Sargasso Sea
aatgagtttcagatggggaaataaacaaacaagatttttattcgtaacaggtggagtagtttcctcacttggcaaaggcgttgctgctgcctctctcggagcagttctagaaagcagaggtctttctgtcactattcttaaattagatccatacataaaccttgatcctggaactatgagcccattccagcatggtgaagtttttgttactgaagatggatctgaaactgatcttgatttaggacattatgaaaggtttcttacatctaagatgtctaaatctaataacttcactacgggacaggtgtatgaagaagttctaagaaaagaaagaaaaggtgattatttaggaggtacggtacaagttattcctcacataaccgatgagataaaagaaagaattataaaaggggcagggaattccgatgttgcaatagttgagataggtgggacagtaggtgatatagaatctcaaccttttttggaagccattaggcagatgaagatagatcttcaatcctatcaaaccttatatatgcatttaactcttttaccgttcttgaaatctgcaggggaaacaaagacaaaacctacacaaaggtccgtgaaagagatgttatctcatggattacaaccagatatcttggtgtgtagatctgatgaaccaa

SEQ ID NO: 314837 - DNA, 715 bp, Unknown
  Bacterial polypeptide expressing nucleotide sequence isolated from the Sargasso Sea
atggcgcgatatatatttgtcactggcggcgtggtttcatccttgggtaaaggtttatcatctgcatctttagcatatttattaaaatctcaaggctacaaagtaagaattagaaaaatggatccttatctcaatgtagaccctggtaccatgagtccatttcaacatggagaagtatttgttactaatgatggagctgagacagatctagatcttggtcattatgaaagatttacaaatatatcagcaaaaaaatctgacaacattacaactggaaaaatttatagcgatataattaaaaaggaacgtaaaggtaaatatttaggaaaaacagttcaagttatacctcatgtaactgatagaataagagaatttataaaaggagatataagtaatgaagattttgttatttgcgaaataggcggtacagttggagatatagaaagtttaccttttattgaagctataagacaattctcaaatgaagtaggaaggagtaaaagtttatttattcatttaacatttgttccatttttaaaatcatctgatgaaataaaaacaaaaccaacccaacattctgttaaagaactaagaagtcttggtattcaaccagatatcattatttgtagatctcaaaaatcgatacccatggatcaaagaaaaaaaatatcattattttgcaatgtttcaattgaaaatgttatgaaactgtgag

SEQ ID NO: 314838 - DNA, 811 bp, Unknown
  Bacterial polypeptide expressing nucleotide sequence isolated from the Sargasso Sea
accgcatgttactgatcgaattaaaaaatttatatctcaagatgttaaaaatgaagattttataatttgcgaaataggtggaacagttggggatatagaaagtttaccttttttagaagcaattagacaattttcaaacgatgtaggtaaaaaaaatagtttatttattcatttaactttagttccttatttgaaggcttcgggcgaattaaaaacgaaaccaacacaacattcagttaaagagttaagaagtttaggaatacaaccagatataataatttgtagatcagaaagagaaattccaaaaaccgaaagaaaaaaaatatccctattttgtaatgttcctatagataacgttatagaaacagttgatgtaagaactatatatgaggcaccaattagttttcataaagaaaaattagacgaaagagttttgtcttatttcaatattaaaaataaaaaaaatccagatcttagtaaatggaaaaatattacttcaagagttttaaatcctaagaaagatgtaaatatagggataataggaaaatatgttgatcttaaagatgcttataaatctctagatgaggctttgatccatggaggtatatcaaataacgtaaaagttaatttaaagagaatagactcggaaaatctaaaacctgagaatataaagccattattaaaagaagtaactggagttcttattcctggaggttttggtaaaagaggcacagagggcaaaattgctgccataaaatacgcaagattgaatcatatacctttctttggtatttgctttggtatgcaaatg

SEQ ID NO: 314839 - DNA, 568 bp, Unknown
  Bacterial polypeptide expressing nucleotide sequence isolated from the Sargasso Sea
atggcgcgatttatttttgtcacgggcggcgtggtttcatcattaggtaaaggtctctcttcagcttcgctagcttatttgcttcaatcaagaggatacaaagtaagattgagaaaactagatccgtatttaaatgtagatccaggaacaatgagtccatttcaacatggggaagtttttgtaacagatgatggagctgagactgaccttgacttgggacattatgaaagattcacagatgtttcagctaaaaaatcagacaatattactacaggaaaaatttacaatgatgttttaaaaaaagaacgtaaaggaaaatatcttggtaaaactgttcaagtcattcctcatattacagaccgaattaaagagtttatcaaaaatgattcctcaaaagaggattttattatttgtgaaattggaggtattgtaggtgatattgaaagcttaccatttatagaagcaataagacaatttgcaaacgatgttggaaaaaagaatacattgtttatccaccttactcttgttccttatttaaaatcttctgaagaaataaaaactaaaccaa

SEQ ID NO: 314840 - DNA, 844 bp, Unknown
  Bacterial polypeptide expressing nucleotide sequence isolated from the Sargasso Sea
acgatgtcaccttttgagcatggcgaggtattcgttactgatgatggcgctgaaacagacctcgacctaggtcattacgaacgatttacaggagtagcagcccaaagcactgactcagtttcttctggtcgaatatattctactgtcttagaacgggaaagaaaaggtgactaccttggagagactatacaggttataccccacgttacaaatgagataaagaagtttttagagcaacacgaagatgaagttgattttatgctttgtgaaattggcggaacaataggagatattgaaggccttcctttttttgaggcgataagacaattctctcaagaaaaaaaatctaattcatgtatttttgtccatttaacgctgttaccatttctttcatcatcaggtgaactaaaaactaagccaacgcaacactcggtaaaggaattaagatctattgggataagccctgatatattagtttgtcgttcagaagtgcccatccctagtaaggagaaagaaaaaattgcacttttctgcaatgtaaataaaaaaaatataattgcagctaatgatcttgaaactatatacgaagctccgatcgctttttttaaagaaggattagatgaagcagtcctacaagttttagggttaaagtctaaatcgagacctgaccttagcatttggcaagacgttagttcaaggtatcggaactctgagggattagtaaagattgctgttgttggaaaatatacaaaacttgaagatgcctataaatcactttcggaggctcttattcatggaggtttagctaataaaacaaacgtagaaattacatggttggagtctg

SEQ ID NO: 314841 - DNA, 847 bp, Unknown
  Bacterial polypeptide expressing nucleotide sequence isolated from the Sargasso Sea
caaaggtctctcttcagcttctctagcttatcttcttcaatctagaggttttaaagttagaattagaaaattagatccatatttaaatgttgaccccggcactatgagtccttttcaacatggagaagtttatgttaccgatgacggagcagaaacagatttagatttaggtcattatgaaagattttctggaatttcagctaaacgatcagataatattacaacaggtcaaatttatagcgatgtactaaagaaagaacgtaaaggaaaatatttaggaaaaacagtgcaagttattccacatgtaacaaatcgtattaaagaatttataaaaaatgatattagaaacgaggacttcgtaatttgtgaaattggtggaacagttggagatattgaaagtctaccttttgtagaagctattagacagttttcaaatgatattggtaaaaaaaattccttatttatacatttaactttagttccgtacatgaaagcttcagatgaaattaaaacaaaaccaacacaacattcagtaaaagaattaagaagtatcggtatacaacctgatataattatatgtagatgtgaaagaagtattccactagatcaaaagaaaaaaatatctttattttgcaatgtagatattaaaaatgtcattcaaaccattgatgtaaaaaccatttatgaagcaccaataagttttaataatgaaaaactcgataaacaagttcttgattattttaaagttaaatcaagaagaaatgttaaccttaatccttggagaaaaattaccaaaactgtacttcatcctaaaaaatacgtaaatataggaataataggaaaatat

SEQ ID NO: 314842 - DNA, 204 bp, Unknown
  Bacterial polypeptide expressing nucleotide sequence isolated from the Sargasso Sea
catggcgcgatatattttcgttaccggcggcgtggtctcatctttaggcaaaggattatcatctgcatcactggcgtacttattacaatctaggggttttaaagtaagaataagaaaacttgatccgtatttaaatgtcgatccaggtacaatgagtccatttcagcatggcgaagtttacgtaactgatgatggagcagaaac

SEQ ID NO: 314843 - DNA, 259 bp, Unknown
  Bacterial polypeptide expressing nucleotide sequence isolated from the Sargasso Sea
atgacaagatatgtatttatcactggtggcgtagtttcatctctaggaaagggaattgccgctgcctcccttgcttctttattcaaattgaggggttataaagtctctcttcaaaaactagatccctatataaatcttgacccaggaacaatgagtcctatccagcatggtgaagtttttgtgaccgaggatggtgcagaaactgacctagatttaggtcattatgagaggtttgttggcatacaaatgtcacaagata

SEQ ID NO: 314844 - DNA, 924 bp, Unknown
  Bacterial polypeptide expressing nucleotide sequence isolated from the Sargasso Sea
aaagaaaaaggcgactatttaggagcaactattcaagtaatacctcatgttacaaatgaaataaaaaattttataaacagtgatctaaaaaaagaagatatagtaatttatgaaataggaggaactgtaggtgatatcgagtcattaccttttttagaagcaataagacaaataagaaatgatagaaacacttcctcagcattaattcatatgacttatattccttatctcagttcagctggtgagttaaaaacaaaaccaactcaacattctgttaaggaacttcttaatgctggaattcaacctgatataattatgtgtagatcagaaatgccaattgacaaagaatcaatttcaaaaatatctttattttgtaatgtaaaaaaagactctgtcatacctgcattaaatgcaaaatcgatttatgaagtaccatcactatattcaaagcatggattagataaaactttgttaaaacacttaaattataatccaaaaaagcatcctttaaatttaaacccttgggataatttaataaaaaaaattaattcgctcagtcatgttgttacaattggagtagtcggtaaatatacaaatctaaaagatagttacaaatctttaaatgaagcgttaattcatggtggaattgaaaactcaactaaagttgatattagatggataaatgctgaaaaactaaataaaaaaaatatttttaataatttaaagaaatgtgatggaatattagttcctggtggatttggtcttagaggaatagcaggtaaaattgcggcaattaattacgctagagagaataatgttccctattttggaatatgtctaggtatgcaacttgctgtaatagaaatcgcgagaaatgtattaaatttaaaaaatgcaaattcatcagaatttaaatcaacatct

SEQ ID NO: 314845 - DNA, 883 bp, Unknown
  Bacterial polypeptide expressing nucleotide sequence isolated from the Sargasso Sea
attcaaccagacataataatttgtagatctcaacaatcaattccatacgatcaaagaaaaaaaatatctttattttgcaatgttcctatagaaaatgttatagaaacagttgatgtcagaacaatttatgaagctccaattagtttttttaatcaaaaactggataaacaagttttaaaatattttaaattaaaatctaaaaaaagagcaaatttattaccttggaaaaaaataactaaaattactttaaatacaaaaaagacaatcaatattggaataattggaaaatatgtaaatttaaaagatgcctataaatctttagatgaagcacttactcatggtggcatttcaaataaagttaaagtaaatttggtaagaattgaatctgataagttaaaagctaatgaaattaataaaaaacttaagaatatttcaggtttgttaattcctggtggttttggcaaaagaggaacggaaggaaaaatatctgcaattagatatgctagagaaagaaaaattccatttttaggaatttgttttggaatgcaaatggcaatcattgaatttgcaagaaataaattaaaaattaaaaaagctggatctactgaattagataaaaaatgttatcctgtaataggcttaataaatgaatggaaaaaagatggtaagattataaaaggtaccgataaaaacttgggcggaacaatgagattaggcttatacgaggcaaaattgagaaataattctgccataaaaaaaatttataaatctagttcaattaaagaaagacatagacataggtatgaagttaacaataatcttaaaagtcaatttgaaaaacaaggtttaattttttcaggaaatgtctcccagataatgaatt

SEQ ID NO: 314846 - DNA, 910 bp, Unknown
  Bacterial polypeptide expressing nucleotide sequence isolated from the Sargasso Sea
ttatgagagatttgttcggtgcggaatttcttccgatagcaactacacagcagggcaaatttatgaaaacgtcattcaaaaagaacgcagaggagattatttaggcgctacggtgcaggttataccccatgtaactgatgaaataataaggtgtatcaagagaggggcggccgatgcggaagtcgctctggtggaaatcggcggaaccgtgggcgatattgagtcgttgccttttcttgaagcgattagacaaatgcgtgttgaactaggaagtgaaaacaccttatttatccatctaactttagttccatacatagcctcagcaggcgaagtaaaaacaaaacctactcaacactccgttaaggaattacgatccatcggaattcagcctgacatcctcttgtgtagagctcaggaatcgatatcctcgtcagagcgaagaaaaattgcgttatttaccaatgtcggtgaaagagcagtaatttctgctttggatgcgtctaatatatatcaaatacctgagaatctgcatgctgagggattagatgatattgtggtagataaattaaatttaactgttcctcctgctaatttgaccaactggaagaaggtggtatctgccctagagaaccccagtaatcatgtttccatagcgatggtaggtaaatatgtagatcttaccgaagcttataaatctctgtctgagtctcttgtgcatgctgggattcacaccgatacaaaagttgaaatctgctatgttgatgccgaagcgatagaaaaaaatggtaccaatatactggaaaaagtcgacggaattctagttcctggtgggtttggcgaacggggaatagatggcaaggtgatggctgtaacttttgccagagaaaggcagataccatttctcggtatt

SEQ ID NO: 314847 - DNA, 374 bp, Unknown
  Bacterial polypeptide expressing nucleotide sequence isolated from the Sargasso Sea
aatgcattttgtttttattacgggtggtgtagcatcctctcttggaaaaggtatagcctcagcctctctagcaactctccttaaaagtagaaaatttaaagtcaggataagaaagttagatccttatttaaatgtggatccaggaacaatgagtccatatcaacatggagaagtttatgttactgatgatggtgcagaaacagatttagaccttggtcattacgaaagattcacaaatcagtctgctaaacaatcagatagtgtttcatcaggtaaaatctattcaaatgtccttatgaaggaaagaaaaggtgattatctaggatcaactattcaggttattcctcatgttactaatgaaataaaatctttta

SEQ ID NO: 314848 - DNA, 649 bp, Unknown
  Bacterial polypeptide expressing nucleotide sequence isolated from the Sargasso Sea
aatgcctaggtttatctttattactggtggtgttgtttcttcgctaggaaaaggtattgtctcatcttcaatagcatcattacttcaactgggaagttataatgttagagttaggaaattagatccttacttaaacattgatcccggcacaatgaatccatcgcaacacggagaagtttttgttacgcaagatggagctgaaacagatatggatttgggtcattatgagaggtttacaggaataatttcgaaaaaaagtgataatattacatctggaaaaatctactctgaagtccttagaaaagagagaaaaggagattatctcggctcaactgtccaagtcattccacatgttacaaatgaaattaaaaaatttattaaagcagatttgaaaaaagaggattttgtaatttgcgaaattggtgggacagttggagatattgaaggacttccttttttagaggcaataagacaattgagaaatgaattaggaagatcaaggacattatttatacacttaacactaattccatttataagagcagcgaatgaatttaaaactaaacctacacaacactctgttaaagagttattaagtgtgggtattcaaccagatttactggtttgcagaaccatagaaaacattagt

SEQ ID NO: 314849 - DNA, 670 bp, Unknown
  Bacterial polypeptide expressing nucleotide sequence isolated from the Sargasso Sea
gtcaacctgcgttatatcgactccgaagacatcgagaaccagggcactggcctgctcgaaggcgtcgatgccatcctggtgccgggcggcttcggtctgcgtggcgtggaaggcaagatcaagaccgtgcagtacgctcgcgagaacaagattccctatctgggcatctgcctcggcatgcaggtagcggtcatcgagtacgcccgtaacgtcgtgggttggactgacgccaactcttccgaattcgacatggccagtgctcatccggtggtgggcctgattaccgaatggcaggacgcaactggcgccaccgagcagcgcagtgaaagctctgacctgggcggcaccatgcgcctgggtgctcaggactgccaactgctgggcggctccaaggtacacgactgctacggcaaggacgtgatcgtcgagcgtcatcgtcaccgttacgaggtgaacaacaacctgctgccgaagctgaccgaggctggcctgaaggtcaccggccgttctggcgacggcgcactggtcgaagtggtcgaggcgccggatcatccgtggttcgttgcctgccagttccacccggagttcacctccacgccgcgtgacggccatccgctattcagcggtttcgtcaatgctgccctggcgcagaaagcgaagaaggcttaag

SEQ ID NO: 314850 - DNA, 898 bp, Unknown
  Bacterial polypeptide expressing nucleotide sequence isolated from the Sargasso Sea
acagatctagatcttggtcactatgaacgatttgttagatttcaagcatcaaaaaaaaataacttcactgcaggaaaagtttatgaaactgttattagaaatgaaagaaaaggaagatatcttggtggcacggtacaagtcattcctcatataacaaacgaaattaaaaagagaattaaggagggtggtcaaggaaaagacattgctattgtagaaatcggaggaacggttggagatattgagagtcagccatttgttgaagcaataaggcaaatggcattggatcttccatcatcttcatgggcttttattcatcttactttagtgccgtatataaaagcttcaggagaactcaaaactaagccaacacaacattctgtaaaagaactaagatcattgggaattggacctaatttattaatttgcaggtctgaacaagagttaccaaaagatgaaaaagaaaaaatagcattattttgctcagttcataaaaataatgttatttctatgcatgatgtagaaacagtatattcaattccaatactgcttaacaaacaaaaagcagatcagataattcttaaaaagttaaacattcattcaaaaaatcctaatttattagattggaaaggtgttgtgaaggcgaaacttcaaccaagaggtgaaacaaatatagcgtttgttggaaaatatactgaacttaaagattcatataaatcaattaacgaggctttagatcatgcaggtattaaaaataaaatcaaagtaaatataaattttgttgaggctgaaactattacaaaaagaaacgtcaaaactattttaaaagattgtgatggagttcttattccaggtggctttgggctaagaggagttgagggaatgataaatgctttgtaat

SEQ ID NO: 314851 - DNA, 406 bp, Unknown
  Bacterial polypeptide expressing nucleotide sequence isolated from the Sargasso Sea
taagaaatgttaccctgttattggattaatccacgaatggaacaaaaatggtaaagtttttaagggtacagaaaaaaacttaggtggaacaatgagattaggtctttatacagctaaattaaaaaataattctgccataaaaaagatttataaatcaaaagaaataaaagaaagacacagacatagatatgaagttaataataaccaaagatcaaaatttgaaaaaaaaggattaatattttcgggcatgtctccagataataaattaccagaaataattgaattaaaaaatcatccctggtttattggtgttcaatttcatccagagtttaaatcaagaccattatcaccacatccattatttaaatcttttataaaagcttcaaaaaattatcatggaaaatag

SEQ ID NO: 314852 - DNA, 846 bp, Unknown
  Bacterial polypeptide expressing nucleotide sequence isolated from the Sargasso Sea
ggatccatatttaaatgtagatccgggaacaatgagtccttttcagcacggtgaagtttttgtaactgacgatggggctgaaactgatttagatttaggacattatgagagatttacaaatatttcagctaaacaatctgacaacattacaacaggtagaatttatagtgatatcataaaaaaagagagaagaggaggttatcttggaaaaacagttcaagtaattccacatgttacagacagaattaaagagtttataaaaaaagatataacaaatgaagattttgtaatttgtgaaattggaggaacggttggtgatattgaaagcttaccatttttagaagctataagacagttttcaaatgataatggtagatcaaaatcattatttattcatttaacatttgttccatttttaaaatcttcagatgaaattaaaacaaagccaacacaacattctgttaaagaattaagaagtataggaattcaacctgatatagtgatctgtagatctcaacagtctattcctttagaccaaagaagaaaaatatccttattttgtaatgtggatattgctaatgttatagaaacagttgatgtaaaaactatttatgaagcaccaataagtttctttaatcaaaaattagataagcaagttttaaaattctttaaaataaaatctagaaaaagaccaaacttgcttccttggaaaaaaattacaaatacagttttaaaaacaaaaaaaacagtaaatattgctatcataggcaaatatgtaaacttaaaagatgcttataaatcacttgatgaagctcttacccatggtggaatatcaaataaagttaa

SEQ ID NO: 314853 - DNA, 842 bp, Unknown
  Bacterial polypeptide expressing nucleotide sequence isolated from the Sargasso Sea
gctcgtaggtctaaaagtaacaatgctaaaacttgatccttatatcaatgttgatcccggcactatgagtccgctccaacatggggaagtatacgtaactgctgatggaactgaaacggaccttgatttagggcactacgagcgatttgtaaaatcatgcagtaatctgactagaaacaataactttaccactggaaggatttatgcggatgttatcgctaaggagagacgaggggattacctgggagcaactattcaagttatccctcacattacagacgaaatcaaactaagaattgttgaagctagccaaggcttcgatgttaccctggtagaaatagggggaacggttggcgatatagaatctcaacctttcttagaggctgcgaggcagctgaaatttgagttaggaagtacctgcgcgctattgatgcatttgactttggttccctttatcgcaaccgcaggggaaactaagactaaacctacgcagcactctgttaaagaacttcgatcgataggacttcaaccagatattctagtcgtgcgatccgaccatgaaattccaaaaagcgccattgataaaatcgctctttttacaaatgtagagccaagtgctgttattcccctgactgattcagacactatttataagataccagtgatgttgaatgatgaagggctggatcagatcattctgaagaaatttggtctagacgcccagcttgcagatcttgatgactggaagagcgtggtgcagaaccaacttaaggcagaaaatgtagttaagttaaaaatggttgggaagtatatggatctttccgatgcctataagtctttga

SEQ ID NO: 314854 - DNA, 436 bp, Unknown
  Bacterial polypeptide expressing nucleotide sequence isolated from the Sargasso Sea
gttgactaaatttattttcatcacggggggtgttgtttcttctttaggaaaagggcttacttcggcatcactgggagctttacttcaatcaagaggttttacggtaaggttaagaaaattagacccctatctaaacgtagacccaggtactatgtctccatttgagcatggggaagtatttgttactgacgatggagcagaaacagacttggacttaggtcactacgagcgatttacaggcgtagcagctagaagtactgactcgatctcttctggaagaatatactcaacagtcttagaaaaagaaagaaaaggagattatttaggggaaactattcaggttattcctcatgtcactaatgagattaagtcgttcttggaaaaaaaagaagaagaggttgattttatgctttgtgaaatagggggaacaattggt

SEQ ID NO: 314855 - DNA, 904 bp, Unknown
  Bacterial polypeptide expressing nucleotide sequence isolated from the Sargasso Sea
atggcgcgatatatattcgttactggcggcgtggtatcttctttaggaaaaggtttatcatcagcatcactagcatatttactgaaatctcaaggttacaaagtgagacttagaaaaatggacccatacttaaatgtagatccaggcacaatgagcccatttcaacatggtgaagtctttgttacggatgatggcgcagagacagatcttgatcttggacactatgaaagattttcaaatatttcagcaaaaaaaaccgataatattacaactggtaaaatttatagcgatataattaaaaaagaaaggacaggaaaatatttaggaaaaactgttcaggtaattccacatgttacagatagaattaaagaatttattaagggtgatattaaaaatgaagactttgtaatttgcgaaattggtggaaccgttggtgatattgaaagtttaccttttgttgaagctataagacaatttgcaaatgatgtaggaaaaaaaagaagtttgtttattcatttaacccttgtgccttttttaaaatcatccgatgaaattaaaacaaaaccaactcaacattcggtaaaagagcttagaagtttaggcatacaacccgacatagtgatatgtagatctcaaaaatcaattccattagatcaaagaaaaaaaatatcgttattctgtaatgttccaatagacaacgttattgagacagttgatgttagaacaatttatgaagctccaataagttttcacaaagaaaagctaaatagacaagttttaaaatatttcaatatcagacctaaaaaaaatgcaaatttaacaccttggaaaagaataactaatacagttttaaattcaaaaaagattgtaaatatagctattattggtaagtacgttaattaaa

SEQ ID NO: 314856 - DNA, 556 bp, Unknown
  Bacterial polypeptide expressing nucleotide sequence isolated from the Sargasso Sea
atggcgcgatatatattcgtaactggcggcgtggtatcttctcttggcaaaggtttatcttcagcatctcttgcttatctattaaaatctcagggttttaaggtaaggataagaaaaatggatccttatctaaatgttgatccgggtacaatgagtccttttcaacatggtgaggtttttgtgactgatgatggatctgaaactgatttagatttaggtcattacgaaagattctctaacatatctacaaaaaaaactgataatattacaactggcaaaatctatagcgatatcattaagaaagaaagaaaaggaaaatatttgggtaaaactgttcaggttatacctcatgttactgatagaattaaagaatttataaaaggtgatattacaaatgaagattttgtaatttgtgaaatcggaggaacagtaggtgatatagaaagtttaccatttgttgaagcaattaggcaattttcaaatgatgttggaaggaaaaaaagtttatttatacatttaacacttgttccctttttaaagtcatctgatgaaataa

SEQ ID NO: 314857 - DNA, 334 bp, Unknown
  Bacterial polypeptide expressing nucleotide sequence isolated from the Sargasso Sea
atgcattttgtttttattacgggtggcgtcgcatcatctcttggaaaaggtatagcctcagcttctctagcaactcttttaaaaagtagaaaatttaaagtaaggataagaaagttagatccgtatttaaatgtggatccaggaacaatgagtccatatcaacatggagaagtttatgttactgatgatggtgcagaaacagatttagatctgggtcattacgaaagattcacaaatcaatctgctaaacaatcagatagcgtgtcgtcaggtaagatttattccaatgttcttctaaaagaaagaaagggagattaccttggttcaacaattc

SEQ ID NO: 314858 - DNA, 224 bp, Unknown
  Bacterial polypeptide expressing nucleotide sequence isolated from the Sargasso Sea
aatgcattttgtttttattacgggtggtgtagcatcttctttgggaaaaggtttagcgtctgcgtctcttgcctctttattacaattaagaaaatttaaagttagaataagaaaattagatccttatctaaatgtagacccaggcacaatgagtccatatcaacatggagaagtttttgttactgatgatggtgcagaaacagatttagatttagggacattat

SEQ ID NO: 314859 - DNA, 284 bp, Unknown
  Bacterial polypeptide expressing nucleotide sequence isolated from the Sargasso Sea
gttgaataattcgttagttaaaaaaatatataattctagaattatcaaagaaagacatagacatagatatgaagttaatattaattttaaaaatcagtttgaaaaaaaaggtctaattttttctggaaattcacctgataaaaacttgcctgaaataattgaattaaaaaatcatccatggtttattggcgttcaatttcaccctgaatttaaatctagacctttatcgccacatccattattctcatcttttataaaagctgcgaaaaatcataaaaaatgaa

SEQ ID NO: 314860 - DNA, 852 bp, Unknown
  Bacterial polypeptide expressing nucleotide sequence isolated from the Sargasso Sea
gtttacctgtgttgatgctaaaaggagtgataatgtaaccacaggtcgtatctattctgatgtaatagcccgggaaagacggggagattatctcggtgcaactattcaggtaatcccccacataacggatgctattaaagattttgttattgcagatattgacaaagaagatttcgtactatgcgaaattggcggtaccgttggagatatagagggtttgccatttcttgaagcaataaggcagctaggaaatgaaatgggtaaagaaagaacaatgtttgttcacctcactttgataccctacttagatgctgccggtgaattgaaaacaaaacctacacagcattctgtaaaagaattgcttaatgtaggtattcagactgatttattattgtgccgtactgaaagagaaattcctgattctgaaagaaaaaaagttgcgcttttttgtaatgtccgtgaggatgctgtagttcaggctttagatgtcgatactatctatagggttcccattaattatcacaatgctggtctagacgagcaggtttgcaagcattttggcctggataagactttaaaaccaaatttggaggattggaagactattgttagattatctacaaagccagagggtgctgtaaaaattggaataattggtaaatatacgggcttaaaggatgcttataaatctctttccgaggctttagcccatggaggaatagctaataatgttttggttgagctaaaatggatagatgccgaaagcttcgatgacgtagagttttctggtgaacttgacgatataaatggtattttagtgccaggtggttttggtgaaagaggttctaacgg

SEQ ID NO: 314861 - DNA, 250 bp, Unknown
  Bacterial polypeptide expressing nucleotide sequence isolated from the Sargasso Sea
ttgacaaagtatatctttgtaacaggaggagttgttagttcccttggaaagggaatcgtttcagcatctattgggaggatacttaaaaataaaggtataaaagtttccattatgaaattagacccctaccttaatgtggatcctggaactatgtctcctttccagcatggtgaagtctttgttactgctgacgggtctgaaactgatcttgatttaggacattatgaaagatttattgatgaagaattaa

SEQ ID NO: 314862 - DNA, 424 bp, Unknown
  Bacterial polypeptide expressing nucleotide sequence isolated from the Sargasso Sea
atggcgaaaactaagtatattttcatcactggtggagttgtttcctctctaggaaagggtattgctgcagcttcaattggagctcttcttgaggctcgtgggctcaaggtttccttattaaaattagacccttacataaatgttgaccctgggactatgagtccatttcagcatggagaagtatttgttactaatgatggaacagaaacggaccttgacttgggtcactatgaacgttttgttagatttgaggcttctagaaagaacaattttacagcaggtatagtttacgaatctgttattaagaacgaaagaaaaggaaaatatcttggcggtactgttcaagttatccctcatataactgatgaaattaaaagaagaattaaggcaggagcagctggaagcgatgttgctatagtagaaa

SEQ ID NO: 314863 - DNA, 532 bp, Unknown
  Bacterial polypeptide expressing nucleotide sequence isolated from the Sargasso Sea
atggcgaaaactaagtatatttttatcactggtggagttgtttcctctcttggaaagggtattgctgctgcctcaattggagctcttcttgaagctcgtggacttaaggtttccctattaaaattagatccttatatcaatgttgatcctggtactatgagtccatttcagcatggcgaagtctttgtcactaatgatggaacagaaacggaccttgacttgggacactatgaacgttttgttaggtttgaggcttctaaaaagaataattttacagcaggtatagtttatgaatctgttattaagaacgaaagaaaaggtaaatatcttggcggtactgttcaagttatcccacacataaccgatgaaattaaaagaaggattaaggctggagcagccggaagtgatgttgctatagtagaaattggtggaactattggtgatatagaaagtcagccatttgttgaagctattagacaaatgtctttagatcttccttcaaaatcaacatcatttgttcatttgactctag

SEQ ID NO: 314864 - DNA, 841 bp, Unknown
  Bacterial polypeptide expressing nucleotide sequence isolated from the Sargasso Sea
ttacaactatcagaccaaaaagtctcatgtgtaaagattgatccatatttgaattatgatgcaggaacaatgaatccaattgcacatggagaagtctttgttaccgatgatgggggagagtgtgatatggatataggaaattatgaaagatttctaaatcaagatattccaaaatcacataacattacaacggctcaaatttattcaagtgttatagaatctgaaagaaaaggagaatatctaggagcttgtgtacagattattcctcatgtaactgatgagataaaaaacagaattaagaaaattgctacagatgaagaattagaaatattggtagtagaatgtggaggaacagtaggagacattgaaagtcttccatttttagaatctttacgacagattagagttgaagaaggttccgagaatgtaatgtttgttcatgtaacattagcaccatcactagatgtagtaggagagcaaaagacaaaaccaacacagcatagcgttcaagaattaagaaggattggtattcaaccagatttattatgtgttagatgtactagcccacttcaagataaaaccagaaataaaatttcaatgtttacaaatgtgacaaataatgatgtattctcatgtcatgacgtagattcaattttccaagttccagaagtattgtatgatcaagggctagtagatgtaatattcaaaaaattcaataaaatgggatatgtcaatgcatcacaaaattgggacgtatggaataaaatagtaaattcattacataatgaaggagagtctatcaatattgctatggtaggaaaagtatgtcacattagctgat

SEQ ID NO: 314865 - DNA, 888 bp, Unknown
  Bacterial polypeptide expressing nucleotide sequence isolated from the Sargasso Sea
tcagcgtctttgggagcccttttgatctctcgaggctacactgttaggcttaagaagctagatccatatcttaatgttgaccctggaacaatgtctccttttgagcacggcgaagtttatgttactgatgacggagcagaaacagatttagatctgggacattatgagagattcaccggggttgctgcaaaagcttcagattctgtttcgtcaggaaaaatatattcgagtgttttagagaaggaaagaaaaggtgattatctgggcaaaacaattcaagttattcctcacgtaacagatgagataaaaaaatttattaatcaaggtgatgataaaatagacttcatgctatgtgaaattggtggtacagtaggagatatagagggattacctttttttgaagcaatacgccaactaggacaggagaaagataacaatggctgcctgtttatacatcttacattattaccatacataaaagcatctggagagttaaaaactaaacctacacagcactctgtaaaagaattaagatcaatcggtttaactcccgatattttaatttgtaggacggaaatagaaataccagaaaaagaaaaggaaaaactagccctcttctgcaacgtaaagccaaaaaatgtaattcctgcaatagacttaagatcaatatacgaggcccccctctcttttcaccaaagcggcttagacactgccgttttaaacgtcttagacattaaacccttagatgacccaaatttatcactttggaaagacgtaaagcgaagaataactagtccagaaggtgaggttcgaattgctatagtagggaaatatactcagctcgaagatgcatacaagtctatatctgaagccctgacacaaagtggc

SEQ ID NO: 314866 - DNA, 577 bp, Unknown
  Bacterial polypeptide expressing nucleotide sequence isolated from the Sargasso Sea
catggcgcgatacattttcgttactggcggcgtggtctcatctttaggaaaagggttatcatctgcatcacttgcatatttattacaatctcgaggatataaagttagaattagaaaacttgatccatatttaaatgtagaccctgggactatgagcccatttcaacacggtgaagtttttgttactgatgatggcgctgaaacagatttggatttaggacactatgagagattttcaggaatatcagcgaaaaagtcagataatataactacaggcaaaatttatagcgatgttttaaaaagggaacgacagggaaaatatttaggaaaaaccgttcaagttatccctcacataacaaatagaattaaagaatttattaaaaatgacgttgctaaagaagacttcgttatttgcgaaataggaggcaccgtcggtgatatcgaaagtttaccttttttagaagctataagacaattttcaaatgaaataggtaaaaaaaatactttattcattcacctaactttagttccttacatgaaggcctctgatgaaataaaaacaaaaccaacccaacat

SEQ ID NO: 314867 - DNA, 442 bp, Unknown
  Bacterial polypeptide expressing nucleotide sequence isolated from the Sargasso Sea
catgaagaccaagtacatcttcgttaccggcggcgtggtttcctctctcggcaagggtgtggccgcggcttccatcgggcttattctcaaatctcgcggcttcaaggtcaccttgatgaagctcgatccctacgtcaacgtggatccgggcaccatgtcgccgtatcagcacggtgaggtctacgtgaccgacgacggtgccgagaccgatttggatctcggacactacgagcggttcacccatacgatcaccaccaagcaccataactacaccaccggcaaaatttatgacgcggtgttgaagaaggagcggcggggagactacctgggtaagaccgtgcaggtgatcccgcacattaccgacgagatcaaagccgccatgcggcgactgggcaatggccatgatgtggtgattgtggagatcggcggcaccgtgggagat

SEQ ID NO: 314868 - DNA, 298 bp, Unknown
  Bacterial polypeptide expressing nucleotide sequence isolated from the Sargasso Sea
tcttatgatgccaaattacaaaaaaattcaaagatcagaaaaatttataagtctcggttaattaaagaacgacatcgtcatagatatgaggtgaatattgcttatagagaaaaatttgaaaaaaaaggtatgattttttcaggtttatcacctgataatcaattacctgaaattattgagcttaaaaatcacccttggtttattggcgtacagtttcacccagaatttaaatctagacctttatcgccccatcctttattctcttcatttatcaaagcagcaaaaaatcataaatgaa

SEQ ID NO: 314869 - DNA, 931 bp, Unknown
  Bacterial polypeptide expressing nucleotide sequence isolated from the Sargasso Sea
atggcgcgatatgttttcgttactggcggcgtggtctcctctttaggaaaaggtctatcttccgcatcattaggatcattattacagttaagaggttttaaagtaagagttagaaaactagacccttatttaaacgtagatccaggaacaatgaatccatttcaacacggcgaagtttttgtaaccgacgatggcgctgaaactgatttagatattggacactacgaaagatttacaggaatttctgctactcaatcagataatatcacaaccggtggaatctatagcgacataattcaaaaagaaagaagaggagattatttaggtggtacagtacaagtagtccctcacgttacagatcgtattaaaaaatttattcatcaagatataaaaaatgaagattttataatatgtgagattggtggaactgttggtgacattgaaagtttaccttttttagaagcaataagacaattttcaaatgatgtaggaaaaaaaaatagtttatttattcatcttacattagtaccttttttaaaagcctcaggggaattaaaaacgaaacctactcaacattcagttaaagaattaagaagtttaggcattcaacctgatataattatttgtagatcagaaagagaaattccaaagacagaaagaaaaaaaatatcattattttgtaacgtaccgataaataatgttatcgaaactgtcgatgtaaaaactatatatgaggcaccaattagttttcataaagaaaaattggatgaaagagttttatcttattttaatattaaaagtaaaaaatcaccagatttgagtaaatggaaaaatattacttccagagttttaaatccaaaaaaagatgtaaacataggaattataggaaaatatgttgatcttaaagatgcttacaagtctttagatgagg

SEQ ID NO: 314870 - DNA, 919 bp, Unknown
  Bacterial polypeptide expressing nucleotide sequence isolated from the Sargasso Sea
tgagcgtttatttcgcacccgcatgaccaagcgcaacaactttactaccggccgtgtatatgaggaagtgttaaagcgcgagcgtcgcggtgattaccttggtgcaactattcaggttatccctcatatcaccaatgaaattaagcgccgcgtaattgaaggtgctgaaggtcatgatgtagctattgttgaagtgggcggaaccgtaggtgacatcgagtcacaacctttcttggaagcaattcgtcagctaggtaccgaagtaggccgtgaacgcgctatgttcatgcacctaacgcttgtaccttatatgccagcatcaggtgaagtaaaaactaagcctacgcagcactcggtaaaagagcttcgctcaattggtattcaaccagacattctcgtttgtcgttcagtaggtgcattgccggctagtgagcgctcgaaaatcgctctattcacaaacgttgctgacaaagccgttatttctttgaaagacgtagacagcatttaccgcatccctgctgcacttaaagcacaaggcatggatcagctagttgtagaccgcttcggtcttgagtgtgaagaagccgacttatctgagtgggaacaagtactttacgcagagtcaaaccctactgcagaagttaacattggcatggtaggcaagtatgttgaattacctgacgcttataagtctgttaatgaagcgcttaagcatgctggccttaaaaaccgtctgactgtgaacatccaccacattgactcacaagacgtggaaagcaaaggtacccaaattctagaacaacttgatgctatcttagtacctggtggctttggtgagcgcggtatagaaggcaaaattgatgctgcgcgttatgctcgtgaaaacaaagtcccttatcttggcatttgcttaggtatg

SEQ ID NO: 314871 - DNA, 633 bp, Unknown
  Bacterial polypeptide expressing nucleotide sequence isolated from the Sargasso Sea
aatgcattatgtttttattacgggaggagttgcttcatcactaggtaaaggtatagcctctgcagctattgcaactttgctaaaatctagaaaatttaaagttagaataaggaagcttgatccatatctaaatgttgatcctggtacaatgagcccttatcagcatggtgaggtatatgttacagatgacggagcagaaactgacttagatctgggccattatgaaagatttactaaccaatctgcaaaaaaaagcgacagtatttcttcaggtaaaatttattcaaatgttttaaataaagaaagaaagggtgtttatcttggagcaacaattcaagttattcctcatgtaacaaatgaaataaaaaattttataaatagtgatctcaacaaagaagacattgtgatttatgagatcggaggaacagttggagatattgagtctcttccttttttggaagctataagacaaattagaaataatcgtaatatatcatctgcattaattcatatgacatatattccatatttaagttcagccggtgaattaaaaactaaaccaactcaacactcagtaaaagaacttcttaatgctggtattcaaccagatataattatgtgtagatcagaaag

SEQ ID NO: 314872 - DNA, 580 bp, Unknown
  Bacterial polypeptide expressing nucleotide sequence isolated from the Sargasso Sea
catggcgcgatacattttcgtaactggcggcgtggtttcatcactaggcaaaggtctctcttccgcttctttagcgtctttgcttcaattaagaggctacaaagtaagagtaagaaaattggatccatatttaaatgttgatccaggaaccatgaatccatttcaacacggagaagtttttgttacggatgatggcgctgagactgacttagacattggtcactacgagagatttacaggaatttctgctactcaatcagataatattaccaccggaggtatttatagccacattataacaaaagaaagaaaaggagattatcttggtggtaccgtccaagttgttcctcatgtaaccgatagaataaaaaaatttatatctcacaaggttaaagatgaagattttattatttgtgaaattggaggaacagttggtgatattgaaagcctacctttccttgaagctataagacaattttcgaacgacataggaaaaaaaaatagtttatttattcacttaactttggttccatatttaaaagcatctggagaacttaaaaccaaaccaacgcaacattca

SEQ ID NO: 314873 - DNA, 793 bp, Unknown
  Bacterial polypeptide expressing nucleotide sequence isolated from the Sargasso Sea
atgaatgaggattttgttatttgtgagataggaggaacggtcggtgatatagaaagtttaccgtttttagaagcaattagacaattttcaaatgaaattggaaaaaataaaactatgtttattcatttaactttggttccatttttaaaatcctctgatgaaataaaaactaagccaacacaacattcagttaaagagctaagaagcattggaattcagcccgatatagtaatttgtagatctcaacaatcaataccatttgaccaaagaaaaaaaatatctttattctgtaatgtaccaattcataatgttattgaaactgttgatgtaagaactatttatgaagcccctataagtttttataatgaaaaactcgataaacaagtattaaaatatttcaaattaaaacctaaaaaaaaagtaaatctgcaaaattggaaaaaaattaccaagactgttcttaatactaaaaggacagtcaatattgcaataataggtaaatatgtaaatttaaaagatgcttataaatctttagatgaagctttaattcacggtggaataaagaataatgtgaaggtaaatttaatcagatttgaatctgacaaaataaaaaaaaatcaaattaaaaaaatttttaaaaatgtatcaggactgctaattccaggaggctttggcaaaagaggcactgatggcaaaatagctgcaattaactatgcaagaaaaaataaaattccatttttaggtatctgttttggtatgcaaatggcaatagtagagtttcaaaaaatgtact

SEQ ID NO: 314874 - DNA, 623 bp, Unknown
  Bacterial polypeptide expressing nucleotide sequence isolated from the Sargasso Sea
taaaaaagttttaaagaactcagatgctattcttgtgccaggagggtttggcaatagaggaattgaaggcatgattttagctgcaaggtttgcaagagaaaacaaagttccatattttggtatctgcttaggccttcaaatagcaattattgagatggctagaaatttacttactttaaaagatgcaaatagtacggagtttaagccacgaacaataaataaagttatatcacttgttacagagtggaaaaataaggatggaacaattgaaaaaagaaacaaagattctgaaaagggtggaaccatgagattaggtgctcagaaggcatcattattaaaaggttcattagctagatctttatataaaaacaaaactatatttgaaagacatagacatagatatgaagttaatccagattatgtgccaacattagaaagtaaaggtttgattgtctcagctagatcagaggttcacaatcttgttgaaatgatcgaattaaagaatcatccatggtttttagggtgtcagtttcatccagaatttacatctaaacctaaaactggtcatccattatttaacgatttcattaagacagctgtaaaattaaaggataaaaaatgaa

SEQ ID NO: 314875 - DNA, 592 bp, Unknown
  Bacterial polypeptide expressing nucleotide sequence isolated from the Sargasso Sea
atggcgcgatatattttcgttactggcggcgtggtttcatctttaggcaaaggattatcatcagcttcgttagcttacttattacaatcaagaggttacaagataagaattagaaaattagatccttatttaaatgttgatcctggtactatgagtccatttcaacatggagaagtttatgtgacaaatgatggagctgaaacagatttagatttaggccattacgagagattttctggaatttcagcaaaaaaatctgacaacataactacaggtaaaatttataatgatgttttgaaaagagagcgacaaggtaaatatttaggtaaaactgttcaggttattccacatattactaatagaataaaagaatttattaaaaacgatgtttcaaaagaagactttgttatttgtgaaataggaggaactgtcggagatatagaaagccttccttttttagaggctataaggcaattttcaaatgagataggaagaaacaacactttgtttattcatcttactttagttccttatatgaaagcttcagatgaaattaaaacaaaaccaacccaacattctgtaaaagaataag

SEQ ID NO: 314876 - DNA, 535 bp, Unknown
  Bacterial polypeptide expressing nucleotide sequence isolated from the Sargasso Sea
aaaatagaagcgataaaacatgcaagaatgaacaaaattcctttccttggaatatgttatggaatgcaaatggcaattattgaatttgcaagaaaccaactcaatttaaaaaatgctacttcaagtgaatttgataaaaaaggtcttccgattattggtttactaaacgaatggtctaaagatggtaaaactattaagggtactgataaagatcttggtgggacgatgagactaggatcttatgatgctaaattacaaaacaatacaaagatcagaaaaatttataactctaagttaattaaagagcgacatcgccatagatacgaggttaatattgcttatagagaaaaatttgaaaaaaaaggcatgattttttcaggtttatcacctgataatcaattacctgaaattattgagcttaaaaaccacccatggtttattggggtacagttccacccagaatttaaatctagacctttatcgccccatcctttattctcttcatttatcaaggcagcaaaaaatcataaatgaa

SEQ ID NO: 314877 - DNA, 304 bp, Unknown
  Bacterial polypeptide expressing nucleotide sequence isolated from the Sargasso Sea
gagactgggatcatatgatgctaaattacaaaacaatacaaagattagaaaaatttataagtctaagttaattaaagaacgacatcgtcatagatacgaggtgaatattgcttatagagaaaaatttgaaaaaaaaggtatgattttttcgggtttatcacctgataatcaattacctgaaattattgagcttaaaaatcacccttggtttattggtgttcagttccacccagaatttaaatctagacctttatctccccatcctttattctcttcatttatcaaggcagcaaaaaatcattaa

SEQ ID NO: 314878 - DNA, 250 bp, Unknown
  Bacterial polypeptide expressing nucleotide sequence isolated from the Sargasso Sea
atttataatcagcaattaatttctgaaagacatcgacatagatacgaagttaataagaaatttatatctaaatttaataataaaggatattattttagtggaatgtcaccagatggattattacctgaagttttagaaagtaaaaatcacaaatggtttataggagtccaatatcatcctgaactaaaatcaagacctttaaaacctcatcctctttttgtttcatttattaaaaattgtaaaaaatgat

SEQ ID NO: 314879 - DNA, 410 bp, Unknown
  Bacterial polypeptide expressing nucleotide sequence isolated from the Sargasso Sea
tgaatttgacaaaaaaggtttacctataataggtttaatgaatcaatgggataaagatggaaaaaaaattaaaggtactgacaaaagtctaggtggtactatgagacttggatcatatgatgcgaaacttatgaaacattcactgattcaaaaaatttatggaaaaaatttaatcaaagaaagacatcgtcatagatatgaggtaaatattgattttaaagaaaaatttgaaaaaaacggcatgaatttttcaggtttatcccctgatggcaaattgcctgaaattgttgagttaaaaaatcatccttggtttattggtgttcaattccatccagaatttaaatctagacctttagctccacatcctttattctcatcttttatcaaggcatcaaaaaatcatagatgaa

SEQ ID NO: 314880 - DNA, 145 bp, Unknown
  Bacterial polypeptide expressing nucleotide sequence isolated from the Sargasso Sea
atggcgcgatatatatttgtcactggcggcgtggtttcctcccttggtaaaggtctctcttctgcatcacttgcttatttgttacaatcaagaggttacaaagttcgtttaagaaaattagatccttatttaaatgtagatccag

SEQ ID NO: 314881 - DNA, 598 bp, Unknown
  Bacterial polypeptide expressing nucleotide sequence isolated from the Sargasso Sea
atgacgcgatatatattcgttactggcggcgtggtatcttctttaggaaaaggattgtcatctgcatcattggcttacctattacaatctagaggttataaagttagaattagaaaactagatccatatttaaatgtagatccaggaacaatgagtccgtttcaacacggtgaagtttttgtaactgatgatggagctgaaacagatttagacttaggtcactatgagaggttttcaggaatatcagcaagaaagtcagacaatatcactacaggcaaaatttataatgatgttttaaaaagagagcgacaaggtaaatatttagggaaaactgttcaagttattccccatataacaaatagaataaaagaatttattaaaaacgatgtagctaaagaagattttgttatttgtgaaataggtggaacagttggagacatagaaagcctaccttttttagaagcgataagacaattttcaaatgaagtttcaaaaaaaaatactttatttatacatctaactttagttccttatatgaaagcatccgatgagatcaaaacaaaaccaactcaacattcagttaaagaattaagaagca

SEQ ID NO: 314882 - DNA, 310 bp, Unknown
  Bacterial polypeptide expressing nucleotide sequence isolated from the Sargasso Sea
gtttacccatgtagattgacaaataatacaactggaaaaaacttgtatgatgaacatgttatttatgagaggcatcgacatagatatgaatttaataattactacaaacaaagttttttaaattccggatacaaaattagtggtacatcaccagatggcagattagttgagttaattgagttagaaaatcatccttacttcttggcatgtcaatatcatcctgagtttttatcaagacctgggaaacctcatcctttatttaaaggtttaataaaagcctctcaagaaaagttaactcaatcaaattaat

SEQ ID NO: 314883 - DNA, 207 bp, Unknown
  Bacterial polypeptide expressing nucleotide sequence isolated from the Sargasso Sea
tatgacgcgttatatatttataactggaggcgttgtttcctcactcggtaaaggaatagcttcggcgtccttgggagcaatcttagaggcgcgcgggcttaacgtaacactattaaagcttgatccttacatcaatgttgatcccggaacgatgagtccatttcagcatggcgaggtttatgttaccgaagatggaaccgagacaga

SEQ ID NO: 314884 - DNA, 835 bp, Unknown
  Bacterial polypeptide expressing nucleotide sequence isolated from the Sargasso Sea
aaaaaagaaagaagaggagattatttgggtggaacagttcaggtcgtacctcatgtttctgaccgtatcaaaaaatttatttctcataacgtaaaaaatgaagactttataatttgtgaaattggcggaacagtaggggacatagagagtttaccgttcttagaagctattagacaattttcaaatgacacaggaaaaaaaaatagtctgtttatacaccttactttggtaccgtatttaaaagcttcaggagaattaaaaacaaagccaacacaacattcggttaaagaactaagaagcttaggtattcaacccgatataattatttgtagatccgaaagagagattccgaaaatagaaagaaaaaaaatatcattgttttgtaatgttccgatagcaaatgttattgaaacagttgacgtaaaaactatttatgaggctccaattagctttcataaagaaaaattagatgaaagagttctttcatattttaatattaaaaataaaaagaaacctaatttatcaagatggaaaaatataacctcaaaagttttaaacccaaaaactgatgtaaatattggaattataggaaagtatataaaccttaaagatgcttataaatctttagacgaagccctaattcacggaggtatttctaataatgttagagtaaaactggaaagaattgactctgaacatctagacccgaaaaaaattaagcctttacttaagaatatatctggagttttaataccaggcggttttggaaaaagaggcacggaaggtaaaattgctgccataaaatacgcaagattgaataatatacctttctttg

SEQ ID NO: 314885 - DNA, 538 bp, Unknown
  Bacterial polypeptide expressing nucleotide sequence isolated from the Sargasso Sea
atgacgcgatttatatttgtaacaggcggcgtggtttcatctcttggtaaaggcttagcttctgcttctttagcttctttacttcaacatcatggctataaagtaaggattagaaaattagatccatatcttaatgttgatccaggcacaatgagtccatatcagcatggtgaagtttatgtaactgatgatggtgcagaaacagatttagaccttggtcattatgaaagattcactggcgtagtttctaaaaaatccgacaatattacctctggaagagtatatcaaaaaattataacaagagagagaaaaggtgaatacttgggtgctacagtacaagttattccacacgttacaaatgagattaaagaatttatttcaaacgatcttgagcaagaagattttgtgatatgtgagataggtggaacaattggtgatattgaaagcttgccttttatagaagctattagacaatttcataatgataatggacatgaaaattcattatttattcatgttactttggtaccatacattg

SEQ ID NO: 314886 - DNA, 454 bp, Unknown
  Bacterial polypeptide expressing nucleotide sequence isolated from the Sargasso Sea
atggcgcgatatgtatttgtcactggcggcgtggtatcatcacttggtaaaggtctttcttccgcttcactagcatcattactacagcttagaggttttaaagttagagtaagaaaattagatccatatttaaatgtcgatccgggtacgatgaatccttttcagcacggggaagttttcgtaactgacgatggagctgaaacagatttagatattggacactacgagagatttacaggaatttctgctacacagtctgataatattactactggaggaatttacagtgatattatacaaaaagaaagaagaggagattatttaggtggaaccgtacaggtagtccctcatgtgaccgatcgaattaaaaagtttatttcacaggatgtaaaaaaagaagattttgtaatttgtgaaattggaggtactgttggagacatcgaaagcttacctt

SEQ ID NO: 314887 - DNA, 928 bp, Unknown
  Bacterial polypeptide expressing nucleotide sequence isolated from the Sargasso Sea
atcataaaaaaagagagaagaggaggttatcatggaaaaacagttcaagtaattccacatattacagatataattaaagattttataaaaaaagatatatcaaatgaagattttgtaatttgtgaaattggaggaacagttggtgatattgaaagtttgccatttttagaggctataagacagttttcaaatgataatggaagatcaaaatcattatttattcatttaacatttgttccttttttaaaatcttcagatgaaattaaaacaaagccgacacaacattctgttaaagaattaagaagtataggaattcaacctgatatagtaatctgtagatctcaacagtctattcccttagatcaaagaagaaaaatatccttattttgtaatgtggatattgctaatgttatagaaacagttgatgtaaaaactatttatgaagccccaataagtttctttaatcaaaaattagataagcaagttctaaaattctttaaaataaaatctagaaaaagaccaaacttgcttccttggaaaaaaattacaaatatagttttaaaaacaaaaagaacggtaaatattgctatcataggcaaatatgtaaatttaaaagatgcttataaatcacttgatgaagcgcttacgcatggtgggatttcaaataaagttaaagttaaagtagtaagaattgaatcagataaacttaaatcaaaagaaattaaatcaaaattaaaaaatgtatcaggaatattgataccaggaggatttggaaaaagaggaacagaggggaaaattgaagcaattaaatatgcaagagagagaaaaataccttttctaggtatttgttttggaatgcaaatggcaatgatcgagtttgcaagaaatattttaaaaattaaaaaagctggctctagtgaattagata

SEQ ID NO: 314888 - DNA, 664 bp, Unknown
  Bacterial polypeptide expressing nucleotide sequence isolated from the Sargasso Sea
tatctaggagcaactattcaagtaattcctcacattactgatgaaattaaaaaaagaataaaactagtaaatgataaaaataaatatgatgttgttatttgtgaagtgggcggtacagttggtgatattgaaagtttaccatttatggaatctattaggcaaatgtctgtagaagtaggttaccataaccatttaattgttcatgtaacacttgttccttatatacaagcaagtgaagaactaaagactaaacctactcaacattcagtaatgaaattaagagaaataggtttgagtccagatataattatgtgtagatcaaactacactttaactgaatctgttgcagaaaaaattgctttattttgtaatgttccaaaaagccatgtaatagaagggaaagaagttaagagcatatatgaagtgccacttgtttttgataaacaaaagatggggcaaataattatgaatagattagaattagatggtcaaccacaagttaccaaattaaataattttatttccaaatataaaaatccttcaaaagaagtgaatattgcaatgtgtggtaagtatactgaattaccagatgcatataaaagtgttttagaggcatttatacatgcagatgttgaaaatgacactagagttaaagttagctgga

SEQ ID NO: 314889 - DNA, 649 bp, Unknown
  Bacterial polypeptide expressing nucleotide sequence isolated from the Sargasso Sea
agaatagactcagagaatctaaggccggaaaacattaagccgttattaaaagaggtaacgggcgtgcttattccaggggggtttggaaaaagaggtacagaggggaaaattgctgccataaaatacgcaagattgaacaatataccattctttggtatttgctttggtatgcagatggcagtaattgaagctgctagaaatttattaaatattaaaaatgcttctacaagtgagtttggtaataattgtaccccagtcgttggattacttgaggagtggcaaaaaggaaagaaaaaaattaaaggaacaaaagaaaatttgggtggaacgatgagattaggtttatatgatgcagtattaaaagataactctttaatatccaaaatttattctgaaaagaaaattaaagaaagacatagacatagatacgaggtaaatatcaaatataagaatgattttgaaaaaaaaggcctaattttttctgccttatctccagacggaactctacctgagataatagaactaaaaaatcatccttggtttgttggcgttcaatttcatcctgaatttcgatcaagaccttttacaccacacccgctattttcatcttttattaaagcagcaggcgttaatgggagaaaagattaat

SEQ ID NO: 314890 - DNA, 673 bp, Unknown
  Bacterial polypeptide expressing nucleotide sequence isolated from the Sargasso Sea
agcaagggagttgagatcgtatatatcgaatccgaagatattcaagagaatggcaccgattgtctttctaaaatggatgccattctgattcctgggggatttggagatcgaggcatagagggaatgattcaatccattgaatatgcaagaaagaatgatatcccttttcttggtatctgtcttggaatgcaagcagctgtaattgaatatgctcgaaatgttttggatcataaggatgcaaatagcactgagtttaactctagtacttctgcacctgtcattgcaatgattacagagtggatgaatgatgacggctcaaaagagaatagagacgaaaactcagatcttggagggactatgagacttggtgcacaagagtgtttgtttacaaaaggaaccaaggcaaaagatatatatggcgcagattccgttgttgaaagacatcgacatcgctatgaatttaataatagatatcgcgaagagcttgaaaaaaatggtttggtattttcagggttctcaaaggatggcttggctgaaatgattgagattaaagatcatccctggtttattggctgtcaattccacccagaattcacatcttcaccccttgcaggccatccattattttattcttttatcaaagctgctgtagaatactctaaaaaggactaat

SEQ ID NO: 314891 - DNA, 928 bp, Unknown
  Bacterial polypeptide expressing nucleotide sequence isolated from the Sargasso Sea
aaacgtaaaattgcattgtttacgaatgttgaagcgcgtgcagttgtagtatgtaaagatgcaaaaacaatttatcaaattcctcgtaacttctccgaacaaaaggttgacgatttaatttgtgaacgttttggttttaatgatcttcctgaagcagatcttgaagattgggacaatgtggtagaagcattattaaatcctgaatataccgttcgcgttgcgatggttggtaaatacgttgaattgccagatgcatataaatctgtaaatgaagcgcttttacatgcaggtattcaaaatcgcgttaaagttcaaattgactacgtcaatgctgaagatctagaacaacaagacatcaatgttttgagtacggctgatgcaattcttgtaccgggtggttttggtgagcgcggtacagaagggaaaatgcgtgcgatccaatatgctcgtgaaaacaagattcctttcttaggtatttgtttaggcatgcaattggctgtaattgaatatgctcgtaatgttgctggtattccagaagcaagttctactgagtttaatcgttctacaaagtctccattaattggcttaattactgaatggttagatgaacgtggcgaattacaacagcgtagtcttgaatcagacttaggcggaacgatgcgtttaggtgctcaaaagtctgaattggttgaaggcacaaaaacacgtgaagtttatggtaaagctgaaattactgaacgccatcgccatcgttatgaaatgaatgatcgtttcattcctacgcttgaagaagcgggtatgaaaatttcaggttattcttcagtacagcatttagttgaaactgtagaaattcctgaacatccttggtttattgctgtacaattccatccagaatttacaagttcaccacgagatggacatccattat

SEQ ID NO: 314892 - DNA, 415 bp, Unknown
  Bacterial polypeptide expressing nucleotide sequence isolated from the Sargasso Sea
tgagtttgataaaaaaggaatttctattattggattaatgaatgaatggaataaagagggtaaaaaaatcaaaggtacggataaagatcttggagggacaatgagattaggttcttatcatgctaaattaaaggataattctttagtaaagaaaatttacaaatcaaagactattaaagaaagacatagacatagatatgaagttaatatttcttataaagagaaatttgagaaaaaaggtctgattttctcaggtatatcacccgataataaacttcccgaaattattgaattaaaaaatcatccttggtttataggtgtgcaatttcatccagaatttaaatctagaccttttaatccacatccactattttcatcattcatcaaagctgctaaaaagagatatgcaaaataa

SEQ ID NO: 314893 - DNA, 424 bp, Unknown
  Bacterial polypeptide expressing nucleotide sequence isolated from the Sargasso Sea
aatgtcaaaatttgtatttgtcactggaggagtggtttctagcattggtaaaggaatcgtagctgcaagcttaggaagattattaaagtctagaggatatagtgtttcaatattaaaactagatccatatctaaatgttgatccaggaacaatgagccctttccaacatggagaagtatttgtaactgaagatggggctgaaaccgatctagatttaggccactatgaaagatttactgatactgcaatgactaggttaaatagtgtgactacgggatctatctatcaagcagttatcaataaagaaagaagaggtaattatgacggtggaactgtgcaagtaatacctcacataacaagagaaataagagaaagaattcatagagtagccgctaacagtaatgcagatattattattactgaa

SEQ ID NO: 314894 - DNA, 730 bp, Unknown
  Bacterial polypeptide expressing nucleotide sequence isolated from the Sargasso Sea
tgtgggaagtatactgagctgatcgattcatataaaagtgttcttgagtcatttgtccatgctggggtggaaaataatacgcgggtaaatattaaatgggtgaaaactgaaaaaattattgatgataaaactgcaaggaggcaatttaaaaatgtagatgggatattgatcttgccagggtttggatctcgaggcggggaaggtaaaattatgtcctctaaatatgctcgtgagaataacataccatttttaggaatatgccttggaatgcagtgtgctatcattgattttgccagaaatgtttgcggtcttgaaggtgcaaattcgactgagtttaacaaaagaacaaaacacccagtgatagacctgatggagtcacaaagagcaatcaaaataaaaggtggtacgatgagactcggagcgtatgattgcaatattaaaccaggcacgaaggcatttgccgcatatcgctcaaagaatgtatcagaaagacatcgccatcgtttcgaggtcaataaccgctatagaagaaagcttcaaaaagaaggtcttattatttccggtgttaatgaagaccttggtgtcgtagagacaatcgagatagccgatcatccttggtttgtagcaggccaatttcatccagaattaaagagcagggtgaataaatcccatcctctttttagagaatttattaaagcatcaaaaaaatacaataaacgcaggagctaga

SEQ ID NO: 314895 - DNA, 916 bp, Unknown
  Bacterial polypeptide expressing nucleotide sequence isolated from the Sargasso Sea
tgtaggagacattgagtcacttccttttttggaagctatacgtcagttcaggcatgatcaaggaaaagaacacaccttgtttgttcacctcacactgatcgtgcaaacttcagaaatgaaaaccaagcctacccagcatagtgtcggtaaactcagggaaattggaatacaacctgatatcctcatctgccgaacgcctgaaatactttcggaaaaactacgaagtaaaatttctttattcactaatgttcctgaagattctgttgtgaacggccttgatgtcgaatcagtgtatgaagtacccctaatgtttcaccaacagaatctagataacatcatcatgacttatttgcagatgtggacaggaagcccaaaactgcagccttggattgatttgattgaaaaatataataatcctcaagacgaggtagaaattgcttttattggtaaatatgtcgcacatcttgactcttatgaaagccttaaggaagccctgatacatggaggtattgcaaacagactaaaagtaaagcttcactacattgattcagaattcttaacccctgaaaatgcctttgaaaaattgaaaaaaatggatggtgtgctggtagctccaggatttggtgagcgtggtatggaagggaaagttattgccatccagattgcacgtaaaggcaatattcctttcttcggaatttgtcttggtatgcagatggcgatagttgaatttgcccgcaatgttataggaattgcaggagcaaattcaggggaatctagacctggtcacgaggaaaatgtgatcgatttgatgccagaacaggagggacatctggaaacgggcggtaccatgcgtctaggtagtcaaaatacggtccttgaaaaaggatcaagaattgccagaatgtataataaaact

SEQ ID NO: 314896 - DNA, 364 bp, Unknown
  Bacterial polypeptide expressing nucleotide sequence isolated from the Sargasso Sea
taaggaagttagagacgaaaattcagatctagggggaacaatgcgtcttggagcgcagaaatgcctccttgagcctggttccatagcacaaaaatgttattgctctagtgagatatttgaaagacatcgacatcggtatgagtttaataataattacctagaactcttgtcggaggcaggcctgaaatttgttggtaaatcttctgatggaatgcttgtggaggtggttgagattccaaatcatccgtggttcgttggttgtcagtttcatcctgaatttacttcaaaaccaatagagggacatcctttgtttactgggtttattaatgctgctatcacagacgatgaatctaaatccatttaa

SEQ ID NO: 314897 - DNA, 863 bp, Unknown
  Bacterial polypeptide expressing nucleotide sequence isolated from the Sargasso Sea
aaagactaaacccacgcaacattctgttaaagaattattaaatgcaggtattcaacctgatataattatgtgtagatccgaaaaaaatatagataaagatgctttggaaaaaatttctttattttgtaatgttaaaaaagaatcagttattccagctatgaatgcatcatctatttatgaagtaccttctttatattacaaagctggtttagatacatctttactaaatcattttggatataaaaaaagtgattataatttagatttaaaaccttggaaaaaggttttaaaaaagataaaaaatccagttcataatgttaaaataggtgtagttggaaaatatactaatcttaaagatagttacaaatctttaaatgaagctttaattcatggcggaatagctaataatgctaaagtagatataaaatggattaattcagaagaaaaaaataataaaaatataattaaagaacttaataatttagaaggtattttaataccaggtggttttggatacagaggcattgaaggaaagattgccgcaataaaatttgctagggaaaaaaatattcctttttttggtatttgtcttggcatgcaactagcagtcattgaaattgctagaaatgttttaggattaaaaaaagccaattctactgagtttgtagatactaaattccctgtagtaggattaatgactgaatggcttaacaaaaataaaatagaaaaaagaaacaaaaatagtgacaaaggtggcacaatgagattaggtgcttataaagctatattaaaaaaaggttctaaaattaataaaatttataataaaaatcatatatctgaaagacatcgtcatcgatatgaag

SEQ ID NO: 314898 - DNA, 517 bp, Unknown
  Bacterial polypeptide expressing nucleotide sequence isolated from the Sargasso Sea
taattatgctcgtaaaagaaaaattccttttttaggaatttgttttggaatgcaaatggcagttatagaatttgcaagaaatgctttaaatattaaaaaagcggggtctagtgaattagataaaaaatgttatcctgtaattggacttttaaacgagtggaataaaaacggaaaaatactaaaaggcacaaataaagatctaggtggaacaatgagactaggtttgtatgaagcaaaattaagacataattcactgatagaaaaaatttataaatccaaatctatatttgaaaggcataggcatagatacgaagtgaacattaaattacaaaaccaatttgaaaaaaaaggtatgattttttcaggaatttctcctgacaataagttaccagaaataattgaacttaaaaaccacccttggtttgttggtgtacagtttcatccagaatttaaatctagacctttaaagccgcatcctttattctcatcatttatcaaggcagctaaattatactaa

SEQ ID NO: 314899 - DNA, 943 bp, Unknown
  Bacterial polypeptide expressing nucleotide sequence isolated from the Sargasso Sea
ttgggtcactatccaggttattccacatgttactgacgaaattaagctttttatagaaagtaattttgaagatgaagatataattatttatgaaattggaggaactgttggagatatagaatctctaccttttttagaggcaattagacaaataagaaataataagaatattcagtctgctttaatacatatgacttatgttccttacttatcttcagctggagaattaaaaacaaaacccactcaacactctgttaaagaattattaaactcaggtattcaaccagatataattatgtgtagatgtgaaaaagagataaatgaagagtcattggaaaaaatttcacagttttgtaacgtaaagaaagactctgtaataccggctcttaatgctaattctatttatgaggttccatcaatttattctaaggcaggattagataaggtattactcgagcatttaggttatgaaacttcaaaacaccctcttaatttagaagcttgggatgatttaattggcaaaataaataagttaaaaaaagaagttattattggtgttgttggaaaatacacaaacttaaaagatagttataaatctcttatagaagctctcactcatggaggaattgaaaataatgttaatgttaaaatcaaatggataaatgcagaaaaaattgaaacaaataagctattaggtgaattgcaaggtgtggatggcattcttatacctggtggttttggttacagaggtgttgaaggaaaaattcaagctataaaatatgcaagggaaaaagatataccgttttttggtatatgtttgggtatgcaattaagtgtaattgagattgcaaggaatgttattggattaaaggactcaaactcaactgaatttaaatcaactacaaatcctgtcgttagtcttatgacagaatggagtaataaa

SEQ ID NO: 314900 - DNA, 814 bp, Unknown
  Bacterial polypeptide expressing nucleotide sequence isolated from the Sargasso Sea
agatttaggccattatgaaagatttacaaatatatcctctaaacaatcagataatataacaactggtcgtatttacagtgatgttattaaaaaagaaagaaagggaggttaccttggaaaaacagttcaagttatacctcatattacaaatcgaattaaagaatttataaaaaaagatattacaaatgaagattttgtaatatgtgaaattggtgggacagttggagatattgaaagcttaccttttgtagaagctataagacaattttcaaacgaacatggtaaatcaaaaacattatttattcatttaacatttgtgccgtttttaaaatcatcagatgagattaagactaaaccaactcagcactcagtcaaagaattaagaagtataggtatccaacctgatattattatctgtagatctcaacaatctataccgttagatcagagaaaaaaaatatcactattttgcaatgttcccattgataatgttattgaaacagtagatgtgagaactatatatgaagcaccaattagtttttataatcaaaaactggataagcaagttttaaaattttttaaacttaaaccaaaaaaaaaaccagatctaagtccatggaaaaaaataactaatattgttttaaatgcaaaaaaatctgtaaatattgcaataattggaaaatatgtaaatttaaaagatgcttataaatctttagatgaagcattggtacatggtggaattgcaaacaatgtaaaagtaaatctggtaagaatagagtctgacagtttaaaaaataatgaaatcaaaacaaaa

SEQ ID NO: 314901 - DNA, 464 bp, Unknown
  Bacterial polypeptide expressing nucleotide sequence isolated from the Sargasso Sea
catggcgcgatacgtatttgtaactggcggcgtggtttcttcattaggaaaaggtctctcatcagcatccctagcttcattgcttcaattaagaggtttcaaagtaagagttagaaaactagatccttatttaaacgttgaccctggaacaatgaacccatttcaacatggtgaagtttttgttactgacgatggagctgaaacggacttagacatcggccactacgaaagatttacaggaatatctgctacacaatcagacaacataactaccgggggaatttatagcgatattattcaaaaagaaagaagaggagattatttaggaggtacagttcaagttgttccacatgtaacagataaaattaagaaatttatttctcaagatataaaaaatgaagattttgttatttgtgaaataggcggaacagtcggagatattgaaagtttgccttttttagaag

SEQ ID NO: 314902 - DNA, 920 bp, Unknown
  Bacterial polypeptide expressing nucleotide sequence isolated from the Sargasso Sea
catgggtgaagtatttgttaccgatgatggagctgaaactgatttagatctaggtcattatgagagatttacaaatatttctgcaaaacaatctgacaatataactacaggaaaaatatatagtgatattataaaaaaagaacgtaaaggcaaatacctcggcaagacagttcaggtaataccccatgtaacggacagaataaaagaatttattaaaaatgatattaccaatgaagattttgtaatttgtgaaattggtggaacagttggtgatatagaaagcttaccattcgtagaagcaataagacaattttcaaatgaagtaggaaaaaataaaactttgtttatacatttaactttagttccttacttaaagtcctctgacgaaattaaaactaaaccaacacaacattctgtaaaagaactaagaagtctagggatacaacctgatattgttatttgcagatctcaacattccatacctattgatcaaagaaaaaaaatatcacttttttgcaacgtaccaattgataatgtaattgaaaccgttgatgtaaagactatttatgaggctccaataagtttttcaaatgaaaaactagacaaacaggttttaaaattttttaaattaaaacctaaaaaaaaagtgaatttatctccatggaaaaatattacaaagatagttataaacacaagcaaaagtgtaaatatagcaataattggcaaatatgttaatttgaaagatgcttataaatctttagacgaagcattaattcatggtggaatatctaataaaattaaagttaacttaaccagaattgagtccgataaattaaaacctaaagaaatagcaaataaactaaaaaatgtatctggcatattaatcccgggaggttttggaaaaaaggaacagaaggaaa

SEQ ID NO: 314903 - DNA, 508 bp, Unknown
  Bacterial polypeptide expressing nucleotide sequence isolated from the Sargasso Sea
aatgaaaaataataacaagaccaaatacatttttgttttaggaggagtaatgtccggactcggtaaagggatagcagcatcatctgttggatatcttttaaaaagtgctggcctaaatgttactatacttaaactagacccataccttaatgtcgaccccggtacaatgaatccctatcaacatggagaagtctatgttcttgacgatggctctgaaacagatctagatcttgggcactatgaacgttttatagatgtgggtatgaataaaaataacaatgcgactgctggacaaatttatagtactgtattagagaaagagcggaaaggtgaatacttaggtgatacagttcaagtcattccccacataactgatgaaattattcgcaaaataaagttagtaaataaatccaacaagtacgaattagtaatatgcgaagttggagggacagtaggagatatcgaaagtcttccattcatggaagctataaggcaattatcattagag

SEQ ID NO: 314904 - DNA, 663 bp, Unknown
  Bacterial polypeptide expressing nucleotide sequence isolated from the Sargasso Sea
tatagtgatattataaaaaaagagagaagaggaggttatctcggaaaaacagttcaagtaattccacatgttacagatagaattaaagaatttataaaaaaggatataacaaatgaagattttgtaatttgtgaaattggaggaacggttggtgatattgagagcttaccatttttagaagctataagacagttttcaaatgataatggcagatcaaaatcattatttattcatttaacatttgttccatttttaaaatcttcagatgaaattaaaacaaagccaacacaacattctgttaaagaattaagaagtataggaattcaacctgatatagtgatctgtagatctcaacagtctattcctttagatcaaagaagaaaaatatccttattttgtaatgtggacattgctaatgttatagaaacagttgatgtaaaaactatttatgaagctccaataagtttctttaatcaaaaattagataagcaagttttaaaattctttaaaattaaatctagaaaaagaccaaacttgctgccttggaaaaaaattacaaatatagttttaaaaacaaaaagaacagtaaatattgctatcataggcaaatatgtaaacttaaaagatgcttataaatcacttgatgaggctcttacgcatggg

SEQ ID NO: 314905 - DNA, 679 bp, Unknown
  Bacterial polypeptide expressing nucleotide sequence isolated from the Sargasso Sea
cttgacacatgctggagtagctaatgaagtgaaagtaaatataataacaattcattctgaatcaattgatgatagtaatctaaatgaattattaatcaatttaaatggtattattgtagctccaggatttggtgaaagaggaatagagggtaaaattaaagctattaaatactctagagaaaatcatgtcccatttttaggtatttgtttaggaatgcaaatggctgtaattgaatatgctagaaatgttttaaaattagaagacgttaattcaactgaaatgaaagaagattgtaaaaatcctattatttctcttatggaaaatcaaaaaagtatcgtaaataaaggaggtacaatgagacttggtgcgtgggattgccaattactgaaaaattctaaaacagaaaaaatatataataaaaaagtaatttcagaaaggcacagacacagatatgaattaaataataaatacttggaccaacttaacaaaggagatcttattccatctggaattaatccagaaacaaatttagttgagatcattgagcacaaagaacatccttggtttataggggtgcaatttcatcctgaatattctagcactgtattagagcctcatccattatttaaaagttttataaattcatcaattgaaaatttaaaaaataataataattag

SEQ ID NO: 314906 - DNA, 685 bp, Unknown
  Bacterial polypeptide expressing nucleotide sequence isolated from the Sargasso Sea
catggcgcgatatattttcgtaactggcggcgtggtttcatctttaggaaaaggattatcatctgcatcactagcatacttgcttcaatctagaggctataaagttagaataagaaagcttgatccatatttaaatgttgatccaggtacaatgagtccatttcaacatggtgaagtttttgttactgacgatggagcggagacagacttagatttaggacattatgaaagattctctggtatctcagcaaaaaaatcagacaatataactacaggaaaaatatataatgatgttttaaaaagagaaagagagggaaaatatttaggaaaaactgtgcaagttattccacacatcactaatagaattaaagaatttattaagaacgatgttaccaaagaagactttgtaatctgtgaaattggaggcactgttggagatattgaaagccttccttttttagaagcaattagacagttttctaatgaaattggtagaaaaaatactttgttcattcatttaactttagttccttatatgagagcctcagatgaaattaaaacaaaaccgacacaacattctgttaaggaactaagaagcatcggtattcaaccagacattataatttgtagatctgagagatcaattccattagatcaaagaaaaaaagatttctcttttttgtaa

SEQ ID NO: 314907 - DNA, 469 bp, Unknown
  Bacterial polypeptide expressing nucleotide sequence isolated from the Sargasso Sea
atggcgcgatatatatttgtcactggcggcgtggtctcatcattaggaaaaggtctttcatcagcatcactagcttatttgttaaaatcacagggttacaaagttaggttaagaaaaatggatccgtatttgaatgtagatcctggaacaatgagtccatttcaacatggagaagttttcgtcaccgatgatggtgctgaaactgatttagatctaggtcattatgagagatttacaaatatttcatctagacagtcagataatattacaactggtcgtatttatagtgatgttattaaaaaagaaagaaagggaggatatcttggaaaaactgttcaagttatccctcatatcacaaaccgaataaaagaatttataaaaaaagatattacaaatgaagattttgtaatatgtgaaattggtggaacagttggagatattgaaagtttaccatttgtgaagctataag

SEQ ID NO: 314908 - DNA, 625 bp, Unknown
  Bacterial polypeptide expressing nucleotide sequence isolated from the Sargasso Sea
taaattaaaagttaatcaaattagaaagaaattaaaaaatgtttcaggcctattaattccaggtggttttgggaaaagaggaactgaaggtaaaatttctgcaattaaatacgcaagagaaaacaaaataccgtttctcggtatttgttttggaatgcagatggcaattgttgaatttgcacgaaataaattaaaaattaaaaaagctggatctagtgaattagataaaaattgttaccctgttatagggttaattaatgagtgggataaaaatggtaaaatcattaagggaacagataaagaattaggtggaacaatgagattaggcttatatgaagctaaattaagaaataattctgccataaaaaagatttataaatctaattcaattaaagaaagacatagacatagatatgaagttaataataatttgaaaaatgaatttgaaagaaagggattagttttttcgggaatgtcaccagataataatttaccagaaataatagaacttaaaaatcacccgtggtttataggggttcagtttcatccagaatttaaatctagacctttaaccccacatccattattctcttcttttatcaaagctgcaaaaaatcataaatga

SEQ ID NO: 314909 - DNA, 516 bp, Unknown
  Bacterial polypeptide expressing nucleotide sequence isolated from the Sargasso Sea
ataatcgaccatattttggaatctgtttgggaatgcaaatagcgatcattgaattttctagaaatgttttaaaactaaaaaatgccaatagcactgaatttaatagcaagactaaatatccggttattggattagtaacagaatggaaggatgcatcaggaaaaattgaacatagaaatgaaaagtctaatttaggagggaccatgcgattgggtgggcagaagtgtttaattaaaaaatcttctctgtctcataagctttataaaaaattaaccatcactgaaagacatcgccacagatatgaggtaaatccagagtttaaaaacaaattagttgcagggggaatggacattgttggcacatctctagatgggaacttagcagaaatgattgaaattaagaaacatccttggtttttgggttgtcaatttcatccagaatttacatctaacccaagagatggccacccaatatttaatgattttattgctaaagctattaagataaaaagatgag

SEQ ID NO: 314910 - DNA, 481 bp, Unknown
  Bacterial polypeptide expressing nucleotide sequence isolated from the Sargasso Sea
tttaagtttgtgccttggtatgcaatgtgcagttatagaatgggcaaggaatgtagctaatcttccagatgcatctagttcagaattagacccaaacactcccaatccagtgatacatttattaccagaacaggaagatgtagttgatttaggtgggacaatgagacttggagtatatccatgtagattgacaaaaaatacaactgggaaaaacttatataatgaggatgttatttatgagagacatcgacatagatacgaatttaataattactacaaacaaagttttttagattctggatacaaaataagtggaacatcaccagatggcagattagttgagttaattgagttagaaaatcatccatacttcttagcatgtcaatatcatcctgagtttttatcacgacccggcaaaccacatcctttatttaaaggtttaataaaagcctctcaagataagttaactcaatcaaattaa

SEQ ID NO: 314911 - DNA, 871 bp, Unknown
  Bacterial polypeptide expressing nucleotide sequence isolated from the Sargasso Sea
atgtcaaaatatatttttattacaggtggtgtggtttcgtctcttggaaaaggattaacctctgctgcacttggagcattgcttcaatctagagggtattctgttcgcttaaagaaacttgacccttatttaaatgtggatccaggaactatgtcaccttttgagcacggcgaggtttttgtaactgacgacggagcagaaacagacttagacctaggtcactatgaacgatttactggtgtttcagctaggaaaacagactctatctcatctggccgaatatactctaatgttctagaaaaagaacgcaggggtgattatctcgggaagaccatccaagtgatacctcatgtaacagatgaaataaaattatttttatccgtaggagaagaagaaatagattttatgttatgcgaaatcggtggaaccgttggggatattgaaggtctaccattctttgaagcaattagacaattttctcaagatcaggagaatgaatgtattttcatacacttaactcttataccgtttgtttcagcgtcaggggaactaaagacaaaacctactcaacactctgtaaaagaattaaggtcaattgggataacacctaacattctggtgtgccgatctgacagatttatcccagaaaaggaaagaaataagttagctctcttttgtaatgtaaaaaaagagagtgttattgctgcgccagatctcaaatcaatctatgaagctccactagcatataataaggaaaaactagatcatgcagtattggacgctttcaagattctatcagctaaaagtccaaatttaaaaatttggcaagaagttgcggataggatctataatcccgagggagaggtacata

SEQ ID NO: 314912 - DNA, 723 bp, Unknown
  Bacterial polypeptide expressing nucleotide sequence isolated from the Sargasso Sea
aatggaaatttttacctcaagagttttaaatcccaaaaaagatgtcaatattggtattataggaaaatatgttgatcttaaagatgcttataaatcattagatgaagctttaattcacggtggaatatcaaataatgtgaaagttaatctaaagaggatagactctgaaaatttgaaacctgaaaatattaaatctttattaaaagatgtaactggtgttcttataccaggaggatttggaaaaagaggtactgaaggtaaaattgctgccataaaatacgcaagattgaacaatatacctttcttcggtatctgttttggtatgcaaatggcagttattgaagctgctagaaacttattgaatattaagaatgcctcaacaagcgagtttggaaataactgtactcctgttgttggattacttgaagaatggcaaaaaggaaagaaaacaattaaggggactaaaaagaatttaggcgggacaatgagattaggtttatatgatgctgtattaaaaaataattctttgatatctaaaatttattctgaaaagaaaattaaagaaagacacaggcataggtatgaagtaaatataaagtataaaaatgactttgagaagaaaggtttgattttttctgctttatctccagatggaacacttccagagataatagaattaaaaaatcatccttggtttgttggtgttcaatttcatccagaatt

SEQ ID NO: 314913 - DNA, 445 bp, Unknown
  Bacterial polypeptide expressing nucleotide sequence isolated from the Sargasso Sea
ctaaatattaaaaacgcttctactagcgaatttagtaacaactgcacaccagtagttggtttactggaagagtggcaaaaaggtaaaagaaaaattaaaggaactgaaaaaaatttgggcggaacaatgagattaggtttgtatgatgctgtgttaaaaaacaattctttgatatcaaagatatattctgaaaagagaattagagaaagacatagacacagatatgaagtcaatattgaatacaaagatgattttgaaaaaaaagggttggttttttccgctatgtcgccagatggattgcttccagaaataatagagctaaaaaaccacccctggtttgttggtgttcagtttcatcctgaatttaaatcaagaccttttacaccacatccattattctcttctttcgtgaaagctgtagaaactaaagggagtggaaattaat

SEQ ID NO: 314914 - DNA, 370 bp, Unknown
  Bacterial polypeptide expressing nucleotide sequence isolated from the Sargasso Sea
aatgacagagtggattaagggtaacaaaattgaaaaaagaagcaaaaatagcaacaaaggtggaacaatgcgccttggttcatataaagctaaactcaaaaaaaattctaaaatatatactatttataatagacaattaatttctgaaagacatcgacatagatacgaagttaataaaaaatttatatctaaatttaataataaaggatattattttagtggaatgtcaccagatggattattgcctgaagttttagaaagtaaaaatcataaatggtttataggagtacaatatcatcctgaactaaaatcaaggcccttaaaaccccatccactttttgtttcatttattaaaaattgtaaaaaatga

SEQ ID NO: 314915 - DNA, 746 bp, Unknown
  Bacterial polypeptide expressing nucleotide sequence isolated from the Sargasso Sea
gcaactaatacacaacctaagaaatcctggagctccaatcaaagttgctttggtaggtaaatacattgaacttggagatgcatatttatccgttgttgaagctttaagacatgcttgcattgaacaaaaggctttattagatttacattgggtaagtgctgaaatgatagaaaaaaattcatcagaaacttacttaaatgaagttgatgcaattgtcgtacccgggggatttggcaatagaggagtaaatggaaaaatttcggctataaaattcgcaagagaaaataaaattccatttttaggtttgtgccttggtatgcaatgtgcagttatagaatgggctaggaatgtagctaatcttccagatgcatctagttcagaactagacccaaatactcccaatccagtgatacatttattaccagaacaggaagatgtagttgatttaggtgggacaatgagacttggagtttatccatgtagattgacaaaaaatacaacagggaaaaacttatatgatgaagatgttatttatgagagacatcgacatagatacgaatttaataattactataaacaaagttttttagattctggatacaaaattagtggtacatcaccagatggcagattagttgagttaattgagttagaaaatcatccatacttcttagcatgtcaatatcatcccgagtttttatcacgacctggcaaacctcatcctttatttaaaggtttaattaaag

SEQ ID NO: 314916 - DNA, 335 bp, Unknown
  Bacterial polypeptide expressing nucleotide sequence isolated from the Sargasso Sea
tgactcagatttaggcggaacaatgaggttgggtgggcagacctgcattttaaaaaaaggctctaatgtttttaaaatgtataaaaaggaagaaattgttgaaaggcatagacatagatatgaggtaaatccagaatttagagatggatttaatactaaaggaatgaatatagttggtacttctgtagatgatatgctggttgagatgattgaggtaaaaaatcatccctggtttcttggttgtcagtttcatcccgaatttacttcaaatccaagagatggacatcctatctttaatagcttcatttcaagtacaataaagactaaaaaatgaa

SEQ ID NO: 314917 - DNA, 471 bp, Unknown
  Bacterial polypeptide expressing nucleotide sequence isolated from the Sargasso Sea
tgcagatggctattattgagtttgcgagaaaccaactaaatattaaaaatgcaacatcaagtgaatttagttctaaaggtacgccaattgtaggattaataaccgaatggaacaaggatggtaaaattatcaaaggaacaaaaaaagaattaggtggaacaatgaggcttggtctttatgaagctaaattgaaagatgattcattaataaaaaaaatatattgttcaaaatttatcaaagaaagacacagacatagatatgaagtaaatattaattacaaagataaatttgagaaaaaaggcatgattttctcagctttatctcctgacaaaaatctgcccgaaatcattgagttaaaaaatcatccttggtttataggagttcaatttcaccctgaatttaaatctagacctttggctccacatccattattctcatcatttatcaaagctgcaaaaaatcatagatgaa

SEQ ID NO: 314918 - DNA, 844 bp, Unknown
  Bacterial polypeptide expressing nucleotide sequence isolated from the Sargasso Sea
agagaaatcaaaaaatgatgtcaatagaaatgatgttgcatacatacacgtaacattacttcctttcatcaaaacctctggcgaaatcaaaactaagccaactcagcattcagtaaaagaattaagatcaattggaattcagccagatttacttgtttgccgaagtgataaatcgataaatgaaggtcttaaaaaaaagcttagtggattttgcggtgtcaatattaactctgtaattgaagcattagacgcagatagtatttattctgtacctctttctttaaaaaaagaaggtttatgcaaggaaaccctgaagtatctagaacttgaagataaaaaatgtgatttaaaaaattgggaagaactaattcacaatctaagaaatcctggagctccaataaaagttgctctcgtaggtaaatacattgaacttggagatgcatatttatcggttgttgaagctttaagacatgcatgcattgaacataaggctttattagatttacattgggtaagcgctgaaatgatagaaaaaaattcagcagaaacttacttaaatgaagttgatgcaattgtcgtgcctggaggatttggcaatagaggagtcaatggaaaaatttcggctataaaatttgccagagaaaataaaattccctttttagggctgtgccttggtatgcaatgtgcagttatagaatgggcaaggaatgtagctaatcttccagatgcatctagttcagaactagacccaaacactcccaatccagtgatacatttattacctgaacaggaagatgtaattgatttaggtgggacaatgagacttggagtttatccatgtaga

SEQ ID NO: 314919 - DNA, 801 bp, Unknown
  Bacterial polypeptide expressing nucleotide sequence isolated from the Sargasso Sea
aatgcaatatgtatttattacgggcggagttgcctcatctcttggaaaaggtatagcttctgcagcagttgcatctttactccagcaaagaaattttaaggtcagaataagaaaacttgacccgtatcttaatgttgatccgggtacaatgagtccatatcaacatggtgaagtttttgtaaccgatgacggggctgaaactgatcttgatttaggtcactacgaaaggtttactaatagatctgctaaaaaaactgatagtacatcatcaggaaaaatctactctaatgttttaaaaaaagaaagaaaaggagattaccttggtgctactatacaagttatcccacatgtaacagatgaaataaagcttttcataaattctaattttgaagatgaagatattataatttatgaaataggtggtactgtaggagatattgaatcccttccttttttagaagcaataagacagattagaaatgataaaaaaatatcatcagcattaattcacatgacctatgtcccttatttaagttctgctggtgaattaaaaacaaaacctactcaacactctgttaaagaattactaaattcaggtattcaacctgatattataatgtgtagatgtgaaaaagaaattaatcaagaatctcttgagaagatatcacaattttgcaatgtaaaaaaagattcagtaattcctgcattaaatgcaaattctatttatgaagttccatcaatttattctaaagctggtcttgataaagttttactcgagcatttgggttatgatgtctctaa

SEQ ID NO: 314920 - DNA, 349 bp, Unknown
  Bacterial polypeptide expressing nucleotide sequence isolated from the Sargasso Sea
gatggccaaaactaagtacatttttattaccggaggagtggtttcatcactcggaaagggtatcgcagcagcatcaattggtgcccttcttgaagcaagagggttatcagtatcacttataaaagttgatccttacataaacgttgatcctggaacgatgagtccttttcaacatggagaggtatttgtaacaaatgatggaactgaaactgatttagatcttggtcattatgaaagatttgtcagattccaagcttctaggaaaaacaatttcactttaaagtacgggtcgagaacgtggtgctcaacctgccatgcccggttgaaggctcgagcaataccgagcaat

SEQ ID NO: 314921 - DNA, 916 bp, Unknown
  Bacterial polypeptide expressing nucleotide sequence isolated from the Sargasso Sea
gatttaggacattatgaaaggttttctggtatttctgcaaaaaaatcagataacattacaacaggaaaaatttacagtgacgtattaaaaagagaacgacaaggaaaatatttaggaaaaaccgtccaagtaatacctcatattacaaatcgaataaaagaatttataaaaaacgacgttgctaaagaagattttgttatttgtgaaattgggggaacggtaggggatatagagagtcttccatttttagaggcaataagacaatactcaaacgaaattggaagaaaaaatactttgttcatacatctaactttagtaccgtatatgaaagcttcagatgaaataaagacaaaaccaacacaacactctgtaaaagaattaagaagtataggaattcaacctgatataattatttgccgatctgaaagaactattcctttagatcaaagaaagaaaatttcactgttttgcaatgttgcaatagaagatgtcattgaaactgttgatgtaaaaacaatatatgaagctccaataagttttaataaagagaaattagatgaaagagtattaaaattttttaaaataaaatctagaaaaaaagtaaatcttctgccatggaaaaggattactaatttggttttaaaaacaaaaaataaagttaatattgcaattattggcaagtatgttgaacttaaagatgcatataaatctctggatgaggctcttactcatggaggtattgctaataatttaaaggtaaatttggttagaatagaatctgattttttgagaccaattgaaattaaaaataagcttaaaaatgtctctggaattttgatacctggcggtttcggcaaaagaggaacagaaggaaaaattgcagcgataaattatgctagaaaaaataaaataccat

SEQ ID NO: 314922 - DNA, 499 bp, Unknown
  Bacterial polypeptide expressing nucleotide sequence isolated from the Sargasso Sea
catggcgcgatatatttttgtcactggcggcgtggtttcatctttaggcaaaggtctatcatcagcctctttagcttatcttcttcagtctagaggttataaagtaaggttacgtaagttagatccatatttaaatgtagatcctggaactatgagtccatttcagcacggagaagtttttgtgacagaggatggtgctgaaactgatcttgatttgggtcactacgagagattctctggcgtttcagctaaaagatccgacaatataactacaggaaaaatatacaacgatgttcttagtaaagagcgtaaaggtaaatatctaggcaaaactgttcaggttatacctcatatcacagatcgaataaaagaatttataaagaatgagtcttcaaaggaagattttattatttgtgaaataggtgggatagtaggtgatattgaaagcttacctttcattgaagcaataagacaattggcaaatgatgtaggtaaaaaa

SEQ ID NO: 314923 - DNA, 877 bp, Unknown
  Bacterial polypeptide expressing nucleotide sequence isolated from the Sargasso Sea
cagcattctgttaaggaactgcggtctataggaatccaaccagatatcttgttgtgtcgtgccgatcgagaaatagaagagcctgaacggaggaaaattgctctgtttaccaatgttgaggagagggccgtaataaccgcttatgacgcaagtacaatctataaaataccaatgcttcttcatcaagagggattggatgatatcgtcactgagaaattaggcctagaggcttctccggcagatctttctccatgggtttccttggtggattctttagagaatccgagtgacagcatcgatgtagctatggtgggtaagtatgttgatttaactgagtcatataagtcgctatcagaagctttggtccacgctagtattcataccaataccaaagtgaatattcactatgtcgactcagagcaggttggaatgggtggagaagcagatctacgaaagatggatgccatattagtacctggtggattcggagaacgaggaattgaaggaaaggttagcgcagttcgcctggctagggagaatggaataccgtttttagggatttgtttaggtatgcaggctgccgttatagaatttgcgaggcacgaggttgggctgcaggacgctcatagtaccgaatttgatgcacgaacacagcatcctgtcatagccctgattacggaatggacaacacctgagggagccgtagaaattcgaacagacgagagcgacgtcggcggttcaatgcgactgggggctcaaccttgcaagctagcgcgaggaagcttcgtcgcggaagcctataaatccgaattgattagggagaggcatcgacatcgatatgagtttaataatacttatacgatggaattagaagcgg

SEQ ID NO: 314924 - DNA, 782 bp, Unknown
  Bacterial polypeptide expressing nucleotide sequence isolated from the Sargasso Sea
gtgccaattgataatgttattgaaactgttgatgtaagaactatatatgaagcaccaatcagtttttttaaccaaaaattagataaacaagttcttaaatattttaaacttagatcgaaaaaaagagctaatctttctccatggaaaagaataacaaatatcactttaaacacaaaaaaatctattaatattgctataattggtaaatatgtaaatttgaaagatgcttataaatctttagatgaagctttaatacatggtggtatttccaataaagtaaaagtaaatttagtaagaatagaatctgataaattaaaagccaatcaaataaaaaaagaactaaaaaatatctcaggtttattgatacctggggggtttggaaaaagaggtacagaaggtaaaatttccgcaattagatatgctagagagaacaaaataccttttcttggtatttgttttgggatgcaaatggcaactattgaatttgctcggaatgtattaaaaattaaaaaagctggatcaagtgaattagataaaaattgtttcccagtaattgggttaattaacgagtgggataaagatggcaaagttattaagggaacggataaaaatttaggaggaacaatgagattaggcttatatgaagctaaattaagaaataattctgccataaaaatgatttataaaactagttctattaatgaaagacatagacatagatatgaagttaacatcaatcttaaagaggaatttgagaaaaacggattaatattttcaggaat

SEQ ID NO: 314925 - DNA, 573 bp, Unknown
  Bacterial polypeptide expressing nucleotide sequence isolated from the Sargasso Sea
ttaatacctgggggtttggaaaaagaggaacagaaggtaaaatttctgcaataaaatatgcaagagaaaataaaataccatttctaggtatctgctttgggatgcagatggctatcattgagtttgcgcgtagtaaattgaaacttaaaaaggctggatcaagcgaactagataaaaattgttatccagttatagggttaattaatgagtgggataaagatggaaagattattaaaggtacagataaaaatttaggtggaacaatgagattgggcttatatgaggctaaattaagaaataattctgccataaaaagaatttataaatctaactcaattaaagaaagacatagacatagatatgaagttaacaataatcttaaaaatgaatttgaaagaaaaggattaattttttcaggaatgtcaccagataatagtttgccagaaataatagaacttaaaaatcacccttggtttataggcgttcaatttcatcctgaatttaaatctagacctttgtctccccatcctttattctcttcatttatcaaggcagcaaaaaatcataaatgag

SEQ ID NO: 314926 - DNA, 679 bp, Unknown
  Bacterial polypeptide expressing nucleotide sequence isolated from the Sargasso Sea
catggccaaattcgtcttcatcaccggtggtgtcgtctccagcatcggcaaggggatcgtggccgcaagcctggggcgactgctgaaatcccgcgggtacaacgtctcgatcctcaagctggatccctacctgaatgtggatccgggcacgatgagcccgatccagcacggtgaggtgttcgtcaccgaagacggcgccgagaccgatctggaccttggtcattacgaacgcttcaccgacaccgccatgtcacgcctcaacagcgtgaccacgggatcgatctaccaggcggtgatcaacaaagaacgacgaggcgactacaacggtgggacggtgcaggtgatcccccacatcacaggggagatccgcgagcgcatccaccgggtggcagcgaacagcaatgccgatgtggtgatcacggagatcggaggcacagttggcgacatcgaatcgctcccctttctcgaggccatccgtgaattccggggggatgtggggcgccgcgacctcgcctacatccacgtcacactgctgcccttcatcggaacctccggagagctgaagaccaaacccacgcagcactcggtgaaggagctgcgatccatcggcatccagcccgatgtgctcgtctgccgaagcgaccgcaaactcggtgaggagatgaaagcgcagatcgga

SEQ ID NO: 314927 - DNA, 875 bp, Unknown
  Bacterial polypeptide expressing nucleotide sequence isolated from the Sargasso Sea
ccaacattctgtaaaagaattgagaagtataggaattcagcctgatatagtgatctgtagatctcaacagtctattcctttagaccaaagaagaaaaatatccttattttgtaatgtagatattgctaatgttatagaaacagttgatgtaaaaactatttatgaagccccaataagtttctttaatcaaaaattagataggcaagttttaaaattctttaaaataaaatctagaaaaaaaccaaacttgctaccttggaaaaaaattacaaatatagttttaaagacaaaaagaacagtaaatattgctatcataggcaaatatgtaaacttaaaagatgcatacaaatcacttgatgaagcactcacgcatggaggaatttcaaataaagttaaagtaaacttagtaagaattgagtcagataaacttagatcaaaagatattaaatcaaaattgaaaaatgtatcaggaatactgattcctggaggatttggtaagagaggaacagagggaaaaattgaggcaattagatatgcgagagagagaaaagtaccttttttaggtatttgttttggaatgcaaatggcaatgattgagtttgcaagaaatattttaaaaattgaaaaagccggctctagtgaacttgatcaaaattgttttcccgtaataggattaattgatgaatggaacaaagatggaaagatcataaaagggactgataaaaatctaggaggaacaatgagactaggtatttatgaagctaaactaagaaataattctgccataaaaaatatctataaatctaatatgattaaagagagacacagacatagatatgaggtcaatataaatttaatgcagaaatttgaaaaaa

SEQ ID NO: 314928 - DNA, 316 bp, Unknown
  Bacterial polypeptide expressing nucleotide sequence isolated from the Sargasso Sea
atggcgcgatatatattcgtaactggcggcgtggtctcatcattaggtaaaggattgtcatctgcttcattagcttatcttttaaaatcacaaggttataaagtcagaattagaaaaatggatccatacttaaatgttgaccctggtacaatgagtccttttcaacatggagaagtttttgtaactgacgacggtgctgagacagatttagatcttggtcattatgaaagatttacgaatatttcagcaaaaaagtctgataatattacaacaggaaaaatttacagtgatataattaaaaaagaacgtaaaggta

SEQ ID NO: 314929 - DNA, 786 bp, Unknown
  Bacterial polypeptide expressing nucleotide sequence isolated from the Sargasso Sea
gaaaaatggatccatatttaaatgttgatccaggaactatgagtccatttcaacacggcgaagtatttgtaacagatgatggagcagaaacagatttagacttaggacattatgaaagatttactaatatttcatccaaacaatcagacaacattacgactggcagagtttatagcgatataataaaaaaagaacgtaagggaaattatttgggcaaaacagttcaagttattccacatgttacggatagaataaaagaatttataaaaggagatatcacagatgaagattttgttatttgtgaaattggaggaacagtcggtgatattgaaagtttaccttttcttgaagcgataagacaattttcaaatgatattggaagaaataaaactttatttattcatttaacacttgtaccttttttaaaatcatctgatgaaattaaaacaaaaccaacacaacactccgttaaagaactgagaagcataggtattcagccggatattgttatttgcagatctcaaaaatctatcccttctgatcaaagaaaaaaaatatcattattttgtaatgttccaatagaaaatgtaatagaaacagttgatgtaaaaactatatatgaagccccaattagtttttataaagaaaaattagacaagcaagtattaaaatattttaaaataaaaagtaaaaaaaattcaaatttaactccatggaaaaaaataacaaaaatattattaaaaaacaaaaaacaagtagatatagcaataatggaaaatatgtgaa

SEQ ID NO: 314930 - DNA, 691 bp, Unknown
  Bacterial polypeptide expressing nucleotide sequence isolated from the Sargasso Sea
catggcgcgatatatatttgtcactggcggcgtggtatcatctcttggaaaaggattaacatcagcatcattagcgtacttactaaaatcacaaggttataaagtaagagtaagaaaaatggatccttatttaaacgttgatccaggaacaatgagtccttttcagcatggagaagtttttgttactgacgatggtgcagaaactgaccttgacttaggtcattatgaaaggtttacaaatatttctgcaaaaaaatctgacaatataactacaggaagaatttatagtgacattattaaaaaagaaagaaaaggaaaatatttaggtaaaactgttcaagttataccgcatgtaacagatcgtattaaagaatttataaagggtgatatcagcaatgaagattttgtagtttgtgaagttggtggaactgttggcgacattgaaagtttgccatttgttgaagcaataagacaattttcaaatgacgttggtaaaaataatagtttatttattcatttaactctagttccttttttaaaatcttcagatgaaattaaaactaaacctacacaacattcagtaaaagaactaaggagcctaggtgttcaaccagacatagtaatttgtagatcacaaaaatctataccaattgatccaagaaaaaaaatatctttgttctgcaatgtctct

SEQ ID NO: 314931 - DNA, 813 bp, Unknown
  Bacterial polypeptide expressing nucleotide sequence isolated from the Sargasso Sea
tatttcagatgaagattttgtaatatgtgaaattggcggaacagtatttgacatcgagagccttccatttgttgaagctataaggcaattttcaaatgaacatggtaaatcaaaaacattatttattcatttaacttttgttccttttttaaaatcatcagatgaaataaaaacaaaaccaacccaacattctgttaaagaattaagaagtattggtatacagccaaatataattatttgtagatctcaacaatcaatacccatcgaccaaagaaaaaaaatatccttattttgtaatgtccaaattgaaaatgtaatagaaacagttgatgttagaacaatttatgaagcacctatcagtttttttaatcaaaaactcgataaacaagtattaaaattttttaaattaaaatcaaaaaaaagaccaaatctattaccttggaaaaaaattacaaaaattactttaaatacaaaaaagataatcaatattggtataataggaaaatatgtaaacttaaaagatgcttataaatctttagatgaagcactaactcatggcggtatatctaataaagttaaagtaaatttaattagaattgaatctgataaattaaaacctaatcaaatagcaaaaaaattaaagaatatatctggcttgttaatacctggaggttttggaaaaagaggaaccgaaggtaagattaccgcaatcaagtacgcaagggaaagaaaaataccattcttaggtatatgttttggaatgcaaatggcaataattgaatttgctcgaaacaagttaaaaataaaaaaagc

SEQ ID NO: 314932 - DNA, 513 bp, Unknown
  Bacterial polypeptide expressing nucleotide sequence isolated from the Sargasso Sea
caagagaaaataagataccttttcttggtatttgttttggaatgcaattggctattgttgaatatgcaagaaatagattaaaaattaaaaaagctggatctagtgaattagacaagaaatgttatccagtaataggcttaattaatgaatgggataaaaatggaaagaaaattaaaggaacagataaaaatttaggtggaacaatgagattaggtttatatgaagccaaattaagaaataattctgccataaataaaatttataaattaaaatctattaaagaaagacatagacacagatatgaagttaataataatctcaaaaatcaatttgaaagaaaaggattaattttttcaggaatgtcaccagataacaaattaccagaaataattgaactcaataatcatccctggtttataggagttcagtttcatcctgaatttaaatctagacctttgtctcctcatcctttattctcatcttttatcaaggcagcaaaaaatcataaatgag

SEQ ID NO: 314933 - DNA, 523 bp, Unknown
  Bacterial polypeptide expressing nucleotide sequence isolated from the Sargasso Sea
atggcgcgatacattttcgttactggcggcgtggtttcatctttaggcaaaggattatcatcagcttcactagcttatcttttacaatcaagaggttacaaagttcgaattagaaaattggatccttatttaaatgttgatcctggaacgatgagtccatttcaacatggggaagtttatgtgactgatgatggagcagaaactgatctagacctaggacactatgaaagattctcaggaatttcagcaaaaaaatctgataacataacaacaggaaaaatttacaacgatgtattaaaaagagaacgtcaaggtaaatatctaggcaaaactgtccaggttatcccccacatcactgatagaattaaagaatttattaaaaacgatgtaacaaaagaagactttgttatttgtgagataggtggaactgtaggagatatagaaagtcttccttttttagaagccatacgacagttttcaaacgagctaggtagaaaaaatactttgtttatacatcttactc

SEQ ID NO: 314934 - DNA, 387 bp, Unknown
  Bacterial polypeptide expressing nucleotide sequence isolated from the Sargasso Sea
catggcgcgatatatatttgtcacgggcggcgtggtttcatcattaggtaaaggtttatcctcagcttcactagcatacctacttcaatcacgaggttttaaagtaaggattagaaaacttgatccatatttaaatgtagaccctggaacaatgagtccttttcagcatggtgaagtttatgtaactgacgatggcgctgaaacagatttagatctcggtcattatgaacgattttcaggagtatcagcaaaaaaatcagataatatcactacaggcaaaatatataatgatgtattaaaaaaagaacgtaaaggagagtatcttggaaaaactgttcaagtaattccacatattacagatcgcataaaacaatttattaaaaacga

SEQ ID NO: 314935 - DNA, 828 bp, Unknown
  Bacterial polypeptide expressing nucleotide sequence isolated from the Sargasso Sea
tttgggtaaaggactttcctcagcatcgctaggatatctacttcaatcaagaggttataaggtaaggcttagaaaactagatccttatttaaacgttgatccaggaacaatgagcccgtttcaacacggagaagtttttgttacagatgacggtgctgaaacagatcttgatttgggacattatgaaagattttcaggtgtatcagcaaaaaaatcagacaatataacctctggcaaaatttataatgatgttcttaaaaaagaacgtaaaggaaaatatcttggtaaaacagtacaagtcatcccacacataactgatcagataaaagaatttattaaaaatgactcttataaagaggactttgttatttgtgaaattggaggaatagttggagatattgaaagcttaccttttattgaagctataagacaatttgcaaacgacattggaaaaaaaaatgcattgtttattcatctcactctagttccatatttaaaagcttctgatgaaattaaaactaaaccaacgcagcattctgttaaagaattaagaagtatcggtgttcaaccagacataataatttgtagatctgaaagaccaatacccttacaacatcgaaaaaaaatatcattattttgcaatgtaaatattaaaaatgtaattgaaacagttgatgttagaactatttatgaagcaccaataagtttttttaaggaaaaattagatattcaagttttaaattattttaaacttaaatcaaaaaaaccggcaaatttaaatccttggaagaaaattaccaaagttattttgcaaaataaaaagttggt

SEQ ID NO: 314936 - DNA, 800 bp, Unknown
  Bacterial polypeptide expressing nucleotide sequence isolated from the Sargasso Sea
aaacccgcagcatgagatcaccatcggcatggtcggcaagtatgttgacctgaccgagtcgtacaagtcgctgatcgaggcactgcgccacgccggcctgcacacctccacgcgcgtcaatatcgagtacatcgattctgaagaactcgaatcgggccacacgcaggtgctggactcgctcgacgctgtgctggtgccgggcggctttggcaagcgcggtacggaaggcaagatccgcgcaattcaatacgcccgcgaaaagggcgtgccgtacctgggcatctgcctggggatgcagttggccgtgatcgaattcgcccgccatctggccggcatgaaagacgccaacagtaccgaattcaacgatgagaccgagcacccggtggtcgcgctcatcaccgagtggctggatcgcgatggccgcgtcgaaaagcgctccgccgactcagatatgggcggcaccatgcgcctgggctcgcagcgcgtgccggttcagccggggaccaaggccgcgtcgatctacggtgcggaagtcaacgagcgccatcgccatcgctacgaggtgaacaaccactacgtgccgcagctggaaaaggccggcatgatcatttcggcgcgtacgccgtcggaaaacctgccggaaatgatggaactgccagcgtcgatgcacccgtggttcgtcggcgtgcagttccacccggaattcacctcgacgccgcgtgacggccacccgcttttcaaggcctacgtggaagccgcgctggcacatcagcagaacacgcaacgcgctgtcgcctgag

SEQ ID NO: 314937 - DNA, 912 bp, Unknown
  Bacterial polypeptide expressing nucleotide sequence isolated from the Sargasso Sea
aaatattctcttttttgtaatgttaaaaaagaatcagtaattccagctatgaatgctaattctatttacgaagttccattactttattacaaagcaggattagattcatctttgcttaatcatttaggttttaaagctaataaatacccgcttaatcttaaaccttggaaaaatgttttaaaaaagattaataaatcagaaaagtatgttaaaattgcagtagtaggtaaatatactaatctaaaagatagttataaatctttgaatgaagctcttgttcatggaggcatagcaaataataaaaatgttcatattgaatggataaactctgaaaaattaaattttaaaaatattgacaaaaaattaaaaaatataaatggtatattaattcctggaggctttggatacagaggaatagaaggtaagattaaagcaattaaatatgcaagagaaaacaatatacctttttttggcatatgtcttggaatgcaacttgctgtaattgagattgcaagaaatgtaataaaattgaaaaatgccaactcaactgaatttaataaaaccagtaatccagtagttggtttaatgacagaatggattaataaggataaaattgaaaaaagaaacaaaaatagtgataaaggtggaactatgagattgggatcttataatgctatattaaaaaaaggttctaaaattcataaaatatacaacaatactagtataagtgaaagacataggcataggtacgaagtaaatactaaatatatagaatcttttgctaaatatggttttgattttacagcaatgtcacctgataatattcttccagaagctttagaaagtagaaagcattcttggtttattggtgtacaatttcatccagaacttaagtctagaccatttgcacca

SEQ ID NO: 314938 - DNA, 550 bp, Unknown
  Bacterial polypeptide expressing nucleotide sequence isolated from the Sargasso Sea
gaaggtaaaatagctgccataaaatacgcaagattgaatcatataccattctttggaatttgttttggtatgcaaatggctattattgaggctgccagaaatttattaaatataaaaaatgcttcaactagtgaatttggtaataattgtataccagttgtaggtttgttagaagaatggcaaaagggaaaaaaaagaattaaaggaagtgaagaaaatttaggtggaacaatgagattaggtttatatgatgctattttaaaaaataattctttaatatcaaaaatatattctgaaaagaaaattaaagagagacataggcatagatatgaagttaatattaaatataaagatgactttgaaaaaaaaggattaattttttcagctttatcaccggacggtatgcttccagaaataatagaactaaataatcatccttggtttgttggtgttcagtttcacccggaatttaaatctagaccttttacaccacaccctttgttttcttctttcattaaagctgctgacaaaaataggagaggtaactaat

SEQ ID NO: 314939 - DNA, 801 bp, Unknown
  Bacterial polypeptide expressing nucleotide sequence isolated from the Sargasso Sea
tcggtcaaagagctgcagagcgtaggaattcagcctgatattttactatgtcgctctgaggtagacataccagtcgagcagaggagcaagatagccttgttttgtaatattaggccggacgctgttatcgctgctttagacgtcggatcaatatatgatgttcccttgagttatcatgctcaggggtttgatacggaagtttgcagacactttggcttgttagaaagtggcgctggtcctgaccttggagtatggcaaaggatttccagtattgttgcgaaacccgagggcaccgtaaaaatagccatagttgggaaatatacaagcctattagattcctacaagtccttggccgaggcgcttatgcatggcggcatcgctaacaacatcaaagtagatttggtttggatagattccgaaatttttgagagtgaggatacagttcatcatttggatggagtgaatgggattttagtgcccggcggttttggagagagaggagcggaaggtaaaatttcagcggttaaatttgcaagagaacgacagattccatatttcggtatttgttttggaatgcaaatggccgttattgaagcggcgcgaaatctcagcgggttaaaaggtgctggttcgtcggagtttgggaagtgtgaaaaagcggtggttggtcttctgaccgagtgggtcaagggtaatgaaatggaagaacgaagcgataaggatgatttgggcggcactatgcgcttaggagcctaccagtgtttgttatctgaaaattcaaaagttcgggaaatatatggt

SEQ ID NO: 314940 - DNA, 770 bp, Unknown
  Bacterial polypeptide expressing nucleotide sequence isolated from the Sargasso Sea
attgaaaactaaaccaacccaacattctgttaaagaacttagaagtctaggaatccagccagatattattatttgcaggtctgaaaaaaatattccaataaatgagagaaagaaaatatctttgttttgtaatgtagattataaaaatgttattgagaccgtcgatgttagaactatttatgaggcaccaattagtttttataaagaaaagtttgacgaaagagttttatcacattttaatgttaaaagtaaaaaattacccaacttaagaaggtggagaaatattacttccaatgttcttgaggcaagaaaacacgttaatattggcattataggaaaatatgtaaatcttaaagatgcttacaaatctttagatgaagctctagttcatggtggaatatccaataatcttaaaattaagcttacaagaatagattctgaacatttaaagattaaagatttgaatttattgttgaaaaatgtatcgggaattttaattccaggaggttttggtaaaagaggtagtgaaggtaaaattgctgccataaaatatgctagattgaacaatatacctttctttggaatttgttttggaatgcaaatggcagtaattgaagcagcaagaaatctattaaatataaaaaatgcttctacaagcgaattcggaaataattgtactccagtagtagggttactagaagaatggcaaaaaggaaaaaaaatatttaaaggtagtgaaaaagatttaggaggaactatgagattaggtt

SEQ ID NO: 314941 - DNA, 295 bp, Unknown
  Bacterial polypeptide expressing nucleotide sequence isolated from the Sargasso Sea
tgcaaaattaaggaataattctgccataaaaaatatatataaaactaactctttaaaagaaagacacagacatagatatgaagttaataataatctcaaaaacaaattcgaaaaaaaagggttaattttttcaggaatgtcgccagataataaattaccagaaataattgaacttaaaaatcatccttggtttattggagttcaatttcatcctgaatttaaatctagacctttattgccacatcctttattctcatcatttgttaaagctgcaaaatcatataatggaaaataa

SEQ ID NO: 314942 - DNA, 865 bp, Unknown
  Bacterial polypeptide expressing nucleotide sequence isolated from the Sargasso Sea
gatttagatcttggacattatgaaagattctcaggcatatcagcaaagaaatccgacaatgtaacaacgggtcaaatttatagtgatgtattaaaaaaagaaagaaagggaaaatatttaggtaaaacggtacaagtaattcctcatgtaacagaccgaattaaagagtttattaataacgatgttaagaaagaagattttgtaatttgtgaaattggaggaacagttggagatattgaaagtttgccatttgttgaggccattagacaattttcaaatgatataggaaaaaaaaatactttatttattcatctgacattggttccctatatgaaagcttcagatgaaattaaaaccaagcccacacaacattctgtaaaagagctcaggagtatcggaatacaacctgatataataatttgcagatgtgaaaaaaatatccctatagatcaaaaaaaaaaaatatctcttttttgtaatgtggatattaaaaatgttatccaaacaatagatgttaaaacaatttatgaggctccaataagctttaatagagaaaatcttgatggacaggtattaaaatattttaatattaaatcaaaaaaaagtgtaaatttaaaaccgtggaaaaaaattactaatattgttttaaaaaacaaaaaatatgtaaatattgggataattggaaaatatgtaaatttaaaggatgcctataaatcactagatgaagcattagttcatggaggaataagtaacaataccaaagtaaatttaatacgaattgagtctgataattttaaaaaatctgatgttagaaaaaaactacaaaatgtatcaggtatattgatacctggtgggttggaaaaag

SEQ ID NO: 314943 - DNA, 880 bp, Unknown
  Bacterial polypeptide expressing nucleotide sequence isolated from the Sargasso Sea
atgattttacctgagcaagagcgcaaaaaaatagctttattcactaatgtacccgcagctcatgtgatcccacttaaggatgccaagagtatttacgaggtgcctttgatattgcacgaacaaggcttagagcgtgcggttgagcaaatttggcagttgggtcagggtgatgctgatttatcgcaatggaaatgggttgttgatcggtatttaaaccctacggatactgtgcgtattgcaatggttggtaaatacatggatcttgctgattcgtataaatcactctcagaagcgctgatgcatgccggtattcataatgatactcgagtgaagattgattacattgattctgaagagattgagaaaaatggtactgcagtactggcgcaagcggatgctattttggtaccaggcggatttggtgatcgcggtacagaaggtaagatagcagctattacgtatgcgcgtgaaaatcaagtgccgtttttggggatttgcttgggcatgcagcttgcggtggttgagtttgcgcgtcattgcgctggcttaacaggtgcaaatagtactgagtttgatgttaaaacaccgtatccagttgtggcgctgatgagtgaatggcaggcagcgcatggccaacaagaaactcgtactagtgagtctgataagggcggcaccatgcgtttgggtgcgcaagaatgccatctagaagatgctagcttaattcatcagttatacaatgagcgggtgatcttcgagcgtcatcgccatcgttatgaagtggatgccaatgattttgaaaagctaattgcgcctcatggccttaaggcatcagggtattcgattgataagcagttagttgaggtggtagagatgcctgagc

SEQ ID NO: 314944 - DNA, 799 bp, Unknown
  Bacterial polypeptide expressing nucleotide sequence isolated from the Sargasso Sea
aactttatttattcatctaactttggttccatttttaaaatcttcagacgagattaaaactaagccaacacaacattctgttaaggagctaagaagcatcggtattcaaccagatatagttatttgtagatctcaaagatccataccatacgagcagagaaaaaagatttcacttttttgcaatgtagaaatagataatgtaatagaaacagtcgatgtgagaacaatttatgaagctcctataagtttttacaaagaaaaacttgataaacaggtattaaaatattttaaaataaaaccaaaaaaaaatgtaaatttactcccatggaaaaacattactaaaattgttcttaaaaataaaaaacctatagatattgctataattggaaaatatgtaaatttaaaagatgcatacaaatctttagatgaagctttaattcatggtggaatcaaaaataatgtaaaagtaaatttaattagaatagaatctgaccatttgaaacctgcaaaaatccctaaaatattacgtaatgtctctggaattttaattccaggcggttttggaaaaagaggaacagatggaaaaattgctgctataaattatgctagaaaaaataaaactccttttttaggaatttgttttggaatgcaaatggcagttatagagtttgcaaaaaatattttaaaaatcaaaaaagctggatcaactgaattaaaaaagaattgctttccagtcgtaggtttaattgacgaatggtataagaatggaaaaattataaaaggcactagtgttaattta

SEQ ID NO: 314945 - DNA, 487 bp, Unknown
  Bacterial polypeptide expressing nucleotide sequence isolated from the Sargasso Sea
tatttgtttcggcatgcaaatggcaattatcttttttgctcgaaatgtacttaaaattaataaagcttcatctacagaattagattcaaaatgtattccagtcataggtttaattcatgaatggaaaaaaaatggtaaaattataaaaggaactgataaagatctaggaggtaccatgagattaggatcttatgatgctgaattggttaataattctttaattaaaagtatctataaatctaaaatagttaaagaaagacacagacatagatatgaagttaacgttaattataaaaatcaattcgaaaaaaaaggtttaattttttctggaaattcacctgataagaatttacctgaaattattgaattaaaaaatcatccatggtttattggtgttcaatttcatccagaatttaaatctagacctttggccccacatcctttattctcatcttttataaaagctgcaagaaatcataagaaatga

SEQ ID NO: 314946 - DNA, 805 bp, Unknown
  Bacterial polypeptide expressing nucleotide sequence isolated from the Sargasso Sea
ttatgatttaaaatcaatttatgacgctccgttagcatttcatagagaatttctagatgttgcagtcttaaatgcttttcaaattaaacctttaaaaaaacctgatttatctatttggaaagatgtttctaaaaatattaatttcccagaaggcgaagttagaatcgcaattgttggaaaatataccaaactaggagatgcttataaatcgattgctgaagctctgacgcatgggggtattgcaaacaacacaaaagtgatagctgaattgatagattccgaaatttttgaaaaagaaaatacagcatcttatttacaaaattttagtgctatccttgttccaggtgggtttggagaacgaggagcagagggtaaaattatggcagcaaaatttgcaagagaaaaaaaagtgccattctttggtatttgccttggaatgcaaatggcagttgttgaagcaattcgaaatttaggagaaattaagaatgctagttctgaagagtttcactacccttattctgatgttaaaaaagacattgtaccaataatttttcatttagaaaaatggatagataaaggcaaaattgttaccagaaaagttaccgactataagggtggtactatgcgtttaggagcctatgatgctatactcaaatcaaattcaaaagtcagtaaaatttataatgcacattctatatcagagagacacagacaccgatttgaagtagatataaattataaagaaattttggaaaaaaatggattcattttttctggggtttcacctgacggtttgttacctgaa

SEQ ID NO: 314947 - DNA, 339 bp, Unknown
  Bacterial polypeptide expressing nucleotide sequence isolated from the Sargasso Sea
catggcgcgatacatattcgttactggcggcgtggtttcatccttaggtaaaggtttatcgtcagcatctctagcatatcttttacaatcaagaggttttaaagttagaattagaaaattagatccttatttaaatgtagatccaggaactatgaacccgttccaacatggtgaagtgtttgtaactgatgatggagcagaaacagatttggatttaggccattatgaaagattttcaggaatatccgcaaaaaaatctgacaatataacaacaggtcaaatttatagtgatgttttaaaaaaagaacgtaaaggcaaatatttaggaaaaactgtgca

SEQ ID NO: 314948 - DNA, 802 bp, Unknown
  Bacterial polypeptide expressing nucleotide sequence isolated from the Sargasso Sea
agcccttatcaacatggtgaagtttttgtaaccgatgatggtgctgaaactgatcttgatcttggacattatgaaaggtttacaaatagatcagcaaaaaaaactgacagtacatcatctggaagaatttactcaaatgttttaaaaaaagaaagaaaaggagattatcttggagcaacaattcaagttatacctcatgttactgatgaaattaaattatttattaacagcaattttgaagatgaagatattattatttatgaaataggtggaactgtaggtgatatagaatcccttccatttttagaagcaataagacaaataagaaatgataaaaatatctcctcagcattgattcatatgacatatgtgccttatcttagttctgcaggggaattaaaaactaagcctactcaacattctgttaaagagttgttaaattctggaattcaaccagatattataatgtgcagatgtgaaaaagaaatcaatgaagagtctcttgaaaaaatttcacaattttgtaacgtaaaaaaagactcagttattcccgctctaaacgcaagttcaatttatgaagttccttcaatttattctaatgcgggattagacaatgttttgcttgaccatttaggttttgataaatcaaaatatcctcttgatttaagtgattggaacaatttaattaataaaattaataatttgaaaaaaatagtaagaataggggttgttggaaaatatacaaatctcaaagatagttataaatctctaatagaagctcttactcacggaggtatgaaaa

SEQ ID NO: 314949 - DNA, 756 bp, Unknown
  Bacterial polypeptide expressing nucleotide sequence isolated from the Sargasso Sea
tttaaacacaaaaaataaagtaaatattgcaataattggtaaatatgtggaactcaaagatgcttataaatcgctagatgaagcattaacgcatggaggtatagcaaataatttaaaagtaaaccttataagaattgaatctgattatttaaagccaaaagaaataaataataaattaaaaggtgtatcagggattttaataccaggcggttttggaaaaagaggtactgaaggaaaaattgcagctataaactacgcaagaaaaaaaaaaataccgtttctaggcatttgttttggaatgcaaatggccgttatcgaatttgctagaaatatattaaatataaaaaatgccacttcaagtgaatttggtttttcaaaagcatctgttgttgggttgatgaacgaatggacgaagaatgggaagcttatgaaaggaactgataaaaatttaggaggaacgatgcgtttaggtagttacgaagctagacttaaaaaagacacaaagataagtaaaatttataattctttgaaaatcaaagaaagacatcgtcatagatatgaagttaatatcaattataaagaagagtttgaaaataaaggaatgattttttcaggtttatctccagataataaattaccagaaattatagagttaaaagatcatccttggtttataggagttcagtttcaccctgaatttaaatctagacctttagctccacatcctttattctcttcatttataaaggctgcaaa

SEQ ID NO: 314950 - DNA, 842 bp, Unknown
  Bacterial polypeptide expressing nucleotide sequence isolated from the Sargasso Sea
tgatctagatttaggtcattatgagagatttacaggtgttaatttaagaaaagactctaatgtcactacagggagtatttacagaaaagttattgagagtgaaagaaaaggtgactatttaggtgcaacagttcaagtaattcctcatattactgatgaaatcaaacgaagaattaaggggatttcaaatgatatagatgtacaaattacagaaatcggaggaactgttggtgatattgaaatccttccatttctagaagctgcacgtcaaattcgaaaagaattaggaagtgaaaatgtcatgtttgtacatgttactttagttccatttattggaccaagtagggagttgaaaactaaaccaacgcaacattcagtaactttactaagggcagcaggaatttctccagatttgatagttctacgatctgatagagaattaaatgaagaaataaaaagtaaagtttctttattttgtgatgtatctttatcgaatgtcattaatgctcctgacttggatgatatttatgaagtcccattgagaatgtttgacgaaggattagataatgctgtgaatgatcgtttaaaacttaattcaaactcccaagacttatcccaatggaaaacaatggttgatttaaaacagaatgctataaatacggtaaaaattgcaatacttggtaaatattttggattacctgacagctacctctcagttgttgaatcgttaaagcattcttgtttacacaacaatgttaaactcgatcttcattggatagatgcagataatttcgaattagattcacttgctgacatggatggtgtaatagttcccggaggtt

SEQ ID NO: 314951 - DNA, 262 bp, Unknown
  Bacterial polypeptide expressing nucleotide sequence isolated from the Sargasso Sea
gatggcaaaaactaagtacatttttataaccggcggagtggtttcatcacttggaaaaggtattgcggctgcatctattggagcattgctagaatcaagaggcctttcagtatcgctaattaaagttgatccatatataaatgttgacccaggtacaatgagtccttttcaacatggggaagtatttgtaacaaatgatggaactgaaacagatttagatttgggccattatgagagatttgtaagatttcaagcttcaaga

SEQ ID NO: 314952 - DNA, 835 bp, Unknown
  Bacterial polypeptide expressing nucleotide sequence isolated from the Sargasso Sea
aacaaacaaacaagatttttatttgtaacaggtggagtagtttcctcacttggtaagggcgttgctgctgcctctctcggagcagttctcgaaagcagaggtctttctgtcactattcttaaattagatccatatataaaccttgatcctggaactatgagcccatttcagcatggcgaagtttttgttactgaagatggatctgaaactgatcttgatttaggacattatgaaaggtttcttgcatctaagatgtctaaatccaataacttcactacgggacaagtgtatgaagaagttctgagaaaagaaagaaaaggtgactatttaggaggcacggtacaagttattcctcacataactgacgagataaaagaaagaattataaaaggtgcagggaattccgaagtggcaatagttgaaataggtgggacagtaggtgatatagaatctcaaccttttttggaagccattaggcagatgaagatagatcttcaatcctatcaaaccttatacatgcatttgactcttttaccattcttgaaatctgcaggggaaactaagacaaaacctacacaaaggtctgtgaaagagatgttatctcatggcttacaaccagatatcttggtgtgtagatctgataaaccaatggaagaagaggaaagaaagaaaattgcattattcactaacgtaaaaccaaatgctgtcatctcgatgccagatgtagattcgatttataagatccctattgaactaaattaccaaaaagttgatgaaatagtgttagaaaaattcaaattaaattcttctaagaaacccaatttaagagactgga

SEQ ID NO: 314953 - DNA, 397 bp, Unknown
  Bacterial polypeptide expressing nucleotide sequence isolated from the Sargasso Sea
atgggaaataaacaaacaagatttatattcgtaaccggtggtgttgtttcatctctgggcaaaggtattgcttcagcttctttaggagcacttttagaaagtagaggattatcggtaacaattttaaaattagatccctacataaatcttgatccaggcacaatgagtcccttccagcatggtgaggtttttgtcaccgaagacgggtcagagactgaccttgatttaggtcattacgaaaggtttttgacgtccaaaatgaccaaggcaaataatttcacaactggacaagtctacgaggaagttcttaaaaaagagagaaaaggagattatttgggaggtaccgttcagatcataccccatgtcactgatgagataaaaagaagaatacttaaag

SEQ ID NO: 314954 - DNA, 175 bp, Unknown
  Bacterial polypeptide expressing nucleotide sequence isolated from the Sargasso Sea
atgcattttgtatttattacgggcggtgtagcgtcatcattaggcaaaggattagcttcggcatcccttgcttctcttcttcaatctagaaaatttaaagttagaattagaaagttggatccttatttaaatgtcgatcccggtacgatgagcccttatcaacatggagaggttt

SEQ ID NO: 314955 - DNA, 598 bp, Unknown
  Bacterial polypeptide expressing nucleotide sequence isolated from the Sargasso Sea
taaagatgcagcaaaatcttttaaagatattgacggtattttactgcctggagggtttggatctaggggcgcagaaggaaaaattttaacttcaaaatttgcaagagaaaataatattccttttcttggtatatgcttaggattgcaatgtgcagttattgattatgcgcgaaatgtctgtaaaataaatgatgctaacagttctgagtttaaacccaaatccaaaaataaggttattgatctcatggaatcccaaagggcaattaagttgaagggaggaacaatgagattaggttcttatgattgtgagatttcaactggtactaaagcatattctatttatcgtaaaaagactatcagtgaaagacatagacatagatttgaagtaaataataaatatgtctccaaaatggagaaaaatgggttaattttctctggtatgaataaaaaattaggagtggtagaaataattgaattaaaaaatcatccatggtttgttggatgtcaatttcacccagaattaaaaagtagggtagataaagctcatcctctttttagagaatttgttaaagcttctcttaaaaatagtaaaatataa

SEQ ID NO: 314956 - DNA, 629 bp, Unknown
  Bacterial polypeptide expressing nucleotide sequence isolated from the Sargasso Sea
tttaaaaccaagagaaataaataataagttgaaaggtgtatcagggatcttaataccaggtggttttggaaaaaggggtaccgaaggaaaaattgcagcgatatattatgctagaaaaaacaaaataccatttctaggcatctgttttggaatgcaaatggctgttattgaatttgctagaaatgaattaaacataaaaaatgcaacatcaagtgagtttggttcttcaaaagcttccgttgtaggtttgatgagtgaatggttaaaagatggtaaattaatgaaaggaactgataaagatttaggtggaaccatgcgattaggaagctatgaagcaagacttaaaaaagacacaaaaataagtaaaatttataattctttgaagatcgaagaaagacatcgtcatagatatgaagttaatattaattataaagaagattttgaaaataaaggaatgattttttcaggcttatctccagataataaactaccagagattattgaattaaaggatcatccttggtttattggagtacagtttcatcctgaatttaaatctagacctttaacaccgcatcctttattctcatcatttataaaagccgcaaaaattaattcgaaaaaatgaa

SEQ ID NO: 314957 - DNA, 388 bp, Unknown
  Bacterial polypeptide expressing nucleotide sequence isolated from the Sargasso Sea
gatgggaaaagtacaaactcgttttattttcgttactggaggcgttgtatcttctcttgggaaaggtattgcttctgcatctattggggcattacttgaaagtagagggttaactgtaacaatccttaagcttgatccatatatcaatttagaccctggaaccatgagtccttttcagcacggggaggtttttgttactgaagacggatcagagactgatttagatttaggtcattatgaaagattcttaaaaactaagatgaccaaggataataattttactactggccaagtctatgaagaagtattaagaaaagaacgaaagggtgattatctaggtgggaccgtacaagttatacctcatataactgacgagataaaaaataaa

SEQ ID NO: 314958 - DNA, 793 bp, Unknown
  Bacterial polypeptide expressing nucleotide sequence isolated from the Sargasso Sea
catggcgcgatatatattcgtaactggcggcgtggtttcatcacttggaaaaggtctttcttcagcttcgttagcttacttattacaatcgagaggatttaaagttagaattagaaaattagatccttatttaaatgttgatccaggaacaatgagtccatttcaacatggtgaagtttttgtaacggatgatggtgcagaaacagatttagacttgggacactatgaaagattttccggaatttctgcaaaacaatcagacaatataacaacaggaaaaatatatagtgatgttttaaaaaaagagagaaaaggaaaatatttaggtaaaactgtacaggtaattcctcatgtcactgatcggataaaggaatttattaaaagtgatataaaaaaagaagattttgtaatttgtgaaataggcggaactgtcggtgatattgaaagcttaccttttgttgaggcaattagacaattttcaaatgatattggtaaaagaaatactttattcatacatttaactctcgttccttacatgaaagcttctgatgaaattaaaactaaaccaactcaacattccgtaaaagaattgagaagtattggtattcagcctgatattataatatgtagatgtgaaagaagtattccattagatcaaaagaaaaaaatctctttattttgtaatgtagatattaaaaatgttatacaaactattgacgtaaaaactatttacgaagcaccaattagttttaatgctgaaaaacttgataaacaagtgctcaattattttaaa

SEQ ID NO: 314959 - DNA, 205 bp, Unknown
  Bacterial polypeptide expressing nucleotide sequence isolated from the Sargasso Sea
tttgcaaacgatgttggtaagaaaaacgctttatttatccatttaactttagttccttatttaaaagcatcagacgagataaaaacaaaaccaactcaacattctgtaaaagagctaagaagtataggtattcaaccagatattatcatttgtagatctgaaagacccataccactagaacatagaaagaagatttctttattct

SEQ ID NO: 314960 - DNA, 907 bp, Unknown
  Bacterial polypeptide expressing nucleotide sequence isolated from the Sargasso Sea
ccactaggagaagtaaaaactaaacctactcaacatagcgtcaatgcacttagggctatgggtattcagcctgattttttagtctgtagaagtgatgaacaatttgataatggaattaaaagcaaattatctcttcattgcgatgtgaagcttgaaagaatcttttcactagaaacactagatacaatttacgctgttccaatcgcacttgaaagtcagaatatgggtgaaaaggtttcagaatttttaaatcttgaaaaaaataaatctaatttaaaaaattggaatgaaatggtaaatgtaattagaagtgataagaaaaatttaaatattggaataatcggcaaatatacctctctagaagactcatacttatcagtaaaagaagcacttcttcacgcagcttttaatcagtcattaaacttaaatattgattggatattatctgatgaaatggagcaatcagatttagataaaattttaggcaaattatctggcatcgtaataccaggaggatttggccctagagggattgacggaatggttaaatgtgccaattatgcaagaactaagaaaattccatatctcggtctttgcttaggcatgcaaataatggtaattgaatattctagaaatgtattgcatttagaagatgcgaattcatccgagtttaatgaaaaatcaaataatcttgtgatagattttttaccaggacaaatgaaattaaaagaaacaggggcaagtatgaggctcggcaattatccttgtataatcaagaaagattcgaaagtttttaatttttatcaaaaagaagaaattaaagaaaggcataggcacagatacgaagtcaataatttatttaaagatagattagaaaaagaaggtctattgccagttggaacttctc

SEQ ID NO: 314961 - DNA, 518 bp, Unknown
  Bacterial polypeptide expressing nucleotide sequence isolated from the Sargasso Sea
aatgccggatataaaatatatttttgttacaggaggggtatcttcatctctaggaaaaggtataattgctgcttctctggctaagttacttcaagcccaagattttaaagtcactattcaaaaatttgatccctacatcaatgtagatccaggtaccttaaatccctacgagcacggcgaatgttatgtaactgatgatggtgctgaaactgatttagatttgggacattacgaacgatttttaagtattaagacctcacaagcgaataatgttactacaggaagagtatatcaaagtgtaatagaaaaagaacgtaagggtttatttttagggaaaacggttcaagttattccacatattaccaacgagataaaagaacggatgcagctattaggtaagtctggagaatttgatatagtaatcactgaaattggaggaacagtaggtgacattgagtcacttccatacattgagtctgttagacaattgatttatgagcttggagaagacaatgcta

SEQ ID NO: 314962 - DNA, 958 bp, Unknown
  Bacterial polypeptide expressing nucleotide sequence isolated from the Sargasso Sea
tagatccgaaagagagattccaaaagtagaaagaaaaaaaatatcattattttgcaatgttcctatagcaaatgttatcgaaactgttgatgtaaaaactatttatgaggctccaattagctttcataaagaaaaattagacgaaagggttctctcatattttaatattaaaaataataagaaacctaatttatcaagatggaaaaatataacatcaaaagttttaaacccaaaaactgatgtaaatatcggaattgtaggaaagtatataaaccttaaagatgcttataaatctttagacgaagccctaatccacggaggtatttctaataatgttagagtaaaactggaaagaattgactctgaacatctagacccgaaaaaaatcaagcctttacttaagaatatatctggagttttaataccaggcggttttggaaaaagaggcacggaaggcaaaattgctgccataaaatatgcaagattgaataatatacctttctttggaatttgttttggaatgcaaatggctgttatcgaggctgctagaaatatgttgaatataaagaatgcatctagtagcgaatttggaaataactgtacaccagttgttggtctgatcgaagaatggcaaaaaggaaaaaaaattttcaaaggtagtgaaaaagatttaggtggaactatgagattaggtttatacgatgcaataattaaaaataactctttaatttcaaaaatttactcagaaaaaagaattaaagaaagacacagacacagatatgaagtaaatataaaatacaaaaaagattttgagaaaaaaggacttattttttctgctttatcaccagatggtactttacctgaaataattgaattaaataatcatccatggtttgtaggggtgcagttccatcctgaattcaaatcaagacctttcactccacacccgttgttctcg

SEQ ID NO: 314963 - DNA, 968 bp, Unknown
  Bacterial polypeptide expressing nucleotide sequence isolated from the Sargasso Sea
ttgtttattcatttaactttagttcctttccttaaagcatctggagtacttaaaactaaaccaactcagcattcagttaaagagttacgaagtttaggtattcaacctgatataataatttgcagatccgagaaagaacttccaaaagaagaaagaagaaaaatatctttattttgtaatgttcaaatagaaaatgttattgaaaccgttgatgttagaaccatatatgaagcaccgattagttttcacaaggaaaaacttgatgaacgagttctatcatattttaatattaaaaataaaaaattaccaaatcttagtaaatggaaaaacattacttcaaaagttttaaatccgaagaaagatgtaaacataggtattataggcaaatatgttaatttaaaagatgcttataaatctttagatgaagctttaattcacggtggaatatcgaacaatcttaaagtaaatctaaaaagaatagattcagaaaatttaaaagctgaaaatatcaaacctttgttaaaagaggtgtcgggagttcttattccaggaggttttggcaaaagaggcagcgaaggtaaaattgctgccataaaatatgcaagattgaataatatacctttctttggcatttgttttggtatgcaaatggcagttattgaagcagctaggaatttattaaatattaaaaatgcttctacaagtgaatttggaaataattgtacacctgtagttgggttgttagaggaatggaaaaaaggaaaaaaaagaattaaaggaagtgaaaaaaatttaggtggaacaatgagattaggtttatatgaagctatattaaaaaataattctttaatatctaaaatctattctggaaaaaaaatcaaagaaaggcacagacatagatatgaagtaaatataaagtataaggaagattttgaaaaaaaaggcttaattttttctgctttatcccc

SEQ ID NO: 314964 - DNA, 873 bp, Unknown
  Bacterial polypeptide expressing nucleotide sequence isolated from the Sargasso Sea
tactgatctagatcttggtcattatgaaaggtttacaggcgttaatttaagaaaagactccaacgttactacaggaagtatttacagaaaagtaattgaaagtgagagaaaaggagattacttaggtgcaactgttcaagttattccccatattactgatgaaataaaaagaagaatcaagggaatctcaaatgatgtagatgttcaaatcacagaaattgggggaaccgttggagatattgaaattcttccatttcttgaagctgcaagacaaataaggaaagaattaggaactgataacgtaatgtttattcatgtcacattggtaccttttatcggtccaagtaccgaattaaaaacaaaacctactcaacattccgtatctttattaagagcagcaggtatctctcctgatttaattgttttgagatcagacagagaacttaatgatgagataaagagtaaagtttcattattttgcgatgttgcagtaaataatgtaattaatgcacctgatttagatgatatctatgcagttcctttaaggatgcgtgatgaaggtcttgataaatcagtggatgagagattgaatctacaaactaatgaaccttcattagaggaatggaaaacaatggtaaatcttaaacttgaagcaaatgaaacagttaagattgcaatccttggaaaatattttggattaccagatagctacctctcagttgtagagtcacttaatcatgcttgtcttcaaaataaagtaaaactcgatcttcactggatagatgcagacaattttgaaatagaaaatttacaagatatagatggggttattgtcccaggaggatttggatacagggggatagaaggaagatt

SEQ ID NO: 314965 - DNA, 364 bp, Unknown
  Bacterial polypeptide expressing nucleotide sequence isolated from the Sargasso Sea
taaagatggtaaattaattagaggtacagataaaaatttaggcggtacaatgcggttaggaagctatgaagctcgacttaaaaaagacacaaaaatcagtaacatttataattctatgaaaatacatgaaaggcatcgccacagatatgaagtaaatatcaattttaaagatgaatttgaaaaacaaggaatgattttctcaggcctatctccagacaataaattacctgaaactattgaattaaaagatcatccatggttcataggagtacaatttcatcctgaatttaaatctagacctttagcaccacatcctttattctcttcttttattaaagctgcgaaaaaaaattcaagaaaatga

SEQ ID NO: 314966 - DNA, 550 bp, Unknown
  Bacterial polypeptide expressing nucleotide sequence isolated from the Sargasso Sea
actgagggcaaaaattgaagcaattagatatgccagagaaagaaaaataccttttctaggtatttgttttggaatgcaaatggcaatgattgagttttcaagaaatattttaaaaattaaaaaagctggctctagcgaattagataaaaattgttttcccgtaataggattaattgatgaatggaaaaaagatggaaaaattataaaaggaactgataaaaaccttggaggaacaatgagattaggtctatatgaggcaaaacttagaaataattctgccataaaaaaaatctataaatccaatatgattaaagagagacacagacatagatatgaggtcaatataaatttaatgcaaaaatttgaaaaaaaaggtttgatattttcaggaatttctcctgacaatcaattacctgaaattgttgaactaaaaaatcatccatggtttattggagtccaatttcatccagaatttaaatctagacctttaaatcctcatcctttattctcatcatttattaaaactgcaaaatctcttaatggaaaataa

SEQ ID NO: 314967 - DNA, 388 bp, Unknown
  Bacterial polypeptide expressing nucleotide sequence isolated from the Sargasso Sea
atgggtaaaggtaatccaacaaaattcatttttgtactaggtggagtgatgtctggtctaggtaagggtattgctgcgtcttcaataggctatcttcttaaaaattctggtctaagagttacaattttgaaattagatccatatttgaatgtagatccagggactatgaatccttatcagcatggtgaggtttttgttttggatgatggatctgagacggaccttgatcttggccactatgagcgatttattgatgtaaacatgaccaaaaataataacgcaaccgcaggacagatttatagcaccgttttagataaagaaagaaaaggtgaatatctaggggaaaccgtgcaagttattcctcatgttaccgatgaaatcatcaata

SEQ ID NO: 314968 - DNA, 727 bp, Unknown
  Bacterial polypeptide expressing nucleotide sequence isolated from the Sargasso Sea
gatggtaaattcggaaactagatttatttttgtcactggaggagtggtgtcttctttaggtaaaggtctgacttctgcttctttgggagctttattagaaagcagaggtattaaggtaactataatgaaactggatccttatattaacttagatcctggaaccatgagcccgtttcaacatggcgaagtttttgttactgaagatgggtccgaaactgatttagatttggggcattatgaaaggtttataaagtccaaaatgtccaaagataataattttactacagggcaggtctatgaaactgtcttaaagaatgaaagaaaaggggattaccttggaggcactgttcaggttatacctcatataactgatgagattaagagaagaattgttaaaggatcaaaaaatgcagaagtagctatagtagagataggtggtacagttggggatattgagtcacaaccttttctagaagccatcagacaaatgaaaattgaattgggttctgaaagaactttatttatgcatctgactcttgttccttacattgctgcagctggagagaccaaaacaaaaccaacacaaagatcagttaaagagatgctatctcatggtcttcaaccagatatactcatttgcagatcagataaagagctttctgaagaggctagagaaaaaatagccctgtttactaatgttgaaaaacaaagtgttatttctctgcct

SEQ ID NO: 314969 - DNA, 583 bp, Unknown
  Bacterial polypeptide expressing nucleotide sequence isolated from the Sargasso Sea
atggctaatacaaaatatatattcgtaactggaggagttacttcttcattgggaaaaggtataattgcagcgtccttagccaaattactacaagcaagaaaatttaatgtaactattcagaaatttgatccatatataaatgttgatccaggaacattaaacccttacgaacacggagagtgttttgtcactgatgatggagctgaaactgatcttgatttgggtcattatgaaaggtttttaaataatagtacctctcaagaaaataatgttacaacaggtagagtgtatcaaagtatcatagagaaagaaagaaaaggtgattttttaggaaaaacagttcaagttattcctcatgtaacaaatgaaattaaggaaagaatgatgcttttaggtaaatcaggtgattatgattttgttataaccgaaattggaggaacagttggtgatattgaatctttaccttacatagaatctgtaaggcaacttgtttgggagctaggtaaagaaaataccgttgtaattcatttaactttaattccattcctttcagctacaggggagttaaaaactaaacccactc

SEQ ID NO: 314970 - DNA, 226 bp, Unknown
  Bacterial polypeptide expressing nucleotide sequence isolated from the Sargasso Sea
catggcgcgatatatttttgtcactggcggcgtggtttcatcactaggaaaaggtttatcatcagcttcacttggttacttgcttagatcacaaggttataaagtcaggataagaaaaatggatccgtatttgaatgttgatccaggcacaatgagtccttttcaacatggtgaaatttttgtgacagatgatggtgctgaaacagatttagatttaggacattat

SEQ ID NO: 314971 - DNA, 286 bp, Unknown
  Bacterial polypeptide expressing nucleotide sequence isolated from the Sargasso Sea
catggcgcgatacattttcgttactggcggcgtggtttcatctttaggaaaaggattgtcatcagcttcacttgcatatttattacagtcaagaggatataaagttcgtataagaaaactagatccttatttaaatgttgatcctggaacaatgagcccgtttcaacatggggaagtttatgtaacagatgatggagcagaaactgatttagatttaggacattatgaaagattttcaggaatttcagataaaaaatctgacaatattacaacaggaaaaatttat

SEQ ID NO: 314972 - DNA, 751 bp, Unknown
  Bacterial polypeptide expressing nucleotide sequence isolated from the Sargasso Sea
attgccattattcggaaaatatgtagaacttaaagatgcctataaatctttagatgaagcattaacccatgggggaatagctaataaccttaaagtaaaccttgtaagattagagtcagactatttaaaacctaaaagaataaaaaaggaattaaacaatgtttcaggaatacttatacctggcgggtttggcaaaagaggaacagaaggaaaaattgcagcaattaattttgctagaaaaaacaaaattccatttttaggcatatgttttggaatgcaaatggcagttattgaatttgcacgaaataaattaaacattaagaaggcaacgtctagtgagtttggcccttcccaagcctcggttgttggattaatgagtgaatggtcaaaggatggaaagttaatgaaagggactgataaagatttaggtggaacaatgcgcttagggagctttgaagcgagacttaaaaaggacacaaaaataagtaagatttataattcattaaaaatatacgaaagacatcgacatagatatgaagttaatattaattacaaaaaagattttgaaaataaaggaatgattttttcaggaatatcaccagataataaattacctgaaattatagaactagaggatcatccttggtttataggagtacagtttcatcctgaatttaaatctagacctttaacaccacatcctttattctcatcttttataaaggcagcaaaaatcaattcaaaaaaatga

SEQ ID NO: 314973 - DNA, 873 bp, Unknown
  Bacterial polypeptide expressing nucleotide sequence isolated from the Sargasso Sea
taaaaagaaacttagtggcttttgcggtgtcagtattatctctgtaattgaagctttagacgcagacagtatttattcggtacctctttctttaaaaaaagaaggtttatgcaaagaaaccctgaaatatttagaacttgaagataaaaaatgtgatttgagaaattgggaagaactaatacataatctaagaaatcctggagctccaataaaagttgctctcgtaggtaaatatattgaacttggagatgcatatttatccgttgttgaagctttaaaacatgcatgcattgaacaaaaggcttcattagatttgcattgggtaagtgctgaaatgatagaaaaaaattcagcagagacttacttaaataaagttgatgcaattgtcgtacctggaggatttggaaatagaggagtaaatggaaaaatttcggctatcaaattcgcaagagaaaataaagttccctttttaggcctgtgccttggtatgcaatgtgcagttatagaatgggctagaaacgtagctaatcttccagatgcatctagttcagaactagacccaaaaactcccaatccagtcatacatttattaccagaacaggaagatatagttgatttaggtgggacaatgagacttggagtttatccatgtagattaactaataatacaactgggaaaaacttatatgatgaagatgttatttatgagagacatcgacatagatatgaatttaataattactacaaacaaagttttttaaattctggatacaaaattagtggcacatcaccagatggcagattagtagagttaattgaattaggaaatcatccttacttcttagcatgccaatatcatcttgagtttttatc

SEQ ID NO: 314974 - DNA, 790 bp, Unknown
  Bacterial polypeptide expressing nucleotide sequence isolated from the Sargasso Sea
gaaacgcgccgtggcccccgaaggaggggtcaccattgccgtggtcggcaaatataccggcctcctggatgcttataaatccttggctgaggccctgacccatggcgggctagccaacaatgtgaaggtgaacctcaagtggatggagtctcagagttttgaggatggtggtacatttcaacaacttgaagacgttcacggtattttggtgcccggcggcttcggcgaacgcggtgctgaaggcaagatcatggccgcaaagtttgcccgagagagacaggtcccgtattttggaatctgctttggtatgcaaatggcggtagtcgaggctgctcggaatatggccggaatcagagacgctggaacgacggagtttggcgagccgacagatgcggttgtggggctactcacggaatgggaacgggacggcattgtctatcagcgcgacgaaacatcggagaaaggcggtaccatgcgcctcggggcttatccttgcatgttgagtaatggcagtcgggtccgacgcatctacggcgcggacggtataagtgaacggcatcgacaccggtacgaagtcaatatgtcttatgaggaccggctcgccgaggcaggcatggttttctccggcaagtcgccggatggtgtgttacccgaaatcgtggagatccccgatcatccctggtatattggcgttcagttccaccccgagcttaaatcccgcccgtttgagccgcatcccctatttaccgacttcattcgggcagccgtcgaacaatcgcggttggtataa

SEQ ID NO: 314975 - DNA, 665 bp, Unknown
  Bacterial polypeptide expressing nucleotide sequence isolated from the Sargasso Sea
ggttaactcagtaaaagtaaatgtacatccaatccactctgaatcaattaacaaaacaaatgtaaaatccctgatgtcaaacctagatggggttttggtcgcaccgggctttggtgatagaggtatagagggtaaaataatatcaattgaatatgctagggttaatgatattccttttcttggaatttgtcttggaatgcaaatggcagtgattgagtatgcaagaaatgtcattggtctaaaaaatgccaattctactgaaatggattatcacacaaaacaccctgtaatttctctcatggaggatcaagtaaatgttgaaaaaaaaggtggtacaatgagattaggttcgtggaaatgtgaaatttccaaaggaacattaactcatgatatttataagaaaaatgtaataaaagaaaggcatcgacacaggtacgagcttaattttaattatatagaatcattaactaaatcaggtatggttttctgtggtaaaaatcctgaaactgatttagttgaaataattgaattacctaatcacagttggtttattggagtgcaatttcatcctgaatatcaaagtactgtagataaaccacaccctctgtttaaatcattcattaaagcagcaaccaataaaaaaagaacatatggcagaaagtaaa

SEQ ID NO: 314976 - DNA, 774 bp, Unknown
  Bacterial polypeptide expressing nucleotide sequence isolated from the Sargasso Sea
aggattgtcaatcagtatgataaaactcgatccatatataaatgttgatccaggtacaatgagtcccttccagcatggagaggtatttgttacatctgatggaactgaaactgatcttgatctgggtcattatgagcgttttgttagaactgaaacaggcaggaacagtaattttactgctggaagaatttatgagtctgtgatcgctaaagaaaggagaggtgattatctaggtgcaactgtacaagtgattcctcatataactgatgaaataaaaaatggcataaaaaaaggatctaatgatgccgatatatgtcttgtagagattggaggaaccattggagatattgaatcccttccatttatggaggcgattaggcaaatgggtattgagcttggtccagaaaaagtagtttatgttcatctgacactcgtcccatacattgcttcatcgtcagagataaagacaaaaccaacacagcactcagtgaaagaaatgagatcgattggtattcagccagatattttagtatgtcgctcagaacacgaactaccagacgagcaaagaaaaaagatagcgctattcactaatgtcaatgaggaagctgtaatttcagcttacgatgttgatgatctctacaagattcctgagatgatgcatcaacagtctttagacagtattgtgatcaaaaaactaaaactcaagacacctgacgctaatctaaatgaatggaagtccattgttagggcaaaaacttccgctaagaaagaaat

SEQ ID NO: 314977 - DNA, 265 bp, Unknown
  Bacterial polypeptide expressing nucleotide sequence isolated from the Sargasso Sea
ttgggtaaaaaaaatttataaatcaaataatattaacgaaagacatagacacagatacgaggttaataaacatttgcagagtaaatttgaaaataaaggtatgattttttcaggtatgtcaccaaacaataaccttcctgaaataattgaattaaagaatcatccatggtttataggtgttcaatttcatcctgaatttaaatctagacctttaaatcctcatcctttattctgctcatttattaaggctgcaaaattaaaataa

SEQ ID NO: 314978 - DNA, 370 bp, Unknown
  Bacterial polypeptide expressing nucleotide sequence isolated from the Sargasso Sea
atggatgagtggaataaagatgaaaaaataattagaggtactgataaagaattaggtggaactatgagactaggactttataaagcaaaattaagacataattccttagtaaaaaaaatttataaatcaaattttatagacgagagacacagacatagatacgaagtgaataaatatttacaaatcaagtttgaaagcaaaggtatgattttttctggtatgtccccaaataacaatttacctgaaataatagaattgaagaatcatccttggtttataggtgtacagtttcacccggaatttaaatctagacctttaaaccctcatcctttattctcttcttttattaaggctgcaaaatcaaaataat

SEQ ID NO: 314979 - DNA, 259 bp, Unknown
  Bacterial polypeptide expressing nucleotide sequence isolated from the Sargasso Sea
catggcgcgatttatttttgtcacgggcggcgtggtttcatcacttggaaaaggtctctcatcagcttcattggcatatttattaaaatctcaaggatataaagtaagaataagaaaaatggatccatatttaaatgtagatcctggaacaatgagcccatttcaacatggagaggtttttgtaacggatgatggtgccgaaacagatttagatttaggtcattatgaaagatttactaatatctcatcaaaacaatca

SEQ ID NO: 314980 - DNA, 728 bp, Unknown
  Bacterial polypeptide expressing nucleotide sequence isolated from the Sargasso Sea
gttggagatattgagagtttgccatttttagaagctataagacaattttcaaatgataatggaaaatcaaaatcattatttattcatttaacatttgttccttttttaaaatcttcagatgaaattaaaacaaaaccaacacaacactctgttaaagaattaagaagtatcggtattcaacctgacatagtgatatgtagatctcaacagtctattcctttagatcaaagaagaaaaatatccttattttgtaatgtggacattgctaatgttatagaaacagtcgatgtaaaaactatttatgaagccccaataagtttctttaaccagaaattagataagcaagttttaaaattctttaaaataaaatctagaaaaagaccaaacttgcttccttggaaaaaaattacaaatatagttttaaatgctaaaagaatagtaaatattgctatcataggcaaatatgtaaacttaaaagatgcttataaatcacttgatgaagctcttacccatggaggaatttcaaataaagttaaagttaacttagtaagaattgagtcagacaaaattagatcaaaaaaaattaaatcaaaattaaataatgtatcaggaatattgataccaggagggtttggtaaacgaggaaccgagggaaaaattgaggcaattagatatgcaagagagagaaaaataccttttctaggtatttgttttggaatgcaaatggc

SEQ ID NO: 314981 - DNA, 844 bp, Unknown
  Bacterial polypeptide expressing nucleotide sequence isolated from the Sargasso Sea
gaaagagaaataccaaaaacagaaagaaaaaaaatatctttattttgtaatgtacctatagaaaatgttattgaaacagttgatgtaaaaactatatatgaagcaccaattagttttcataaagaaaaactggacgaaagagtactttcttatttcaatatcaaaaacaaaaaatcacctgatttaagtaaatggagaaatattacttctaaagttttaaatccaaaaaaagatgtgaatataggtattataggtaaatatattaatcttaaagacgcttacaagtcactagatgaagctttaattcatggaggcatatcgaacaacataaaagttaatttgaaaagaatagattcggaaaatttaaaaccagaaaatataaagccattattgaagaatgtgtcaggagtgcttattcctggaggatttggtaaaagaggcacagaaggtaaaattgctgccataaaatatgcaagattgaatagtatacccttctttggaatttgttttggtatgcagatggcgattattgaagctgccagaaatttattaaacattaaaaatgcttctagcagtgaattcggcaataactgtaccccagttgttggattgctagaagagtggcaaaaaggcaaaaaaagaattaaaggaagtgaaaaagatttaggtggaactatgagattgggtttatatgacgctgtattaaaaaataattctttgatatctaaaatatattctgaaaagagaattaaagaaagacacagacacaggtatgaagtgaatataaaatataaaaatgattttgaaaaaaaaggtttgattttttctgctttatcacccggat

SEQ ID NO: 314982 - DNA, 863 bp, Unknown
  Bacterial polypeptide expressing nucleotide sequence isolated from the Sargasso Sea
tatgtctaaaccaagatatatatttataactggtggcgtggtttcatctttgggaaaaggaatttccgcagctgcaattggttctttactccaggcaagaggttattcagtaagaataagaaaattagacccatatattaacgttgatccaggaactatgagtccttatcagcatggagaggtatttgttacagatgatggtgctgaaacagatttggacttaggacactatgagagatttacaggagttcctgctaaacaaagtgataatattacgacaggtaggatctatcaaaatgtaataaataaagaaagagagggtgattacttaggaagtacggttcaagttattcctcatgttacggatgaaataaagtcttttattacaaaagatataggaaaatgcgattttattttggtagagattggaggaacagtaggtgatatagaaagtcttccttttttagaagccataagacagtttggtaatgaaataggtaaaaaaagagcaatatatatacatttaactttagttccatatatagacacttctaatgagcaaaaaactaagcctacccagcattctgttaaagaattaagagaaataggtatacaacctaatattttactatgtaggtgcgataggcctattgaggctaacgaagtagataaaattgcattattttgtaatgtaaaatcagaagatgttattcaggctctagatgtaaaaaatatttataatgtacctatagtttatcatagtgaaaaattggatgtacaagttttaaggcatttcaatattaaacctaataaaataaatttaataaaatggaaaaaaattgttctatctgcaaataaagtca

SEQ ID NO: 314983 - DNA, 424 bp, Unknown
  Bacterial polypeptide expressing nucleotide sequence isolated from the Sargasso Sea
aaaagctggatctagtgaattagataaaaactgctatccagttataggtttaattaatgaatgggataaagatggtaaaataatcaaagggacagataaaaacttaggtggaacaatgagattaggcttatatgaagctaaattaaaaaataattctgccataaatagaatatataaatcaaaaacaataaaagaaagacatagacatagatatgaagttaacaataatcttaaaaatcaatttgagaataaaggattaattttttcaggaatgtcaccagataacaaattgccagaaattattgagcttaaaaatcatccgtggtttataggagttcagtttcatcctgaatttaaatctagacctttgtctccacatcctttattctcatcttttatcaaggcagcaaaaaatcacaaatga

SEQ ID NO: 314984 - DNA, 472 bp, Unknown
  Bacterial polypeptide expressing nucleotide sequence isolated from the Sargasso Sea
aatgcaaatggctattattgaatttgcaagaaatcaattaaatatcaaaaatgcaacttcaagtgaatttgataaaaaaggattaccaatagttgggttaattaacgaatggtctaaagatggtaaaataattaaaggcactgataaagaccttggggggacaatgagattaggttcatatgatgcgaaacttagagataattctttaattagaaaaatttataaatcaaaaattataaaagaaagacatagacatagatatgaagtgaacattgcttttaaagataaatttgaaaaaaaaggcatgattttctctggtttatcaccagataataagttaccagagattatagagttaaaaaaccatccttggtttattggggttcagtttcatcctgaatttaaatctagacctttatcgcctcatcctttattctcatcatttatcaaagcagcaaaaaatcataaatga

SEQ ID NO: 314985 - DNA, 742 bp, Unknown
  Bacterial polypeptide expressing nucleotide sequence isolated from the Sargasso Sea
atatttattacaatcaagaggttacaaagttcgcctaagaaaattagatccttatttaaatgtggatccaggaacaatgagtccgtttcaacatggagaagtttttgtaaccgatgatggggctgaaacagatttagatctaggtcactatgaaagattttcaggtgtaactgcaaagaaaacagataacattacaactggaaaaatttatagtgatgttcttagaaaagaaagaaaaggtcagtatttaggtaaaactgttcaagttattccacatattacggatagaattaaagaatttataaaacacgatacatctaaagaagattttgtcatttgtgaaataggcggaatagtaggggacatagaaagtttaccatttgtagaagcgataagacaattttcgaatgatattggtaaaaaaaatgcattatttattcatttaactttagttccttatttaaaagcatcggatgaaataaaaaccaaaccaacacaacattctgtaaaagaattaagaagtattggtattcaacctgatattataatttgtagatcagaaagacctattcctttagaacatagaaaaaaaatatctttgttttgtaatgttgatattaaaaatgtaattgaaactgtagatgttaaaactatttacgaggcaccaattagttttgctaaagaaaaattagatgtccaagttttaaattatttcaaaataaaatctaaaaaaatcaaataa

SEQ ID NO: 314986 - DNA, 823 bp, Unknown
  Bacterial polypeptide expressing nucleotide sequence isolated from the Sargasso Sea
acaaaacctactcagcactctgttaaagaattaagaagccttggtattcaacctgatataatagtttgcagaagtgaaaggtcaataccaaacgatcagagaaaaaaaatatcactcttttgtaatgtaccaattgaaaatgtagtagagacagttgatgtaaaaacaatatatgaagctcctataagttttcataatgaaaaattagataaactagttttgaatttttttagtctcaaaccaaagaaaaaagtaaatttaagaccttggaaaaatattaccaatattattttaaaaaacaaaaaaaaattgaatattgcaatcgtaggaaaatatgtagatttaaaggatgcatacaaatcattagatgaggcactaattcacggtggcattgaaaataaagtaaatattaatttagagagaatagagtcagataaaattaacaaattaaattctagcaaaaaattaaaaaaaatatcaggtattttaattcctggaggttttggttctaggggaaccgagggaaaaattgctgcaattaaacatgctagaattagtaaaacaccatttttaggaatatgttttgggatgcaaatggccgttatagaatttgcaagaaatgttttaaaaataaatgatgctggatcaactgaatttcataaaaaatgttttccaatagttggtttaataagcgagtgggaaaaagatggtaaattaattaaaggaacaaaatccgacctaggtggtacaatgagattaggagcttataaagcaaaattaagacataattctttaataaataagatatataagtctaaagaaa

SEQ ID NO: 314987 - DNA, 934 bp, Unknown
  Bacterial polypeptide expressing nucleotide sequence isolated from the Sargasso Sea
ggtatttgtaactaatgatggaactgaaacagatttagatcttggtcactatgagagatttgttagatttgaggcatcgaaaaaaaataattttacagctggaaaagtttatgaaactgtaatcagaaatgaaagaaaaggtgattatttaggaggcactgttcaagttattcctcatattacaaacgaaatcaagaaaagaattaagtcgggtggtcaaggtaaagacgtggccatagttgaagttggaggaaccgtaggtgatattgaaagtcaaccttttgtagaagcattaagacaaatggcattagagcttccaaattcttcctgggcatttgttcacttgacccttgttccttttataaatgcatcaggtgagcttaaaactaagcctacacagcattcagttaaagagctaagatcacttggaattagccctgatgttcttatttgtagatcagataaagaattaccaaaagatgaaagaaataagatagctttattctgctcagtccccaataagagcgttatctctatgcacgatgtagatactgtatattcaataccaattttacttaacaaacaaaaagtagataaaacaattcttgaaaaattaaaaattaagtctaaaaatcctcaattaaatgattggaaaagagttgttaaagcaaagcttcttccagaaaaagaagtaaatgttgcatttgtaggcaaatacactgaattaaaagattcatataaatctataaatgaagctttagagcatgcaggaattaagaatagcactaaagtaaatataaattttgttgaagctgaaaatctcacatcaagaaacgtaaataaaattcttaaaaaggcagatgcagtcttggttccaggcggctttggagaaagggggattgagggaatgatacttgcttgtaagtattcaaga

SEQ ID NO: 314988 - DNA, 310 bp, Unknown
  Bacterial polypeptide expressing nucleotide sequence isolated from the Sargasso Sea
tttaggtagttatgaagctagacttaaaaaagacacaaaggtaagtaaaatatataattctttaaaaataaatgaaagacatcgtcacagatatgaagtcaatattaattataaagagaaatttgagaaaaaaggtatgattttttcaggtttatctccagacaataaattaccagaaatagttgaattaaatgatcacccatggttcattggagttcagtttcatcctgaatttaaatctagacctttaactccgcatccattattctcgtcgtttataaaggctgcaaaaatttattcaaaaaaatga

SEQ ID NO: 314989 - DNA, 451 bp, Unknown
  Bacterial polypeptide expressing nucleotide sequence isolated from the Sargasso Sea
atgacgcgctacatattcgtcacgggcggtgttgtttcttcattggggaaaggcattgcctccgcttcattggcggccatcctggaggcgcggggacttaaggtcaccatgctcaagctggacccgtacatcaacgttgacccgggcaccatgagcccgttccagcacggtgaagtgttcgtcacccacgacggcgccgagaccgacctggacctgggccactacgagcggttcatccgcacgaccatgacccagaacaacaacttcaccaccggccgtgtctacgagcacgtgctgcgcaaagagcgccgtggtgactacctgggtgcaaccatccaggtgatcccgcacatcaccgacgaaatcaagcgccgcatcatcaagggtgcaggcgatgccgacgtggcgatggtcgagatcggtggcaccgtgggtgacatcgagtcccaac

SEQ ID NO: 314990 - DNA, 922 bp, Unknown
  Bacterial polypeptide expressing nucleotide sequence isolated from the Sargasso Sea
ataactggaggtgtggtttcttctttaggaaaaggactggcttcagcatctcttggtgcaattcttcaagctagaggatataaaattaaattaagaaagttagatccttatttaaacgtcgatcctggaactatgagtccatatcagcatggggaatgttatgttacagatgatggtgctgaaacagacttagacttaggacattatgagagatttactggtgtaaatgcaaaaaaatctgataatataactactggcaaaatttattcaaatgttatagctaaagaaagaagaggtgattacttaggcgctactatacaagtcatacctcatgtgacagacgcaataaaagaatatatattatctgatatcaatgatgaggattttatactttgcgaaattggaggaacagttggtgatatagaatcacttccttttatagaagcaattagacagttaggaaatgagttgggattgtctaaaacttgttttctacatgttacacttttacctttcataaaaacagctggtgaactaaaaactaaaccaactcaacattcagttaaagagttacaaggaatgggcatacagcctgatattcttctttgtagaactgaaaacagtattcctgaagagcaaaagtcaaaaattgcacttttttgtaatttaaaatctgaaacagtaattgaagccttggattcctcttcaatatatgacgttcccattgcttatcataatcaaggacttgactatcaagtttgcaaacattttgaacttgatttgtcaaaaaaaccagatttaagccgttggattaaaataaataaaatacaaaattcatctgaaggtaatgttaatattggtattgtaggtaaatatacatctatgattgatgcttataaatctttgattgaagccattaatc

SEQ ID NO: 314991 - DNA, 400 bp, Unknown
  Bacterial polypeptide expressing nucleotide sequence isolated from the Sargasso Sea
agataaaaaatgttatcccattattggtttaataagtgagtggaataaaaatggccaaatgataaaaggaacaaacaaggatttgggtggcactatgagattaggtttatatgaagctaaattaagacataattcattgatagaaaaaatctataaatctaagtttatatttgaaagacatagacacaggtatgaagtgaataataatttaaaaaataaatttgaaaataaaggaatgtttttttctggtatgtcgccagatggtaaattacctgaaattattgaacttaaaaaccatccttggtttataggtgttcaatatcatcctgaatttaaatctagacctttatcgccacatcctttattttcatcatttatcaaagctgcaaaattttattaa

SEQ ID NO: 314992 - DNA, 778 bp, Unknown
  Bacterial polypeptide expressing nucleotide sequence isolated from the Sargasso Sea
atggttatttgcagatcacaacaatctatacctcttgatcaaagaaaaaaaatttcattattctgcaacataccaataaaaagggttatagagacagttgatgttaaaacaatttatgaagcgccaataagtttctttaacgagggcttggataaacaagtctttgaatatttcagtatgaaaccgagaaaaaagattaatttaaaaccgtggaaagatgtaactaaaattgtaacaaacaaaaacattaggactataaatatagcaattgttggaaaatatgtagatttaaaggatgcatataaatcattggatgaagcactagttcacggaggcattcataataatgtaaaaataaatttaataagaatagaatcagacttattgaaaatctcagatgttcaaaaaaaattgaataatgtttctggaataataattcctggaggttttggaaaaagaggtaccgagggcaagatagcatgtataaattatgcaaggactaaaaaaattccttttttaggtatttgttttggcatgcaaatggcagtaattgaatttgctagaaatgtactaaaaattaaaaatgctggctctagtgaatttgataaaaattgctatccggtaattggccttattgaagaatggaacaaaaacggtagaaaaattaaaggaacggtaaaaaatttaggtggaactatgcgattaggtctttatccagctaaattacaacacaattccttaataaaagaaatttataagtctagtcaaattaaagaaa

SEQ ID NO: 314993 - DNA, 684 bp, Unknown
  Bacterial polypeptide expressing nucleotide sequence isolated from the Sargasso Sea
atggaggaatagccaataatttaaaagtaaatttaataagaattgaatctgactttttaaagccaagtgaaataaaaaataaactcagggaagcgtctggaatcttgataccaggtggatttggtaaacgaggaacagaaggaaaaatagctgctgttaattacgcaaggagaaacaaaatccctttcctaggaatctgctttggtatgcaaatggcagttattgaatttgcaagaaataaattaaatataaaaaatgcaacatctagtgagttcggatcatcaaaagcttccgttgttggtctaatgagcgagtggataaaagatggaaaattgatgaaagggactgataaaaatctaggtggaacaatgcgtttaggtagctacgaggctagactaaaaaaggacacaaaaataagcaaaatttacaattcttcaaagatacaagaaagacatcgacatagatatgaagttaatattaattacagagaggattttgaaaacaaaggaatgattttttcaggattatcaccagataataaattaccagagactatagaattaaaaaatcatccgtggtttattggagttcagtttcatcctgaatttaaatctagacctttggcaccacatcctttattctcatcatttattaaggctgcaaaattaaattcgaaaaaatgaa

SEQ ID NO: 314994 - DNA, 808 bp, Unknown
  Bacterial polypeptide expressing nucleotide sequence isolated from the Sargasso Sea
aaaactaagcctacccagcactctgtcaaagaaatgttaagtgtcggaatacagccagatattttgctgtgccgcgcagaaagagagattcctgaagcacaaagaagaaaaatagcattattttgtaatgttaaagaagcttctgtaatttctgccttggatgtagactcgatttacagtgttccgattagctaccacaaacaaggattagataacgaggtatgccgtttttttaatatagacccaccgaggttagactctaaacgttgggaagacattattgagagagttgacaagcctgaaggccaggtaacaatcgcaatagttggaaaatatacaggacttcttgatgcttataaatctctgtcagaggctcttgcccacggtgggatagctaacaaagtaaaagtaaaccttaactggattgactctgaaatatttgagagcaaagaggctttgcattatctggagggagttcacggtattcttgttcctggtggatttggagaaaggggcattgaaggaaagattgctgctgcaaaatttgcgagggagcactccttaccttactttggtatatgtttggggatgcaaatggcagttatagaggctgcacgtaatctggctggaataaaaggggcgggttctacagaatttggggagtgcctagagccagtaataggattattaacagaatgggaaaatcgaggaattatagagaagcgtcaaaaaggaggagatttaggaggaactatgagattgggggcttatgacgctttaattaagcctaatactcacatccactcta

SEQ ID NO: 314995 - DNA, 252 bp, Unknown
  Bacterial polypeptide expressing nucleotide sequence isolated from the Sargasso Sea
catggcgcgatatattttcgttactggcggcgtggtttcatctttaggaaaaggattgtcatctgcttcacttgcctacttattacaatcaagaggctacaaagttagaataagaaaattagacccttatttaaatgttgatcccggaacaatgagcccgtttcaacatggagaggtttacgtaacagacgacggtgctgaaactgatttagatttaggtcactacgaaagattttctggtatatctgcaaa

SEQ ID NO: 314996 - DNA, 806 bp, Unknown
  Bacterial polypeptide expressing nucleotide sequence isolated from the Sargasso Sea
ttggcatgaaataagcagattaataaataatccagaagggtctgtaaaaattgcaatagtaggaaaatatacttcattagaagatgcttataaatctctagtagaagctctcactcatggtggtttagcaaataatgtaaaagttgaaatagtttgggttgactctgaagtttttgagaataaaaacccctcatctgatttagaaggaatacacggaatacttgtccctggtgcttttggaaatagaggtgcagagggcatgattaaaactattacattttcaagagaaagaaaaattccattttttggaatatgttttggaatgcagatggctgtaattgagactgcaagaaaccttttggggcttgaagatgcatcgtcatcagagtttggtaatacaaaagaaccaattgttggtttgttaactgaatgggttaaaaataatattaaagagaaaagggaagctggaggaaatcttgggggaactatgaggttaggtgcatacgattgtgttttaaaacctggaactaaagttagtcagatttataatgaaaataaaattagagaacgccatcgccatcggtatgaagtaaatgtaaattacctaaataaactagagagtgtaggtatggtattttctggaatttctcctgatggttctttgcctgaaataattgagttggttgatcacccttggtttattggtgttcaatttcatccagaattaaaatcaaaaccttttgatcctcaccccttatttaagtcatttattaatgcctcagttaaacaatctaggcttgtataat

SEQ ID NO: 314997 - DNA, 697 bp, Unknown
  Bacterial polypeptide expressing nucleotide sequence isolated from the Sargasso Sea
tccataaaaaaggcgcaaggcgttctcgtgccgggtggtttcggcggcagaggcacggagggcaagatgatcgcggccaagttcgcgagagagaacaaggtgccgtacctcggcatttgcctcggcatgcagtgtatggtcatcgagtacgcgcgccacgtgctcaacttggcggacgcgcactcgacggagatggaaccggagacgaagaacccggccgtcatctttatgcccgaaggaagcaagacgcacatgggcggcacgatgcgtctcggcagcagacgaacaatcttccagacgcaagaatgcatcagctcccgtctctacggcaaggttccccacgtcgacgagcgccaccgtcatagatacgaagtcaacccggacatggtgccgcagctcgacgcggcgggttgcaaatttgtgggcaaggacgacacgcagacacgcatggagatttgcgaagtcgacggccacccgttcatggtcggttgccaataccaccccgagtacaagtctcgtccgggcaaaccgtctccgctcttcatgggtctcatcctcgccgcgagcggtcagcttcccgagtacatctccgacgaggccatcgccgttcgtcagagcgaggcgtacgccgaccatagctccgtcctcacgtcgccgctcaaagtgcttcgaaacaaacaaacgaccaacaagtaga

SEQ ID NO: 314998 - DNA, 988 bp, Unknown
  Bacterial polypeptide expressing nucleotide sequence isolated from the Sargasso Sea
ggcggcgtggtttcttcattaggtaagggcttagcatctgcatccttagcttctttgctccaacatcatggttataaggtaagaataaggaaattagatccttatttaaatgttgatcctggaactatgagtccttatcagcatggagaagtttatgtaacagatgacggagccgaaacagatttagatcttggtcattatgaaagatttacaggtgttgtttctaagcaatcagataatataacatcaggtaaagtatatcaaaaaattatttctaaagaaagaagaggagagtaccttggtgcgacagttcaagtaattccacatgttacaaatgagattaaggaatttataggcaacgatattcaaggagaggattttataatctgtgagataggcggaacaattggagatattgaaagcctaccttttatcgaagctattagacagtttaataatgataatggaagagagaattcgatgtttgttcatgttactcttgtaccttttatttcaagctcaggagaattaaaaactaaacctacgcaacactcagtaaaagagttaagaagtcttggaattcaacccgatatcttactttgccgtactgatagagaaattccagcagaagaaagaaaaaaaataggattattttgtaatgttaaaaatgattgtgttattcaagcaattaatgccaatacaatatatgaagttccaattaattttaaaaaagaagaatttgataaaagagtacttgaatattttaatttagattcttcaaatgaaatagatcttaaaatgtggcatcaagtttcaaggcacatacttgagcctgatggagaagtaacgataggtatagttggcaaatatacaggcctagctgacgcctacaaatctctaaacgaagctttatctcacggtggtatctttaacgatgtaaaagttaatctgcaatggatagagtcagagggatttaatcaaatctaat

SEQ ID NO: 314999 - DNA, 625 bp, Unknown
  Bacterial polypeptide expressing nucleotide sequence isolated from the Sargasso Sea
agttcaaatgtcgttaaattattatctgattgtaacggagtacttgtaccaggtgggttcggcgagcgtggctcagaaggaaaaataattgccataaagtatgcaagagaaaataagattccatattttggtatatgttttgggatgcaattagctgtaattgaaatggcaagaaatatattaggtattgaagatgcaaattctagtgaatttgcagattgtacaaattcaattgttggcctaatgacagagtggtcaacgtctaataataataaagaaaaaagatctaaagacagtgacctgggtggaacaatgaggttgggttcatataaagcaaaattaaagaaaaacagtaaaatatataatatctacaaagatgaaattattaatgaaagacatcgtcatagatatgaagtaaataataagtttgcaggtgaattcgaaaaaaaaggggtgattttttcagggtattcacctgacggacttcttcctgaaactgtagaaataattgaccatccctggttcattggtgttcagtaccaccctgaactaaaatctaagccttttgagccacatcctttatttaaatcattcattgaggcagctaaggtttcgcaaaaatgaa

SEQ ID NO: 315000 - DNA, 859 bp, Unknown
  Bacterial polypeptide expressing nucleotide sequence isolated from the Sargasso Sea
gatagagttctttcgtattttaatataaaaagcaaaaaattacccaatctaagtaaatggaaaaatatcacttcaagagttttaaatccaaaagaagatgtaaatataggaattataggaaaatatgtagatctaaaagacgcctataaatcattagatgaagccttaatacatgggggtatatcaaataatgttaaggttaatttgaaaagaatagactctgaaaacctaaaaccgaataatataaaacctttgctcaaagatgtaactggtgttttaattccaggggggtttggaaaaagaggtacagaaggtaaaattgctgccataaaatacgcaagattgaacaatatacctttctttggtatttgttttggtatgcagatggcggttatagaggctgctagaaatcttttaaatatcaaaaatgcatctacaagtgaatttggaaataattgtaccccagttgttgggttaattgaagaatggcaaaaaggaaagaaaaaaattaaaggaactaaaaaaaatttaggtggaacaatgagattaggtttatatgatgctatattaaaaaataattctttgatatccaaaatctattctgaaaaaataattaaagagagacataggcatagatatgaagtaaatatcaaatttaaaaatgattttgaaaaaaaaggtttaattttttctgctttatcaccggacggtttacttcctgaaataatcgaattacaagatcacccgtggtttgtaggtgttcagttccatcctgaatttaaatcaagaccttttacaccacatcctttattttcatcttttgtaaaagcagctggttacaataggagaaaaaactaat

SEQ ID NO: 315001 - DNA, 886 bp, Unknown
  Bacterial polypeptide expressing nucleotide sequence isolated from the Sargasso Sea
atttttgtacatttaacgctgctcccttttctatcgtcttcaggcgaactaaaaaccaaaccaacacaacattctgtcaaggaattgagatctattggaataagtccagatatattagtttgtcgatcggaagtacccattcctaagaaagagaaagaaaaaattgcgcttttctgtaatgttgatgagaaaaatattatcgctgctaatgatcttgaaacaatttatgaagctccaattgctttttttgatgaaggattagatgatgcagttcttcaagttttaaatttaaaatctaaaaaaaaacctgacttaaatatttggaatgatgttagttctagataccgtagctcagagggatcggtcaagattgctgttgttggaaagtatacaaaacttgaagatgcttataaatctctctcagaagctcttatacatggaggtttagcaaataaaacgaacgtagaagtaacttggctggagtctgaagagtttgaaaaatcgtatcaaacaaagcggttaaataagtttgacggtatattgataccaggtggatttgggaaaagagggacggaaggaaaaattaaagtgataaaatatgcaagagaaaaacagattccctttctaggaatttgtttaggcatgcaattattagttatagaatacgcaagaaattgtgctggcattaaagacgctaattctgaagaattcgatgagaaatcaaacagttctgaagatcacttgatctatcatctttccaaatggattaaagatcagaaagttgaaattagaagtaaagtccaaaataaaggtgggacaatgaggctgggcgcctaccctgctaaaataaaaacagggacaatggctcattcgatttataaaaaag

SEQ ID NO: 315002 - DNA, 419 bp, Unknown
  Bacterial polypeptide expressing nucleotide sequence isolated from the Sargasso Sea
catggcgcgatatatatttgtcactggcggcgtggtttcatcactaggaaaaggattatcttcagcttctcttgcttacttgcttaagtcacaaggttacaaagtcagagttagaaaaatggatccttatttaaatgtagacccaggtacaatgagtccatttcaacatggagaagtttttgtaaccgatgatggggcagaaacggatctagatttgggacactacgaaagatttacaaatatttctgcaaaaaaatctgacaatataaccacaggaagaatttatagcgacataataaaaaaagaaaggacaggaaaatatttaggaaaaacagttcaagttatacctcatgttaccgatagaataaaagaatttattcgaggagatattaaagatgaagactttgttatttgtgaaa

SEQ ID NO: 315003 - DNA, 721 bp, Unknown
  Bacterial polypeptide expressing nucleotide sequence isolated from the Sargasso Sea
gaaattaatactgagtctcttgagaaaatatcacagttttgcaatgttaaaaaagactctgttatacctgccttaaacgcaaaatcgatttatgatgtgccctcaatctattctaaagcaggtcttgataaagttttacttgagcatttaggttatgactcttcaaaataccctctgaatttaaaggcttgggaaaatttaacaaaaaaaattaacaatttaaaaaaagatgtaacaataggtgtggttggaaaatatacaaatctaaaagacagttataaatctttaatagaagcccttacccatggaggtattgaaaacaatactaatgttaagattcattggataaatgcagaaaaaactaaaactaatgaattaattaaggagcttgaaaatgttgatggcattttaataccaggtggatttgggtatagaggagttgagggtaaaatatcagctattaaatttgcaagagaaaacaatattcctttttttggaatttgtttaggaatgcaattaagcgtaatagaaatagctagaaatgtttttggtttagcagactctcattctacagaatttcaatctagtaaaaatcctgtagtcagtcttatgacagaatggaataataaaaataaaattgaaaaaagagatcacaccagtgaaaaaggtggcactatgaggcttggagcgtataaagctattctaaaagaagaattctaaa

SEQ ID NO: 315004 - DNA, 457 bp, Unknown
  Bacterial polypeptide expressing nucleotide sequence isolated from the Sargasso Sea
aatgtcaaaatttgtttttgtcaccggaggagtagtttctagcattggtaaaggaattgtagctgcaagcttaggtagattattaaagtctagaggatatagtgtttcaatattaaaactagatccatatctaaatgttgatccaggcacaatgagccctttccaacatggggaagtatttgtaaccgaagatggggctgaaactgatctagatttaggtcactatgaaagatttactgatactgcaatgactaggttgaatagtgtaacaacgggatctatttatcaagcagttattaataaagaaagaagaggtagttataacggtggaactgtccaagtaatacctcacataacgggagaaattagagaaaggattcatagagtagccgctaacagcaatgcagatattattattactgaaattggtggaacagttggtgatattgaatcttta

SEQ ID NO: 315005 - DNA, 700 bp, Unknown
  Bacterial polypeptide expressing nucleotide sequence isolated from the Sargasso Sea
taaatctcttgatgaagctcttatacatggtggcattcagaataatgttaaagtaaatcttgtaagaattgagtcagataacttgaaaaaaagtcaaattattcagaagttgaagaatgtttctggaattttgatacctggcggttttggaaaaagaggaacagaaggaaaaattaatgcaattacatttgctagaaaaaagaaaattccttttttaggtatttgctttggaatgcaaatggcaataatagaattttcaagaaatgtattaaatattaaaaaagcaggttctagtgaactagataaaaaatgtttccctgtaataggattaattaatgaatggacaaaaaatggtcaattaattaagggaacttcaaaagatttaggtggtacaatgaggcttggttcatatgaggctaaattaaaacataattcattgataaataaaatttataaattaaacgtaatcaatgaaagacataggcataggtacgaggtgaacatcaatttaaaaaaacaatttgaaaaaaaaggacttattttttcaggaatgtcgccagataataaacttcctgagataatagaacttaaaaatcacccctggtttataggagttcaatttcatcctgaatttaaatctagacctttatcaccacatccattattctcttcatttatcaaagctacaaaattctattaa

SEQ ID NO: 315006 - DNA, 292 bp, Unknown
  Bacterial polypeptide expressing nucleotide sequence isolated from the Sargasso Sea
catggcgcgatatatattcgtcactggcggcgtggtttcatcattaggtaagggattgtcatctgcatcgttagcgtatttattaaaatcaagaggcttcaaagttagagttagaaaaatggatccgtatttaaatgtagatccaggaacaatgagtccgtttcaacatggagaagtatttgttactgatgatggagcagaaacagatttagatcttggtcattatgaaagatttacagaaatttcttcaaagcaatcagacaatattacaactggaaaaattttacagtga

SEQ ID NO: 315007 - DNA, 422 bp, Unknown
  Bacterial polypeptide expressing nucleotide sequence isolated from the Sargasso Sea
tcttccaaatgcatctagttcagaactagatccgaaaactcccaatccagtgatacatttattaccagaacaggaagatgtagttgatttaggtgggacaatgagacttggagtgtatccatgtagattgacaaataatacaactgggaaaaaactatataatgaagatgtaatttatgagagacatcgacatagatatgaatttaataattactacaaacaaagtttcttaaattctggatacaaaataagtggtacatcgccagatgggagattagtagagttaattgagttagaaaatcatccttacttcttagcatgtcaatatcatcctgagtttttatcaagacctggcaaacctcatcctttatttagaggtttaataaaagcctctcaagaaaagttaactcaatcaaattaat

SEQ ID NO: 315008 - DNA, 946 bp, Unknown
  Bacterial polypeptide expressing nucleotide sequence isolated from the Sargasso Sea
aacaaatagaattaaagagttcattaaaaaagatattacaaacgaagactttgtaatttgtgaaattggaggcacagttggcgatatcgagagtcttccatttttggaagcaataagacaattctctaatgatcatggaaaatctaaaaccttatttattcatttaacacttgttccatttttaaaatcgtcggatgaaattaaaactaaaccaacacaacattctgttaaagagctgagaagcattggtattcaacccgatatagtaatttgtagatctcaacaatcaattccacatgatcaaagaagaaaaatttcattattttgcaatgttcctattgataatgttattgaaactgtagatgttaaaacgatttatgaggcaccaattagtttttttaatcaaaaattagataaacaggttttaaaattttttaaagtaaaatctaaaaaaagaccaaatttattaccatggaaaaaaataacaaatattactttaaacactaaaaaattaattaacattgcaataataggaaagtacgtaaaccttaaagatgcatataaatctttagatgaagcacttactcatggtggtatttcaaataaagttaaagttaatttaattcgcattgaatctgataaacttaaattttatcaaataaaaaataaaataaaaaatgtttcaggaatactaataccaggaggatttggcaaaagaggaacagaaggaaaaatttctgcaataaaatatgctagagataaaaaaataccttttttaggaatttgttttggtatgcaaatggccatgattgaatatgctagaaatgtattaaagattaaaaatgcaggttctaccgagttgaacaaatcatgctatccaattataggtttaattaatgaatggaataaagatggaaaaattataaaagggacagataaaaactta

SEQ ID NO: 315009 - DNA, 534 bp, Unknown
  Bacterial polypeptide expressing nucleotide sequence isolated from the Sargasso Sea
aatgcattatgtttttattacgggcggagtagcttcatcattaggcaagggcatagcttcagcatcgatagccacacttcttaaatcaagaaaatttaaagttagaattagaaaacttgatccttatttaaatgtagacccgggtacaatgagtccatatcaacatggggaggtttatgttactgatgatggtgctgagactgatcttgatttaggtcattatgaaagatttacaaatcaatctgcaaaaaaaagtgacagtatttcctctggtaaaatatattcaaatgttttgaataaagaaagaaaaggagattatctaggcgctacaattcaagttattccgcatgtaactaatgaaattaaaaattttataaatagtgatcttaaaaatgaagatattgtaatatatgaaattggtggaactgttggtgatattgagtctttaccttttttagaagctataagacaaataagaaatgataaaaaaatttcatcagctcttattcatatgacctatattccttatttaag

SEQ ID NO: 315010 - DNA, 457 bp, Unknown
  Bacterial polypeptide expressing nucleotide sequence isolated from the Sargasso Sea
tttgcaaaccaaatatattttcataactggcggagtggtatccggattgggaaagggaattgctgccgcttcgatcggtgccctgctggaaacccgcgggctgagtatcagtctgatgaagttagatccctacatcaatgtcgatgcgggaaccatgaaccctttccagcacggtgaggttttcgttacggaggatggtgcggaaaccgacctggacctgggacattacgaacgtttttccagcgcggttctcggccggaaacacaataccacgacaggtcagatttacgatgcgatcatccgcaaggaacgagaaggagaataccttggtgctacggttcaggtggtgccgcatgtgatcgatgaaatcaaggctcagatcgaagaagcctccaaaggggttgacatcagtatcgtggagatcggcgggaccgtaggggacatcgaatccctgcct

SEQ ID NO: 315011 - DNA, 667 bp, Unknown
  Bacterial polypeptide expressing nucleotide sequence isolated from the Sargasso Sea
catggcgcgatatatatttgtcactggcggcgtggtttcatctcttggaaaaggtctatcatcagcatcactagcttatcttctacaatctcgaggttacaaaattagacttagaaaattagatccttatctaaatgttgaccctggaacaatgagtccattccaacatggagaagtttttgtaacagatgatggtgctgaaacagatttagacttaggtcattacgagagattttcaggagttaccgcaaagaaaacagataatattacctcaggaaaaatttacagtgatgttctgaggaaagaaagaaaaggagaatatcttggaaagacagttcaagttattccacatataaccgatagaattaaagaatttattaaatacgatacgtcaaaagaagattttgtaatttgcgaaataggtggaatagtaggcgatattgaaagtttaccatttgttgaagctataagacaattttcaaatgatattggaaaaaaaaatgctttatttattcatttaactttagttccatatttaaaagcttcagatgaaataaaaactaaaccaacacaacattctgttaaagaattgagaagtattggtattcaacctgatataattatttgcagatcagaaagaccaatacctttggatcacagaaaaaaa

SEQ ID NO: 315012 - DNA, 751 bp, Unknown
  Bacterial polypeptide expressing nucleotide sequence isolated from the Sargasso Sea
tacgatacgtcaaaagaagattttgtaatttgtgaaataggtggaattgtaggagatattgaaagtttaccatttgttgaagctataagacaattttcaaatgatattggaaaaaaaaatgctttatttattcatttaactttagttccatatttaaaagcatcagatgagataaaaaccaaaccaacacaacactccgttaaagaattgagaagtattggtattcaacctgatataattatttgtagatcagaaagaccaatacctttagagcatagaaaaaaaatatctctattttgtaatgttgatattaaaaatgtaattgaaacagttgatgtaaaaacaatttatgaagctccaattagttttgctaaagaaaagttagatgttcaagtcttagattactttaaaataaaatctaaaaaatcaaataacttaaatccttggaagaaaatcaccaaaattacacttagtacaaaaaaacaagttaatattgcgataataggtaaatatgtagaattaaaagatgcatataaatctttagatgaagccttaactcatggaggaattacaaataaccttaaggtaaatttagttagaattgactcagaaaaattaaaagtttctgaaattaaaaataaacttaaaaatgtttcaggtattttaataccaggtggatttggaaaaagaggaactgagggaaaaatagaatcgatcaaacacgctagagttaacaaaataccatttcttg

SEQ ID NO: 315013 - DNA, 288 bp, Unknown
  Bacterial polypeptide expressing nucleotide sequence isolated from the Sargasso Sea
catggcgcgatatatattcgttactggcggcgtggtctcatctttaggaaaaggtctttcttctgcttctttagcttatcttctacaatctagaggatttaaagttagaataagaaaattagatccatatttaaatgttgatccaggcacaatgaatccgtttcaacacggagaagtttttgtaaccgatgatggtgctgaaacagatttagatctaggtcactatgaaagattttcaggaatttcagctaagcaatctgacaacataaccactggtcagatttatag

SEQ ID NO: 315014 - DNA, 806 bp, Unknown
  Bacterial polypeptide expressing nucleotide sequence isolated from the Sargasso Sea
aagaattagaaaacttgatccctatttgaatgtggatcctggcactatgagtccatatcagcatggagaagtatttgttacagacgatggagctgaaacggatttagatttagggcactatgaaagatttacaaatatttcttctaaaaaatcagatagcatttcttcaggaaaaatttattcaaatgtattgagaaaagaaagaaaaggagagtatttaggcgctactattcaagtaatacctcatgtaacggatgaaattaagaaatttattaatagtgatttaacaaatgaagatattgtaatttatgaaataggaggaactgtaggagatatagagtcacttccttttttagaagcaataagacaaattagaaataataataaaatttcttcatgcttaatacatatgacttatgtaccatatatttcttctgctgatgaattgaaaactaaaccgacacaacattctgtaaaagaacttcttaatgctggaattcagcctgatataataatgtgcaggtgtgagaaaaaaattggtaatgaggcaattaaaaagatttctcttttttgtaatgtaaaagaaaaaaatgttatttccgcacttaatgcaaattcaatttatgaagtaccttctttatattgtaaagcaggattagataaagctctactttctgaattgggatttaattataaaaagtatcctgtaaatttaaaaccttggaataatgttgttgcaaaaattaataaatcttcaaaagaaattattattgcaatagtaggaaagtatactgacttaaaagata

SEQ ID NO: 315015 - DNA, 864 bp, Unknown
  Bacterial polypeptide expressing nucleotide sequence isolated from the Sargasso Sea
ggcgtggtttcttctcttggaaaaggattatcatcagcatcgcttgcttatttattaaaatcacaaggttataaagtaagattaagaaaaatggatccatacttaaatgttgatccgggtacaatgagtccatttcaacatggtgaagtttttgtaactgatgatggagcggaaaccgacttagatttaggacattatgaaaggtttacaagtatatcctcaaaaaaatctgacaacattacaacaggaaaaatttacagtgatataataaaaaaagaaagaagaggtggttatcttggtaaaactgtacaagtaattccacacataacagatagaattaaagaatttataaaaaaagatattacaaacgaagattttgttatatgtgaaataggtggaacggtaggtgatattgaaagccttccttttgttgaagcaataagacaattttcaaatgaacatggtaaatcaaaaactttatttattcatttaacttttgttccatttctaaaatcttcagatgaaataaaaactaaaccaacacaacattctgttaaagagttaagaagtattggtattcaaccagatataattatatgcagatctcaacaatcaataccaatagaccaaagaaaaaaaatatctttattttgcaatgttccaattgaaaatgtaattgaaactgttgatgtaagaacaatttatgaagcacctattagtttttttaatcaaaaacttgataaacaagttttaaaatattttaaaataaaatctaaaaaaagagcaaatttattgccatggaagaaaataactaaaattactttaaatacaaaaaagatagttaatattggaattataggaaaa

SEQ ID NO: 315016 - DNA, 460 bp, Unknown
  Bacterial polypeptide expressing nucleotide sequence isolated from the Sargasso Sea
ctgaaagatacgaggtttattttcgttacgggtggtgttgtttcatctctagggaaaggaatcgcttcagcatctataggatcaattctagaatcaaaaggttataaggtctcagtaataaaacttgatccatattttaatgttgatccaggtaccatgagcccatttcagcatggcgaagtatttgttcttgaagatggaacagagacagatttagatttaggtcattatgagagattcattgataacgtatgcactaagaaaaataattttacagctggaaaagtttattactctgtattaagaaaagaaagaaaaggagaatatctaggaaaaacagtacaaataattcctcatattaccgatgagattaaacgtaagatattaaatgcttcaaaaaattgtgacattgctatcgttgagataggtggaacagtaggggatatagaaggtcaaccat

SEQ ID NO: 315017 - DNA, 384 bp, Unknown
  Bacterial polypeptide expressing nucleotide sequence isolated from the Sargasso Sea
tatgaaaactaaattcatatttgttcttggtggtgtaatgtccggtttaggaaaagggatttctgcctcttcaataggttatcttttaaaaagtgcaggattaaaagttaatattttaaaacttgatccctatctcaatgtagaccctggtactatgaatccgtatcaacatggagaagtatttgttttggacgatggttcggagactgatttagatttaggtcattatgaaagatttattgatgagaatatgtctagtaagaataatgcaactgctggacaaatctatagtacagtattagataaggagcgttcaggaagttatttaggagaaactgtacaagtaattcctcacataactgatgaaatcaaaaatagaatgaa

SEQ ID NO: 315018 - DNA, 664 bp, Unknown
  Bacterial polypeptide expressing nucleotide sequence isolated from the Sargasso Sea
atggcgcgatatattttcgttactggcggcgtggtatcatctttaggcaaaggtctttcttcagcatctttagcatatttgttaaaatctcaaggctttaaagtgcggattaggaaaatggatccatatttaaatgttgaccctggaacgatgagcccatttcaacatggtgaagtatttgttactgacgatggtgcagaaacagatttagatttaggtcactatgaaaggtttacaaacattaatgcaaaacaatcagataacattactacaggtaagatttattcagatataattaaaaaagaaagaagaggaggctatcttggaaaaacagttcaagtaattcctcacgtcacagatagaattaaagagtttattaaaaaagatataacgaatgaagactttgtaatttgtgaaattggtggaacagttggagatatagaaagtcttccattccttgaggcaataagacaattttctaatgaaaatggaaaatcaaaatctttgtttattcatttaactttagttccttatatgaagtcttctgatgaaattaaaactaaacctactcaacattcagtgaaagaacttagaagcattggaatacaacccgatattgtgatttgtagatcagagcaatcaattccaactgatcaaaaaagaa

SEQ ID NO: 315019 - DNA, 448 bp, Unknown
  Bacterial polypeptide expressing nucleotide sequence isolated from the Sargasso Sea
aaatgtagaccctgggactatgtcgccatatcaacatggagaagtatttgttactatggatggttttgaaacagatcttgacttaggtcattatgaaagattcatggatgttgaactttcaaaaaaatcaaatgttacagccggtcaaatctacacagaagttcttgataaagaaagatcaggtttttatttaggaggtactattcagactgttcctcatgttacagacgctattaagtctaaaatttttgacctagctgaaagctctgaatctgatgttatattagttgaagtagggggaacaattggagacattgaaggacagccgtttattgaagctattagacaacttaggaatgatagttctacaaaaaatgttttttatattcatttgactttattgccttacttatctacctcagatgaaatcaagactaagcctactcaa

SEQ ID NO: 315020 - DNA, 603 bp, Unknown
  Bacterial polypeptide expressing nucleotide sequence isolated from the Sargasso Sea
tatgaagtctaagacaaagtttatatttgtattgggcggagtaatgtccggcctcgggaaaggtatctctgcttcatccatcggttatttattaaaaagtgctggtcttaaagtaaatattctaaaacttgatccttatttgaatgttgatcccggtactatgaatccatatcagcatggagaagtatttgttctagatgatggttctgaaactgatttggatttaggtcactatgaaagatttattgatgaaaatatgtctaaagataataatgctactgcaggacagatttatagcaccgtattagataaagagcgtttaggtgattatttgggagaaacagttcaagtcattcctcatgttactgatgaaattaaaaatcgtatttatgaattatcaaagagtaataaatatgatattgttatttgtgaagtaggaggtacggttggagatatagaaagtttaccatttcttgaagcaattcgtcaattgtcattagatgttggatattttaattcacttattattcatttaacattacttccacatgttttttctagcggggaaatcaagacaaagccaacgcagcattcagtaatgaa

SEQ ID NO: 315021 - DNA, 703 bp, Unknown
  Bacterial polypeptide expressing nucleotide sequence isolated from the Sargasso Sea
atgtcaaaatttgtttttgtaactggaggtgtggtttctagcattggcaaagggattgtcgctgcaagcttaggaagattattaaagtctagaggatatagcgtttcaatattaaaactagatccatatctgaatgttgatccaggcacaatgagtcctttccagcatggagaagtttttgtaacggaagacggagccgaaaccgatctagatttaggacactatgagagattcactgatactgctatgaatagattaaatagtgtcactactggatctatttatcaagcagttattaacaaagaaagaagaggaagttataacggtggaactgtgcaagtcatacctcacataacgggagaaattagagaaaggattcatagagtagcagctaacagcaatgcagatattattattactgaaattggtggaacagttggtgatattgaatctttaccttttttagaggcaataagagaattcagaaatgatgtcaaaaggaatgatgttgcatacatacacgtaacattacttccctacatcaaaacctctggcgaaataaaaactaagccaacacaacattcagtaaaagaattaagatcaattggaattcagccagatttacttgtatgccgaagtgataaatcaatcaatgaaggtcttaaaaagaaacttagtggattttgtggagtcaaatattaat

SEQ ID NO: 315022 - DNA, 538 bp, Unknown
  Bacterial polypeptide expressing nucleotide sequence isolated from the Sargasso Sea
atggcgcgatatatatttgtcactggcggcgtggtttcatcacttggtaaaggtttatcatcagcatcgcttggatacttacttagatctcaaggttataaggttagaataagaaaaatggatccatatttaaatgtagatccaggaacaatgagtccttttcaacatggtgaagtttttgtaactgatgatggtgctgaaactgatttagatttaggacattatgaaagatttacaaatatatcagccaaacaatctgacaacattactacaggtagaatttacagtgatatcataaaaaaagagagaagaggaggttatctcggaaaaacagttcaagtaattccacatgttacagatagaattaaagagtttataaaaaaagatattacaaatgaagattttgtaatttgcgaaattggaggaactgttggtgatattgagagcttaccatttttagaagctataagacagttttcaaatgataatggtagatcaaaatcattatttattcatttaacatttgtcccattttaaa

SEQ ID NO: 315023 - DNA, 850 bp, Unknown
  Bacterial polypeptide expressing nucleotide sequence isolated from the Sargasso Sea
gttgatgttaaaacgatttacgaagctcccataagttttaataaagagaaacttgataaaattgttcttaaatactttaaattaaaatcaaagaaaaatgtaaatcttaatccgtggaaaaaaattactaatgttgttttgaaaacaaaacctaaagtaaatattggtttaataggtaaatatgtaaatcttaaagatgcttataaatcacttgatgaggctttgatacatggtggaatagataataacgtgaaggtgaatttaatacgaattgaatctgataaattaaaacctaatgaaataaaagaaaaattaaaaaatatatcaggtatacttataccaggtggttttggaaaaagaggcactgaaggtaaaattgaggctataaaatatgcaagacaaaataaaataccatttttaggtatctgttatggaatgcagatggccgttattgaatatgcaagaaatgtattgaaaataaagaaagctacatctagtgaatttagcaagacaggagtgaatgtaataggattaatacatgaatggaatagagatggtaaaattttcaaaggttctaaaaaagagcttggtggtacaatgcgacttggtctttatgaggctaaattaaaaaaaaattctttaattagaaaaatttataaatcaggcaatataagcgagaggcatagacatagatatgaggttaatattgattataaagacaaatttgaggataaaggtctaattttttctggaatgtcaccggatcacaaattacctgagattattgagctaaaaaatcatccttggtttgttggtgttcaatttcatccagaatttaaatctagacctt

SEQ ID NO: 315024 - DNA, 873 bp, Unknown
  Bacterial polypeptide expressing nucleotide sequence isolated from the Sargasso Sea
gaaagtttaccatttatagaagccattagacaatttgctaatgacgttggtaaaaaaaatgcattatttattcatttaactttagtgccatatttaaaagcttcagatgaaattaaaacaaaaccaactcagcattcagtcaaagaattaagaagcattggtgttcaaccagatataataatttgtagatcagaaagatctataccattagaacatagaaaaaaaatttcattattctgtaatgttgatattaaaaatgtaattgaaacagtcgacgttaaaaccatatatgaggcaccaattagtttttttaatcaaaaattagatattcaagtcttaaaatattttaaattaaaatcaaaaaaacctgtaaatttgaaaccttggaaaaaaattactaaaattattttacaaaataaaaaacaagtgaatattgcaatcataggtaagtatgtagaacttaaagatgcatataaatctttggatgaagcgctaactcatgggggcatagataataacattaaagtgaatttagaaagaattgactctgaaaaattaaaagtttctgaaataaagaaaaaacttaaaaatatttcaggaattttgataccaggtggttttggtaaaagaggaactgatggaaaaatagaagcaataaaacatgctagaataaataaaataccatttttgggaatttgttatggaatgcaaatggctataattgagtttgcaagaaatcaactaaatttacaaaaagcaacatctagtgaatttgataagagaggtttacatattattggtttaataaatgaatggacaaaagatggtaaaaaaattaaaggaacagacaaagatctaggcggcactatgaga

SEQ ID NO: 315025 - DNA, 949 bp, Unknown
  Bacterial polypeptide expressing nucleotide sequence isolated from the Sargasso Sea
acttttttgttctgtacccaatgaaagtgttatatcaatgcatgatgttgacacagtatattcagtaccgattttactaaataagcaaaaagttgataaaaccattattgaaaaactaaaaattaaggctaaacaacctaatctaaatgactggaaaagagttgttaaagctaaattaatgcctgaaaaggaagtaaatgtttcatttgttggaaaatatacggagttaaaagattcttataaatcaattaatgaagctcttgagcacgccggaataaaaaataaagcaaaagtaaacattaattttgttgaagccgaaaacatttcttcaaaaaacatcaaaaaaactcttaagaatgcagatgcagtcttagttcctggtggatttggtgaaagaggtattgagggaatgatcttagcttgcaaatatgctagagagaataacattccatatttaggaatttgccttggcatgcaagtagcgattatagaatatgcaagaaatgttcttaatctaaaaggtgcaaatagtactgagtttgatcaaaatacaaagcatcctgttattggccttattacagaatggaatgatatttcaggcaaaaaagaaaaaagagataaaaattcagacttaggtggaacaatgcgtttaggcgggcagctatgtaaactcaaaaagggatctaattcattaagaatgtataaaaattcagaaatcattgaaagacatagacatcgttatgaggtaaatccaaaatataaagatgatatgatcaaaaaaggattagatgttgtagggacatccattgatggtaagctagtagaaatgattgagattcctaaacataaatggtttttagcttgtcaatttcatcctgaatttacctccaaatccagagatggacatcctattttccacagttatattaaaagtacgttaagaaagtaa

SEQ ID NO: 315026 - DNA, 694 bp, Unknown
  Bacterial polypeptide expressing nucleotide sequence isolated from the Sargasso Sea
atgagtacaaaatttatcttcgttactggcggggttgtttcttcgttgggtaaaggtattgcagcagcatcgttggcggctattttagaagcccgtggcttaaatgttactattttaaagctggatccttacatcaacgttgacccaggcacaatgagcccaattcaacacggtgaagtatacgttacagaagacggcgcagagactgatcttgatttaggtcactacgaacgttttattcgcaccaaaatgactagccgaaataacttcacacaaggccgcgtatatgaagacgtattacgtcgcgagcgtcgtggtgaatacttaggcgcaactattcaggttatccctcatatcactaacgatattaaacagcgtgtttacgaaggcgctgaaggccatgatatagcaattgttgaaattggtggcacagtaggtgatatagaatcacaaccgtttatcgaagcaattcgtcaaatgggcacagagataggtcgcgaacgcgcactctttattcacttaacgttagtgcctttcttaggccctgcaggcgaagtgaaaacaaaaccaacacagcactcagttaaagaacttcgctctgttggtattcagccagatattctaatttgtcgttcagaccgtaagttacctaacaatgagcgtgcaaaaattgcattgtttaccaatgtagaag

SEQ ID NO: 315027 - DNA, 871 bp, Unknown
  Bacterial polypeptide expressing nucleotide sequence isolated from the Sargasso Sea
tacttaggggcgactattcaggttatcccacatgttacaaatgctattaaagattttataatttcagatctaaagaatgaagattttatattatgtgaaattggaggaactgttggtgacattgaatctcttccattccttgaggcaataagacaacttggtaatgagcttgggagggataaaacttgttttcttcatttaactttagtgccttttattgccgctgctggggaattgaaaactaaacctacccaacactctgttaaagagcttcaatcagtaggtataagaccagatgttgttttatgcagaactgaagagcatattcctgatgaccaaaaagataaaatagctcttttttgtaatataccaaaaaaatctgtgattgaggccattgatgcagatagcatttatgatgttccattagtgtatcacaagaatggattagatgaagttatttgtgatcattttgggattaagcccaaagaaccaaacttaaaaatatggttagatattaaatcagctattaaaaaccctgagggtgaaattaatattgctgttgtaggtaaatatacatccttaattgatagttataagtcacttgatgaagcgcttactcacggaggaatagctaataaaacaaaagttaaagttcactggattgattcatctgaacttaaggatgaaaataaatttaatgcaatttttgaaaatatacatggtatattagtacctggtggatttggtgaaagaggctcagaaggtaaaatattatcaataaaatatgcgagagaaaataatataccttttcttggaatatgcttcggtatgcaaatggctgtaattgaggctgctcgtaatttaactagta

SEQ ID NO: 315028 - DNA, 247 bp, Unknown
  Bacterial polypeptide expressing nucleotide sequence isolated from the Sargasso Sea
catggcgcgatttatatttgtcacgggcggcgtggtttcatcacttggtaaaggattgtcttcagcttcattagcttatctacttcaatcaagaggatttaaagttagacttagaaaacttgacccatacttaaatgttgatccaggtacaatgagcccttttcacatggtgaagtttttgtcactgacgatggagcagaaacagatcttgaccttggtcattatgagagattttctggtgttatag

SEQ ID NO: 315029 - DNA, 715 bp, Unknown
  Bacterial polypeptide expressing nucleotide sequence isolated from the Sargasso Sea
cttggtcattatgaaagatttacaaatatatcagcaaaaaaatcagataatattacaactggaaaaatttatagcgatataattagaaaagaacgtaaaggtaaatatttaggaaaaacagttcaagttatacctcatgttacagatagaataagagaatttattaaaggtgacataaccaatgaagattttgttatttgtgaaataggaggaacagttggagacatagaaagtttaccttttgttgaagctataagacaattttcaaattatgtaggaagaagtaaaagtttatttattcatttaacttttgttccatttttaaaatcatcagatgaaattaaaacaaaaccaacccaacattctgtaaaagaattacgaagtcttggaattcaaccagatataattatttgtagatcacaaaaacccataccaacagatcaaagaaaaaaaatatccttattttgcaatgtttcaattgaaaacgttatagagacagtcgatgtaagaacaatttatgaagcgccaataagtttttacaatgaaaaattagataaacaggttttaaaatattttaaattaaaaccaagaaagaaagtaaatttattaccatggaaaaaaattaccaaaactgttttaaatacaaaaaaattggtaaacattgcgattataggaaaatatgtaaatttaaaagatgcatataaatctttagatg

SEQ ID NO: 315030 - DNA, 520 bp, Unknown
  Bacterial polypeptide expressing nucleotide sequence isolated from the Sargasso Sea
catgtcatctaaatttgctcgtgagaataatattccatttttaggtatatgccttgggatgcagtgcgctgtcattgattttgccagaaatgtttgcggtcttgaaggtgcaaattcgactgagtttaacaaaagaacaaaacatccagtgatcgaccttatggagtcacaaagagcaatcaaaataaaaggtggtacaatgagacttggggcttatgattgcactattaagccggggacgaaggcattttccgcatatcgctcaaagaatgtatcagagaggcatcgtcatcgatttgaggtaaataatcgctatagaaaaaagcttcaaaaaggaggccttattatttccggtattaacgaagaccttggcgtagtggagacaatcgaggtagctgctcatccttggtttgtagcaggccaatttcatccagaactaaagagtagggtgaataaatctcatccactttttcgagattttattaaagcatcaaaaaaatacaataaacgcaggagctag

SEQ ID NO: 315031 - DNA, 466 bp, Unknown
  Bacterial polypeptide expressing nucleotide sequence isolated from the Sargasso Sea
gtaatagaatttgctcgaaacagattaaatatgagaaatgctacttctagcgagtttggcccatcaaaaggttcagtagttggattgatgagtgagtggatcaaagatggtaaattaatgaaaggaacagataaggaattaggtggtacaatgagactaggtagctatgaagctaggcttaaaaaagggtctttgataaatagtatttataaatctgcaaaaatttttgagaggcacagacacagatatgaagttaatattaactttaaagaaaaatttgaagataaaggaatgatattttctgggttatcaccaaatatgaaattaccagagattatagaactcaaaaaccacccatggtttataggagttcaatttcatcctgaatttaaatctagacctttagccccacatcctttattctcctcatttattaaagccgcaaaaatcaaatcgaataaatgac

SEQ ID NO: 315032 - DNA, 904 bp, Unknown
  Bacterial polypeptide expressing nucleotide sequence isolated from the Sargasso Sea
caagtaataccacacataactgatgaaattaaacttagaattgaaaatggcgctggagacgctgacgtagctcttgtagaaattggcggaaccgttggtgatatcgaatctcagccgtttttagaagctgtccgtcaattgcgcgtagagttaggtgctgaaaaagctttattcgttcacttaacactgattccttttatttcgacggccggtgagactaaaactaagccaactcaacattctgtcaaagagctcaggtcaataggtatacagccggatattttagtgtgtcgttcagaaaaagagattgatcagtctgctagaaggaaaattgccttgttcacgaacgttgagcttccagctgtgatttcattaccggatacagattctatatatcgaattccatctacgcttggtgcagcaggtttagacgaaattgtagtgaataagctgcgcttaaaatgcccaacagccaattttacagagtgggatcaggtggttgagtcacatttgaatccagagcaggagatcaggttggcaatggttggcaagtacacagacttgctggatgcgtataagtctttaaatgaagctatcatacacgctggaatccagactcgaactcgtgtggagatagaatacatagattcgaccgatatcatggataatggcgccaagtcactattgggccataacgccatcttggttcctggaggttttggtgagcgaggttttgaagggaaaatactagctactcagtttgcaagagagaacaaaattccctttctaggaatttgcttaggattacaagcagctgtcattgattatgctcgcaatgttgctggactgcacggcgcaaacagcacagagttgagagtgaatgtgcacatcctgtcatcgcact

SEQ ID NO: 315033 - DNA, 876 bp, Unknown
  Bacterial polypeptide expressing nucleotide sequence isolated from the Sargasso Sea
gtttcatctttaggaaaaggattatcttctgcctctttagcatatctgcttcaatcaagaggttttaaagtaagaataagaaaacttgatccttatctaaatattgatccagggacaatgagtccgtttcagcacggggaagtatttgtaactgatgatggtgcagaaaccgatttagatttaggccattacgaaagattttccggaacatctgcaaaaaaatctgacaatataactactggtaagatttacaacgatgttcttaagagagaacgacaaggtaaatatttaggtaaaactgttcaagttattcctcacataactaacagaattaaagagtttattaagaacgatgttgctaaagaagattttgttatttgtgagataggcggcacagtaggtgatatagaaagcctcccattcttggaggcaataagacagttctcaaatgagattggtatcaaaaatactttatttattcatttaactttagtaccctatatgaaagcttcagatgaaattaaaacaaaaccaacacaacattcagttaaagaactaagaagcattggtattcagccaaatattataatttgtagatctgagagaacaataccattagatcaaagaaaaaagatatccttattttgtaatgtagatattaaggatgttatagaaactgtcgatgttaaaacaatatatgaagcaccaattagttttaataaagaaaaattggatgacagagttttgagttactttaaaattaagtctaaaaagaaagtcaatcttcaaccttggaaaaaaattactcaattagttcttaaaactaaaaactcagtaaatattggtgtaattggaaaatatgttgaactaaagacg

SEQ ID NO: 315034 - DNA, 674 bp, Unknown
  Bacterial polypeptide expressing nucleotide sequence isolated from the Sargasso Sea
tatgaaaactaaattcatatttgttcttggaggtgttatgtccggtttaggaaaagggatttctgcctcttctataggttatcttttaaaaagtgccggtttaaaagttaacattctaaaacttgatccctatttaaatgtagatcctggtactatgaatccatatcaacacggagaagtatttgttttggatgatggttcggagactgatttggatttaggtcattacgaaagatttattgataagaatatgtctagtaagaataatgcaactgctggacaaatttatagtagagtattggataaagaacgttcagggagttatttaggagaaactgttcaggtaattcctcatataactgatgaaatcaaaaataggatgaacgcattaactgattctaaaaaatatgatattgtaatttgtgaggtaggcggaacagttggtgacatagaaagtttaccattcctcgaggctattcgtcaactttctttagaagttggttatcataattctttaatcattcatttaacattactaccatttattgatgcaagcggcgaactcaaaacaaagccaactcaacattctgtaatgaaattaagagaaattggtctttcgccggattttatattttgcagaacccaaaatgagataagccaagaaataaaagaaa

SEQ ID NO: 315035 - DNA, 627 bp, Unknown
  Bacterial polypeptide expressing nucleotide sequence isolated from the Sargasso Sea
aattgaagatcttaaaaattaaatggtgtagtagttcctggaggtttggctacagaggaatggaaggaaaaataggtgctatcgagtatctgagaaaaaataaaataccttttcttggaatttgcttaggtctacagtgtgctgtaattgagtttgcgcgcaacgtatgtggcatatcagacgcaaattctacagagttttctcaaactacaaaaaatcctgtcatagatttattacctaatcaagatttagaagcagatgatgtcggtgcatctatgagacttgggacttatccttgtaaaattcaaccagacactatggttaaagatatatataacaatgaaataatctatgaacgtcacaggcatagatacgaagtaaataataagttcagaaatgaattggaatctaaaggattagtatttagtggattatcacctgatgaagatttagttgaaatgattgaactaaaagatcatccatactttgtagcttcacaatttcatcctgaatttaaatcaaggccatgggacccagcacctatgttcaattcatttatagctgcatcaaaagaaataaaattttttgatgaaaatgtaaaagatgaacataaagtcaaagattaat

SEQ ID NO: 315036 - DNA, 844 bp, Unknown
  Bacterial polypeptide expressing nucleotide sequence isolated from the Sargasso Sea
aaatcaagggggtacaacgtctcgatcctgaagctggatccgtacctcaacgtggatcccggcacgatgagcccgattcagcacggggaggtgtttgtcaccgaggacggtgccgaaaccgatctggatctgggccactacgagcgcttcacggacacagccatgtcgcgcctgaacagcgtgaccaccggctcgatctaccaggcggtgatcaacaaggaacggcggggtgattacaacggcggcacggtgcaggtgattccccacatcaccggtgagatccgcgaacgcatccaccgcgttgccgccaacagcaacgccgatgtggtgatcacagaaatcggcggcaccgtcggtgacatcgaatcgctgcccttcctggaagccatccgcgaattccgtggagacgttggacggaacgatttggcgtatatccacgtcacactgctgcccttcatcggcacctcgggcgaactcaagaccaagcccacccagcattcggtgaaggaactgcgctccatcggcatccaaccggatgtgctggtctgccgcagtgaccgcaccatcagcgaggagatgaagcggaagatcggagggttctgtggggtaccgacccgggccgtcatcccgtccctcgatgccgacagtatctatgcagtgcccctgaccctggagcaggaagggctttgccgcgaagttctcgatgtgctggatctgaccgatcacgacagcgacatggcggcctggcaggagctggtgcacaaactccgcaaccccggcccggccgtcaaggtggccctggtaggcaaatacatccagctcaacgatgcctacctctccgtgg

SEQ ID NO: 315037 - DNA, 169 bp, Unknown
  Bacterial polypeptide expressing nucleotide sequence isolated from the Sargasso Sea
atgactacaaggtatatcttcgttactggtggtgtggtttcatcactaggtaaaggcattgcagccgcttcattagccgcaattttagaggcccgtggtctcaatgtaaccatcatgaaactggacccatacataaaagttgatccaggtaccatgagcccaacgcaac

SEQ ID NO: 315038 - DNA, 964 bp, Unknown
  Bacterial polypeptide expressing nucleotide sequence isolated from the Sargasso Sea
gaagagaggggagtatttaggtaaaacagttcaggtcattcctcacattacagaccgtataaaacagtttattaaaaatgattcatctaaagaggattttgtaatttgtgaaataggcggaatagttggagacattgaaagtttaccatttgtagaagcaataagacagtttgcaaatgatgttggaaaaaagaatgcactatttattcatttaacattagtgccattcttaaaagcctctgatgaaattaaaactaaaccaactcaacattcagttaaagaattaagaagcattggtattcaaccagatataataatttgcaggtctgaaagacctattcctttggaacatagaaaaaaaatttcattattttgtaatgttgatattaaaaatgtaatagaaacagttgatgtaaaaactatttatgaagcaccaattagtttttttagagaaaaattagatattcaagttttaaattattttaatttaaaatcaaaaaaacctgtaaatttaaaaccctggaaaaaaattacaaaaattattttacaaaataaaaagcaagttaatattgcaatcattggtaaatatgtagagcttaaagatgcttataaatctttagatgaggctctaacgcatggaggaattgataataatattaaagtaaatttagtaagaattgactcagaaaaattgaaagtctctgaaataaagaaaaaactaaataatatttcaggtattcttataccaggaggatttggaaagagaggcactgatggtaaaattgaagcaatcaaacatgctagaaaaaataaaattccatttttaggaatatgttatggaatgcaaatggccataattgaatttgcaagaaaccagttgaatttaaaaaaagcaacatcaagtgaatttgataggaaaggtttacctataattggtctaattaatgagtggacaaaagatggt

SEQ ID NO: 315039 - DNA, 901 bp, Unknown
  Bacterial polypeptide expressing nucleotide sequence isolated from the Sargasso Sea
ttggtaaaaaaaatactctggtttattcatttgactctagtaccctacatgaaatcatcagatgaaatcaaaactaaacctactcaacattcagtaaaagaattaagaagcataggtatacaaccagatattattatatgtaggtctgaaagaagtatcccccttgatcaaaaaaaaaaaatttcattattctgcaatgttgatattaaaaatgttatacaaacagtagatgttaaaacaatttatgaggctccaattagtttttatacagaaaaacttgataaacaggttcttgattatttcaaaataaagtcaagaaaaaatgttaatttaaatccttggaaaaaaattactaaagtagtacttaatcaaaaaaaatatgtaaatattgcgataattggaaaatatgtaaatttaaaagacgcatataaatctttggatgaagcccttgttcatggaggtattgataataatttaaaagttaatttggtaaggattgagtctgataatttaaaaccttcagatattaaaaataagctaaaaaatgtttctggaatattaatacctggaggttttggcaaaagaggcacggatggaaaaatagctgctattaagtatgcaaggctaaacaaaataccttttttaggaatttgctttggaatgcaaatggcaattattgagtttgctaaaaatgttttaaaaataagaaaagcttcatctactgagctaaatccaaagtgtattcctgtcataggtttaattcatgagtggagaaaaaatggaaaaataataaaaggcacaaataaagatttaggtggtacaatgaggctaggttcttatgatgcggaattgttaaataattctttagtaaaaaatatatataaatcaaaaattataaaag

SEQ ID NO: 315040 - DNA, 400 bp, Unknown
  Bacterial polypeptide expressing nucleotide sequence isolated from the Sargasso Sea
gctgccggaacagcaggacgtagtggacctgggcggcacgatgcgcctgggggtctacccctgcaggattgcaccgggaaccctcgcccaaaggctttacggggacgaggtggtctacgaacggcaccgccaccgctacgaattcaacaactcctatcggaatcttttcctggaatccggatatgtggtgagcggcacgtccccggatggacgcctggtggagttgatcgaactgaaagggcatccattcttcacggcctgccagtaccaccccgaattcctttcccgacctggacaaccccatccgttattccggggattgatcgaagcggcccaacaacgccttccggattcaccggctcaggcactgcgtcaacagggggacattgcgatcccatga

SEQ ID NO: 315041 - DNA, 676 bp, Unknown
  Bacterial polypeptide expressing nucleotide sequence isolated from the Sargasso Sea
atggctcaaacaaagtacatttttataaccggcggggttgtttcttctcttggaaaaggcattgctgccgcttctattggagcactttttgaggcgagaggattaaaagtatcattaaataaacttgatccatacattaacgttgatccaggaaccatgagcccttttcaacatggagaggtttttgtgactaatgatggaacagagacagaccttgatttgggacactatgaaaggtttgtaagatttcaagcaagtaaaaaaaataacttcacagctggaaaagtctatgaagaagtaatacaaaacgaaagaagaggagactatcttggaggcacagttcaggttattcctcatataactgatgagataaaacgtcgaattaaattaggtgccaaaggtgctgatattgcgatagttgaaattggcggcactgtaggtgatattgaaagtcagccctttattgaagctattagacaaatgatgctagaacttcctaccacttcttctgcattggctcatcttactctagttccatacattcaagtttctgaggaacttaaaactaaacctactcaacactctgtaaaggagctaagatcattaggacttcagcctgactgtctgatatgtaggcttgaaaaagaattgcctcaagagaaaagaaaaaaatagc

SEQ ID NO: 315042 - DNA, 909 bp, Unknown
  Bacterial polypeptide expressing nucleotide sequence isolated from the Sargasso Sea
aaatgcgtcgtgccataatattacggcaggaaaaatttatcataatgtgattcaaaaagaacgaaaaggagattatttaggtgctacagttcaggttattccgcatattacagatgaaataaagaagcatataaaaaatttgcagggggaggtagatgtagtaatctgcgaaattggaggtacggttggtgatatagagagtcttccatttcttgaggctataagacaattccgtttcgaagttaaaccaaaagacattttatatgttcatttgactttagtaccttatataaaaacctctgatgaattaaaaacaaagccgacccaacatagtgttcagaagttaagagaaattggtattcaacccgatgttttgctttgcaggacagaaaagcaattatcaaaatctttgaaagagaaaatcgccttattttgtaatgttgatacgagatctgttatcactgctatggatgtcagttccatctatgaagttccattgagtcttgaaaaggaagggttgcgagaaatcattcttgaaaaacttggaatgaaagtggaacaacccgatttagagcggtgggaaaatattaataaaattctaaagaaacctgccgggaaagttaaaattggaattgttgggaaatatgtcgatcttaaagaatcctataaaagccttaccgaagctttgattcatggtggaataggtaataatgttggtgttaagtttaactgggtggatgcagaagaactcgaaaatgaaaatggattgaagcaattgacggaatgcgacggagttctagttcccggaggatttggagatagagggattgaaggtaagatcaacgcagttagatttgcgcgagaaataaggtaccttattttggaatttgcctgggaatgcattgcgcg

SEQ ID NO: 315043 - DNA, 344 bp, Unknown
  Bacterial polypeptide expressing nucleotide sequence isolated from the Sargasso Sea
catggcgcgatatatatttgtcactggcggcgtggtctcatcacttggtaaaggattatcttctgcttcgttagcttacttacttcaatcaaggggttacaaagtaagattacgaaagctagacccatatctaaatgtagatcctggcacaatgagcccatttcaacatggggaagtttttgtaactgatgatggtgcagaaacagatcttgatttgggccattacgaaagattcacagatatatcagcaaaacaatctgacaatataaccacgggaagaatttatagtgatattattcagagagagagaaaaggtggttatttaggtaagacagtccaagtaa

SEQ ID NO: 315044 - DNA, 901 bp, Unknown
  Bacterial polypeptide expressing nucleotide sequence isolated from the Sargasso Sea
atatttattaaagtctcaaggctataaagtaagaattagaaaaatggatccatacctaaatgtagatccggggacaatgagcccatttcaacatggtgaagtttttgtaactaatgatggagctgagaccgatttagatcttggacattatgaaagatttacaaacatatcagcaaaaaaatctgataatataacaactggaaaaatttatagtgatataattaaaaaagaacgtaaaggtaaatatttaggaaaaacagttcaagtcataccccacgtcacagatagaataagagagtttataaaggacgatataaccaatgaacattttgttatttgtgaaataggaggaactgttggagatatagaaagtttaccctttgtcgaggccataagacaattttcgaatgaagtaggtagaagaaaaagtttattcattcatttaacttttgttccatttttaaaatcttctgatgaaattaaaactaaacctacacaacattccgtgaaggaattaagaagccttggtattcaaccagatataataatttgcagatcacaaaaaaatataccattagatcaaagaaaaaaaatatctcagttttgtaatgtatcgatagaaaatgttatagaaacagttgatgtaagaacaatttatgaagcaccaataagtttttataatgaaaaattagacaaacaggttttaaagtattttaaattaaagccaaaaaagaaagtcaatctacaaccttggaaaaaaataactaaaactgttttaaatacaaaaaaagtagtaaatattgcaattataggaaagtatgtaaatttaaaagatgcatataaatcgcttgatgaagcattaattcatggtggaattaataataatgtaaaagtaaattaa

SEQ ID NO: 315045 - DNA, 313 bp, Unknown
  Bacterial polypeptide expressing nucleotide sequence isolated from the Sargasso Sea
gatgacccgttatatttttattactggcggtgttgtctcatcccttggcaagggtctagcctctgctgttctgggctcattattacagctgagagggtatcaggttagacttcgaaagcttgacccttatttaaatgttgaccctggcacgatgtctcctactcaacatggggaggtgtttgttacagatgatggtgcagaaacagatttagacctcggacattatgagagatttacaggcgttactaccaaaaaaacagataatgtgactactggccggatttattcagatgttttggcaaaagaacgcagg

SEQ ID NO: 315046 - DNA, 934 bp, Unknown
  Bacterial polypeptide expressing nucleotide sequence isolated from the Sargasso Sea
cgtctgcgtaaacttgatccgtatattaacgttgatccaggcaccatgagcccgtaccagcatggcgaatgctatgtgaccgaagacggggcggagaccgatcttgatcttggtcactatgaacgtttcaccggcgtgtcttcgcgccggtccgataacgtcaccacgggtcgtatttattccaacgtgatcgcgcgtgaacgtcgcggtgattaccttggcgggacggtgcaggtcattccgcacatcaccgatgcgatcaaggaattcgtgatgtcggacgcgaccgaggactttgtcctggttgagatcggcggcacggtcggcgatattgaaagcctgccgttccttgaagccatccgtcagatgggtaacgaccttggtgatggccgtgcactgttcatgcatctgacccttgtgccttatatttcttcggccggggagctcaaaaccaagccgacccagcattccgtcaaggaactgcagagcgttggtattcagcctgatattcttctgtgccgttgtgatcgtgaaatcccgatcaatgaacgccgcaagattgcgcgtttctgtaacgtccgtgaagcggctgttattccggcttatgacgttgataacatctatcaggtgccgatcagctatcaccagtatggtctggataacgaagtgcttcatcacttcggcctgcaggcgcaggaacccgatcttcaaccgtgggaagacatctgcagcaccatccgcaatccggaaggtgaggtcaccatcggtattgttggcaaatacatccagcttcccgatgcctataaatcgctgacggaagccctgacccatggcgggatcgccaacaaggtgcgagttaaccttgaatggattgcgtctgacgcgcttgaaaaagaagacaatgtcagtgaaatcctgtccaagcttgatgcga

SEQ ID NO: 315047 - DNA, 408 bp, Unknown
  Bacterial polypeptide expressing nucleotide sequence isolated from the Sargasso Sea
gatggccaaaactaagtacattttcattactggaggagtggtttcatcactcggcaagggtatcgcagcagcatcaattggtgctcttcttgaagcaagaggcttatcagtatcacttataaaagttgatccttatataaacgttgatcctggaacgatgagtccttttcaacatggagaggtttttgtgacaaatgatggaactgaaactgatttagaccttggtcattatgagagatttgtgagattccaagcctcaaagaaaaacaattttaccgcaggtaaagtatatgaagccgttattcgtaatgaaagaaaaggtaaatatcttggagggactgttcaagtaattcctcatataacaaatgaaataaaaaaaagaataaaagagggcggtcagaataaaga

SEQ ID NO: 315048 - DNA, 307 bp, Unknown
  Bacterial polypeptide expressing nucleotide sequence isolated from the Sargasso Sea
tcagctatgtcaccttattgaaggcaccaaagtacacgaaatgtatggcagtgctgaaatttacgaacgtcaccgccatcgttacgaagtcaataacaatttgcgtgaccaaattgaagctgcaggtttaaaagtaagtggtttgtccactgataagcgacttgtagaagttgtcgaaatccctgatcatccatggttcattgcgggccaattccaccctgagttcacttcaacccctcgggatggacacccattatttactggttttgtagctgcggctggcaaataccagaaagaaaatcactaa

SEQ ID NO: 315049 - DNA, 417 bp, Unknown
  Bacterial polypeptide expressing nucleotide sequence isolated from the Sargasso Sea
catggcgcgatatatatttgtcactggcggcgtggtatcatcattaggtaagggattatcatcagcatcattagcatatttgttaaagtcgcaaggttataaagttaggatcagaaaaatggatccttatttaaatgtagatcccggaacaatgagtccttttcaacacggagaagtttttgtaacaaacgacggagcagaaacagatttagatctaggtcactatgaaagatttaccaatatatcagcaaaaaaatctgacaatattacaacagggaaaatttatagtgatataatcaaaaaagagcgtaaaggaaaatacttaggaaaaacagttcaagttatacctcatgtaacagatagaatcagagaatttataaagggcgatataaccaatgaagattttgtaatttgtga

SEQ ID NO: 315050 - DNA, 547 bp, Unknown
  Bacterial polypeptide expressing nucleotide sequence isolated from the Sargasso Sea
gaagatagcagcagtacaattcgcgagagaacgcaggataccatattttggtatttgttttggtatgcaaatggcggtaattgaagccgcaaggaacttgagcggaattaagggggctggatcgacggaatttggaaactgtgatcaccctgtagtcggtctgctgacagaatggataaaagaaggggtaacagaagaacgccacgataaggatgatttggggggaactatgaggctaggcgcctatgactgtgatttgataccaaattctcgggtgtgggatatttacggtactgataggatcagtgaaaggcatcgtcataggtatgaagtcaatattgattataaagagagattggaaacggcaggtctaattttttctgggatgtcaccagataagaaattaccagaaattgtagaaataccggatcatccctggtttgtcgcagtgcaatttcacccggaattaaagtcgaagccgtttgatccgcatccgttattcaagcatttcgtaagtgctgcagtgtaccaatcgagattagtttaa

SEQ ID NO: 315051 - DNA, 538 bp, Unknown
  Bacterial polypeptide expressing nucleotide sequence isolated from the Sargasso Sea
atgcaatatgtatttattacgggtggagttgcctcatctcttggtaagggaatagcttctgcagctctagcatccctactacaacaaagaaagtttaaggtaagaataagaaaacttgatccatatctgaatgttgatcctggaacaatgagtccatatcaacacggagaagtatttgtcacagatgatggtgcggaaactgatctagatctaggtcattatgaaagatttactaataggtcagctaaaaaaactgatagcacttcgtcaggaaaaatttattctaatgttttaaaaaaagaaagaaaaggtgattatcttggcgcaactatacaagttatccctcatgttactgatgaaataaaactttttattaattctaattttgaggatgaggatattataatttatgaaataggaggtactgttggagatatcgagtctctgccttttttagaggccattagacaaattagaaatgacaagaatatttcttcagcattaattcatatgacttatgtgccatatttaagttcag

SEQ ID NO: 315052 - DNA, 739 bp, Unknown
  Bacterial polypeptide expressing nucleotide sequence isolated from the Sargasso Sea
tggaaaatatgttgaacttaaagatgcgtataaatcactagatgaagctttaacacatggtggaattgcaaataatatcaaagtaaatttggttagaattgagtcagactttttaagacccagcgaaatcaaaaataagttaaaaaatgtttctggaatattaatacctggtgggtttggcaaaagaggaactgagggaaaaatcgcagcaatcaattattcaagaaaaaataaaattccttttttcggcatttgttttggcatgcaaatggcaataattgagtttgcaagaaatagattaaatattaaaaaagctacttccagcgagtttggaccgtcaaagacatctgtagtcggacttatgagcgaatggacaaaagatggaaagcttatgagaggtaccgataaagaattaggagggacaatgcgtttaggtagttatgaagcgagacttaaaaaagacacaaaaataagtaaaatttataattcattaaaaataaatgaaagacaccgtcacagatatgaggtgaatattaattatagaaaggactttgaaaataaaggaatgattttctcaggtttatcaccagataataaattaccagagacagttgagttaaaagatcatccgtggtttattggagttcagtttcatcctgaatttaaatctagacctttgtcaccacatccattattctcatcatttataaaggctgctaaaatcaattcaaaaaaatga

SEQ ID NO: 315053 - DNA, 397 bp, Unknown
  Bacterial polypeptide expressing nucleotide sequence isolated from the Sargasso Sea
catggcgcgatatatttttgtcactggcggcgtggtttcatctcttggaaaaggattatcatcagcatctttggcttatctacttcagtctaggggttttaaagtaagaattagaaagttagatccttatttaaatgttgatccaggaaccatgagtccatttcaacatggcgaggtatttgtaacagatgatggtgcagaaaccgatttagatcttggtcattacgagagattttctggaatctctgcaaaaaaatcagataatattaccactggtaaaatttacaatgatgtattgaaaaaagaaagaaaaggaaaatatcttggaaaaacagttcaagttattcctcatattaccgatagaattaaagaatttataaaagacgatgttaataaa

SEQ ID NO: 315054 - DNA, 955 bp, Unknown
  Bacterial polypeptide expressing nucleotide sequence isolated from the Sargasso Sea
tactttagttccttatattaatgcttctggagaacttaaaacaaaacctacccaacattctgttaaagaacttagatcattaggaatcagtcctgacgtattagtttgtagatctgaacaggagttaccaaaagatgaaaaaaagaagattgcacttttttgctctgtacctaatgaaagtgttatatcaatgcatgatgttgacacagtatattcagtaccgatattactaaataagcaaaaagttgataaaaccattattgaaaaactaaaaattaatgctaaacagccaaatctaaatgactggaaaagagttgttaaagctaaattaatgcccgagaaggaagtaaatgtttcatttgttggaaaatatacggagttaaaagattcttataaatcaattaatgaagctcttgaacatgccggaataaaaaataaagcaaaagtaaatattaattttgttgaagccgaaaacatttcttcaaaaaacatcaaaaaaactcttaagaatgcagatgcagtcttagttcctggtggatttggtgaaagaggtattgagggaatgatcttagcttgcaaatatgctagagaaaataacattccatatttaggaatttgccttggcatgcaagtagcgattatagaatatgcaagaaatgttcttaatcttaaaggtgcaaacagcactgagtttgatcaaaatacaaagcatcctgttattggccttattacagaatggaatgatatttctggcaaaaaagaaaaaagagataaaaattcagacttgggtggaacaatgcgtttaggtggccagctatgcaaactcaaaaaggggtctaattcattaagaatgtataaaaattcagaaatcattgaaagacatagacatcgatatgaggtaaatccaaaatataaagatgatatgatcaaaaaaggattagatgttgtagggaca

SEQ ID NO: 315055 - DNA, 699 bp, Unknown
  Bacterial polypeptide expressing nucleotide sequence isolated from the Sargasso Sea
attatttattcatttaacatttgttccatttttaaaatcttcagatgaaattaaaacaaagccaacacaacattctgttaaagaattaagaagtataggaattcaacctgatatagtgatctgtagatctcaacagtctattcctttagatcaaagaagaaaaatatccttattttgtaatgtggacattgctaatgttatagaaacagttgatgtaaaaactatttatgaagctccaataagtttctttaatcaaaaattagataagcaagttttaaaattttttaaaattaaatctagaaaaagaccacacttgctgccttggaaaaaaattacaaatatagttttaaaaacaaaaagaacagtaaatattgctatcataggcaaatatgtaaacttaaaagatgcttataaatcacttgatgaggctcttacgcatgggggaatttcaaataaagttaaagttaacttagtaagaattgagtcagataaacttagatcaaaagaaattaaatcaaaattaaagaatgtatcgggaatattgataccaggagggtttggtaaaagaggaacagagggaaaaattgaagcaattagatatgccagagagagaaaaataccttttctaggtatttgttttggaatgcaaatggcaatgattgagtttgcaagaaatattttaaaaattaaaaaagctgg

SEQ ID NO: 315056 - DNA, 733 bp, Unknown
  Bacterial polypeptide expressing nucleotide sequence isolated from the Sargasso Sea
cttatagatagttataaatctcttaacgaagctcttacccatggtggcatttcaaataaaactaggataaatataacttggatggattcttcagatttaaataataaaaatatctctagtgaaaaatttgaaaatattcatggaattcttgttcctggtggctttggtcaaagaggctcagaaggaaaaattgaagcaataaaatttgctagagttaataaaatcccatttttaggaatttgttttgggatgcaaatggctgtaattgaagccgctagaaatttatcattcattgaagacgcaggatcatctgaatttggtgattttgaatcgccgatagtagggcttctgactgaatgggtaaaaggtagtaatgttgaaaaaagatcatctactgatgatctgggtggatcaatgcgcttaggttcttatgaatgccatataattaaaaatagccttgctgaaaaagtttatggtcaaagtatcatttttgaaagacataggcataggtatgaggtaaatattaaatataaagaaaatcttgaaaaaattggtctaagattttctggcatgtctcctgatagaatactcccagaaataatagaatatgaaaatcatccatggtttattggagtccaatttcatccagagcttaagtcaaaaccttttgatccacatccattgtttaagtgctttataaaagcatcctcaaagtattctagattagtttagt

SEQ ID NO: 315057 - DNA, 569 bp, Unknown
  Bacterial polypeptide expressing nucleotide sequence isolated from the Sargasso Sea
catgacacagtatatttttataactggtggcgtggcatcttctttaggaaaaggactcacatcagctgcattaggcgctcttttgcaatcaagaggttttaatgtaaaaattaaaaaacttgatccatatcttaatgttgatccaggtacaatgaatccattccagcacggtgaagtttttgttactgatgatggtgcagaaactgatcttgatttagggcattatgagagatttactaatgttccctcatcaattaacgataacattacaactggtcaaatttacaagagaattattagcaaggaaagaaaaggcgattacctaggaagaacagttcaaattattcctcatgttactgatgaaatcaaagaatttatactttccaataatgataatatagatttttgtttatgtgaaattggtggaacagttggtgatattgagggattacctttttttgaagcgataagacagttaagtaatgagttaaaaaaaaatatgacatgtttccttcatttaactcttgtcccatatattagtgccgctggcgaagttaaaacgaaaccta

SEQ ID NO: 315058 - DNA, 829 bp, Unknown
  Bacterial polypeptide expressing nucleotide sequence isolated from the Sargasso Sea
taaacttaaatctaaaaaaagagctaatttagtcccatggaagagaataactaaaattgttttaaatacaaaaaaatgtgtaaacatcgctataattggtaaatatgtaaatttgaaagatgcttataaatcattagatgaagctttaatacatggaggtatttctaataaagtaaaagtaaatctaattagaatagagtctgataacttaaaaagtaatgaaattaaaaaaacactaaagaatgtttcgggattattgataccaggtggttttggtaaaagaggaacagaaggtaaaatttcagctataaaatatgctagagaaaacaagataccttttctcggcatttgttttggtatgcagatggctattattgaatttgcaagaaataaattgaaaattaaaaaagcaggatctagtgaactagataaaaaatgttatccagttataggtttaattaatgaatgggataaaaatggaaaaataataaaaggaacggataaaaatttaggtggaacgatgagattaggtttatatgaagctaaattaagaaataattctgccataaatagaatctacaagttaaaatctataaaagaaagacatagacatagatatgaagttaacaataatcttaagaatcaatttgagagaaaaggattgattttttcaggaatgtcaccagataataaattgccagaaataattgagcttaaaaatcatccttggtttataggagttcagtttcatcctgaatttaaatctagacctttggcccctcatcctttattctcttcatttatcaaggcatcaaaaaatcataaatga

SEQ ID NO: 315059 - DNA, 960 bp, Unknown
  Bacterial polypeptide expressing nucleotide sequence isolated from the Sargasso Sea
gattgcctcagcttcattagccactcttcttttatctagaaattttaaagttagaataagaaaattagatccttatttaaatgttgatcctggaactatgagtccgtatcagcatggtgaagtttacgttactgatgatggagcagaaacagatttagatcttggtcactatgaaagatttacaaatcaatcagcaaaaaaaagtgacagtatttcctctggaaaagtatattcaaacgttcttaacaaagaaagaagaggtgattatttaggagctacaattcaggtcatacctcatgttactaatgaaattaagaatttcataaatagtgatcttaacaaagaagatatagttatttatgaaataggaggaacagttggtgatatagaatcattgccttttttagaggccatacgtcaaattagaaacgatcgcagtatttcatctgcattaatacatatgacgtatataccatatttaagttctgcaggtgaattaaaaactaaaccaactcaacattcagtaaaagaacttcttaatgctggtattcagcctgatataataatgtgtagatctgagagaattatagataaggattcaatttcaaaaatttcattattctgtaatgtaaaaaaagactcagttattcctgctttaaatgcaaattcaatttatgaagtcccatctttatactcaaaatttggattagataaaatattactcaaacatttaaattacaaaccaaataaacatcctttgaatttaaaatcgtggaataatttactaaaaaaaattaagttacaaaaatacaatgtgaccattggtgttgttggaaaatatacaaatctaaaagatagttataaatcattaaatgaagctttagttcatggtggaattgaaaattccactaaagttgaaattaagtggattcatgcagaaaaaataaataaaaaaattta

SEQ ID NO: 315060 - DNA, 736 bp, Unknown
  Bacterial polypeptide expressing nucleotide sequence isolated from the Sargasso Sea
aagacagttcaagtaatacctcatatcacaaatgagataaaagaacgcatgcaaatacttggtaaaaccgaagattatgatataataattactgagataggtggtacggttggagatatagaatcacttccttatattgagtcagttcgacaaatagtatatgagttaggtgataacaattctatggtaattcatcttaccctaataccttttctctcagctactggagaactaaaaacaaaaccaacccaacactctgttaaaactttaatggagagcggaattaaagcagatgttattgtctgtagaactgaaaatgatctttcaagtgacttaagagataaaattgcacttttttgtaatgtaagaagagaagcagtaattcaatctatagatgtagaaacaatttatgatgtgccgctaaaaatgttagaggaaggattaaataaagttgtaattaaaaaattaagtttgaaaccaaattctgaaccaaatttagaacaatggaaatcatttttaaaaaaatataaaaatcctaaaaaatctattgaggtagctctagttggtaagtatgttgaacttcaagattcttacaagtcgattttagagtctttaattcatgccggagcatataatgaggtagaggttaaagttaaaagcgtacattcggaagatttagaaaaaggggaaagtatagatttgcttagcggttttaatgggataattgttgcgcctg

SEQ ID NO: 315061 - DNA, 709 bp, Unknown
  Bacterial polypeptide expressing nucleotide sequence isolated from the Sargasso Sea
catggcgcgatatatatttgtcactggcggcgtggtatcatcattaggaaaaggtctttcatcagcttcactagcctatttgttaaaatcacagggttacaaagttaggttaagaaaaatggatccgtacttgaatgtagatcctggaacaatgagtccatttcaacatggagaagttttcgtcaccgatgatggtgctgaaactgatctagatctaggtcattatgagagatttacaaatatttcatctaaacagtcagataacatcacaactggtcgtatttatagtgatgttattaaaaaagaaagaaagggaggatatcttggaaaaactgttcaagttatacctcatatcacaaaccgaataaaagaatttataaaaaaagatattacaaatgaagattttgtaatatgtgaaattggtggaacagttggagatattgaaagtttaccatttgttgaagctataagacaattttcaaatgaatatggtaaatcaaaaacattatttattcatttaacttttgttccgtttttgaaatcatctgatgaaataaagactaaacctactcaacattcagtaaaagaattaagaagtataggtgttcaaccagatattattatttgtagatctcaacaatctataccattagaccaaagaaaaaaaatatcattattttgtaatgttccaattgaaaacgttatcgaa

SEQ ID NO: 315062 - DNA, 546 bp, Unknown
  Bacterial polypeptide expressing nucleotide sequence isolated from the Sargasso Sea
catggcgcgatatatattcgttactggcggcgtggtttcttcacttggaaaaggtttgtcatcagcttctttagcatatttattaaaatcacaaggttacaaagttagattaagaaaaatggatccatacttaaatgtcgatccagggacaatgagtcctttccaacatggtgaagtttttgtaactgatgatggagctgaaacagatttagatttaggacattatgaaagatttacaaatatatcttcaaaaaaatcagacaatataacaactggaagaatttatagtgatataattaaaaaagaaagaagaggaggatatcttggaaaaacagttcaagtaataccacatattacagatagaattaaagaatttattaaaaaagatatttcaaatgaagattttgttatatgcgaaattggtggaaccgttggagatattgaaagtttgccatttgttgaagcaataagacagttttctaatgaacacggtaagtcaaaaactttattcatacacttaacgtttgttccttttttaaaatcatc

SEQ ID NO: 315063 - DNA, 602 bp, Unknown
  Bacterial polypeptide expressing nucleotide sequence isolated from the Sargasso Sea
tcaaaaaaaattaagtaatgtttctggaataataattccagggggttttggaaaaagaggtaccgaaggtaagatagcatgtataaattatgcaaggactaaaaaaatcccttttttagggatttgttttggtatgcaaatggcagtaattgaatttgctagaaatgtattaaaaattaaaaatgctggctcaagtgagtttgataaaaattgctatcctgtaattggccttattgaggaatggaacaaaaacggtagaaaaattaaaggaactgtgaaaaatttaggtggaacaatgcgattaggtctttatccagctaaattacaacacaattccttaataaaagaaatttataagtctagtcaaattaaagaaagacatagacataggtatgaggttaatgtcaatttgagaaaaaaatttgaaacacacggtttaaatttttcaggaatgtcccctgacaataacttacctgaaatcgttgaaattaaaaatcatccttggtttattggagttcaatttcacccagaatttaaatctagacctttacaacctcatccattattctcatcatttattagggctgcaaaaaatacataat

SEQ ID NO: 315064 - DNA, 397 bp, Unknown
  Bacterial polypeptide expressing nucleotide sequence isolated from the Sargasso Sea
tttcctgtaattggtttaattgatgaatggaacaaagatggaaaaattattaaaggaacagacaaaaatcttggaggaacaatgagattggggctttatgaagcaaaactgagaaataattctgccataaaaaatgtttataaatctagcacaattaaggagagacacagacatagatatgaggtcaatataaatttaatgcaaaaatttgaaaaaaaaggtttgatattttcaggaatttctccagataataaattacctgaaattattgaattaaaaaatcatccttggtttattggagttcaatttcatccagaatttaaatctagacctttaaatcctcatcctttattctcatcatttattaaagctgcaaaatcttttaatggaaactaaa

SEQ ID NO: 315065 - DNA, 484 bp, Unknown
  Bacterial polypeptide expressing nucleotide sequence isolated from the Sargasso Sea
gcgggttattgacgtggccagaaacttggcaggtctagagaaagctaactctactgagatcgatctaaaaacagatcatcccgtgatcgcgctcattacagaatggcaagatagttctggtcgtatcgaaactcggtcggagaatgatgacctagggggaacgatgcgtcttggagagcaggcttgcaagctggcaagcggttctttatcgcgccatctctacggggaggagacggtaaatgaacgtcaccgtcatcgatacgagtttaacaacaactatgctgcccagttggtcagtgcaggattagtcttggcaggtcattccgaagatggaacgttggtggaggttgtcgaaatcgacgatcatccatggtttgttggatgtcagttccaccccgaatttacttcttcaccaaggaatggtcatccgttgtttagtggttttgttgaagctggtttgaaaaaacaggcggagaacagctag

SEQ ID NO: 315066 - DNA, 703 bp, Unknown
  Bacterial polypeptide expressing nucleotide sequence isolated from the Sargasso Sea
tccctgctgcacgccggtatcaagacccgcaccaaggtcaacatcaactacatcgattccgaagacatcgaacgcgacggcacctccgtgctggaatccgcggatgctattctggtgcccggtggctttggtgagcgtggcgtggaaggcaagatccgcaccgtacagtacgcccgtgaaaacaaggtgccgtatctgggcatctgcctgggtatgcaggtggcggttatcgaatacgcccgcaacgtggccggcctgaaagacgcccacagcacggaattccgtgaacacacaccggagccggttgtcggcctgatcaccgaatggctcgatgccaccggtgaaaaagaagagcgcaccgaagaatccgacctcggcggcaccatgcgtctgggtgcccaggattgtgtactgactgaaggctccaccatcgttggctgttacggcaagaagaccattcgtgagcgtcatcgtcaccgttacgaagtcaacaaccatttcctgcctaggctggaagaagcaggcctgcaaatttccggccgctctgccgatggcaagctggttgaggtggtggaagcgcccgatcatccctggtttgttgcctgccagttccacccggaatttacctcaacacctcgcgacggccatccgctgttcaagggctttgttgaagccgcgctggcgaacaagaaaggatcctgat

SEQ ID NO: 315067 - DNA, 608 bp, Unknown
  Bacterial polypeptide expressing nucleotide sequence isolated from the Sargasso Sea
catgccaaattttatttttattactggtggcgtggtctcttccttgggaaaaggtcttgcatcggcagctttaggagcaattcttcagtcaagaggttttaaagttagactaagaaaattagacccatatttgaatgttgatccagggacaatgagtccaacacagcatggtgaagtatttgttacagacgatggtgctgaaactgacttagacttagggcactacgaaagatttactggggtgtccgcaaaaaaatctgacaatgttacaacaggtcaaatttactctcaagttatcgctaaagaaagaaaaggtgagtacttaggagctactattcaggttatccctcatgttacaaatgctattaaagattttataatttcagatctaaagaatgaagattttatattatgtgaaattggtggaactgtaggtgacattgaatctcttccattccttgaagcaataagacaacttggtaatcaacttgggagggataaaacttgttttcttcatttaactttagtgccttttattgccgctgctggggaattgaaaactaaacctacccagcactctgttaaagagcttcaatcagtaggtataa

SEQ ID NO: 315068 - DNA, 829 bp, Unknown
  Bacterial polypeptide expressing nucleotide sequence isolated from the Sargasso Sea
ttgtaatgtaaatataaagaatgtaattgaaacagttgatgtaagaactatttatgaagctccaataagtttctataaagaaaaactagacttacaagtcttaaactatttcaaactaaaatcaaaaaaaccagtaaacttaactccatggaaaaaaattactaaaattattttgcatacaaaaaaacatgttaatattgcaataattggtaaatatgttgatttaaaagatgcttataaatctttagatgaagcacttactcatggtggaatagataataatgtcaagataaaccttgtaagaatagattctgaaaatttaaaagtttcagaaattaaatctaaactaaaaaatatctcaggaattttaatacctggtgggttcggtaaaagaggaactgatggaaaaatagcagctatcaaattcgcaagaataaataagataccatttcttggaatttgttatggtatgcaaatggcaataattgaatttgctagaaataaattaaatttaaaaaaagctacctcaagtgaatttgataaaaaaggtttagctattataggcttgatgaatgagtggaacaaagatggtaaaaaaattaaaggtacagataaaaacttaggtggcacaatgagacttggttcttatgatgcaaaactattaaaaaattcaatgattcaaaaaatttacggaaaaaatttgattaaagagagacatcgtcatagatatgaagtgaatattgcttttaaggaaaaatttgaaaaaaatggtatgaatttttcaggtttatctccagatggtaatttacctgaaataattgagttaaaa

SEQ ID NO: 315069 - DNA, 714 bp, Unknown
  Bacterial polypeptide expressing nucleotide sequence isolated from the Sargasso Sea
aatggatccttatttaaatgttgatcctggcacaatgagtccatttcagcatggcgaagtttttgttactgacgatggagctgaaaccgacttagatcttgggcattatgaaaggtttacaaatatatctgcaaaaaaaaatgataatattacaactggaaaaatttatagtgatataatttttagagagcgtaagggagactatttaggaaaaactgttcaggttataccgcatgttacagaaagaattaaacagtttattaaaaaagatattaaaaatgaagattttgttatttgtgaaataggtggaaccgtaggtgatattgagagtttaccttttttagaggctattagacaattttctaacgatattggaaaagagaaaactttatttgttcatttaacgctagtgccatttttaaaatcgtcggatgaaattaaaacaaaaccaactcaacattcagtaaaagaattaagaagcataggtatacaaccagatattatcatttgtagatcacaacaatcaataccattagatcaaagaaaaaaaatatcactattttgcaatattccaatagagagagttatagaaacagttgatgtaaaaactatttatgaagcaccaataagtttttataacgaaggtttggataaacaagttttaaaatattttaaaataaaaccaaaaaaaaaaattaatctatttccatggaa

SEQ ID NO: 315070 - DNA, 499 bp, Unknown
  Bacterial polypeptide expressing nucleotide sequence isolated from the Sargasso Sea
atacctttcttcggtatttgctttggtatgcaaatggcagttatcgaagccgcaagaaatttattgaatattaaaaatgcttctacaagtgaatttggaaataattgcacaccagttgttgggctacttgaagaatggcaaaaaggaaagaaaaagatgaaaggaactgaaaaaaatttaggtggaacaatgagattaggtttatatgatgccgtattaaaaaataattctctaatatcgaaaatttattctgaaaaaagaattaaggaaagacataggcataggtacgaggtaaacattaagtacaaaaatgattttgaaaaaaagggtctaattttttctgcattatctcctgatggaagtcttccagagataattgaattaagagatcatccttggtttgttggtgttcagtttcatccggaatttaaatcaagaccttttacaccccatccattattttcctcttttatcaaagcagcaggaggtaaaaattaat

SEQ ID NO: 315071 - DNA, 679 bp, Unknown
  Bacterial polypeptide expressing nucleotide sequence isolated from the Sargasso Sea
ggtattaacaataatttaaaagtaaatttgataagaatagaatctgacagacttaaaccaggagaaataaaaaataaattaaaagatgtctcaggaattcttataccaggtggttttggtaaaaggggcaccgaaggaaaaatagcagcaattaatttcgctagaaaaaataatattccatttttaggcatatgttttggaatgcaaatggcagtaattgaatttgctagaaacaaattaaacatcaaaaatgctacctctagtgaatttggtccttctaaagcatctgttgttggcttaatgagtgagtggacaaaagatggaaaattaattagggggactgacaaaaatttgggcgggactatgcgtttaggtagttatgaagctagacttaaaaaagacacaaaggtaagcaaaatatataattctttaaaaataaatgaaagacatcgtcacaggtatgaagttaacattaattataaagagaaatttgagaataaaggtatgattttttcaggtctctctccagataataaattaccagaaatagttgaattaaatgatcacccatggtttattggagttcagtttcatcctgaatttaaatctagacctttaactccacatccattattctcgtcatttataaaggctgcaaaaacttattcaaaaaaatgac

SEQ ID NO: 315072 - DNA, 412 bp, Unknown
  Bacterial polypeptide expressing nucleotide sequence isolated from the Sargasso Sea
agacaaaaattgtttaccaataatagcttttttcaatgaatggaataaaaaaggcaaattagtaaaagggactgataaatctttaggtggaacaatgagattaggagagtatcctgccaatttaaagacaaaatcgttaattatgggtatatataaaaataaaaaaatatttgagcgacatagacaccgatatgaggttaacatgaattataaaaatatatttgaaaaaaaaggaatgttgttttcagctttatcaccagataaattacttacagaaattatcgaattaaaaaatcatccatggtttattggtgttcaatttcaccctgagtttaaatcaagacccatgaaaccgcatccattgtttgtttcattcattaacgctgcaaaaaaaaattatgaaaaattttaa

SEQ ID NO: 315073 - DNA, 727 bp, Unknown
  Bacterial polypeptide expressing nucleotide sequence isolated from the Sargasso Sea
atacgttgaattaaaggatgcttataaatctttagatgaagcatttactcatggaggaatatccaataatcttaaagttaatttggttagaatagattctgaaaaattaaaagtttcagaaataaaaaataaacttaaaaatgtttcaggaattctaattccaggtgggtttggcaaaaggggaactgaaggtaaaattgaagcaataaggtatgcaagaaaaaataaaattccattccttggaatttgttatggaatgcaaatggctatacttgaatttgctagaaatcaattaaagattaaaaaagcaacttcttctgagtttgataaagaaggtgttcatattattggcttgatgcatgaatgggagaaaagtggcagaaaagttaaagggactaataaagacttaggtggcaccatgagacttggttcttatgatgcaatcttaaaagataagtctaaaattagagatatttataaatctaaattaattaaagagagacataggcacagatatgaagtggatatttcatataaagaaaaatttgagaagaaaggattaatattttcaggcttatctcctgatcataagcttccagagataattgaacttaaaaatcatccatggttcataggagttcagtttcatcctgaatttaaatctagacctttgaacccacatcctttattctcttcttttatcaaagcagcaaaaaatcatagatga

SEQ ID NO: 315074 - DNA, 805 bp, Unknown
  Bacterial polypeptide expressing nucleotide sequence isolated from the Sargasso Sea
ggcacaatgaatccatatcagcatggagaagtatttgttttagatgatggttcagaaacagatttagatttaggtcactacgaaagatttatagatgttaatttgagtaagttaaatacaacttcatcaggtagagtatattgggatgtgctagaaagagaaagaagaggtgattatttaggtgatacaattcaggttatcccacatattaccgatgaaattaaagatagaattaatcgtgttaatccaagaaaaaaatatgatattattattacagaagttggagggactgtaggagatatcgaaggcctcccattttatgaagcaattagacaaatgattttagataaaggcaaatcaaattctattgttattcatacaactcttttaccatttattaatgcggctggtgaggttaaaacaaaacctacacaacatagtgttatgagattaagagaaattggtcttgagcctgatatacttgtttgcaggacagaggatagcaatcacttaaatgatagcttaaagaaaaaacttgggcttttttgtaatgtgcacccatcgcatgtctttgaatctccagatgtagatactatttatagcattccgctagtattgtttgagcaaaaatttgataaaattattttaaatcgtcttggttataaaaaaacaccgagacataataatataaaacaacttaaaacatttgttaagagatttactaatcctaaactagaggtaaatattgcgatatgtggaaaatataatggtttacatgatgcatataaaagtattatgaagcatt

SEQ ID NO: 315075 - DNA, 251 bp, Unknown
  Bacterial polypeptide expressing nucleotide sequence isolated from the Sargasso Sea
taactcgattaaagaaagacacagacatagatatgaagttaataacaatctcaaaagacaatttgaaaataaaggtttaattttttcaggcatgtcaccagataataatttaccagaaataatagaactcaaaaatcatccatggtttataggagttcaatttcatcctgaatttaaatctagacctttacttccgcatcctttattctcatcatttattaaggcagcaaaatcatataatggaaaataaa

SEQ ID NO: 315076 - DNA, 631 bp, Unknown
  Bacterial polypeptide expressing nucleotide sequence isolated from the Sargasso Sea
catggcgcgatatatattcgtaactggcggcgtggtttcatctttaggtaaaggattatcatcagcttcactggcttacctattacaatcaagaggatacaaagtaagaattagaaaattagatccttatttaaatgttgacccgggaacaatgagtccatttcagcatggagaagtatttgtaactgatgatggtgctgaaacagatttagatttaggtcactacgaaagattttcaggaatatctgctaaaaaatcagataatataacaacaggaaaaatttataatgatgtattaaaaagagaacgacaaggtgaatatttaggaaaaactgttcaagtcattcctcatatcacaaatagaatcaaagaatttattaaaaatgatgttgctaaagaggacttcgtaatttgtgagataggaggtactgtcggtgatatcgaaagcctaccttttttagaagctataagacaattttcaaatgaaataggtaagaaaaatacattattcattcacttaactttagttccttacatgaaggcttctgatgaaataaaaacaaaaccaacccaacattcagttaaagagttgaggagtataggtattcaaccagaatataattatttgcag

SEQ ID NO: 315077 - DNA, 508 bp, Unknown
  Bacterial polypeptide expressing nucleotide sequence isolated from the Sargasso Sea
aaaataccatttcttggtatttgttttggtatgcaaatggcagtaattgaattcgctagaaataaattgaatattaaaaaagcaacttctagcgaatttggaccatctagagcgtcagttgttggacttatgagtgaatggacaaaaaatggaaaattgatgaagggcactgacaaagatttaggcggaacaatgcgtctaggtagttatgaagcaagacttaaaaaagacacaaaaataagtaaaatttacaattcagtgaagataaacgaaagacatcgtcatagatatgaagttaacatcaactataaaaaagattttgaaaataaaggtatgattttttcaggtttatctccagacaacaaattaccagaaactatagaattagaaaaccatccttggtttattggcgttcagtttcatcctgaatttaaatctagacctttatcaccacatcctttattctcatcttttataaaggctgcaaaaatcaataagacaaaatgaa

SEQ ID NO: 315078 - DNA, 691 bp, Unknown
  Bacterial polypeptide expressing nucleotide sequence isolated from the Sargasso Sea
aatgaataataaattagcagctaagtttatttttattactggaggtgtggtttcttctttaggaaaagggctagcttcagcctcactaggtgcaattcttcaagctaggggatacaaaattaaattaagaaagttagatccttatttaaacgttgatcctgggactatgagtccttatcagcatggagaatgttatgttacagatgatggtgctgaaacagacttggacttaggacattatgaaagattcactggtgtaaatgcaaaaaaatctgataacataacaactggtaaaatttattcaaatgtaatagctaaggaaaggagaggtgactatttaggagcaactattcaagttataccccatgtgacagatgcaataaaagaatatatattatctgatatcaataatgaggattttattctttgcgagattggaggtaccgtcggtgatatagaatcacttccttttattgaagcaattagacagctaggaaatgagttgggactttctaagacttgttttcttcatgttacacttttacctttcattaaaacagctggtgaacttaaaactaaaccaactcaacattctgttaaagagctacaaggaatggggatacagcctgatattcttctctgtagaacggaaaacattattcctcaagagcaaaagtcaaaaattgcactt

SEQ ID NO: 315079 - DNA, 880 bp, Unknown
  Bacterial polypeptide expressing nucleotide sequence isolated from the Sargasso Sea
gatgaaaaaaagaagatcgcacttttttgctctgtccccaatgaaagcgttatatcaatgcatgatgttaacacagtatattcagtaccgattttactaaataagcaaaaagttgataaaaccattattgaaaaactaaaaattaaggctaaacagccaaatctaaatgactggaaaagagttgttaaagctaaattaatgccagagaaggaagtaaatgtttcatttgttggaaaatatacggagttaaaagattcttataaatcaattaatgaagctcttgagcatgccggaataaaaaataaagcaaaagtaaatattaattttgttgaagccgaaaacatttcttcaaaaaacatcaaaaaaactcttaagaatgcagatgcagtcttagttcctggtggatttggtgaaagaggtattgagggaatgatcttagcttgcaaatatgctagagagaataacattccatatttaggaatttgccttggcatgcaagtagcgattatagaatatgcaagaaatgttcttaatctaaaaggtgcaaatagtactgagtttgatcaaaatacaaagcatcctgttattggccttattacagaatggaatgatatttcaggcaaaaaagaaaaaagagataaaaattcagacttgggtggaacaatgcgtttaggagggcagctatgtaaactcaaaaagggatctaattcattaagaatgtataaaaattcagaaatcattgaaagacatagacatcgttatgaggtaaatccaaaatataaagatgatatgatcaaaaaaggattagatgttgtagggacatccattgatggtaagctagtagaaatgattgagattcctaaacataaatggtttttag

SEQ ID NO: 315080 - DNA, 275 bp, Unknown
  Bacterial polypeptide expressing nucleotide sequence isolated from the Sargasso Sea
attgaatagttcaccgaaatatgtttttgttacaggaggagtaagttcttctcttgggaaaggtataatatctgcgtcattggcaaaacttcttcaatcaagaggtttgaatgttacaatacaaaaatttgatccttacataaatattgatcctggaacattgaatccttatgagcatggagagtgttatgtgacagatgatggaactgaaacagatttggatttaggtcattacgaaagatttctagatattaaaactagtaactctaaacacg

SEQ ID NO: 315081 - DNA, 392 bp, Unknown
  Bacterial polypeptide expressing nucleotide sequence isolated from the Sargasso Sea
catggcgcgatacgtatttgtaactggcggcgtggtttcatctttaggcaaaggtctttcttcagcttcgctcgcctctttactacaattaagaggatttaaagttagagtgagaaaactagatccgtatttaaatgttgatcctgggactatgaatccatttcaacatggagaagtttatgtaacagatgatggtgctgaaacagacttagatataggtcattatgaaagatttacagggatttcagccacacaatcagataatattactactggtgcaatctatagtgatattattaaaaaggagagaagaggagattatttaggtggaactgttcaagtagtacctcatgttacagacaggattaaaaaatttatttcacaagatgtta

SEQ ID NO: 315082 - DNA, 363 bp, Unknown
  Bacterial polypeptide expressing nucleotide sequence isolated from the Sargasso Sea
aatgtcatctacaactaaatacatctttgtaactggaggagttacctcatccttaggtaaaggaattgtttctgcatcattagctaagcttcttcaatcaagagggtttaccgtaaccattcaaaagctagatccatatattaatgttgaccctggtacgcttaatccttatgaacatggcgaatgttatgtaacggaagatggtgctgaaactgatttagatttaggtcattacgaaaggtttttagatgtcaatacttctcaagacaataacgttacaactggaagaatataccaatctgtaataaacaaagaaagacgtggtgattacttaggtaaaactgttcaagtcattcctcatat

SEQ ID NO: 315083 - DNA, 299 bp, Unknown
  Bacterial polypeptide expressing nucleotide sequence isolated from the Sargasso Sea
catgacgcgatttatttttgttacaggcggtgtggtttcatctttaggaaagggactagcttcagcatgcctaggtgcccttcttcaagcaagaggatattctgtcaggctaaggaaacttgacccatacattaatgttgaccccggaacaatgagtccctatcaacatggtgaagtatttgtaactgatgatggtgctgaaactgatttagatttggggcactatgagagatttaccggtgtttctgccaaaaaaactgataatgttacagcaggcagaatttatcaaaatgttattt

SEQ ID NO: 315084 - DNA, 547 bp, Unknown
  Bacterial polypeptide expressing nucleotide sequence isolated from the Sargasso Sea
gtaaaattcgctgccataaaatatgcaagattgaacaatatacctttctttggaatttgttttggaatgcaaatggcagttattgaggctgccagaaatttattaaatataaaaaatgcatctagtagtgaatttggaaacaattgcacaccagttgttggtttattagaagaatggcaaaaaggtaaaaaaatttttaaaggtagcgaaaaggatttaggtggaacaatgagattaggtttatatgatgctgtaattaaaaataattctttaatctcaaaaatctattcagaaaaaagaataaaggaaagacacagacatcgatatgaggtaaatataaagtataaaaaagaatttgaaaaaaaaggacttattttttctgctttatcgccagatggtactttacctgaaataattgaattaaataatcatccatggtttgtaggagtacagttccatcctgaattcaaatcaagacctttcaccccacacccgttgttctcttcgtttattaaagcagctaatctaagaaggagaataaattaat

SEQ ID NO: 315085 - DNA, 955 bp, Unknown
  Bacterial polypeptide expressing nucleotide sequence isolated from the Sargasso Sea
agtcgccgccaacagtaatgcagatattattattactgaaattggtggaacagttggtgatattgaatctctaccttttttagaggcaataagagaattcaaaaatgatgtcaataggaacgatgttgcatatatacacgtaacattacttccttacatcaaaacctctggcgaaataaaaactaaaccaacacaacattcagtgaaagaattaagatcaattggaattcagccagatttacttgtatgccgaagtgataaatctatcaatgaagctcttaaaaagaagcttagcggtttttgcggtgtcagtatcaactctgtaattgaagctttagacgctgacagtatttattctgtacctctttctttaaaaaaagaaggtttatgcaaagaaaccctgcagtatttagatcttgaagataaaaaatgtgatttgaaaaattgggagcaactaatacataacctaagaaatcctggagctccaatcaaagttgctttagtaggtaaatacattgaacttggagatgcatatttatccgttgttgaagctttaagacatgcatgcattgaacaaaaggctttattagatttacattgggtaagtgctgaaatgatagaaaaaaattcagcagaaacttacttaaatgcagttgatgcaattgtcgtacccgggggatttggaaatagaggagtcaatggaaaaatttcggcaataaaatttgcaagagaaaataaaattccctttttaggtttgtgccttggtatgcaatgtgcagttatagaatgggccaggaatgtagctaatcttccagatgcttctagttcagaactagacccaaacactcccaatccagtgatacatttattaccagaacaggaagatgtagttgatttaggtggcacaatgagacttggagtttatccatgtagattgacaaaaatacaactggaa

SEQ ID NO: 315086 - DNA, 505 bp, Unknown
  Bacterial polypeptide expressing nucleotide sequence isolated from the Sargasso Sea
tgcagagaaaataaaattccctttttaggactgtgccttggtatgcaatgtgcagttatagaatgggccaggaatgtggctaatcttccggatgcatctagttcagaactagacccaaatactccaaatccagtgatacatttattaccagaacaggaagatatcgttgatttaggtgggactatgagacttggagtttatccatgtagattgacaaataatacaactggaaaaaacttgtatgatgaagatgttatttatgagaggcatcgacatagatacgaatttaataattactacaaacaaagttttttaaattccggatacaaaattagtggtacatcgccagatggcagattagttgagttaattgagttagaaaatcatccttacttcttggcatgtcaatatcatcctgagtttttatcacgacctgggaaacctcatcctttatttaaaggtttaataaaagcctctcaaaaaaagttaactcaatcaaattaat

SEQ ID NO: 315087 - DNA, 598 bp, Unknown
  Bacterial polypeptide expressing nucleotide sequence isolated from the Sargasso Sea
catgtcgaagtttatttttattacaggtggcgtggtttcttctcttggaaaaggtctagcatcagctgcgctgggaactctactccagtcgcgcggatacaaggtgcgtcttaggaagcttgatccctatctcaacgttgatccaggaacaatgagtccttaccagcatggggaagtttatgtaacagacgatggggctgagactgatctcgatttagggcactatgagcgttttacaggtgtgccagcgaaaaaatccgataatgtaacgactgggcaactctacatggatgttttgtcgagagagcggcggggagattacctaggggctactatacaggtaattccccatgtaaccgacgcaataaaagaatttgttaaaagtgatatatcggacgaagatttcattttatgtgaaattggtggcaccgtcggggatatagaaagcttgccttttttagaagctataaggcaacttggaaatgaattaggcagagagagatcactttttgttcattttactttggttccatttatagcttcggctggtgaactgaagacaaaaccaacccagcattcagtaaaagaattacagagt

SEQ ID NO: 315088 - DNA, 838 bp, Unknown
  Bacterial polypeptide expressing nucleotide sequence isolated from the Sargasso Sea
agatcggagggctccatacctgaaaaggaacgcgaaaaactagcattattctgcaatgtaaggcctgaatctgttattgcagctcaggatttaaaatcaatatatgaggccccaatcgtatataaccgtgaagggctcgatcaggcggtacttgatgcatttaatatcgcgccggccccaaaaccagatttaagtatttgggaagacgtcgcggaccgagtgcataatccagagggtgaagtgaacgttgccattgtaggcaaatacacgcaactggaggatgcatataaatcaatagctgaggcactgactcacggcggtttagcaaacagagttaaagttaatatcgaatgggtagatgcagagacttttgataaaaaagattccacgtcagaattacaaggttttaatgcaattctagtaccaggaggctttggagagcgtggcacggaaggtaaaataagggcagctcaatttgcgagagaaaatcacgtgccttatcttggaatctgccttggcatgcaaatggcggtgattgaagctgcgagaaatgtagctggctataagaatgccggatctgaggaatttgatcatgaggcaggcaagaaaagatttgaacccgttgtttatcatttaaaagagtggatacaaggcaaccaaactatagaacggtctgtcagcgatgataaaggcggaactatgcgattaggtgcttacaacgcaacattactagatgggagcaaggttgcatcaatttatggaatatctcaaatagaagaacggcataggcatcgatatgaggtcgatacaaaataccaaaaaaagttagaaagtgtag

SEQ ID NO: 315089 - DNA, 506 bp, Unknown
  Bacterial polypeptide expressing nucleotide sequence isolated from the Sargasso Sea
catggcgcgttttatattcgtaactggcggcgtggtttcatccattggtaaaggattatcttctgcgtctttagctagtttattaatctcacaaggttataaagttagagtaagaaaattggatccttatttaaatattgatcctggaacaatgagtccatttcaacatggggaagtttttgtaactgatgatggcgcagagacagaccttgatttaggtcattatgaaagattcacaaatacttcatctcgacaatctgataacataacaactggaaaaatttattcagatattctcaaaagagaacgtgagggaggatacttgggtaaaaccgtacaagtaataccgcatgttacagacagaattaaacaatttataaaacatgatacaaaaaaagaagattttgtaatttgtgaaattgggggaacagttggtgatattgaaagtttaccatttttagaggctataagacaattttctaatgatatagaaaaaaaaaatactt

SEQ ID NO: 315090 - DNA, 292 bp, Unknown
  Bacterial polypeptide expressing nucleotide sequence isolated from the Sargasso Sea
atgggaaataaacaaacaagatttttatttgtaactggtggagtagtttcttcacttggtaagggcgttgctgctgcctctttgggagcagttctcgaaagtagaggtctttcagtcactattcttaaattagatccatatataaaccttgatccaggaactatgagcccatttcagcatggcgaagtttttgttactgaagatggatctgaaactgatcttgatttaggacattatgaaaggtttcttacatcaaagatgtctaaatccaataacttcactacgggacaag

SEQ ID NO: 315091 - DNA, 336 bp, Unknown
  Bacterial polypeptide expressing nucleotide sequence isolated from the Sargasso Sea
catggcgcgatttatatttgtcactggcggcgtggtctcttcacttggtaaaggcttggcttcagcatcacttgcttcattattgcaacatcacggatacaaagtcagaattagaaaattagacccatatctaaatgtagacccaggtacgatgagtccatatcagcatggtgaagtttatgtaacggatgatggtgcggaaacagatttagatctaggtcactatgagaggttcacaggagttacatctaaaaaatcagataatattacatcgggaaaagtctatcaaaaaattataggaaaagagagaaaaggcgaatacttgggtgccacagt

SEQ ID NO: 315092 - DNA, 857 bp, Unknown
  Bacterial polypeptide expressing nucleotide sequence isolated from the Sargasso Sea
tgagttggtggtactggtgggagatattgaaagcttgccttttatggaagcgattcgtcagttatcgttaaaagttggttatcataatcatttaattgttcacttaactttgttgccatatataaaagctagtggagaattaaaatctaagcctactcaacattctgttatgaagcttcgagaaattgggctgtctccagatatgattctctgtaggtctgaatacaaaatagatagatcgattagagataagattgctttgttttgcaatgtacgttctgatcatgtttttgaaggtcgagacgtagaaagtatttatgaggttcctctagttatggatgaacaaaatatgggaggtcttattaatgatagattgcaacttgataaaaagccagatttgtcacttttaaaagggtttgttaaaaggtataaaaaccctaaaaaagaaataaatatcgcgatgtgcgggaaatatactgaattaattgattcctataaaagtgttatggagtcttttgtacatgctggagttgaaaacaattctaaagtaaatgtgaagtgggtaaaaactgaaaacataaaaaatgataaaaaagctaaaaatcagtttagaaatatagatggaattttaattcttcctgggtttggatctagagggggagaaggaaaaattttatcttcaaaatatgctcgagaaaacaacattccttttttaggaatttgtttaggtatgcaatgtgctattattgattttgctcgacatgtttgtagtttgaaaggggctaattcaacagagtttaataagcgtactaaatatccggtaatagatttaatggaatcacaaaaagcaattaaaa

SEQ ID NO: 315093 - DNA, 843 bp, Unknown
  Bacterial polypeptide expressing nucleotide sequence isolated from the Sargasso Sea
tttattgaagcaatcagacaattaggtctggagttaatgagttaccaaacttcttatttgcatttgacccttgttccttatttgtctaatgcaggtgaattaaaaactaaacctactcagcattcagtaaaagagtatagaacacttggtgttcaacctgatattcttatctgccgttcagaatacgctctaccgcaagaaagcaaagagaaaattgctttattctgctccatgccaaaagatggagttatttcattacctaatctagaaactatttatcaagcaccgttatttctttctgaggaaggcatagataaaattcttacgaaaagattgcagcttgataaaactatacctaatcttagggattggaaaaaagttataaaaagaaagatcaagccttcaaaagaattaaatgtttcttttgttggaaaatatgttgatttaaaagatgcatatttttccttgatagaagctttggatcatgcaggaattcataatgacacgaaaattaatataaattatataaactcagaaaaaattgaatcctccaattataaaaaagtcttaaaaaattcagatgcaattcttgtgccaggaggatttggtaatagaggaattgaaggaatgattttagcttctaaattcgctagagaaaataagattccatattttggtatatgtctaggtcttcaaatcgcaattattgagatgaccagaaatcttcttaatctaaaagatgcaaatagcactgagtttaaaccacgaacaaaaaataaagctatatctcttgttacagagtggaagaataaagatggaacgattgaaaaaaagaataagaac

SEQ ID NO: 315094 - DNA, 847 bp, Unknown
  Bacterial polypeptide expressing nucleotide sequence isolated from the Sargasso Sea
aaagaacgtaaaggtaagtacttaggaaaaactgttcaggttatacctcatgtaactgataggataagagagtttataaaaggtgatataaccaatgaagattttgttatttgtgaaattggtggaacagtgggggatatagaaagtttaccttttgttgaagcaataagacaattttcaaacgatgtagggagaagtaaaagtttatttatccatttaacttttgttccatttttaaaatcttccgatgaaataaaaacaaaacccactcaacattctgtaaaagaattaagaagtctcggtatacaacctgatatcattatttgtagatcgcaaaaatctataccattagatcaaagaaaaaaaatatctctattttgcaatgtttcaatcgaaaacgttatagagactgttgatgtaagaacaatttatgaagctccaattagtttctataatgaaaaattagataaacaagtcttgaaatattttaaactaaaaccaagaaaaaaagttaatttgttaccatggaaaaaaattacaaaaactgttttaaatacaaaaaaaatagtgaatattggaattattggtaagtatgtaaatttaaaagatgcatacaaatcattggatgaagcattaattcatggtgggattaataataatataaaggttaatttgacaagaattgaatcagacaaattaaaaccaaatcaaattaaaaaagttctaaaaaatgtttctgggattttaattcccggtggatttggtaaaaggggaacagaaggtaaaatatcagctattagctatgctagaagaaataaaatcccctttttaggaatttgttttggta

SEQ ID NO: 315095 - DNA, 190 bp, Unknown
  Bacterial polypeptide expressing nucleotide sequence isolated from the Sargasso Sea
atggcgcgatatatatttgtcactggcggcgtggtttcatcattaggaaaaggtctttcatccgcatcgctggcttatttattaaaatctcaaggttacaaagttaggttaagaaaaatggatccatacttaaatgtagacccaggaacaatgagcccatttcaacatggagaagtttttgttacggatg

SEQ ID NO: 315096 - DNA, 719 bp, Unknown
  Bacterial polypeptide expressing nucleotide sequence isolated from the Sargasso Sea
ggcaaaggtttatcatctgcatctttagcttatcttttaaaatctcaaggctacaaagtaagaattagaaaaatggatccatatttaaatgttgatcctggaactatgagtccatttcaacatggtgaagtctttgtaactaacgacggagcagagacagatttggatcttggtcactatgaaagatttacaaacatatctgctaaaaagtctgacaatattacaaccgggaaaatttatagtgatataattaaaaaagaacgaaaaggaaattatttaggaaaaactgttcaggttattccacatgttactgatagaattagagagtttattaaaggagatatatctaacgaggattttgttatttgtgaaatagggggcacagtaggagacatagaaagcttaccatttgtagaagctattagacaattttcaaatgaagttggaagaagcaaaagtttatttattcatttaacatttgttccatttttaaaatcatctgatgaaatcaaaactaaacctactcagcactctgttaaagagttaagaagccttggtattcaaccagatattattatttgtagatcccaaaaatcaataccgctagatcaaagaaaaaaaatatctcttttctgtaatgtatcaatagataacgtaattgaaacagttgatgtaagaacaatttatgaagcacccataagtttttttaatgaaaaatt

SEQ ID NO: 315097 - DNA, 730 bp, Unknown
  Bacterial polypeptide expressing nucleotide sequence isolated from the Sargasso Sea
atgtcagattatatttttgttacaggtggagttgtttcagcactcggcaagggtgtgacgtccgcttctctgggcgctatcttagagtctcgagggcttaatgtgggaatgatgaagcttgatccatacctcaatgttgatccgggcacaatgagcccatatcaacacggggaagtctttgtaaccgaagatggaaccgagactgatttggatttaggccattatgagaggtatgtttccaccataacgggaaagcacagtaactatacagctggtaagatctacgaaactgtcattgcaaaagaaagaagaggcgattacctaggagcaactgttcaagtgatccctcatgttaccgatgaaatcagaaaaagcattgtcaaaggatcgcaaggttatgacgtaacaattgttgaaattggtggaacggttggagacattgaatctcttccattcattgaagccataagacaaatggggatctataaagatggttatgaagttgcatacgttcatttaacattggtgccatatatcaaggcatcttcagaaattaaaaccaagccaactcaacattcagtcagagaactccgagctatcggaattcaacccgatgctttggtctgccgctctgaactacctctcccaaaagaacattttgataagattgctctttttacaaatgttgaaaagaaagcagtcatttctgcacatgatgctgaagacatct

SEQ ID NO: 315098 - DNA, 613 bp, Unknown
  Bacterial polypeptide expressing nucleotide sequence isolated from the Sargasso Sea
ctcgacgcgattctggtgcccggtggtttcggcgaccggggtacggaaggcaagattgccgcgatccgttatgctcgtgagaataaggtgccctatctgggtatttgtcttggtatgcaattggcggtgattgaatatgctcgccatgtggcggggattgaaaaagcgcattcatctgagcttaacccaaacaccccggacccggtggtgggcctgattaccgaatggatcaccgaagacgggcagaaggaactgcgttcggcggattctgacctgggtggtaccatgcgtttgggtggtcaggagtgtgtacttgaagctgatagccgtgctgctgagtgttatggcagcacgcatatcgtagagcgtcatcgccaccgttatgaggtgaataacaactacttgccgcagttggaagcggcaggtttgaaaattgttggccgttccgcggatggtgagcttgtggaagtgattgaagtgggcgaccacccgtggtttgtggcttgtcagttccaccctgagttcacttccacccctcgtgacggtcacggtttgttcaaaggttatgtggccgccgccctggcggaacaaaaggcccacaaggagacgtgac

SEQ ID NO: 315099 - DNA, 259 bp, Unknown
  Bacterial polypeptide expressing nucleotide sequence isolated from the Sargasso Sea
atttattctatttataataaacaattaatttctgaaagacatagacatagatacgaagtaaataagaaatttatatctaaatttaataataaaggatattattttagcggaatgtcgccagatggattattacctgaagttttagaaagtgaaaatcacaaatggtttataggagtacaatatcatcctgaactaaaatcaaggcctttaaaacctcatccactttttgtttcatttattaaaaattgtataaaatgat

SEQ ID NO: 315100 - DNA, 922 bp, Unknown
  Bacterial polypeptide expressing nucleotide sequence isolated from the Sargasso Sea
accgatttagatcttggacactatgaaagatttactgatatttcagcaaaacaatctgataatattaccacaggtagaatttatagcgatataataaaaaaagaacgtaaaggaaaatatttaggcaaaacagtacaagtaatacctcatgtaactgatcgtataaaagaatttattaaaaaagatattgttaatgaagattttgttatttgcgaagtaggaggaacagttggtgatattgaaagtcttccttttttagaagcaattcgacaattttctaatgatataggtaaaaataaaactttatttgttcatttaactttagttccatttatgaaatcttcagatgaaattaaaaccaaacctacgcagcattctgtaaaagaattaagaagtataggtatacagcccgatatagttatatgcaggtcagaaaaatctattccaaaagatcaaagaaaaaagatttctttattttgcaatgttccaattgaaaatgttatagaaactgtagatgtaagaactatttatgaagcacctataagcttttatagtgaaaaattagataaacaagtattaaaatattttaaaacaaaacccaaaaagaaagtcaatttaaaaccatggaagaaaattacaaacacagtaattaaaaataagaaagaagtaaaaattgcaattattggaaaatatgtaaatttaaaagatgcttataaatcgttagatgaagccttgattcacggtggtgtcaaaaataacgttaaagttaatttaataagaatagaatctgataaattaaaaagtaacgaagtacgtaaaaaaatacgaaatgcatcaggcatattaataccaggtggttttggaaaaagaggaacagaaaacaaaatatccgcgattaattatgctagaagaaacaaagtgc

SEQ ID NO: 315101 - DNA, 310 bp, Unknown
  Bacterial polypeptide expressing nucleotide sequence isolated from the Sargasso Sea
atggcgcgatatatttttgtcacgggcggcgtggtttcatctttaggaaaaggtctttcatcagcttcacttgcttatttgttaaaatctcagggttacaaagttaggttaagaaagatggacccgtatctaaatgtagatccaggaaccatgagtccatttcaacatggggaagtttttgttacagatgatggcgctgaaacagatttagacttgggtcattatgaaagatttactaatatttcatcaaagcaatcggataatattacaactggccgtatttatagtgatgtaataaaaaagaaaggaa

SEQ ID NO: 315102 - DNA, 439 bp, Unknown
  Bacterial polypeptide expressing nucleotide sequence isolated from the Sargasso Sea
taatctaaaaggtgcaaatagtactgagtttgatcaaaatacaaagcatcctgttattggccttattacagaatggaatgatatttcaggcaaaaaagaaaaaagagataaaaattcagacttgggtggaacaatgcgtttaggagggcagctatgtaaactcaaaaagggatctaattcattaagaatgtataaaaattcagaaatcattgaaagacatagacatcgttatgaggtaaatccaaaatataaagatgatatgatcaaaaaaggattagatgttgtagggacatccattgatggtaagctagtagaaatgattgagattcctaaacataaatggtttttagcatgccaatttcatcctgaatttacctccaatccaagagatggacatcctattttcaacagttatatcaaaagtacgttaagaaagtaa

SEQ ID NO: 315103 - DNA, 859 bp, Unknown
  Bacterial polypeptide expressing nucleotide sequence isolated from the Sargasso Sea
agagaagctgtaatccaatcgattgatgcttcaacaatttacgatgttccaaacctgatgctggaagaaggccttgacaaagtagcattgaaaaaattggatttgccggaaaaagcaactccggatttgaaacaatggaacgagttcctgcaaaaactgaaaaatccgaaacacatcgtaaatatcggtttggttgggaaatatgttgagttgcaggattcttataaatccattttagaagcctttattcatgcaggagctgccaatgaaaccaaagtcaatgtagtgagcattcactctgaatatgtagatgagaaaaatattgccgacaagctaagggatttagacggtattcttgtagcgccgggctttggtgaaagaggaattgaaggaaagattgatacggttcgttatgcaagagaaaataatattccgttttttggaatctgtttaggaatgcaaatggctgtaattgaatattcaagaaatgttttggggtattcagatgccaattcaacagaaatgaatgcgggaacagcacatccggtaatcaatctgatggaagaacagaaaacgattactgataaaggtggaacaatgcgtctgggagcatggaaatgtgaaataaaaccggatactctggcttcaaagatttatggtaaaaaccagattcaggagcgtcaccgccaccgttatgaatttaacggcgaatatttggaagaattggaaaatgccggattaaaagcatcgggtataaatccggatacgaaattggtggaaatcatcgagattgagaaacatccgttttttatcggagtacagtaccatccggaatataagagtacagtcgcacagccac

SEQ ID NO: 315104 - DNA, 294 bp, Unknown
  Bacterial polypeptide expressing nucleotide sequence isolated from the Sargasso Sea
catgacgcgatatgtattcgttactggtggtgttgtgtcctctctgggtaaggggatcgccgccgcctccctcgccgctgtgcttgaggcacgtggaatcaaagtcaccctcctcaaactggatccttatatcaacgtggacccgggcacgatgagcccatttcagcatggtgaggtttttgtgactgacgatggtgccgagactgatctggatctgggtcactatgagcggttcacgcgcaccgtcatgagccgggcaaataacttcacagcgggcagggtttatgacgccgt

SEQ ID NO: 315105 - DNA, 870 bp, Unknown
  Bacterial polypeptide expressing nucleotide sequence isolated from the Sargasso Sea
gcacttttaaaatcaagaaattttaaagtaagaattagaaagcttgatccttatttaaatgttgatccaggcactatgagcccttatcaacatggagaagtttatgtgaccgatgatggagctgaaacagatttagatttaggacattatgaaaggttcacaaatcaatcatcaaaaaaaagtgatagtatttcttcaggtaaaatttattcaacagttttgtcaaaagaaagaaaaggtgactatctaggagcaactattcaagtaattcctcatgttacaaatgaaattaaatcatttattaatagtgatttaaaaaatgaagattttgcaatttatgaaattggaggaacagtaggagatatcgaatcactaccttttttagaggcaataagacaaattagaaatgataaaaaaatatcttcagctctgatacatatgacttatataccttatttaagttttgcaggtgaattaaagactaaaccaacacaacattccgtaaaagagcttcttaatgctggaattcaacctgacataataatgtgcaggtcagaaaaagctatagaccaggaatctattttaaaaatatcattattttgtaatgtaaaaaaagaatccgtcatacctgcactaaatgctaattctatttatgacgttccttctttatattcaaagtatggattagatgaatctctcttaaaacacttgggatataaatcaaaaaatcatcctttggatttgaaaccttggaataacttattaaagaaaattaaaaatcaaaaatctcaagttaaaatagctgttgtaggcaaatatactaatcttaaggatagttataaatctttgactgaagctctaatgcatgga

SEQ ID NO: 315106 - DNA, 419 bp, Unknown
  Bacterial polypeptide expressing nucleotide sequence isolated from the Sargasso Sea
cactgagtttgatcaaaatacaaagcatcctgttattggccttattacagaatggaatgatatttctggcaaaaaagaaaaaagagataaaaattcagacttgggtggaacaatgcgtttaggtggccagctatgcaaactcaaaaaggggtctaattcattaagaatgtataaaaattcagaaattattgaaagacatagacatcgatatgaggtaaatccaaaatacaaagaagatatgatcaaaaaaggattagatgttgtagggacatccattgatggtaagctagtagaaatgattgagattcctaaacataaatggtttttagcatgccaatttcatcctgaatttacctccaatccaagagatggacatcctattttcaacagttatatcaaaagtacgttaagaatgtaaa

SEQ ID NO: 315107 - DNA, 216 bp, Unknown
  Bacterial polypeptide expressing nucleotide sequence isolated from the Sargasso Sea
aatgacgcgctttatatttataactggcggagttgtgtcttcccttggcaagggtttggcctctgctgcacttggtactttattgcaggcaaggggattttcagtcagactaagaaaattagacccttatattaatgttgacccaggtacaatgagcccatatcagcatggcgaggtattcgtaaccgatgatggcgctgaaactgatttagattt

SEQ ID NO: 315108 - DNA, 837 bp, Unknown
  Bacterial polypeptide expressing nucleotide sequence isolated from the Sargasso Sea
cttttgtgtcgccgggaagaatgagatagatgacagaattaaaaagaaacttgcgttattcacgaacgtgtcgaaagacgcagttttttctgctatagatgccgaaacaatatatgatatccctgtattgctacaaaaacaaaacatagatacatatatcaccaagagtttgaaactaaaaaataaaaaattaaacttgaagccatggacagattacagaaaaaaacttaataaatgtaaaaaaaatacaacaattgctatgatagggaagtatgttgatttagaggattcttataaatcactcaatgaagcactttatcatgccggaatcattaatggggcaagagtaaatattgagtatattgattcagaaaaaattaataatagataccttaaaaatctcaaaaaggtaaatggtattttagtacccgggggttttggaaataggggtatagagggaaaaattcttgccgctatgtatgcgagaaagaatgaaattccatatttcggtatctgtcttggaatgcaaatctctgttattgagtacgcaagaaatgtaataaacttaacaagagcgaatagtacagagtttgatatgaaaacgaaaaatccagttattgctctggtagaggaatggaaaaactcatcaggaaaaaatattctagttgataaaaagaatatgggagggacaatgcgtttaggctctcaaaaatgtgatatcatcaagaattcattggcattcaaaatgtataattctcttgtagtaaatgagagacaccgtcaccgatatgaggtcaatagtaattttttggatttttttgagaatggtaacatggt

SEQ ID NO: 315109 - DNA, 649 bp, Unknown
  Bacterial polypeptide expressing nucleotide sequence isolated from the Sargasso Sea
atgtcgatccgaagatattcaagagaatggcaccgattgtctttctgaaatggatgccattctgattcctgggggatttggagatcgaggcatagagggaatgattcaatccattgaatatgcaagaaagaatgatatcccttttcttggtatctgtcttggaatgcaagcagctgtaattgaatatgctcgaaatgttttggatcataaggatgcaaatagcactgagtttaactctagtacttctgcacctgtcattgcaatgattacagagtggatgaatgatgacggctcaaaagagaatagagacgaaaactcagatcttggagggactatgagacttggtgcacaagagtgtttgtttacaaaaggaaccaaggcaaaagatatatatggcgcagattccgttgttgaaagacatcgacatcgctatgaatttaataatagatatcgcgaagagcttgaaaaaaatggtttggtattttctgggttctcaaaggatggcttggctgaaatgattgagattaaagatcatccctggtttattggctgtcaattccacccagaattcacatcttcaccccttgcaggccatccattattttattcttttatcaaagctgctgtagaatactctaaaaagaactaa

SEQ ID NO: 315110 - DNA, 379 bp, Unknown
  Bacterial polypeptide expressing nucleotide sequence isolated from the Sargasso Sea
aatgaatgagtggataaaggatggtaaattaatgaaaggaactgataaaaatctgggcggaactatgcgattaggtagttacgaagcaagacttaaaaaagacacaaagataagtaaaatttacaattcattgaaaattgaagaaagacatcgtcatagatatgaagttaacattaattacaaagaagattttgaagataaaggaatgattttttcaggcctatctccagataataaattgccagaaattattgagttaaaggatcatccttggtttataggagtgcagtttcatccagaatttaaatctagacctttaaaaccgcatcctttattctcatcatttataaaagctgcaaaaaccaattcgaaaaaatga

SEQ ID NO: 315111 - DNA, 889 bp, Unknown
  Bacterial polypeptide expressing nucleotide sequence isolated from the Sargasso Sea
atgacgcgatttatatttgtaacaggcggcgtggtatcatctcttggtaaaggtttagcttcagcctctttagcatcactacttcaacaccatggttataaagtaagaattagaaaattagatccttatctaaatgtagatccgggaacaatgagtccatatcagcatggtgaagtttatgttacagatgatggcgctgaaacagatttagacctaggtcattatgaaagattcactggcgtggtttctaaaaaatctgacaatattacctctggaagagtgtatcaaaaaattatagctagagagagaaaaggtgagtacttgggcgctacagtgcaagttattccacatgttactaatgaaattaaagaatttatttcaaacgatcttgagcaagaagattttgtgatatgtgaaattggcggaacaattggtgatattgaaagcttgccttttatagaagcaataagacaatttcataatgatagtgggcatgagaattcattatttattcatgttactttggtaccatacattgcaagctcaggtgaattaaaaacaaaacctactcaacattcagtaaaagaattgaggagtttgggcatacaaccaaatattttattgtgtagatctgacagaataatacctgaaggagaaagaaaaaaaatcggcttattctgcaatgttcaacataactgtgtaattcaagcgataaatgcaaattcaatatacgaagttccaattaatttttataatgaaggattagataagagagttttagaatatttcaattttgatgcaaataaaactatagatcttaaaatgtggtctcaagtttctaaacatgttcttgaacctaagggaagggtcataataggaatagtaggca

SEQ ID NO: 315112 - DNA, 960 bp, Unknown
  Bacterial polypeptide expressing nucleotide sequence isolated from the Sargasso Sea
agatctcattattttgcaatgtgtcaattaatgatgtgattgaaacagttgatgtaaaaacaatttatgaagctccaataagttttaataaggagaaattagatgaacgagttttaaaatttttcaagataaaatccaaaaagaaagtaaatctaagtccatggaaaaaaattacttattcggtattaaataataaaaagaaagtcaatattgctataattggaaaatacgtagaattaaaagatgcatataaatctctagatgaagctttaactcacggcggattatctaataatttaaaagtcaatttaataaggattgaatctgattatttaaaaccaaaagatgttaacaaaaaattaaaagatgtttctggtgttctaattccaggtggttttggaaaaaggggaacagaaggaaaaatcgcagcgataacatatgcaagaaaaaataatgtaccatttttaggaatatgttttggaatgcaaatggcagttattgaatttgcaagaaataaattaaatatcaaaaaagcaacttctagtgaattcggaccttcaaaagcctctgtagttggcctgatgagtgaatgggttagagacggtaaaatgattaaaggaactgataaagaacttggtggcacgatgagattaggcagttatgaagcaaaacttaaaaaaggatcattaatcagtaacatttataattctactaaaattaatgaaagacatcgtcatagatacgaggtaaatataaattacaaagaagaatttgaaaaaaagggtatgatattttcaggcttatcgccagatacaaaattacctgagataatagaacttaaaaaccatccctggtttattggggttcagtttcatccagaatttaaatctagacctttagctccacatcctttattctcttcatttataaaagccgcaaaaatcaaatcgaataaataat

SEQ ID NO: 315113 - DNA, 292 bp, Unknown
  Bacterial polypeptide expressing nucleotide sequence isolated from the Sargasso Sea
catggcgcgatatatattcgtaactggcggcgtggtttcatctttaggaaaaggtttgtcatcagcatcgttggcttatttacttaaatcacaaggttacaaagtaagattaagaaaaatggacccatatttaaatatagatccaggcacgatgagtccattccaacatggagaagtttttgttactgatgacggtgctgaaacagatttagacttaggtcattatgaaagattttcaaatatttcagcaaaaaaaacagataacattacaactggtaaaatctacagcgac

SEQ ID NO: 315114 - DNA, 346 bp, Unknown
  Bacterial polypeptide expressing nucleotide sequence isolated from the Sargasso Sea
aaaagaaaaaagaaataaaaattccgatttaggtggcactatgagattgggtggacaattatgcaagattaaaaaaggatcaaattcatataaaatgtataagagtttagagattgttgagagacatagacatagatatgaagttaatcctaaatttaaagaagctatgattaaagaaggtcttaatgtagttggaacctcaattgatggtaaattagttgaaatgattgaaattccgaatcataaatggtttttagcatgtcaatttcatcctgaatttacatcaaatcctagagacggccatcctatttttaatagttatataaagagtacaattaaaagataa

SEQ ID NO: 315115 - DNA, 766 bp, Unknown
  Bacterial polypeptide expressing nucleotide sequence isolated from the Sargasso Sea
agagtattaaatcatttcaaaattaagaataaaaaatcaccaaatttatctaaatggaaaaatattacatctaaagttttaaatccaaaaagtaatgtaagcataggtataataggtaaatatgttaatttgaaagatgcttataagtctttagatgaagctttagttcacggaggactttctaataatcttaaagtgaacttaaaaaggatagactctgagaatttaaaacctcaaaatattgaaaatattttaaaagatgtttcaggtgttttaattccaggggggtttggcaaaaggggcacagaaggtaaaattgctgccataaaatacgcaagattgaataatatacctttttttggaatttgttttggaatgcaaatggcagtaattgaagcagctagaaacttattaaatattaaaaatgcttcaacaagtgaatttggaaataattgcaccccagtggttggattattggaagaatggcaaaaaggaaaaaaaagattaaaaggcagtgaaaaaaatttaggtggaactatgaggctaggtttatatgatgcagtgttaaaaagtaattcatttatatataaaatatattctgaaaaaaaaattaaagaacgacacagacatcgatacgaagttaatataaaatataaaaacgattttgagaaaaaaggacttattttttctgctttatcccccgatggatcccttcaagaaattgtagagctaaaagatcatccttggtttataggagttcaatttc

SEQ ID NO: 315116 - DNA, 895 bp, Unknown
  Bacterial polypeptide expressing nucleotide sequence isolated from the Sargasso Sea
aatgtaatcaataaagaaagagaaggtgattacttaggaagtactgttcaagtaatttctcatgtaacggatgaaataaagtcttttataacaaaagatataggaaaatgtgattttattttagtagagattggtgggacagtaggtgatatagaaagccttccttttttagaggcaataagacagtttggtaatgaaataggtaaaaaaagagcaatttatattcatttaactttagttcctttcatacacacttctaatgagcaaaaaactaaacctactcagcattctgttaaagagttaagagaaataggaatacaacctaatattttactatgtagatgtgatagatctattgaggctaacgaagtagataaaattgcattattttgtaatgtaaaatcagaagatgttattcaagctctagatgtaaaaaatatttataatgtgcctatagtttatcatagtgaaaaattagatgtacaagttttaaggcatttcaatattagacctaataaaataaatttaataaaatggaaaaaaattgttctatctgcaaataaagtcaaaagaaatattaatgttggtattgttggaaaatatactgatttacctgatgcttataaatccttaaatgaagctttagttcatggagggttaataaataatgtaggtattaatattcattggatcaattcagaaaatttaaatgataaatctattaagaataaatttaaaaatatacatggtattattgtgccaggagggttcggagaaagaggtatctcaggaaaaatcaaggcaataaaatatgctcgcttaaataaagttccatttttaggtatttgtcttggtcttcagcttgcagtaattgagttttctaaaaatgtattaa

SEQ ID NO: 315117 - DNA, 895 bp, Unknown
  Bacterial polypeptide expressing nucleotide sequence isolated from the Sargasso Sea
cttgcatccgcggctctgggtgcacttctgcaggcgcgcggttacagcgttcgcgttcgcaaacttgatccttacctgaacgtcgatccgggcacgatgagccctttcgagcatggtgaggtcttcgtcaccgacgacggggccgagaccgatctcgatctaggccattatgagcggttcacgggagtggcggcgacccaatccgacaacgtcacgactgggaggatctattccgacgttctgggtcgagagcggcgtggtgactatctgggcggcacggtccaggtgatcccgcacgttaccgatgccatcaagaaatttgtcaccgctgatctgcatggtgaggattttgtgatctgtgaaataggcggcacagtcggcgatatcgaaagtctgccgttcctcgaggcgatccgccaactcggcaacgagttgggccatgaacgggcgatgtttgtacacttgaccctcgtgccctacctgtctgcctcgggcgaacttaagactaagccgacccaacattcagtgatggagctgcagcgtgtcggcatccgacccgatgtcatcctgtgccgctgcgaccgcacgatccccgctggcgagcgcaacaagatcgcgctgttttgcaacatacgtcccgaggcggttgtgccggcgatcgatatcgacacgatctaccaggtgccaatcgagtatcatgatgaaggcttcgatactcaggtgctggcgcattttcgcatcgacgccagcgtccggcccaatctcgacacttggcgcgagatcgtgggccgggttcgcgaaccggatggcgaggtcacgatcgctgtagtgggtaaatacacggacctgcccgatgcatacaaatccctgtcggaagcgctggtacatggtggca

SEQ ID NO: 315118 - DNA, 496 bp, Unknown
  Bacterial polypeptide expressing nucleotide sequence isolated from the Sargasso Sea
aatgttccatttcttggtatttgtttaggtatgcaatgtgctgtagttgaattttctaggaatgtctgtgaattttcaaaagctaatagttctgagttctcagaagatactccctttccagtaatagctctcttgcctggtcaagaaaatgtggaattaggtggaactatgcgtttgggttcatatcctggagttttaaagtcgaaaaccttagcatctaaaatatatggggattcaactcaatttgaagagagacatcgtcatagatatgaattgaataacaaatatagggattctatggaaaaaaaaggactcattttttctggcatatctccaaatgatgaattagttgaaattattgaaatttctggacatcctttttattttggttgtcagtttcatcctgaatttaaaagtgctccgttttctcctcaccctgtttttgtatcttttgtgcaggccgcaaaaaatgcccggagtgaactttttaaataaa

SEQ ID NO: 315119 - DNA, 634 bp, Unknown
  Bacterial polypeptide expressing nucleotide sequence isolated from the Sargasso Sea
aatttaaaaattgaaaatataaagaccttattaaaaaatgtatcaggtgttttaattcctggtggttttggaaaaagaggtagtgaaggtaaaattgctgccataaaatatgcaagattgaataatatacctttctttggaatatgttttggaatgcaaatggcagtaattgaggctgctagaaatttgttaaatattaaaaatgcttctactagtgaatttggaaataactgtactccagtagttggtttattagaagagtggaataaaggtaaaaaaatttataaaggaagtgaaaaaaatttaggtggcacaatgagattaggtttgtatgatgcagtattaaaaactgattctttgatatctaaaatatattcaatgaaaaaaattagcgaaagacacagacatcgatacgaagtaaatattaaatacaaaaatgattttgaaaaaaagggattaatcttttcagctttatcccccgatggaactttgccagaaattatagaattaaaaaaccatccttggtttattggagttcagtttcatcctgaatttaaatcaagaccgtttacaccccatcctcttttttcgtcttttataaaagctgctgaaaagagaaaaggagtaaattaat

SEQ ID NO: 315120 - DNA, 856 bp, Unknown
  Bacterial polypeptide expressing nucleotide sequence isolated from the Sargasso Sea
actaacgaagattttgttatttgtgaaattggtggaacggttggagatatagaaagtcttccgtttattgaagccataagacagttttcaaatgagcacggtaaatcaaaaacattatttatacatttaacttttgttccatttttaaaatcttctgacgaaataaaaactaaaccaactcaacattcagtaaaggaattaagaagcataggtattcagccagatataattatttgtagatcacaaaaatcaataccttttgatcaaagaaaaaaaatatctttattttgtaatgttcctatagaaaatgtaatcgaaactgttgatgtaagaactatttacgaagccccaattagtttttttaaacaaaaactcgataaacaagttttaaattattttagattacaaccaaaaaaaagagcgaatttattgccatggaaaaaaattacaaaaattactttaaaaacaaaaaaatcaattaatattgctatcattggtaaatatgtaaatttaaaagatgcatataaatctttagatgaagcgcttacacatggaggtatttcaaataaaattaaagttaatttaattcgaatagaatctgacaagttaaaacctaatcaaatatctaaaaagcttaaaaatgtttctggtttattaattccaggtggttttggcaaaagaggtaccgaaggtaaaatttatgcaatcaaatatgctagagaaagaaaaataccctttttaggcatatgttttggcatgcaaatggcaattatcgaatttgctcgcaataaattaaaaattaaaaaagccggatctactgaacttgataaaaaggtgttatcctgtaattggttaa

SEQ ID NO: 315121 - DNA, 654 bp, Unknown
  Bacterial polypeptide expressing nucleotide sequence isolated from the Sargasso Sea
aatgcattttgtttttattacgggtggagtagcatcatctcttggaaaaggtatagcctcagcttctctcgcaacacttcttaaaagtagaaaatttaaagttagaatacgtaagttagatccttacttaaacgtagatccaggaacaatgagtccgtatcaacatggagaggtttatgtaacagatgatggtgcagaaacagatttagatcttggtcattacgaaagatttacaaatcagtctgctaaacaatcagatagtatatcgtcagggaagatttattctaacgttcttctaaaagaaagaaagggagattaccttgggtcaacaattcaggtaattcctcatgttaccaatgaaataaaatcatttattaatagtgatttaaaaagtgaagatatagctatttatgaaatcggaggaacagttggagatattgaatctcttccttttttagaagcaatacgacaaattagaaatgataaaaatatttcgtcagcattaattcatatgacttatattccatatttaagttcagcgggcgagttaaaaacaaaacctactccacattcagttaaaagacttcttaatgctgtattcaccagatatattatgtgcaatctgaacaccaatagatatgattcatctctaaa

SEQ ID NO: 315122 - DNA, 720 bp, Unknown
  Bacterial polypeptide expressing nucleotide sequence isolated from the Sargasso Sea
attggtggaacagtaggtgatatcgaaagtttaccttttttagaagcgatacgacaattttcaaatgatattggaaaaaaaaatagtttatttattcaccttactttagttccttatcttaaagcatcaggcgaacttaaaacaaaaccaacacagcattcagttaaagaattaagaagtttaggaattcaaccagacattattatttgtaggtctgaaagagagattccaaaatcagaaagaaaaaaaatatcacttttttgtaacgttcaaatagaaaatgtaattgaaacagttgatgtaaaaactatatacgaagctccaattagttttcacaaagaaaaattagactcaagagtcatgtcttattttaatgtaaaaagtaaaaaattacctgatttaagtgtttggaaaaatatcacaaaaaaagtactcaatccaaaacgtgatgtaaatattggcataataggaaagtatgttaatcttaaagatgcatataaatcacttgatgaagcattaattcatggaggaatatcaaataatctaaaagtaaatttaaaaaggatagactcagaaaatttaaaaccagaaaatattaaatcgttgttaaacgatgtcacgggtgttctaatacctggtggatttggaaaaagaggcagcgaaggtaaaattgctgccataaaatatgcaagattgaacgatatacctttttttggtatt

SEQ ID NO: 315123 - DNA, 394 bp, Unknown
  Bacterial polypeptide expressing nucleotide sequence isolated from the Sargasso Sea
atggcgcgatatgtattcgtcaccggcggcgtggtttcatcattaggaaaaggtctctcttccgcttcccttgctgcgttactacagcttagaggatttagagtcagggttagaaagttagatccatatttaaatgtggatcctggcacaatgaatccgtttcaacatggagaagtttttgtaaccgatgatggagctgaaacagacttagatataggtcactacgaaaggtttacaggaatttctgctactcaatctgacaacataacaacaggcggtatttacagcgatataataaaaaaagagagaagaggagactatcttggaggaactgtacaggtagttccccatgttacggaccgtattaaaaaatttatatctcacaatgtaaaag

SEQ ID NO: 315124 - DNA, 562 bp, Unknown
  Bacterial polypeptide expressing nucleotide sequence isolated from the Sargasso Sea
atggttaaacaaaaaaacacaaaatacatatttgttttaggtggtgtaatgtcagggcttggcaaagggatagctgcatcatctgtaggctatttacttaaaaacgcgaatgttaatgttacaattttaaaattagatccctatttaaatattgatccagggaccatgaatccatttcaacatggtgaggtgtttgttttggatgatggatcagaaactgatcttgacctaggtcattatgaacgtttcatagatgttaatatgacaaagaaaaataatgcaactgctggccatatttatagtagggtcttagaaaaagagagaaaagggaagtatcttggtgaaacagttcaagtaattcctcacgtaacagatgaaataatcaaacgaattgaagatgtgaactctaatttgttgtatgatgttgtaatatgtgaggttggtggtaccgtgggagatattgaaagtttgccatttatggaagctattaggcaattatcattagaagttgggtataataattacatgattatacatgttacgcttcttccttttgttaaag

SEQ ID NO: 315125 - DNA, 688 bp, Unknown
  Bacterial polypeptide expressing nucleotide sequence isolated from the Sargasso Sea
ttagttcatggtgggctatcaaataatctcaaattttatttaaaaaggatagactcagaaactttaaaacccgcaaacattaaacctttactaaaagatgtttctggtatcttaattcctggtgggtttggtaaaagaggcacggagggtaaaattgctgccataaaatacgcaagattgaataatatacctttctttggaatttgttttggaatgcaaatggcgattatagaagcagcaaggaatttgctgaatatcaaagatgcatctacgagtgaatttggaaacaattgtacacccgtagttggtttattagaagaatggaaaaagggtaaaaaaagaattaagggaagtgaaaagaatttaggtggaacaatgagactaggtttatatgacgcaatattaaaaaataattctttaatttctaaaatatattctgaaaagaaaattaaagaaagacacagacatagatacgaagtaaatataaaatataaaagcgattttgaaaaaaaaggtttgattttttcagctttatctccagacggaactttacctgagataattgaattaagagaccacccttggtttgtaggcgttcaatttcatcctgaatttaaatcaagaccatttgaaccacatccactattttcctcttttattaaagcagctggaattaaagaaaggaaaa

SEQ ID NO: 315126 - DNA, 847 bp, Unknown
  Bacterial polypeptide expressing nucleotide sequence isolated from the Sargasso Sea
aatgagtccatttcaacatggtgaagtttttgtaaccgatgatggtgctgaaactgatttagatttaggacattatgaaagatttactaatatatcagcaaaacaatctgataacataacaacaggcagaatatacagtgaaataattaaaaaagagagactaggtggctatctaggaaaaactgttcaagtaattcctcatgtaacagatggaataaaagagtttattaaaaaagatattacaaatgaagattttgttatttgtgaaattggaggaactgtaggcgatatcgaaagtttaccatttttagaggctataagacaattttcaaatgatattggaagatcaaaatctttatttatccacctaacttttgttccttttttaaaatcatcagatgaaattaagacaaaaccaactcagcattcagtaaaagagttaagaagtataggaattcaacctgatatagttatctgtagatctcaacaatctattcctttagatcaaagaagaaaaatatctttattttgtaatgtagatatcgacaatgttatcgaaacagttgatgtaaaaactatttatgaggctccaataagtttttttaatcaaaaattagacacgcaagtattaaaattttttaaaattaaatccaaaaaaagaccaaacttattaccttggaaaaaaataactgatattgttctaaatacaaaaaaaatagttaatattgcaataattggaaaatatgtaaatcttaaagatgcttacaagtctctagatgaagctcttactcatggaggaatatctaataaaattaaggtaaatttagttagaattgaatcggataaa

SEQ ID NO: 315127 - DNA, 557 bp, Unknown
  Bacterial polypeptide expressing nucleotide sequence isolated from the Sargasso Sea
tatgggtaaagtgagtccaacaaaattcatttttgtactaggaggagtgatgtccggcttaggcaagggtattgctgcatcctccataggctatcttcttaaaaattctggtctaaaagttacaattttgaaattagatccatacttgaatgtagatcctgggactatgaacccttatcagcatggtgaggtttttgttttagatgatggatctgagacggaccttgatcttggccactatgagcgatttattgatgtgagtatgactaagaataataacgcaactgcaggacagatttatagtaccgttttggataaagagaggaaaggtgaatatttgggggagactgtgcaagtgattcctcatgttaccgatgaaatcataaatagaattaaaaatatcaataaaccaaaaagatatgatgttgtcatctgcgaagttggcggcacggttggcgacatagagagcttgccctttatggaagcaataagacaactttcattacaggttgggtatcacaaccatttgattgtccatgtaacgctattgccatatg

SEQ ID NO: 315128 - DNA, 835 bp, Unknown
  Bacterial polypeptide expressing nucleotide sequence isolated from the Sargasso Sea
agtagaaaatttaaagtaagaatcagaaagttagatccttatttgaatgtggatccaggaacaatgagtccatatcagcatggagaagtttatgttacagatgatggtgcagaaacagatcttgatcttggtcattatgaaagattcacaaatcaatctgctaaaaaatcagatagtgtatcatcaggtaagatttattctaatgttcttataaaagaaagaaagggagattaccttgggtctacaattcaagtcattcctcatgttactaatgaaataaagtcatttattaatagtgatttaaaaaatgaagatattgctatttatgaaattggaggcacagttggagatattgaatctcttcctttcttagaagcaataagacaaattagaaatgataaaaatatttcttcagcattaattcatatgacttatattccttatttaagttcagccggtgagttaaaaacaaaacctactcaacattcagttaaagaacttcttaatgctggtattcaaccagatatcattatgtgtagatcagagcaactaattgataaggattcaatttctaaaatatctttattttgtaatgtaaaaaaagaatctgtaattcctgcattgaatgctaaatcaatttatgaagttccttcattgtattccaagtatggtttggatgaagcacttcttcaacaattaggctataatccaaaaaatcacaaattaaatttaaagccttggattgatcttcaaaaaaaaattaaaaagaaaaaacataaggttaaaatcgcagtagtaggaaaatacacaaatcttaaagatagttataaatcgc

SEQ ID NO: 315129 - DNA, 684 bp, Unknown
  Bacterial polypeptide expressing nucleotide sequence isolated from the Sargasso Sea
atggtggtatttcaaataaaattaaagttaatttaattcgaatagaatctgacaaactaaaacctaatcaaatatctaaaaaactgaaaaatgtttctggtttattgataccgggtggttttggcaaaagaggaactgaaggtaaaatttcagcaatcaaatatgctagagaaagaaaaataccttttttaggaatatgttttggtatgcaaatggcaatcattgaatttgctcgtaataaattaaaaattaaaaagtctggatctactgaacttgataaaaaatgctatcctgtagttggtttaatagatgaatggaataaagatggaaaaattattaaaggtactgataaagatttaggcggtacaatgagattgggcttatatgaagcaaaattaagaaataattctgccataaaaaatatatataaatctaattcaattaaggaaagacacagacatagatatgaagttaataataatctcaaaagtcaatttgaaaggaaaggtttaatattctcaggcatgtcaccagataataagttaccagaaataatagagctcaaaaatcatccttggtttataggagttcaatttcatccagaatttaaatctagacctttattgccacatcctttattctcatcatttattaaagctgcaaaatcatttaatggaaaataaa

SEQ ID NO: 315130 - DNA, 535 bp, Unknown
  Bacterial polypeptide expressing nucleotide sequence isolated from the Sargasso Sea
tgcagctatcggttatgctagaaaaaataaaattccttttttaggaatttgttttggtatgcaaatggcagtcattgaatttgcccgaaataaattaaatataaaaaatgctacatcgagtgaatttggcccctctaaagcttccgtagttggattaatgaatgaatggacaaaagatggaaaattaatgagaggaactgataaagatttaggtggaacaatgcgtctaggtagttacgaggcaagacttaaaaaagacacaaagataagtaagatttacaattctgttaaaataaaagaaagacatcgtcacagatatgaggttaatattaattataaagatgattttgaaagcaaaggaatgattttttcaggtttatctccagacagtaaattgcctgaaacaatagagttaaaggatcacccttggtttataggagttcaatttcatcctgaatttaaatctagacctttaacaccacatcctttattctcttcatttataaaggctgcaaaaattaattcgaaaaaatga

SEQ ID NO: 315131 - DNA, 617 bp, Unknown
  Bacterial polypeptide expressing nucleotide sequence isolated from the Sargasso Sea
taacacaagtttaatgaaaaaattaaaaggttgtgatggaattctaattcctggtggttttggtattcgtggtattaatggaaaaattaatgccatcaaatatgcgagagaaaataatattcctttttttggaatttgtcttggaatgcagttagctgttattgaaatagcacaaaatgtactaaagattaaaaatgctcattcttcagaatttaagaaaaccactaaatcagttgtagggttaatgacagaatgggtaaataaaaataagatcgaaaaaagagataaaaatagtgacaagggtggaacgatgcgtcttggagcatacaaagctgttttgaaaaaaaattcaaaaatcttttccatatataaaaataaagtaattagcgagagacacagacatagatacgaagtaaatcagaaatttctatcaaaatttgaaaacaaaggttattatttcagtggtatgtcaccagacgggttattgcctgaagtactagagagtaaaaaacataaatggtttataggagttcaatttcatccagaattaaaatcaagaccattagaccctcatcctcttttcgtatcatttataaaggctgcaattaatgattaat

SEQ ID NO: 315132 - DNA, 740 bp, Unknown
  Bacterial polypeptide expressing nucleotide sequence isolated from the Sargasso Sea
tatgaagtacgtcattgtctctggcggtgtcctcagcggccttggaaaaggggtgaccgcttccagtcttggagtgcttctgaagagcgctggtttgcgccccacggcaatcaagattgacccctatctgaatactgacgcgggtacgatgtcaccgtttgaacacggagaagtattcgttcttgatgatggtggagaggttgatctggatttgggtaattatgagcgcttcctcgatgtcaacctgacaagggacaacaatttgactaccggcaaagtatactccaaagtcatagaggcagaaaggaggggggattatctcggcaaaactgtgcaagtcatcccccacattaccgatgcagtccaagattggatagaggaggttgcagcgcgcccttcagacgatagtggggcaaaaccagatgtttgcgtcatcgaattggggggaacagtaggagatatcgaatctgcaccattcatcgaagcattacgtcaattccaattccgagttggtcctgaaaacgtctgctttgtccacgtttcattggttccagttatcggagtggttggagaacagaaaaccaaacctactcagcatactgtcaaggaattgcgcagccttggaataactccagacatgctggtctgtcgtagtgaaaggccacttgaagacgatgtgcgcgacaaattggccttgttctgccatgtatcttcggaagcagtactctcggctcacgatg

SEQ ID NO: 315133 - DNA, 655 bp, Unknown
  Bacterial polypeptide expressing nucleotide sequence isolated from the Sargasso Sea
aaacttgttagaatagactcagaaaaacttaaaccttctcaaataaaaagtaagttgaataatatttctggaattttaataccgggtggatttggaaaaagaggaacaagtggaaaaattgagtctatacggtttgctagagtaaataaaattccttttttaggtatttgttatggtatgcaaatggcaataattgaatttgcaagaaataaacttaaaattagaaacgcaacctcaagtgaatttgacaagaaaggaatttcaataataggacttatgaatgaatggaataaagatggaattaaaattaaaggaactgataaagatcttggaggcacaatgagacttggttcatatgatgccaaattaaaagaaaattctttagtaagaaaaatctataaatctaagattattaaagaaaggcatagacataggtatgaggttaatatctcttataaagaaaaatttgagaaaaatggtcttattttttcgggtttatcgccagataatactttgcctgaaattgttgagttgaaaaatcacccttggtttataggtgtgcaatttcatcctgaatttaaatctagaccttttaatccacatccattattttcatcttttattaaagctgctaaaaaaaaatatgcaaaataaa

SEQ ID NO: 315134 - DNA, 391 bp, Unknown
  Bacterial polypeptide expressing nucleotide sequence isolated from the Sargasso Sea
ggttgttggtcttatgagtgaatggacaaaagatggtaaattaatgaagggcacagataaaaatttaggtggtacaatgcgtttaggtagttatgaagctagacttaaaaaagacacaaaaattagtaaaatttataattcattgaaaataagagaaagacatcgtcacaggtacgaagtgaatatcaattttagaaaggaatttgagaataaaggaatgattttttcaggcttgtcaccagacaataaattaccagaaattattgagttaaaagatcatccttggtttatcggcgttcaattccatccagaatttaaatctagacctttatcaccacatcctttattctcatcatttataaaggcagcaaaaattaaatcaaataaatga

SEQ ID NO: 315135 - DNA, 619 bp, Unknown
  Bacterial polypeptide expressing nucleotide sequence isolated from the Sargasso Sea
atggcacgttttatttttataacaggtggtgtggtatcttccctcggaaaaggactatcttcagcatcacttggtgcactacttcagtctcacggatataaggtaaaacttcgtaagcttgatccatatttgaatgtggatcctggcactatgaatccaatacagcatggtgaggtatttgtgaccgatgacggtgccgaaacagatcttgatcttggtcattatgagcgctttaccgatgtatccgcaactaaatttgataacattaccagtggcaagatttaccaggatattatccaaaatgaaagaaaaggagattatcttgggggtacagttcaggtaattccacacgtaacggatgcaattaaggaattcattacccaatacacggatgacgttgactttcttttgtgtgagattggaggtactgtcggtgatatcgaggccttaccattttttgaagcaattcgacaattaagaaatgaattgagcccagaaaactgtttattcattcatctaactttattaccattcattgcggcagcaggtgaactcaagaccaagccaacacaacattcagtaaaagagttaacttccatcggtatccagccggacatta

SEQ ID NO: 315136 - DNA, 259 bp, Unknown
  Bacterial polypeptide expressing nucleotide sequence isolated from the Sargasso Sea
catggcgcgatatatattcgtcactggcggcgtggtttcatcattaggtaaaggattgtcatctgcttctttagcatacttattaaaatccagaggatttaaagtaagaattagaaaaatggatccttatttaaatgtcgatcctggaacaatgagtccatttcagcatggagaggtatttgttacagatgatggagctgaaacagatttagatttaggtcattacgaaagatttactgaaatttcatgtaaacagtca

SEQ ID NO: 315137 - DNA, 302 bp, Unknown
  Bacterial polypeptide expressing nucleotide sequence isolated from the Sargasso Sea
atgtagactgacaaaaaatacaactgggaaaaacttatatgatgaggatgttatttatgagagacatcggcatagatacgaatttaataattactacaaacaaagttttttagattctggatacaaaattagtggtacatcaccagatggcagattagttgagttaattgagttagaaaatcatccatacttcttagcctgtcaatatcatcctgagtttttgtcaagacctggcaaacctcatcctttatttaaaggattaataaaagcctctcaagataagttaactcaatcaaattaat

SEQ ID NO: 315138 - DNA, 682 bp, Unknown
  Bacterial polypeptide expressing nucleotide sequence isolated from the Sargasso Sea
ggaatttcaaataatctaaaagttaatttaaatcgtatagattcagaagatttagaaaataataaatccaaatctgttttaaaggaggtttcgggaatacttataccaggaggatttggcaaaagaggcagcgaaggtaaaattgctgccataaaatacgcaagattaaacaatatacctttttttggtatttgttttggaatgcaaatggcaattattgaagcggctagaaatttattaaatattaaaaatgcatcatcgagtgagtttggaaataattgcacccctgttgttggtttgctagaagaatggcaaaaagggaaaaagaagtttaaaggcagtcaggaaaaattaggaggtacaatgaggttagggtcttatgaggcaatattaaaaaacaattctttgattaaaaaaatatattccatgaataaaattaatgaaagacacagacatagatatgaggttaatattaaatataaaaatgaatttgaaaaaaaaggactaattttttcagctttatctccagatggtttattaccagaaattattgaattaaaaaatcatccatggtttgtaggagttcaatttcatcctgaatttaaatctagaccatttactccacatcctttattctcatcttttgttaaagcagtacaaataaaccaagaaagaaattaat

SEQ ID NO: 315139 - DNA, 256 bp, Unknown
  Bacterial polypeptide expressing nucleotide sequence isolated from the Sargasso Sea
atgcattttgtttttattacgggtggtgtcgcctcttcacttggaaaaggtatagcctcagcctcattagcagctctccttaaaagcagaaaattcaaagtaagaattagaaagttagatccttatttaaatgtggatccaggaacaatgagtccatatcaacatggagaagtttacgttactgatgatggtgcagaaacagatttagatcttggtcattacgaaagatttacaaatcagtccgcaaaacaaacag

SEQ ID NO: 315140 - DNA, 322 bp, Unknown
  Bacterial polypeptide expressing nucleotide sequence isolated from the Sargasso Sea
atggcgcgatatatatttgtcactggcggcgtggtttcatctttaggaaaaggtctttcttctgcttcgctagcatatttgttacaatcaagaggatttaaagttcgattaagaaaacttgatccttatttaaatgtggatccaggaacgatgagtccgtttcaacatggagaagtatttgtaacagatgatggagctgaaacagatttagatcttggtcattacgagagattttctggtataactgctaaaaaaacagacaatataacaacaggaaaaatatacaatgatgtgttaagaaaagaaagaaaaggaatatatc

SEQ ID NO: 315141 - DNA, 622 bp, Unknown
  Bacterial polypeptide expressing nucleotide sequence isolated from the Sargasso Sea
agatgagataaaaacaaaaccaactcaacactctgtaaaagagttaagaagtataggtattcagccagatattatcatttgtagatctgaaagaccaataccattagagcatagaaaaaagatttctttgttttgcaatgttgatattaaaaatgtgatagaaactgttgatgtcaaaacaatttatgaggcttcaataagtttttttagagaaaaattagatgctcaagtcttaaattattttaaattaaaatctaaaaagccagtaactttaaatccatggaaaaaaataactaaaataattttacaaaataaaaaagaagtaaatattgcaattattggaaaatatgttgagcttaaagatgcttacaagtcattagatgaagcattaactcatggtggaatagataataaaattaaagttaatttagttaggattgactcagaaaaattaaaaatttctgaaattaagaaaaaactaaaaaatatttctggaatattgatacccggtggatttggcaaaagaggtacagatggaaaaatagaagctataaaacatgcaagaattagtaaaattccttttcttggaatatgttatggaatgcaaatggcaattattgaa

SEQ ID NO: 315142 - DNA, 904 bp, Unknown
  Bacterial polypeptide expressing nucleotide sequence isolated from the Sargasso Sea
gctttaatccatatgacttatgttccatatcttagttctgcaggagaattaaaaactaaacctactcaacattctgtaaaagagttactgaattctggtattcaaccagacataattatgtgtagatgtgaaaaagaaattaataaagagtctcttgaaaaaatatcacaattttgtaatgttaaaaaagactccgttataccagctttaaatgctaaatctatttatgaagttccatcaatctattcaaaagcaggtcttgataaagttttgcttgagcacctaggacatgagtcagctaaatatcctcttaatttaaaggcttgggaaaatttaatatttaaaattaataatttacaacaacatgttactataggcattgtaggaaagtacactaatcttaaagatagttataaatctttaatagaagcattaactcatggaggtatagaaaataatgtaaaggttaaaattgaatggattaatgcagaaaaaattgaaaccaatcaattaattaatgtattaaaacttgttgatggaattcttattcccggtggatttggatatagaggtgttgaaggaaaaattcaggcaattaaattcgcaagagaaaatgatattcctttttttggaatatgtttaggaatgcaattaagtgttattgaaatagcaagaaatgttcttggtaaaaaagattcgaattctactgaattcgaatcatcctcaaatccagttgttagtcttatgacagaatggaataatcaaaataaaatagaaaaaagaaatttatatagtgataaaggtggtacaatgagacttggtgcatataaggctactttaaaaaaaggttcaaaaataaatcaaatatataaattaaatgaaatttcagagagacatagacata

SEQ ID NO: 315143 - DNA, 295 bp, Unknown
  Bacterial polypeptide expressing nucleotide sequence isolated from the Sargasso Sea
atggcgaataagccaaagtatatttttgtgtcgggaggagttgtttcttctctcggtaaagggatactctcctcatctttaggagcaatccttgagagtaggggtctcaaagttacaatcttaaaattagatccctatataaatttagatccaggaacgatgtctccatttcagcatggagaagtttttgttactgatgatggttcagaaactgatttagatttagggcactacgaaagatttcttaattctaaaatgtctaataaaaataatttcacggcaggccaagtttaga

SEQ ID NO: 315144 - DNA, 784 bp, Unknown
  Bacterial polypeptide expressing nucleotide sequence isolated from the Sargasso Sea
ttttttcaatgagggacttgataagagagcttttgagtactttagattagagtctaaaaaagaaattgatttaaaaatgtggtcacaagtatcaaaaagaatattggaaccaaaaggcagtatagaaattggcattgttggcaaatatacaggtttggcagacgcatacaaatcgctaaatgaagcactgtcgcatggaggtatttttaataatgttaaagttaaattaaattggattgagtctgaagaattaaacagttccaatattaaaaaaaagcttaataattgccatggcatcttagttcccggcgggtttggtgagagaggggcagaaggtaaaatagcagcaattaaatatgcaagagaaaataaaattccttattttggtatctgttttggaatgcaattagcagtaatagaaatggctagaaatatacttggaataaaagaagcaaattctagtgaattcgctgattgtaaagagtctattgttggattaatgaccgagtggtctaatatagataataccactgaaaaaagaacaaaagagagtgatttaggcggatcaatgagattaggagcttatgaggcaaaattagacaataattctaaagctagagaaatttatggtagagatttgattagtgaaagacatagacacaggtatgaagttaataacaattacgctaaagattttgaaagtaatggagttcatttctcgggttattccccagacggcttattacctgaaatagtggaattaaagatcacccatggtttatag

SEQ ID NO: 315145 - DNA, 793 bp, Unknown
  Bacterial polypeptide expressing nucleotide sequence isolated from the Sargasso Sea
ccttggaaaaaaatcaccaaaactgttttaaatacaaaaaaaatagtaaatattgcaataataggtaaatatgtaaatttaaaagatgcatataaatcattagatgaagcactaattcatggaggtataagcaataatgtaaaagtaaatttagtaagaattgagtctgataaattaaagcctagtcaaattaataagctgttaaaaaatgtatcaggtattttgatacctggtggatttggaaaaagaggaactgagggaaaaatatcagctattagatatgctagaaaaaacaaaataccttttttgggtatttgttttggaatgcaaatggcagtaattgaatttgcaagaaatactttaaaaattaaaaacgctggatcaagcgaactagataagaactgttaccctgtaatcggactgcttaatgagtggaacaaggacggaaaattaataaaagggacaaataaagacctaggtggaacaatgagactaggatcatacgaagctaaattaagacataattcattgatagaaaatatttataaatcaaaatctatattcgaaagacataggcacaggtacgaagtgaacaataatttaaaaaataaatttgaaaataaaggtatgattttttctggaatgtcaccagataaaaaattaccggagattattgaacttaaaaaccatccatggtttgtaggtgttcaataccatcctgaatttaaatctagacctttgtctccacatcctttattctcatcttttattaaagctgcaaaattctactaat

SEQ ID NO: 315146 - DNA, 260 bp, Unknown
  Bacterial polypeptide expressing nucleotide sequence isolated from the Sargasso Sea
catggcgcgatatatatttgtcactggcggcgtggtttcatcactgggtaaaggattatcatctgcttcattagcttatttactcaaatcacaaggttataaagtaagattaagaaaaatggatccttatttaaatgtagaccctggaactatgagtccttttcaacatggagaagtttttgtaacagatgatggagcagaaacagatctagatttaggtcattacgaaagatttacaaatatttcttcaaaaaaatctg

SEQ ID NO: 315147 - DNA, 319 bp, Unknown
  Bacterial polypeptide expressing nucleotide sequence isolated from the Sargasso Sea
atggcgcgatatatatttgtcactggcggcgtggtttcatccttaggtaaaggtctttcttcagcctcgctagcatatttattacaatctagaggatttaaggtccgactaagaaaattagatccgtatttaaatgttgatcctggaacaatgagtccttttcagcatggagaagtttttgtaactgatgatggcgctgaaacagatttagatttgggtcactatgaaaggttttctggaataacagcaaagaaaactgacaatataacaacaggaaaaatttataatgatgtattaaaaagagaaagaaaaggaaaat

SEQ ID NO: 315148 - DNA, 861 bp, Unknown
  Bacterial polypeptide expressing nucleotide sequence isolated from the Sargasso Sea
tgttatctgtgaaataggaggcacagttggtgacattgaaagtttaccttttttagaagcaataaggcagttttcaaatgaaaatggaaataaaaaaagtttatttattcatttgacgcttgtaccatttttaaaatcatctgatgaaattaaaacaaaacccactcagcattctgttaaggaattaagaagtttaggaattcaaccagatatagtcatttgtagatcacaaaaatcaatcccattggatcagagaaaaaaaatatcactattttgcaatgtcccaattgaaaatgttattgaaactgttgatgttagaacaatttatgaagctccaattagcttttataatgaaaaactggataaacgagtattagaattttttaaattaaaacctaaaaaaaaggttaatttacagccttggaagaaaattactaaatctgttttatctaaaaagaaagaaataaacattgcgatcatcggcaaatatgtaaatctaaaagatgcatataaatcattagacgaagccttaattcatggtggcatagataacaatgttaaagtaaatcttgttagaatagaatctgataaacttatgccaagtcatatcaataaaattttaaaaaatgtatctggtattttaatacctggtggtttcggaaaaagaggcaccgaaggaaaaatctcagctatagcatatgcaagaaaacataaaattcctttccttggaatttgttttggtatgcaaatggcagtaatagaatttgctaggaatgttttaaagattaaaaaatccggttctactgaaatagataaaagatgtttcccggtaataggtcttttaaacgagtggaataaaaa

SEQ ID NO: 315149 - DNA, 743 bp, Unknown
  Bacterial polypeptide expressing nucleotide sequence isolated from the Sargasso Sea
tcttccattcattgaagccataagacaaatggggatctataaagatggttatgaagttgcatatgttcatttaacattggtgccatatatcaaagcatcttcagaaattaaaaccaagccaactcaacattcagtcagggagcttcgagcaatcggaattcaacccgatgctctggtctgccgatctgaactacctctcccaaaagaacattttgataagattgctctttttacaaatgttgaaaagaaagctgtcatttctgctcatgatgctgaagacatctatcagataccactgatcctaagggaacaatgcttggatgacatcattgttgaaaaattgaaactggatgtgccaaaagcagatttgacaccttgggaaaatgtctttaaagaatcaaaaaatagcgattccaaggtaaaaatagcaatggttgggaaatatgtagactttaaggactcatacatttcattaagtgaagcccttagacatgccggctttaaaaatagcaagggagttgagatcgtttatgtcgaatccgaagatattcaagagaatggcaccgattgtctttctgaaatggatgccattctgattcctgggggatttggagatcgaggcatagagggaatgattcaatccattgaatatgcaagaaagaataatatcccttttctgggtatctgtcttggaatgcaagcagcagtaattgaatatgctcgcaaatgttttgaatcataag

SEQ ID NO: 315150 - DNA, 655 bp, Unknown
  Bacterial polypeptide expressing nucleotide sequence isolated from the Sargasso Sea
aaaagtcaatgttagatgggtagacactgaagagcttgaggttaatgataatgctgatgttgtttttagagatattgatggaattctcattccaggaggatttggagatagaggaattgaaggaaagataatgtcctcaagatttgcacgagaaaacaagattcctttctttgggatatgtcttggtatgcaatgtgcagtgattgattttgctagatatctttgtaacatgaaggctgcaaatagtaccgagtttaataagcgtacaaaatttcctgtgattgatttaatgaaatctcagaaaaaagttacagataagggaggaagtatgagattaggctcatataaatgttctgtagcttcaagaacaaatgcttcatctgcgtatagaaaaaaaatagttaaggaaagacatcgacatagatatgaatttaataataagtataaaacgaaattgaaaaatgctggattaaagatcagtggagttaatgaaaaattaaatcttgttgaaatgattgaaatttcaaatcacccatggtatgttggagttcaatttcatccagagcttaaaagtactgttgtaaatgtacaccctctttttaaagattttatctctgcatcaataaaatatagagatggaaaacaaattatctaa

SEQ ID NO: 315151 - DNA, 781 bp, Unknown
  Bacterial polypeptide expressing nucleotide sequence isolated from the Sargasso Sea
tgttctgtacccaatgaaagtgttatatcaatgcatgatgttgacacagtatattcagtaccgattttactaaataagcaaaaagttgataaaaccattattgaaaaactaaaaattaaggctaaacaacctaatctaaatgactggaaaagagttgttaaagctaaattaatgcctgaaaaggaagtaaatgtttcatttgttggaaaatatacggagttaaaagattcttataaatcaattaatgaagctcttgagcacgccggaataaaaaataaagcaaaagtaaacattaattttgttgaagccgaaaacatttcttcaaaaaacatcaaaaaaactcttaagaatgcagatgcagtcttagttcctggtggatttggtgaaagaggtattgagggaatgatcttagcttgcaaatatgctagagagaataacattccatatttaggaatttgccttggcatgcaagtagcgattatagaatatgcaagaaatgttcttaatctaaaaggtgcaaatagtactgagtttgatcaaaatacaaagcatcctgttattggccttattacagaatggaatgatatttcaggcaaaaaagaaaaaagagataaaaattcagacttaggtggaacaatgcgtttaggcgggcagctatgtaaactcaaaaagggatctaattcattaagaatgtataaaaattcagaaatcattgaaagacatagacatcgttatgaggtaaatccaaaatataaagatgatatgatcaaaaaaggattag

SEQ ID NO: 315152 - DNA, 439 bp, Unknown
  Bacterial polypeptide expressing nucleotide sequence isolated from the Sargasso Sea
aaatgtttttggtttagcagactctcattctacagaatttcaatctagtaaaaatcctgtagtaagtcttatgacagaatggaataataaaaataaaattgaaaaaagagatcacaccagtgaaaaaggtggcactatgaggcttggagcttataaagctattctaaataagaattctaaagtaagtgaaatttataatacaaatgaaattacagaaaggcatcgtcatagatacgaagttgatttatctttaacgaaagattttgaaaaaaaaggttttattttttctggtatgtcccctgataacgtgttgcctgaaatattagaaagtatgaatcataaatggtttatcggtgtgcagtatcatccagaattaaaatctagacctttagcgccacatcctttattttcctcttttattaaacattgcatcaaatga

SEQ ID NO: 315153 - DNA, 895 bp, Unknown
  Bacterial polypeptide expressing nucleotide sequence isolated from the Sargasso Sea
gtcgatattaataatgttatagaaacagtcgatgtaaatactatatacgaggctccaataagtttctttaatcaaaaattagacaaacaagttttaaaattctttaaaattaattctagaaaaagaccaaacttattaccatggaaaaaaattaccaatatagttttaaatacaaaaaaagtagtcaagattgctattataggtaaatatgtaaatttaaaagatgcttataaatcacttgatgaagctcttacacatggaggaatttcaaataaagttaaagtaaatttagtaagaatagagtctgataaacttaaatcaaaagaaattaaagccaaattaaatgatgtttctggaatattgatccctggtggctttggcaaaagaggaacagaaggaaaaatagaggcaattaaatatgcaagagagaaaaatataccatttttaggtatttgttttggtatgcaaatggcaatgattgaatttgctagaaatattttaaaaataaaaaatgctgggtctagtgaattggataaaaattgttttccagtgatagggttaattaatgaatggaataaagatggtaaaattataaaaggaactgacaaaaatcttggaggaacaatgagattaggtctttatgaggcaaaattaagaaaaaattctgccataaaaaaaatttataaatctaataatattcaagagagacacagacatagatatgaggtcaatataaacttaatggaaaaatttgaaaaaaaaggtctaatattttcaggaatttctccagataataaattgcctgagattatagagttaaaaaatcattcatggttttttggagtgcaatttcatccagaatttaaatctagacctttaaatcctcatcctttat

SEQ ID NO: 315154 - DNA, 579 bp, Unknown
  Bacterial polypeptide expressing nucleotide sequence isolated from the Sargasso Sea
tattaattccaggaggctttggaaaaagaggaaccgaaggaaaaatagcagctattaaatatgcaagaattaaaaagataccatttttaggaatttgctttggtatgcagatggcaattattgagtttgctcgaaatgttttaaaaattaaaaatgcttcatcaactgaattaaatccaaaatgcaaaccagttgtgggattaattcatgaatgggaaaaaaatggaataatgatcaaaggtacagataaaaatttaggaggaacaatgagattgggttcctatgatgctgaattattaaacaactctttaattaaaaaaatatataaatctaaaataattaaggaaagacatagacacagatatgaagttaatattaattacaaaaatcaatttgaaaaaaaaggcttaatattctcaggtaactcacctgataaaaatttacctgaaataattgaactaaaaaatcacccgtggtttattgctgttcaatttcacccagaatttaaatctagacctttgtctccacatcctttattctcatcttttataaaagctgccaaaaatcataaaaaatgaa

SEQ ID NO: 315155 - DNA, 891 bp, Unknown
  Bacterial polypeptide expressing nucleotide sequence isolated from the Sargasso Sea
cgttactggcggcgtggtctcatcattaggaaaaggattatcttcagcatcacttgcttatttactaaagtcacaaggttataaagtaagaattagaaaaatggatccatatcttaatgttgatcctggaacaatgagtccttttcagcatggggaagtttttgttacagatgatggagctgagacagatttagaccttggtcactacgaaagatttaccaatatatccgcaaaaaaatcagacaatattacaactgggaaaatttatagcgatataataaaaaaagaacgtaagggcaagtatttaggaaaaacagttcaagtaataccacatgtcactgatagaataagagaatttataaaaggggatataactaatgaagattttgttatatgtgaaattggaggaacagtaggcgatattgaaagtttaccttttgtcgaagctataagacaattttcaaataatgtgggaagaagtaaaagtttatttatacatttaacttttgtaccatttttaaaatcatcagatgaaattaaaactaaaccaacacaacattcagttaaagaattaagaagcttaggtattcaacctgatataattatttgtagatctcaaaaatctatacctttagatcaaaggaaaaaaatatcacttttctgcaatgtttcaattgataatgttatagaaactgtagatgtaagaacaatttatgaagcaccaataagtttttataatgaaaaattagataagcaggttttaaaatattttaaattaaaacctagaaaaaaagtaaatttactaccgtggaaaaaaattaccaagactgttttaaatacaaaaaaaataataaatattgccattataggtaaatatgtaaatttaaaaga

SEQ ID NO: 315156 - DNA, 445 bp, Unknown
  Bacterial polypeptide expressing nucleotide sequence isolated from the Sargasso Sea
atggcgcgatatgtatttgtcactggcggcgtggtttcatcactaggcaaaggactctcatcagcttcacttgctgctttattacaatcaagaggatttaaagttagagttagaaaattagatccttaccttaatgttgatccaggtacaatgaatccttttcaacacggagaagtttttgtaacagatgatggcgcagagacagatttggatatcggacattatgaaagatttacaggaatatcaggaacgaaatctgataacattacgacaggaggaatttatagcgatattattaaaaaagaaagaaaaggtgattatttaggtggtactgttcaagtagtgccacacgttacagacagaattaaaaaatttttgtcacaagatataaaaaatgaagattttgtaatatgtgaaattggaggaacagttggcgatattgaaa

SEQ ID NO: 315157 - DNA, 491 bp, Unknown
  Bacterial polypeptide expressing nucleotide sequence isolated from the Sargasso Sea
cttcggcatgcagatggctgtgatcgaagctgcccgcaatctggcggggatcaaggatgcgacgtcctcggaattccgtgaatgcgacaatcccatcgtcggtttgatgaccgaatggatgaagggtaacgaccttgaaaaacgggcgcaggatggcgatatgggcgggaccatgcgtctgggtgcgtacgaaaatgtcttcaagcatgacagcaagatcgccacgatttacggctcgacccgtgtcgaggaacgtcaccgtcaccgttatgaagtgaatatggcgtaccgtgaaaagctggaagctgcgggcatgagctttgccgggacatcgccggacggtctgttgccggaaacggtggaactgccggatcatccgtggttcatcggcgttcagtaccatccggaactgaagtcgaaaccgttcgagccgcatccgctatttgcctcattcgtgggtgctgccctgactcaatccagattggtttgag

SEQ ID NO: 315158 - DNA, 788 bp, Unknown
  Bacterial polypeptide expressing nucleotide sequence isolated from the Sargasso Sea
cgatcttagtaagtggaaaaatattacttctaaagttttaaaccctaaaaaggatgtaaatataggtatcataggaaagtatgttaatcttaaagatgcttacaaatctttagatgaagctttaatacatggtggcatttccaataatgttaaagttaatttaaaaagaatagattctgaaagcttaaaacctgaaaatataaaattattgttgaaaaatgtgtcaggcgtccttattccgggaggttttggcaaaagaggaagcgaaggtaagattgctgccataaaatatgcaagattgaatagtatacctttttttggaatatgttttggcatgcaaatggcaattattgaagcagctagaaatttattaaatattaaaaatgcttcaacaagcgaatttggtaataattgtacgcctgtagtaggcttgttagaggagtggcaaaaaggaaaaaaaagaataaaaggaagtgaaaaagatttaggaggtactatgaggttgggtttgtatgatgcagttttaaaaaataattctctaatatcaaaaatatattccagcaaaaaaattaaagagagacatagacatagatatgaagttaatattaaatataaagatgatttcgaaaagaaaggattaattttttcagctttgtccccagatggtatgcttcctgaaattatagaattaaaaaatcatccttggtttgttggagttcagtttcatcctgaatttaaatcaagaccctttaccccacatcctttgttttcttcttttattaaaagct

SEQ ID NO: 315159 - DNA, 793 bp, Unknown
  Bacterial polypeptide expressing nucleotide sequence isolated from the Sargasso Sea
ttttgaagcaattagacaattaagaaatgaattgaacccagaaaattgtttattcattcatttaactttattaccattcattgcggcagcgggtgaactcaagaccaagccaacacaacattcagtaaaagaattaacttcaatcggtatccagccggatattatcatattacgctgtgacagagacattccagaagatgagagaaaaaaaatctcatcattttgcaatgttccattcagtagaataattccagcagtagatgttggtaatatatatgatgttccgatgaatttacatcagaacggcctggatagcgaagtattaagtatatttaatcttaagcaaaaaaataaaccaaatttcattaaatggaaaaaaatctcatcaaatgctagctctttagaggagagtgtaaaggtatcaattgttggaaaatatattcaattgcaagatgcctacaaatctctggatgaggcgatataccatgctggattaataaataagattaaagttaatgttgaatggattgactctgagttactggagagctcaccaccaattgattatctagatagtacagatgcaattttggttccaggtgggtttggtcaacgtggtagtgagggtaaaattaatgcaattagatttgcacgtgagaaaaaggttccatacttaggcatttgtttcggaatgcaaatggccattgtagagatgtcaagatcactactaaaactccctggagcaaacacgacagagttcggagatacagatcatcctgttgttgatcttatg

SEQ ID NO: 315160 - DNA, 898 bp, Unknown
  Bacterial polypeptide expressing nucleotide sequence isolated from the Sargasso Sea
atttatgaggctccaattagtttttataaccaaaaattagataaacaagttttaaaatattttaaaataaaatcaaaaaagaaacccaatttaaatccatggaaaaatattacttctaccgttctaaaaaataataaagtaattaacattggaataataggtaaatacgtaaacttaaaagatgcatataaatctttagatgaagcattaacacacggcggcatagcaaataatgtaaaaattaatttagtaagaattgaatctgataaactaaaaaaaaatgaaataagcaaaaaacttagaagtgtttctggaatattaataccaggtggatttggcaaaaggggaactgaagggaagattgcagcaattaaatatgcaagagaaaaaaaaatacctttttttggtatttgttttggaatgcaaatggcaatcattgaatttgcaagaaacaaattaaatataaaaaatgctggttctacagagcttgataaaaaatgctatcctgttattggattaatccatgaatggaacaaaaatggaaaagtttttaagggaacagaaaaaaacttaggtgggacaatgagattaggactttatacagctaaattaaaaaataattctgccataaaaaagatttataaatcaaatgaaataaaagaaagacatagacatagatatgaagttaataataaccaaagaacaaaatttgaaaaaaaaggattaatattttcgggaatgtctccagataacaaattacctgaaataattgaattaaaaaatcatccctggtttattggtgttcaatttcatccagaatttaaatcaagaccattatcaccacatccattatttaaatcatttataaaagcttcaaaaaattatcatggaaaataga

SEQ ID NO: 315161 - DNA, 850 bp, Unknown
  Bacterial polypeptide expressing nucleotide sequence isolated from the Sargasso Sea
ctttcatacttcaacattaaaaacaaaaaatcacctgatcttagtaaatggaaaaatattacttccaaggttgtaaatccaagaaaagatgtaaatataggcatcataggtaagtatgttaatcttaaagatgcttataaatctctagacgaagcattaattcatggtggtatatcaaataatgttaaagttaatttaaaaaggattgactcagaaaatataaaaccagaaaaaataaaacctttattaaaaaatgtatcaggtgttttaattcctggtgggtttggcaaaagaggcagtgaaggtaaaattgctgccataaaatacgcaagattgaatcatatacctttctttggaatttgttttggtatgcaaatggcgattatagaagctgccagaaatttattgaatattaaaaatgcttcttctagtgaattcggcaataattgtacgcctgttgtaggattattagatgaatggaaaaaaggaaaaaaaagaattaaaggaagtgagaaaaatttgggaggaacaatgagattaggtttatatgatgctgttttaaaaaataattctctaatatcaaaaatatattctgaaaagaagattaaagaaagacataggcataggtatgaagttaatattaaatacaaagaagatttcgaaaaaaaaggattaattttttctgctttatcaccagatggcatgctcccagaaataatagaattaaagaatcatccttggtttgttggagttcagtttcatcctgaatttaaatcaagaccttttactccacatccgttgttttcatcttttattaaagccgcggaaataaacaggagaagcaattaat

SEQ ID NO: 315162 - DNA, 674 bp, Unknown
  Bacterial polypeptide expressing nucleotide sequence isolated from the Sargasso Sea
gatgcgaaagaagttcatcttcgtcaccggcggcgttctctcatccctgggcaaggggctctccggcgcagccatgggcgcgctgatggaggcacgcgggcttcgggtcaccaacatcaagatggacccgtacatcaacgtggatcctggcacgatgagtccgtaccagcacggcgaggtctttgtcacagatgatggtgcggagagtgaccttgatctgggccactacgagcgcttcaccaacaccaccatgcaccagcgcaacaacttcacgactgggcgtgtctaccagaacgtgatcgagcgtgagcgcaagggggagtacctcggacacacggtccaggtcattcctcacatcacagacgagatcaagcgccttgtctgggagggggtcacagaggcagatgtggccatcgtcgaagtgggcgggacggtcggtgacatcgagtccttgccgtatctcgaggcgattcgccagttccgcaatgacgccggctcagacaacgtcttgtacgtgcatctgaccttggtgccgttcatcaagaccagcggtgagctcaagaccaagcccactcagcactctgtgaagatgttgcgtgagattggtatccagccagacattctcctgtgccgctctgatcgggacatccccagggacacccgagagaagatcg

SEQ ID NO: 315163 - DNA, 291 bp, Unknown
  Bacterial polypeptide expressing nucleotide sequence isolated from the Sargasso Sea
tatgacccgatatatcttcattacaggtggcgtcgtttcctcccttggaaagggaattacatcagcatcccttgcagctattcttgaagcacgtggacttaagatcacgatgctcaaattagacccctatattaacgtagacccaggaacgatgagcccttttcaacatggagaagtttttgtaactgaagatggtgctgaaactgacttggatctgggacactatgagcgattcagtcgtgctacgatgaggcgagataataattttacgactggccgcgtttatgagga

SEQ ID NO: 315164 - DNA, 891 bp, Unknown
  Bacterial polypeptide expressing nucleotide sequence isolated from the Sargasso Sea
ccagccagatattgtaatttgtagatcgcaaaaatctattcctatagatcaaagaaaaaaaatatctttgttctgcaatgtttcaattaataatgttatagaaacagttgatgtaagaacaatctatgaagctccattaagtttctataatgaaaaattagataaacaagtcttgaaatactttaaattaaaacctaaaaagaaagttaacctattaccttggaaaaaaattactaaatctgtattaaatactaaaagagctgttaacattgcaataattggaaaatatgtaaatttaaaagatgcatataaatctttagatgaagctttaattcacggtggaatagagaatgatataaaagttaatttgataagaattgaatctgataaacttaaatcaaaggaagttcacaaattattaaaaaatgtttctggcattttgatacccggtggttttggcaaaagaggtactgaaggaaaaatttctgctataaattatgcaagaaaaaataaaatcccattccttggaatttgctttggtatgcaaatggccattattgaatatgctagaaattctcttaaaattaaaaacgcaggttctagtgaacttgataaaaaatgctaccctgtagtgggacttttaaatgaatggaataaaaacggaattattataaaaggtactaataaagatttggggggaacaatgagattaggtttatatgaagcaaaattaagacataattcccttatacataaaatttataaatcaaagactatatttgaaagacatagacacagatacgaagtgaatatcaatttacaaagcaaatttgaaaaaaaaggtatgattttttctggaatatcacctgacaacaaacttcctgaaattat

SEQ ID NO: 315165 - DNA, 640 bp, Unknown
  Bacterial polypeptide expressing nucleotide sequence isolated from the Sargasso Sea
catgtctcgtttcatctttgtcaccggcggtgtggtgtcgtctctggggaaggggattacctctgcgtccctggccaccctgttggaagcccgcggtctcaacgtgaccctgattaaaatggatccttatattaatgtggatcccggtaccatgagcccttaccagcatggtgaggtatttgtgactgaagatggcgccgaaaccgatctggatttgggtcattacgagcgttttattcgcactcgcttgaaccgccgcaacagctttacgactggtcgtgtgtatcagcacgtgctggataaagagcgtcgaggtgaatacctcggtgccaccgtgcaagtcattccccatatcaccgatgagatcaaacttaagattcgcgaaggcgccggtgatgcggatgtggctatcgtagaaattggtggtaccgcgggcgatattgaatctctgcctttcctggaagcagcccgtcagatgcgtgttgaattgggctctagccagtccttactggtgcatctgaccttggtgccttatatcgccaccgccggcgagatcaagactaagccgacccagcactccgtgaaagagctacgctccatcggcctgcaaccggatattctggtgtgccgtggcggatga

SEQ ID NO: 315166 - DNA, 895 bp, Unknown
  Bacterial polypeptide expressing nucleotide sequence isolated from the Sargasso Sea
cctagttcctacattcaagtatctgaagagcttaaaactaaacctactcaacattctgtaaaagagctcagatcattaggtttacagcctgattgtcttatatgcaggctagaaaaagaattgcctcatgatgaaaagaaaaaaatagctttattttgctctgtagatcctaatagtgttatttctatgcatgatgcagaaactgtctattcaattcctttgctcttacattcacaaggagtagataaaattcttctgaagaaattaaatttaaccaaagtcaaatcaccaaaattgaatgactggaaaaaagttgttgacgcaaaaataaatcctaaaaagaaagtttctatagcaattgttggaaaatatgttgatttaaaagattcatataaatcattaaatgaagcacttgatcatgcaggcattaagaatcttgctagggttgagattaatatgattgatgctgcaaaaattacgaaaagaaatgtgtcaaaaattttaaaagccttccaggctgttctaataccaggtggatttggtactaggggtattgaaggcatgatcattgcctgtaaatatgcaagagaaaataaacttccatattttggaatttgcttgggaatgcaaattgcaattattgaattttcaagaaatatcttaaatttaaagaatgccaatagcactgaatttaataaaaaaacaaaatatcctgtaataggcttggtcacagaatggaaagatgcatctggaaagacagaacacagaacagaaaattctaacttaggaggtacaatgagacttggtggtcaaaaatgtttaatcaaaaagtcttctcattcatacaaactatacaaaaaattaacaatcacagaaaggcatcgacacaggtatg

SEQ ID NO: 315167 - DNA, 631 bp, Unknown
  Bacterial polypeptide expressing nucleotide sequence isolated from the Sargasso Sea
atggcgcgatatatatttgtcactggcggcgtggtatcctcccttggaaaaggtctttcttcagcatcacttgcttatttgttgcaatctaggggttacaaagttcgtttacgaaaattagatccatacttgaatgttgatccaggaactatgagtccatttcaacatggcgaagtatatgtaacagatgatggtgcagaaacagatttagatctaggccactatgaaagattttcaggggtatcagcaaaaaaatctgacaacattacaacaggaaaaatttataatgacgttcttaaaaaagagagaaggggtgagtacttaggtaaaacagttcaggtaattcctcatataactgatagaataaaacaatttattaaaaatgattcatctaaagaggattttgtaatttgtgaaattggtggaattgtaggagatatagaaagtttaccgtttgtagaggcaataagacagtttgcaaatgatgttggaaaaaagaatgcattatttattcatttgacactagtaccctacttaaaagcctcagatgaaattaaaactaagccaactcaacattcagttaaagaattaagaagcattggtattcaaccagaatataattatttgtaga

SEQ ID NO: 315168 - DNA, 964 bp, Unknown
  Bacterial polypeptide expressing nucleotide sequence isolated from the Sargasso Sea
gttatttgtgaataggaggaaagtaggagacatagaaagcttaccttttttagaggcaatcaggcaattttctaatgaaaatgggagaaaaaatactttatttattcatctaaccttagttccatatatgaaagcctcagatgaaattaaaacaaaacctactcagcactcagttaaggagcttagaagcataggaatccaacccgacataattatttgcagatctgagagaacaattccactagatcaaagaaagaaaatttctttattttgtaatgtagctatagaggacgtaatagaaacagttgatgtaaaaactatttatgaagctccgataagttttaataaagaaaaattagatgaaagagttattaaatattttaaattaaaatctagaaaaagggtaaaccttttgccttggaagaaaattactaatttagttctaaatacaaaaaaaaatgtaaatattgcaattatcggaaaatacgttgaacttaaagatgcatacaaatctttagatgaagccttaactcatggtggaatagctaataatcttaaagttaatttaataagaattgagtctgattttttaaaacctggggaaataaaaggtaaattgaaaaatgttactggagtcttaattcctggtgggttcggaaaaagaggaacagaaggaaaaattgcggcaataaattatgctaggaaaaataaaatcccatttttaggcatatgttttggtatgcaaatggcagttatagaatttgcaagaaataagttaaatattaaaaacgcaacctcaagtgaatttggatcatcaaaaacttcagttgttggcttaatgagtgagtggacaaaagatggtaaattgatgaagggaactgttaaaaatttgggtggaactatgagattaggaagttacgaagctagacttaaaaaagacacaaaaataagtaaaaatttataa

SEQ ID NO: 315169 - DNA, 880 bp, Unknown
  Bacterial polypeptide expressing nucleotide sequence isolated from the Sargasso Sea
tatttgttacaatctagaggttataaagtaagaattaggaaacttgacccttatctaaacgtagatccaggtactatgagtccttttcaacacggagaagttttcgtgacagacgatggcgcagagactgatctggacttaggacactatgagagattttcaggaatttctgcaaaaaaaactgataacattactacaggaaaaatttatagtgacgttctgaaaagagagagacaaggaaaatacttaggaaaaacagtacaagttattccgcatattactaatagaataaaagagtttattaaaaacgatgtctcaaaagaggattttgttatatgtgaaataggaggcacagtcggagatattgagagtctcccttttttagaagcaataagacaattttcaaatgaagtagaaaaaaaaaatactttatttattcatctaacattagttccttatatgcgagcatctgatgagattaaaactaaaccaacacaacattctgtaaaagagttaagaagtattggaatccaaccagatataatcatttgtaggtcagagaggactattcctcttgatcaaaggaaaaaaatatctttattttgcaatgttgcaatcgaagatgttattgaaactgttgatgttaaaacgatttatgaagctccaattagttttaataaagaaaaattagacgagagagttttaaaattttttaaagttaaatctagaaaaaaagtaaatcttcttccgtggaagaagataaaaaatttagtattaaacacaaaggataaggtaaatattgcaattataggcaagtatgttgaattaaaagatgcttataaatcattagatgaagctttgacacatggaggtatagcaa

SEQ ID NO: 315170 - DNA, 691 bp, Unknown
  Bacterial polypeptide expressing nucleotide sequence isolated from the Sargasso Sea
catggccggctttaaaaataacaagggagttgagatcgtctatgtcgaatccgaagatattcaaaagaatggagccgattgtctttctgaaatggatgccattctgattcccgggggatttggagatcgaggcatagagggaatgattcaatccattgaatatgcaagaaagaatgatgtcccttttctgggtatctgtcttggaatgcaagcagctgtaattgaatatgcacgaaatgttttggatcataaggatgcaaatagcactgagtttaactctagtacctctgcacctgttattgcaatgattacagagtggatgaatgatgacggctcaaaagagaatagagatgaaaactcagatcttggagggactatgagacttggggcacaagagtgtttgtttgcaaaagcaaccaaggcaaaagatatatatggtgcagattccgttattgaaagacatcgacatcgctatgaatttaataatagatatcgcgaagagcttgaaaaaaatggtttggtattttcagggttctcaaaggatggcttagctgaaatgattgagattaaagatcacccctggtttattggctgtcaatttcatccggaattcacatcttctcccctatcagggcatccattattttattcttttatcaaagctgctgtagaatactctaaaaagaattaa

SEQ ID NO: 315171 - DNA, 270 bp, Unknown
  Bacterial polypeptide expressing nucleotide sequence isolated from the Sargasso Sea
aatcaatatataaaaaaaccaaagttagtgaaaggcatagacatagatatgaggttaatatgaactttaaagataaatttcaaaaaaagggcatgatattttctgccttatcgccggataaaactttaaccgaaggagtagaattaattgatcatccctggtttataggagtacaattccatcccgaatttaaatctagaccaatgtcagttcatcctttatttaattcatttataaatgcatcaaaaataaataaaaatgaaaaatagt

SEQ ID NO: 315172 - DNA, 832 bp, Unknown
  Bacterial polypeptide expressing nucleotide sequence isolated from the Sargasso Sea
tgacaatataaccacaggaaaaatttaccaggacatactatcaaaggaaagaaaaggagaatatcttgggaaaactgttcaagtaattcctcatgtaactgaaagaattaaagagtttattaaaaaagatattagaagtgaggattttgttatttgtgaaataggcggaacagtcggagatatagaaagcttaccttttctagaagcaattaggcaatttgctaatgatattgggaaagaaaaagctttgttcattcacttgacattagtaccatttttaaaatcttcagatgaaatcaaaacgaaaccaactcaacattctgtcaaagaacttcgtagtattggtattcagcctgatatagttatctgcagatctcaacagtcaatcccaatagatcaaagaaaaaaaatatccttgttctgcaacatcccaattgacagagtaattgagaccgttgatgtaaaaacaatatacgaagcaccaattagtttttttaaagaaggtttagacaaacaagtgtttaagtattttaaaatgaaacctaagaaaaaaattaatttaagtccatggaaaaaagtaacaagaattataactaataaaaatacaaaacaagtaaatatcgcgataattggaaagtatgtcgatttaaaagacgcttataaatctctagatgaggctttagtacatggtggaattcaaaataaagtaaaaataaatttaaataggatagagtctgacagacttaaaatcaatgagataaacaataaactcaaaaatatttctggaattttaatacctggaggttttggtaaaagaggtacagagggcaaa

SEQ ID NO: 315173 - DNA, 805 bp, Unknown
  Bacterial polypeptide expressing nucleotide sequence isolated from the Sargasso Sea
ccacaggaatctaaagaaaaaattgcattgttttgttccatgccaaaaaatggggttttctctcttccaaatctagatacaatctatcaagttcccgtttttcttgctaaccaaggcatagatgaaatccttacacaaaaaatgcatctagataaaaccaaacctaatttaacagcttggaaaacagtagtgaaaagaaaattattcccaaaaaaacaagtaaatgtttcctttgttggcaaatatgttgatctaaaagatgcttatttttcactaacggaagctttagatcatgctggaattaaaaatgataccaaagtaaacattaatctaattaattctgaagatttaaattcaagaaactacaagagagccctaaaaaaatcagatgcaattcttgttccaggtggttttggtgatagagggattgaagggatgatattagctgcaagattttctagagagcacaacattccatatctaggtatttgtcttgggctgcaaattgccataatagatattgcacggagcttgtgtggtctcaaagatgcaaacagcactgaattcaaacctagaacaaaaaacaaagttatatctttagttacagagtggcaaaataaagatggttctaccgaaaaaagaaataaaaattctgatttaggtggaacaatgaggctaggctctcaaaaagcccatattattaaaggcactaaggcttcaaggctctataagacaaaaacaatttttgaaagacataggcacagatttgaagttaatcctgaatatttaaatttattggagggga

SEQ ID NO: 315174 - DNA, 814 bp, Unknown
  Bacterial polypeptide expressing nucleotide sequence isolated from the Sargasso Sea
tttattagcaaagacataagtaacgaagattttataatttgtgaaattggtggaactgttggcgacatcgaaagtttaccattcctagaagcaataagacaattctcaaacgatcatggaagatctagaacattatttgttcatttaactttagtaccatttatgaaatcttctgatgagataaaaacaaaacctacacaacatagtgtcaaagaattaagaagtatcggtatacagccagatattgttatatgtagatcagagcagcatatacctttagaacaaagaaaaaaaatatctttattttgtaatgtagatattaaaaatgttattgagactgttgatgttaggacaatttatgaagctccgattagcttttataaccaaaaattagataaacaagttttaaaatattttaaaataaaatcaaaaaagaaacccaatttaaatccatggaaaagtatcacttctactgttctaaaaaataataaagtaattaacattggaataataggcaagtatgtgaacttaaaagatgcatataaatctttagatgaagcattaacacacggaggcatagcaaataatgtaaaagttaatttggtaagaatagaatctgataaactaaaaaaaaaagaaataagcaaaaaacttaagagtgtttctggaatattaataccaggtggatttggcaaaagaggaacagatgggaagattgcagcaattaaatatgcaagagaaaaaaaaatacctttttttggtatttgttttggaatgcaaatggcaatcattgaatttgccagaaacaaattaa

SEQ ID NO: 315175 - DNA, 910 bp, Unknown
  Bacterial polypeptide expressing nucleotide sequence isolated from the Sargasso Sea
tcagaaattaaaaccaaaccaactcaacattcagtcagagagcttcgagcaatcggaattcaacccgatgctctggtctgccgatctgaactacctctcccaaaagaacattttgataagattgctctttttacaaatgttgaaaagaaagctgttatttctgcgcatgatgctgaagatatataccagatacccttgattctaagggagcaatgtttggatgatatcatcgttgagaaattgaagctcgatgtaccaaaagcagatttgacaccatgggaaaatgtctttaaagaatcaaaaaatagcgattccaaggtaacaatagcaatggttgggaaatatgtagactttaaggattcatacatttcattgagtgaagcccttaggcatgccggctttaaaaatagcaagggagttgagatcgtatatgtcgaatccgaagatattcaagagaatggcaccgattgtctttctgaaatggatgccattctgattcctgggggatttggagatcgaggcatagagggaatgattcaatccattgaatatgcaagaaagaatgatatcccttttcttggtatctgtcttggaatgcaagcagctgtaattgaatatgctcgaaatgttttggatcataaggatgcaaatagcactgagtttaactctagtacttctgcacctgtcattgcaatgattacagagtggatgaatgatgacggctcaaaagagaatagagacgaaaactcagatcttggagggactatgagacttggtgcacaagagtgtttgtttacaaaaggaaccaaggcaaaagatatatatggcgcagattccgttgttgaaagacatcgacatcgctatgaatttaataatagatatcgcgaagagctgaaaaaaatggtttggt

SEQ ID NO: 315176 - DNA, 721 bp, Unknown
  Bacterial polypeptide expressing nucleotide sequence isolated from the Sargasso Sea
catggcgcgatatatatttgtcacgggcggcgtggtttcttctttaggtaaaggactctcttcagcatcgctagcatatttgttaaaatcacaaggatataaagtaagattgagaaaaatggatccatatttaaacgtagatcctggaacaatgagtccgttccaacatggggaagtttttgtaactgatgatggcgctgaaactgatttagatttgggtcattatgagagattcacaaatatatcatctaaacaatctgacaatataacaacaggacgtatttatagtgatgtgataaaaagagagagaaaaggaggctatttaggaaaaactgttcaagttataccgcatatcacaaatcgaattaaagaatttataaaaaaagatattactaatgaagattttgttatatgtgaaataggtggcactgtaggagatatcgaaagtttaccatttgttgaagctatcagacaattttcaaatgagcacggtaagtcaaaaactttatttattcacttaacatttgttccttttttaaaatcatctgatgaaataaaaacaaaacccacccagcattctgtaaaagagttgagaagtattggaattcaaccggatataattatctgcagatctcaacaatcaataccattagatcaaagaaaaaaaatatctttattttgtaatgttccaattgacaatgtaattgaaacagtagatgta

SEQ ID NO: 315177 - DNA, 436 bp, Unknown
  Bacterial polypeptide expressing nucleotide sequence isolated from the Sargasso Sea
attggcgagatttatttttatcacaggtggtgttgtgtcttctcttgggaagggacttacttcggcatcattaggcgcgctactccaggcaagaggtttttcagtacgactaaggaaacttgacccatatttgaatgtggatcctgggaccatgtcaccttttgaacatggagaagtattcgtgactgatgatggagctgaaacagaccttgatctagggcattacgagcgatttacgggagtagctgctcaaagcactgactcagtttcttcaggacgaatttattctacggtactggaacgagaaagaaaaggtgactaccttggagaaaccatacaggtgatacctcacgttacaaatgagataaagagatttctagaaaaacatgaagacgaagttgactttatgctatgtgaaataggtggcacgatagga

SEQ ID NO: 315178 - DNA, 448 bp, Unknown
  Bacterial polypeptide expressing nucleotide sequence isolated from the Sargasso Sea
tatagaatgggccaggaatgtagctaatctcccaaatgcttctagttcagaactagaaccaaatactcccaatccagtgatacatttattaccagaacaggaagatgtagttgatttaggtgggacaatgagacttggagtttatccatgtagattgacaaaaaatacaactggaaaaaacttatataatgaggatattatttatgagagacatcgacatagatacgaatttaataattactacaaacaaagttttttagattctggatacaaaattagtggtacatcaccagatggcagattagttgagttaattgaattagaaaatcatccatacttcttagcatgtcaatatcatcctgagtttttatcacgacctggcaaaccacatcctttatttaaaggtttaataaaagcctctcaagataagttaactcaatcaaattaa

SEQ ID NO: 315179 - DNA, 526 bp, Unknown
  Bacterial polypeptide expressing nucleotide sequence isolated from the Sargasso Sea
atggcgcgatatatatttgtcactggcggcgtggtttcatcacttggtaaaggtttgtcatcagcatcgctcggatatttgctgagatcacaaggctataaggtgagaataagaaaaatggacccatatttaaatgtagatccaggaacaatgagtccttttcagcatggtgaagtttttgtaactgacgatggggctgagacagatttagatttaggacattacgagagatttacaaatatttcagctaaacaatctgacaacattactacgggtagaatttatagtgatatcataaaaaaagagagaagaggaggttatctcgggaaaacagttcaagtaatcccacatgttacagatagaattaaagagtttataaaaaaagatataacaaatgaagattttgtaatttgtgaaattggaggaacagttggtgatattgagagtttaccatttttagaagctatacgacagttttcaaatgattatggcagatcaaaatcattatttattcatttaacatttg

SEQ ID NO: 315180 - DNA, 857 bp, Unknown
  Bacterial polypeptide expressing nucleotide sequence isolated from the Sargasso Sea
tatttaggaggaactgttcaagtagtaccccatgttacagatagaattaaaaaatttatttcacacgatgttaaaaacgaagattttataatttgtgaaattggtgggacggttggcgatatagaaagtcttccttttttagaagcaataagacaattttctaatgatgttggaaaaaaaaatagtttattcatacacttaactttggttccttacttaaaagcctcaggtgaattgaaaacaaaaccaacccaacattcagttaaagaattgagaagtttaggtatacaaccagacataattgtttgtagatctgaaagagaaatcccaaaaacagaaagaaggaaaatatctttattctgcaatgtgcccattgaaaatgttatagaaactgttgatgtaagaaccatttacgaagcaccaatatgttttcataaagaaaaactagacgatagagttctttctttttttaatattaaaagtaaaaaatcacctgaccttagtaaatggaaaaatattacttctagggttttgaatccaaagaaagatgtaaatattggaattataggcaaatatgttgatcttaaagatgcttataaatctctagacgaagcattaatacatggaggtatttcaaataatgtaaaagtgaatttgaagagaattgactcagaaaatttaaaacctgataaaattaaacccttacttaaagatgtgaccggtgttcttattccaggagggtttggaaaaagaggcacagagggtaaaattgctgccataaaatatgctagattgaataatatacctttcttcggtatttgctttggcatgcaaatggctgttattgaagctgctag

SEQ ID NO: 315181 - DNA, 902 bp, Unknown
  Bacterial polypeptide expressing nucleotide sequence isolated from the Sargasso Sea
gctcttttcactaacgtaaatgctgagtctgtaatttctatgccagatgtagactcaatttacaaaatacctatagagcttaacagtcaacaagttgatgagatagttctaagtaagctgagtctaaactcttcaaagaaacccaacttaaacgattggaaaaaggtaattaaagaggatcttgaacctaaagaaagagtaaccatttccatggtaggtaaatacactgatttagccgatgcctataagtctcttaatgaagctctgaagcatggtggatttaaaaataatctgaaagttcaaataaattacgtagattctgagcagttaaattctaaaaatactcatcaaaagttaaaaaatacagatgccatcttggttcctggaggttttggtgaaagaggcatagagggcatggtttgtgcagtaaagtacgctcgaaccagatctattccgtatttaggcatatgtttaggtatgcaaattgctgtcatagagtttgcaagacatattgcaggtcttaaatcagctaacagcacggaattcaacgaaaaaacaaagtaccctgttgttggcctcatacatgaatggctagattccgaaggctctattgaacgaagagactccaattctaatcttggtggaacgatgagattgggtgcacaagactgtcttttaaataaagattctttgacctataaactttacaagaaggtgaagataaaagaacgacatcgtcatcgttatgaagtaaataataatcttattgagactctaactgctaatggattgagtgtagctggaaagtcagttgataaaatgctcgtggaagtaattgagataaaagatcatccttggtttataggttgtcaattccatcctgaatttacttctgatcccag

SEQ ID NO: 315182 - DNA, 751 bp, Unknown
  Bacterial polypeptide expressing nucleotide sequence isolated from the Sargasso Sea
gtgaatatagcaataataggaaaatatgtagatttaaaggatgcttataaatcacttgatgaagccttaacccacggtggaatcgaaaataatgtaaaagtaaatttgataagaatagactctgaaaaactaaaagtatctgaaataaaatctaaacttaagaatatatctggaattttaattccaggaggttttggaaaaagaggtacagatggtaaaattgatgccattaagtatgcaagaataaataagattccttttcttggaatttgttatggtatgcaaatggctataattgaatttgcaagaaataaactaaatctttcaaaagctacatcaagtgaatttgataaaaaaggattaccaattatcggtttgataaatgaatgggttaaagatggaaaaataattaaaggaacagatattgatttaggaggaactatgagactaggatcttatgaggcaaaacttaaaaaaaattctaaaataaataaaatttacggaaaaaattttattaaagaaagacaccgtcataggtatgaggttaatattaattacaaggaaaaatttgagaaaaaaggaatgtatttttcaggattatctcctaatggcatgttaccagagattatagagcttaaaaatcacccttggtttataggtgtacaatttcatcctgaatttagatctagacctttggctcctcatcctttattctcgtcatttatcaaggcatcaaaaaatcataaatgag

SEQ ID NO: 315183 - DNA, 541 bp, Unknown
  Bacterial polypeptide expressing nucleotide sequence isolated from the Sargasso Sea
actgggaaaaatagagtcaataaaatatgctagaaaaaataaagttccttttcttgggatatgttatggaatgcaaatggcaattatagaatttgcaagaaatcaattgagtttaaaaaaagcaacttcgagtgaatttgatagaaatggtatacctgtaattgggttgattaatgagtggattaaagatggaaaaactatcaaaggaactgataaaaatttaggtggaacaatgagattaggctcttacgatgcgaaattacaagataattctaagattaaaaaaatttatggaaaaaaaattatcaaagaaagacaccgacacagatatgaagttaatattaatctaaaagacaaatttgaaaaaaaaggaatgagcttttctggtttatcgcctgatggttttttaccggagataattgagttaaaagatcatccttggtttattggtgttcagtttcatccagaatttaaatctagaccttttgctccacatcctttattctcatcttttatcaaagcatcaaaaaatcataaatga

SEQ ID NO: 315184 - DNA, 939 bp, Unknown
  Bacterial polypeptide expressing nucleotide sequence isolated from the Sargasso Sea
gaggttattttctattaggttaagaaaattagatccttatataaatgttgatccaggaactatgagtccttatcaacatggagaggtatttgttacagatgatggagcagaaacagacttagatttaggtcattatgaaagatttactggggttcctgcaactaaaagtgataatataactactggaaagatttaccaaaaagtaattcaaaaagaaagaacaggggactatcttggaagcacggtgcaggttataccgcatatcacagatgctataaaagaatttatttcaaaagatataggtaactgcgattttgtattggttgaaattggcggaacagttggagatatagaaagcttaccatttctagaagctattagacaatttggtaatgaagaaggacggaatagaagtatgtacgttcaccttactttaataccctatattgaaacctctaatgaacaaaaaacaaaacctacgcaacactcggtaagagaacttagggagattggcattcaaccaaatattttactttgtagatgtgatagaaatatagaggaaaatgagaaggaaaagatagctttgttttgcaatgtatctcccgagcaagttattcagggaatagatgtaaaaaatatatataatgtccccatagtttataatagtgagggtttagattcacaagtactaaaatatttttctataaaaaagaaaaaaaagattaatttaaaacattgggaaaaaataatttttaggatgaaaagccctaaaagaaatataaaggttggtatcgtaggaaaatatacagattttcctgatgcatataaatcattatcagaagcaatagttcacggttcattaactaatcgttcagaagcaaaaatagtttggataaattctgaaaatttaaaaacctccaacattgaagataatttatc

SEQ ID NO: 315185 - DNA, 285 bp, Unknown
  Bacterial polypeptide expressing nucleotide sequence isolated from the Sargasso Sea
catggcgcgatatatattcgtaactggcggcgtggtttcatctttaggcaaaggattatcatcagcttcattggcttacttattacaatcaagagggtataaagtaagaattagaaagttagatccttatttaaatgttgatccgggaacaatgagtccatttcaacatggagaggtttttgtaactgatgacggagctgaaacagatttagatttaggtcactatgaaagattttcaggaatttctgctaaaaaatctgacaatattactacaggtaaaattta

SEQ ID NO: 315186 - DNA, 584 bp, Unknown
  Bacterial polypeptide expressing nucleotide sequence isolated from the Sargasso Sea
aaataaagtggatgcaattgtcgtacccgggggatttggcaatagaggagtcaacggaaaaatttcggctataaaattcgcaagagaaaataaaattccctttttaggtttgtgccttggaatgcaatgtgcagttatagaatgggctaggaatttagctaatcttccagatgcatctagttcagaactagacccaaacactcccaatccagtgatacatttattaccagaacaggaagatgtagttgatttaggtgggacaatgagacttggagtttatccatgtagattgacaaaaaatacaactggaaaaaaattatatgatgaggatgttatttatgaaagacatcgacatagatacgaatttaataattactacaaacaaagttttttagattctggatacaaaattagtggtacatcaccagatggcagattagttgagttaattgagttagaaaatcatccatacttcttagcatgtcaatatcatcctgagtttttatcacgaccaggcaaacctcatcctttatttaaaggtttaataaaagcctctcaagataagttaactcaatcaaattaat

SEQ ID NO: 315187 - DNA, 717 bp, Unknown
  Bacterial polypeptide expressing nucleotide sequence isolated from the Sargasso Sea
catggcgcgatttatatttgtcacgggcggcgtggtatcatcattaggaaaaggtctatcttcagcatcactagcttatttacttcaatcaagaggttataaagtaagactaagaaaattagatccatatttaaatgtggatcctggtacaatgagtccttttcaacatggagaagtttttgtaactgatgatggagcagaaactgatctagatttgggacattatgaaagattttctggagttttagcaaaaaaatcagataatattacgactggtaaaatttataatgacgtgcttataaaagaacgtaggggtagttatttaggtaaaacagtacaagtaatacctcatattactgatcgtataaaagagttcattaaaaatgattcatctaaagaagattttataatttgtgaaattggtggaacagttggagacattgaaagtttaccttttgtagaagcaataagacaatttgcaaatgatattggaaagaaaaaagccttatttattcatcttacattggttccatatttaaaatcttctgatgaaataaaaacaaaaccaacacaacattccgttaaagaattaagaagtattggagttcaaccagatatcataatctgcagatctgaaagacctatacctttagaacacagaaaaaaaatatccttattttgcaatataaaattcaaaatgttatcgaaacagttgat

SEQ ID NO: 315188 - DNA, 583 bp, Unknown
  Bacterial polypeptide expressing nucleotide sequence isolated from the Sargasso Sea
atggcgcgatatatatttgtcacgggcggcgtggtttcctcattaggaaaaggtttatcctcagcttcacttgcatatcttttacaatcaagaggttttaaagttagaatcagaaaattagatccatatttaaatgtagatcctggaacaatgagtccatttcagcacggtgaagtatatgtaactgatgatggtgctgaaacagatttagaccttggtcattatgaacgattttctggagtatcagcaaagaaatcagacaatattactacaggtagaatttataatgatgttttaaaaaaagaacgtaagggtgagtatcttggaaaaactgttcaagtaattccgcatattacagatcgcataaaacaatttattaaaaatgattcatctaaagaggactttgtaatttgtgaaattggaggaatagttggagatatagaaagccttccatttgttgaagcgataagacaatttgcaaatgatgttggtaagaaaaatgctttatttattcatttaaccttagttccttatttaaaggcttcggatgagattaaaacaaaaccaactcaacattcttaaa

SEQ ID NO: 315189 - DNA, 850 bp, Unknown
  Bacterial polypeptide expressing nucleotide sequence isolated from the Sargasso Sea
ttagaatttccaaactcttcttgggcttttgttcatcttactttggtacccttcataaatgcttcaggagaacttaaaacaaaacctacccaacactctgtaaaagaacttagatcattaggaattagtcctgacttattggtatgtagatctgaacaggagctgccaaaagatgaaaaaaagaagattgcacttttttgttctgtacctaatgaaagcgttatatcaatgcatgatgttgatacagtatattcagtaccgatcttattaaataaacaaaaagttgataaaactattattgaaaaactaaaaatcaaggctaaacagccaaatctaaatgattggaagagagttgttaaagctaaattaatgcctgaaaaagaagtaaatgtttcatttgttggaaaatatacagagttaaaagattcttataagtcaattaatgaagctcttgagcatgccggaattaaaaataaagcaaaagtaaatattaattttgtagaagccgaaaatattacttcaaaaaatatcaaaaaaactcttaaaaatgcagatgcagtcttagttcctggtggatttggcgaaagaggtattgaaggaatgatcttagcttgcaaatatgctcgagaaaataacattccatatctaggaatatgccttggtatgcaagtagcaattatagaatatgcaaggaatgttcttaatttaaaaggagcaaacagcactgagtttgaccataatacaaaacatcctgttaaaggtcttattacagaatggaatgacatctctggcaaaaaaaaaagaagagacaaaaattctgacttaggaagaacaatgcgtttaggcggac

SEQ ID NO: 315190 - DNA, 352 bp, Unknown
  Bacterial polypeptide expressing nucleotide sequence isolated from the Sargasso Sea
atggctagatttatatttatcacaggcggagtggtttcttctcttgggaagggtttagcgtcagcagcgctgggtgcactattgcaagctcgcgggtatagtgtgaggttgagaaagttagatccttatttaaatgtcgatccaggaacaatgagtccatttgaacatggtgaggtgtttgtaacagatgatggcgctgagacagatctagacctaggtcattatgagcgatttacaggagtatctgcaaggatgacagattctgtatcttccggaagaatttactcaaacgtgctcgaaaaggaacgtcgtggtaattacttagggaaaacaattcaggtcattcctcatg

SEQ ID NO: 315191 - DNA, 440 bp, Unknown
  Bacterial polypeptide expressing nucleotide sequence isolated from the Sargasso Sea
aatgtcggctaagtatattttcgtaactggcggagtggtgagttccatagggaaaggtatcactgtcgcttccataggaagaatattaaagaatcgcggatttgatatttccgtaatcaaactggacccttacttgaatgttgatcctggaacaatgtcgccttatcagcatggagaagtttttgttacagaggatggtggggagaccgacctagatttggggcactatgagagattcattgacattgaattaaacaagaaatccaatgtaacagctgggcaagtttatttaagtcttattactaaagaacggaagggtgattttcttggaggtaccattcagactatcccgcatgtgactaacgaaataaagcaccatatcactgacttagctgaatctttagatgtcgatgtgatggtagttgaagttgggggaacgg

SEQ ID NO: 315192 - DNA, 553 bp, Unknown
  Bacterial polypeptide expressing nucleotide sequence isolated from the Sargasso Sea
tatgcagacaaagttcatatttattacaggtggcgtagtttctggtcttggtaagggaatcgcagcggcatctataggcgcactacttgaatcaagaggcttgacaataagccttatgaaacttgatccatacatcaatgttgatgctggaacaatgaatccttttcaacatggggaagtattcgttacagtcgacggtgccgaaactgacttggatttgggacattacgaacgatatactaatgcggttttgacaagaagacataatcgtaccacaggacaaatttatgactctgtaatcagaaaagaacgctcaggaaaatatcttggagcaacagtacaagtaattcctcatgtaattgacgaaataaaacaaactatttcggatgcagccatattaatcagcaataatgataattctaaaaatgctgatatatgtattgttgaaataggtggaacggcaggtgatatagaatctttaccctttcttgaggctatacgtcagtaccgaaatgattttggtagggaaaatactttattcatcacctcacat

SEQ ID NO: 315193 - DNA, 319 bp, Unknown
  Bacterial polypeptide expressing nucleotide sequence isolated from the Sargasso Sea
atggcgcgatatatattcgtaactggcggcgtggtctcatcactaggaaaagggttatcttctgcatcactagcttatttgttaaaatctcaaggttataaagtaagaataagaaagatggatccatatttaaacgttgatcctggaaccatgagtccatttcaacatggtgaagtttttgtaacagatgatggagccgaaactgatttagatttagggcactatgaaagatttacaaatatttcctcaaaaaaatcagacaatattactacaggaagaatttatagcgatataattaaaaaagagcgtaaaggtatgt

SEQ ID NO: 315194 - DNA, 472 bp, Unknown
  Bacterial polypeptide expressing nucleotide sequence isolated from the Sargasso Sea
atggcgcgatttatttttgtcacgggcggcgtggtttcatcattaggtaaaggtctctcttctgcttcgctagcatatctattaaagtctcaaggatataaggttagattaagaaaaatggacccttatttaaatgttgatccaggaacaatgagtccttttcagcatggagaagtttttgtaactgatgatggtgctgaaacagatttagacctaggccattatgaaagatttacagatatatcatgtaaacaatcagataacataacaacgggtcgtatctacagtgatgtaattagaagagaaagaaaaggcggatatttaggaaaaactgttcaagtgatacctcatgtaacaaatcgaataaaagagtttattaaaaaagatattactaatgaagattttgttatttgtgaaattggtggcacagttggagatattgaaagcctaccatttgtcgaggctattagac

SEQ ID NO: 315195 - DNA, 541 bp, Unknown
  Bacterial polypeptide expressing nucleotide sequence isolated from the Sargasso Sea
aattgctgccataaaatatgcaagattaaacaatataccattctttggaatttgttttggtatgcaaatggcaataattgaagcagccagaaatttactaaatattaaaaacgcttcaacaagtgaatttggaaataattgcacacccgtagttggattactggaagaatggaaaaaaggtaaaaagagaataaaaggaagtgaaaaaaatttaggaggaacaatgagattaggtttatatgacgctatattaaaaaataattctttgatttctaaaatatattcagaaaagaaaattaaagagagacacagacatagatatgaagtaaatataaaatataaaaataattttgaaaaaaaaggacttattttttcagccatgtctccagacggcacacttcctgaaataattgaactaaaaaaccatccttggtttattggtgtacagtttcatcctgaatttaaatcaagaccttttgctcctcatcctcttttctcttcttttattaaggctgcaggaatcaaaggaaggaaaaactaa

SEQ ID NO: 315196 - DNA, 694 bp, Unknown
  Bacterial polypeptide expressing nucleotide sequence isolated from the Sargasso Sea
tatgacaagatatgtatttatcactggtggagtagtttcatctctgggaaagggaattgcagctgcctcccttgcttctttattcaaactaaggggttttaaagtctcccttcaaaaacttgacccatatataaaccttgatccaggaacaatgagtcctattcagcatggagaggtatttgttactgaggatggagctgaaacggatctagatctaggtcactatgagagatttgtgggtattcaaatgtcacaggatagcaatgttactgctggaagagtctactcaaatgttattaataaagaaagaaaaggagactatctgggtagcacagttcaggtcatcccacatataacagatgagattaagagactagttattaagggcgcaaaaaaggctgatatagcttttgttgaagtcggaggaacagttggcgatattgaatctctgccatttttagaatcaattagacaatttagccttgatttagggaaaaagagatctatgtttgttcatctaacattattaccttatattgatgtaaccaatgaaattaaaacaaaaccgacgcaacactctgtaaaagaattgcgatcaataggtattcaacctgatgtccttctttgtagaggtaaaaatgaaattaatcaatcacttaaaaataaattagcactatttactaatgtctcaaaa

SEQ ID NO: 315197 - DNA, 181 bp, Unknown
  Bacterial polypeptide expressing nucleotide sequence isolated from the Sargasso Sea
cccttatcttaatgtagatccaggaacaatgtccccctttgaacatggtgaagtttttgtaacagatgacggtgcagaaactgatctggatcttggacattatgaacgttttacaggagtagcagctaaaaaaactgattctatttcatcagggaaaatatactcaagtgttctggataaa

SEQ ID NO: 315198 - DNA, 864 bp, Unknown
  Bacterial polypeptide expressing nucleotide sequence isolated from the Sargasso Sea
aaaaagtgataaaaaccatatgtgaaaaactaaaaattaaggctaaacagccaaatctaaatgactggaaaagagttgttaaagctaaattaatgccagagaaggaagtaaatgtttcatttgttggaaaatatacggagttaaaagattcttataaatcaattaatgaagctcttgaacatgctggaataaaaaataaatcaaaagtaaatattaattttgttgaagccgaaaacatttcttcaaaaaacatcaaaaaaactcttaagaatgcagatgcagtcttagttcctggtggatttggtgaaagaggtattgagggaatgatcttagcttgcaaatatgctagagaaaataacattccatatttaggaatttgccttggcatgcaagtagcgattatagaatatgcaagaaatgttcttaatcttaaaggtgcaaacagtactgagttcgatcaaaatacaaagcatcctgttattggccttattacagaatggaatgatatttctggcaaaaaagaaaaaagagataaaaattcagacttgggtggaacaatgcgtttaggtggccaactatgcaaactcaaaaagggatctaattcattaagaatgtataaaaattcagaaatcattgaaagacatagacatcgatatgaggtaaatccaaaatataaagatgatatgatcaaaaaaggattagatgttgtagggacatctattgatggtaagctagtagaaatgattgagattcctaagcataaatggtttttagcatgccaatttcatcctgaatttacctccaatccaagagatggacatcctattttcaacagttatatcaaaagtacgttaagaaaataaa

SEQ ID NO: 315199 - DNA, 949 bp, Unknown
  Bacterial polypeptide expressing nucleotide sequence isolated from the Sargasso Sea
ctcaccgttaccatgttaaagctcgacccttatatcaacgtcgacccggcacaaatgagccctatacagcatgttgaagtatttgttaccgatgacggtgcagagacagaccttgatcttggtcactacgagcgctttattcgcacccgtatgacaaaacgcaacaacttcaccacaggccgtgtttacgaagaagtacttaaacgcgagcgtcgcggcgattacttgggcgccacaattcaggtcataccacacattaccaacgaaattaaacgtcgcgtaattgaaggtgctgaaggtcacgaagttgccattgtagaagtgggcggaaccgtaggtgatattgagtcacaacctttcttagaagccattcgccaactaggcactgaagtaggccgcgagcgtgctatgtacatgcaccttacgctagtgccttatatgccagcatccggtgaagtaaaaacaaagccaacccagcattcagttaaagagttgcgctcaattggtattcaacccgatattcttgtgtgtcgttctgtaggtgctctacctaccagtgagcgctctaaaatcgcgcttttcactaacgtcgcagataaagcggttatctcattaaaagatgtagatagcatttatcgcattccagctgcacttaaagcgcaaggaatggaccagcttgttgtggatcgctttggatttgattgcccagaagccgatttagtcgagtgggaacaggtgctttacgctgaatcaaatcccactgcagaagttaacataggcatgattggtaagtatgttgagttgccagacgcgtataaatccgttaacgaagcactaaagcatgctggtcttaaaaacagactgacagtcaacattcatcatatcgactctcaagatgttgagagtaaaggcacgcaaatccttgaaaagcttgacgctatcttagtgc

SEQ ID NO: 315200 - DNA, 964 bp, Unknown
  Bacterial polypeptide expressing nucleotide sequence isolated from the Sargasso Sea
gtccatatcagcacggggaggtattgtaacagaagatggctgtgaaacagatttagacttggggcattatgaacgatttttagatcaatcattattgcgctataacaatattacatctggaatgatttattgggatgtccttaaaaaagaaagaaaaggcgactacttaggaaaaacagttcaaattatcccgcatgtaaccaatgaaattaaaaataggattaacagctgtctagacgacaagccattcgacattgttattacagaaatcggtggaacgataggtgatattgaaggccttccatttgttgaagccattcgtcagtttcagtttgcaaataaaggcgactccatccatatccatttaacgttagtaccgttcttaaaaacaagtggtgaatttaaaacaaagcctactcaacatagtgtaaaagagcttcgttcaattggaatacaaccagatatagtattatgccgctcaatgatgccgttatctcaagacattaaagagaaaattgcattattttcagatgttgatatcaagtctgtgacatccgctattgatgtcgagagtatttatgatgtcccgttaattcttcaaaatgaaaagctagatatggttgtttgtcaaaaactaggcttagaaaataaagagtgtagtatgaactcgtggaaagaatatataaaaacactgcatgacccaaccctgacaacaatcaaaattgctgttgttggaaaatatgttaattattcagattgctatattagtgtcgttgaatcattgtatcatgcagcgacaagtcatttatgtaaggtggagttagtgtgggttgattctgaattattagaaaagaaagatgtggcaacggagttatcaggagtatcaggcgttttagtacctggtggttttggagaacgtgggattgaaggtaaaattatggcctgtcaatttgcacgtgagaat

SEQ ID NO: 315201 - DNA, 749 bp, Unknown
  Bacterial polypeptide expressing nucleotide sequence isolated from the Sargasso Sea
ttcatttgttggaaaatatacggagttaaaagattcttataaatcaattaatgaagctcttgagcatgccggaataaaaaataaagcaaaagtaaatattaattttgttgaagccgaaaacatttcttcaaaaaacatcaaaaaaactcttaagaatgcagatgcagttttggttcctggtggatttggtgaaagaggtattgagggaatgatcttagcttgcaaatatgctagagagaataacattccatatttaggaatttgccttggcatgcaagtagcgattatagaatatgcaagaaatgttcttaatcttaaaggtgcaaatagtactgagtttgatcaaaatacaaagcatcctgttattggccttattacagaatggaatgatatttcaggcaaaaaagaaaaaagagataaaaattcagatttgggtggaacaatgcgattaggagggcagctatgtaaactcaaaaagggatctaattcattaagaatgtataaaaattcagaaatcattgaaagacatagacatcgttatgaggtaaatccaaaatataaagatgatatgatcaaaaaaggattagatgttgtagggacatccattgatggtaagctagtagaaatgattgagattcctaaacataaatggtttttagcttgtcaatttcatcctgaatttacctccaatccaagagatggacatcctattttcaacagttatattaaaagtacgttaagaaagtaaa

SEQ ID NO: 315202 - DNA, 847 bp, Unknown
  Bacterial polypeptide expressing nucleotide sequence isolated from the Sargasso Sea
agaaaggactataccattagatcaaagaaaaaaaatctccttgttttgcaacgtaggaattgacgatgttatagaaacggtagatgtaaagacaatttatgaagcaccgataagttttaataaagaaaaattagacgaaagggtgcttaatttttttaagattaaatctagaaaaaaagtaaatcttataccttggaagaaaattaccaagttagttttaaacaccaaagatattgtaaatattgcaattattggaaagtatgttgaacttaaagacgcatataagtctcttgatgaagcattaactcatggcggaatagctaataatctcaaagtaaatatcataaggattgagtctgactttttaaaacctagtgaaattaagaaaaaattgaaaaatgtatcaggagtcttaataccaggtggatttggtaaaagggggaccgagggaaaaattgctgctgtaaatttttctagaaaaaacaaaataccatttttaggtatttgttttggaatgcaaatggcagtaatagaatttgctagaaacaaattaaatataaaaaatgcaacgtctagtgaattcggaccatcaaaagcttccgtgattggtttgatgagtgagtggtcaaaagatggtaaattgattaagggcaccaataaaaaactaggcggaacaatgcgtttaggtagttatgaagcaagactaaaaaaagacacaaaaataagtaagatttataattcattgaaaatacaagagagacatcgtcatagatatgaagttaatattaactataaagaagagtttgagaaaaaagggatgattttttcaggattgtcgccagacaat

SEQ ID NO: 315203 - DNA, 785 bp, Unknown
  Bacterial polypeptide expressing nucleotide sequence isolated from the Sargasso Sea
ggcttctttaggagcaatactcgaagctagaggcctcaaagttggcatgatgaagcttgacccttatctcaatgttgatcctggaacgatgagtccttatcaacacggagaagtttttgtcacagaagatggaacagaaactgaccttgatttaggtcactatgagagatacgtaaatactattacaagcaagcacagtaattttactgccggtaaagtatatgagaatgtcatcgcgaaggagagaagaggagattatctcggtgccacagttcaagtaattccccatgttactgatgaaatcaagaacagcataaaggacggctctataggttatgatgtgacaatagttgaaataggggggacagtaggcgatatagaatcattgccttttatagaagctataagacagatgggaatagaaaaagacggttacgaggttgcctatgtgcatttaaccttagttccatacataagagcctcagatgaaataaaaacaaaaccaacacagcactcggtcagggaattaagggctattggtattcagcctgatgctttggtctgtcgttcagaattaccattaccaaaggagcattttgagaaaattgctttatttactaatgttgataaacaggctgtaatatcagcccacgatgcagaggatatctatcaaattcctcttattttaaaagaacaaggtctggatgacattattgtagaaaaactcaaattaaatgctcctgaagctgatttatcagattggcaaaacataatggaagcaaaaa

SEQ ID NO: 315204 - DNA, 792 bp, Unknown
  Bacterial polypeptide expressing nucleotide sequence isolated from the Sargasso Sea
tatgcatttgactcttttaccgttcttgaaatctgcaggggaaactaagacaaaacctacacaaagatctgtgaaagagatgttatctcatggcttacaaccagatatcttggtgtgtagatctgatgaaccaatggaagaagaggaaagaaagaaaattgcattattcactaatgtaaaaccaaatgctgtcatctcaatgccagatgtagattcgatttataagatccctatcgaattaaattatcaaaaagtcgatgaaatagtattagaaaaattcaaattaaattcttctaagaaacccaatttaagagactggagaaaggtaattaaagaagatcttgaaccaaaggactttgtcaaaatatctatggttggaaagtatacggagcttgcagatgcctacaagtccttgaatgaagcacttaaacatggaggttttaaaaataatcttaaggtagatatagactatgtagactcagagaaattggattcaaaaaacgttcataggaaactaggaaaatctgatgcaattcttgttccaggaggatttggagaaagagggatagagggtatggttaccgctgttaagtatgccagaacaaaattaataccttacctaggtatctgtcttggcatgcagatagctgtaattgaatttgctagaaatgttgcgaaactaaagttagcaaatagtactgaatttgataagactactaattatcctgttgtcggtcttataagcgaatggctagattccgagggctcaataaagagacgagattctaattc

SEQ ID NO: 315205 - DNA, 710 bp, Unknown
  Bacterial polypeptide expressing nucleotide sequence isolated from the Sargasso Sea
tttgggtcattatgaaagattcacaaatagatcttccaaaaaaactgatagtacgtcctcaggaaaaatttattctaacgttttaaaaaaagagcgcaaaggtgactatcttggtgctacaatacaagttattcctcatgtcacagatgaaataaaacttttcattaattctaattttgaggatgaagatatcataatttatgaaatagggggtactgtcggagatatagagtctttgccatttttagaggcgattagacagattagaaatgataaaaatataacatcagctttgatacacatgacttatgtaccctatttaagttctgctggtgaattaaaaacaaaaccaactcaacactctgtaaaggaattattaaattcaggtattcagccagatataattatgtgtagatgtgaaaaagaaataaatttagaatctctggaaaaaatatctcaattctgtaatgttaaaaaagactctgtaattcctgccttaaatgcaaaatcaatttacgaggttccctcaatttattctagagctggtcttgataatgtgttgcttgagcatttgggttatgagacgtctaaatatcctctgaatttaaaagcatgggaaaatttaacaaataaaataaaaaatttaaaaaaagaagtcacgattggtgttgttggaaaatatactaatttaaaagatagttataaatctc

SEQ ID NO: 315206 - DNA, 1299 bp, Unknown
  Bacterial polypeptide expressing nucleotide sequence isolated from the Sargasso Sea
catgacgcgctacatcttcgtcacgggtggtgttgtttcttcattggggaaaggcatcgcctcggcttcactggcggccatcctggaggcgcggggcctgaaggtcaccatgctcaagctggacccttatatcaacgtcgatccgggcaccatgagcccgttccagcacggtgaggtgttcgtcacccacgacggcgccgagaccgacctcgacctgggccactacgagcgcttcatccgtaccacgatgagcaagagcaacaacttcaccaccggtcgggtgtatgaagatgtgctgcgcaaggagcgccgtggtgattacctgggcgcgaccattcaggtcattccgcacattaccgacgagatcaaacgtcgcatcatcaagggtgccggcgatgccgatgtggccctggtggagatcggtggcaccgtaggtgacatcgagtcgcagccgttcctcgaagccattcgccaactgcgtgtggaagtgggcgccaagcgcgccatgctgatgcacctgactctggtgccgtatatcgccaccgccggcgagaccaagaccaagccgactcagcattcggtcaaggagctgcgctccatcggcctgcagcctgacgtgctggtgtgccgctccgaccatccaatcgatgtgtcctcgcggcgcaagatcgccctgttcaccaacgtcgaagagcgtgcggtgatcagcctggaagacgtcgacaccatctacaagattccgggcgtgctgcatgcccaggggctggacgacttcgtcgtcgagcgtttcggcctggagtgtggcggcgccgatctgtccgagtgggatcgcgtggtcgatgccaagctcaacccggaaaaagaagtcaccatcgccatggtcggcaagtacatggagctgctcgatgcgtacaagtcgctgatcgaagcgatgagccatgccggcatccagaaccgtaccaaggtcaacctgcgttatatcgactccgaagacatcgagaaccagggcaccgcgctgctcgaaggtgtcgatgccatcctggtgccgggcggcttcggtctgcgtggcgtggaaggcaagatcaagaccgtgcagtacgcccgcgagaacaagatcccttacctgggtatctgtctcggcatgcaggtggcagtgatcgagtacgcccgcaatgtggtgggctggaccgacgccaactcttccgaattcgacatggccagcgctcacccggtagtgggtctgattaccgagtggcaggatgccgcaggcagcgtcgagcagcgtagcgagagctccga

SEQ ID NO: 315207 - DNA, 1270 bp, Unknown
  Bacterial polypeptide expressing nucleotide sequence isolated from the Sargasso Sea
atggccaagttcgtcttcatcaccggtggtgtggtctccagcatcggcaagggaatcgtggccgcaagccttggacggctgctgaaatccaggggatacaacgtttcgatcctgaagctggacccatacctcaacgtggacccgggcacgatgagcccgatccagcacggggaggtgttcgtcaccgaagacggtgccgaaaccgatctggatctgggccactacgagcgcttcaccgacacggccatgtctcggctgaacagcgtcaccaccggctcgatttaccaggcggtgatcaacaaggagcgccggggcgactacaacggcggcacagtgcaggtgatcccccacatcaccggtgagatccgcgaacgcatccaccgcgttgccgccaacagcaacgccgatgtggtgatcacggaaatcggcggcaccgtcggtgacattgaatcgctgcccttcctggaagcgatccgcgaattccgtggtgacgtgggtcgtcgcgatctggcgtacatccacgtcaccctgctgcccttcatcggcacctcgggcgaactcaagaccaagcccacccagcattcggtcaaggagctgcgttccatcggcatccaaccggatgtgctggtctgccgtagtgaccgcaccatcagcgatgaaatgaagcggaagatcgggggattctgcggggtgccgacccgggccgtgatcccatccctcgatgccgacagcatctatgccgtgcccctgaccctggaaaaggaagggctttgctgcgaagtgctcgatgtgctggatctgaccgaccacgacagcgacatggcggcctggcaggagctggtgcacaaactccgcaaccccggcccggccgtgaaggtggccctggtgggcaaatacatccagctcaacgatgcctacctctccgtggtggaagcgctgcgccatgcctgtatcgcccaggatgcctcccttgatctgcattgggtctgcgcagagcagatcgaaagcgatggtgctcagaccctgctgaagggtatggatgccgtggtcgtgccgggcggtttcggcaaccgtggtgtcgatggcaaaatcgcggcgatccgctgggcccgggaacagcgggtgccgttcctggggctgtgtctcggcatgcagaccgctgtaatcgagtgggcacgcaaccaggccgggctgacagaggccaccagcgccgaactggatgccggaacgccccatcccgtgattcacctgttgccggagcagcaggatg

SEQ ID NO: 315208 - DNA, 1574 bp, Unknown
  Bacterial polypeptide expressing nucleotide sequence isolated from the Sargasso Sea
gatgaataaacctaaatatatctttgttacaggtggtgttacctcttctcttggaaaaggtattgtatctgcctcattagcaaggcttcttcaggctcagggtttaaacgtttcgattcaaaagttagatccatacattaatgttgatcctgggacattaaatccatatgagcatggcgagtgttacgtaactgatgatggagctgaaaccgatcttgatctaggtcattatgaaagatttttaagtatcaatacttcacaaaaaaataatataacaactggaaaaatttatcaaaatgtaattgaaaaagagagaaaaggagagtttttaggtaaaacagttcaggtaatacctcatgttacaaatgagataaaggaaaatattagaaatctaaataataaaaataatttagatataataattactgagattggaggtacagtaggtgatattgagtcattaccatttttggaggcagttagacaagttatttatgaagaaggtcctgaaaactctatggttattcatctaacgttaatccctttcttatctgcaacaggagaattaaaaacaaagccaacacaacattcagttaaaactctcatggaactgggtctaaaggcagatgttttagtgtgtagaacagaaaaggttttatctgatgagataaaaaataaattggcattattttgtaatgttcgatttgactgtgtaattcagtctattgacgtagagactatttatgatgttcctattaaaatgatggatgaaggactagatagggtaacactggaaaagtttaacataaaagaatccgagcctaatcttgataaatggaaaaatttcctccataaactgaagaatccaactcatcaaataaacattggcttagttggaaaatatgttgagttagatgattcatataaatcaattctagaatcacttattcatgcaggagctgaaaatgaggttaaggttgttgttaattcaattcactctgaatatttagataaagaaaatatttcaaaaaatttaagacaattagatggtattattgttgccccaggttttggtcaacgaggtcttgatggaaaaattcttgctgttgagtatgctagagtaaataagataccttttcttggaatatgtctaggaatgcaaatggctgtaatagagtatgctagaaatgtaaaaaagattaggtatgccaattcaacagaaatctctgagaaatgtaaagatcctgttatagacttaatgacatcacaaaaggaaattattaataagggaggaacgatgaggcttggagcttgggattgtgaaatagaaaaaaatactaaatcttataaatgctacaagaaaaaattaatttcggagagacatagacatagatatgaatttaacaataattacacagatagaatctttgatgataaatttgtaattgcagggtcaaatcctgacacaaaacttgttgagattgttgaaaatattgatcatccgtggtttgttggagttcaatttcacccagaatacaaaagtagtgtttataatcctcatccaatttttgtaa

SEQ ID NO: 315209 - DNA, 884 bp, Unknown
  Bacterial polypeptide expressing nucleotide sequence isolated from the Sargasso Sea
catggcgcgattcatttttgtcactggcggcgtggtttcatcacttggaaaaggattgtcatctgcttcgctaggatttttactcaaatcccaaggttacaaagttagaattagaaaaatggatccttatttaaacgttgatcctggcacaatgagtccatttcagcatggggaagtattcgtaactgacgatggagccgaaaccgacttagatcttgggcattatgagaggtttacaaatatatctgcaaaaaaaaatgataatattacgactggaaaaatttacagtgatataatttctaaagagcgtaagggagactatttaggaaaaactgttcaggtcataccccatgtaactgaaagaattaaaaagtttattaaaaaagatattaaaaatgaggattttgtcatttgtgaaataggtggaactgttggtgatatcgagagtttaccttttttagaggctattagacaattttctaacgacattggaaaagataaaactttatttgtacatttaacgctggtgccctttttaaaatcctcagatgaaattaaaacaaaaccaactcaacattcagtaaaagaattaagaagcataggtatacaaccagatattatcatttgtagatcacaacgatcaataccattagatcaaaggaaaaaaatatcactattttgtaatatttcaatagaaagagttattgaaactgttgatgtaaaaactatatatgaagcaccaataagtttttttaatgaaggtttagataaacaagttttaaaatactttaaaataaaaccaaaaaaaaaaattaatctctctccatggaaaaacgtaactaaaattgtaactgataaaaattcaaaaacaataaatattgcaa

SEQ ID NO: 315210 - DNA, 1372 bp, Unknown
  Bacterial polypeptide expressing nucleotide sequence isolated from the Sargasso Sea
atggctcaaacaaagtacatttttataaccggtggggttgtttcctctcttggaaagggtattgctgctgcttctataggagcactctttgaggcaagaggcttaaaagtatcattaaataaacttgatccatacatcaatgttgatccgggtaccatgagtccttttcaacatggagaggtttttgtaactgatgatggaacagaaacagaccttgatttaggtcactatgaaagatttgtaagatttcaagcaagtaaaaaaaataatttcacagctggaaaagtttatgaagaagtgattcaaaacgaaagaagaggggattatcttggaggaacagttcaggttatacctcatataactgatgagataaaacgtcgaatcaaattaggcgccaaaggtgctgacattgcaatagtcgaaattggtggcactgtaggcgatattgaaagccagccctttattgaagccataagacaaatgatgttggaattacctacaaatgctactgccctggctcatcttactttagttccatatattcaagtttcagaagagctaaaaactaaacctactcaacattctgtcaaagagcttagatcacttgggctgcagcctgattgtttaatatgcaggcttgaaaaagaactacccaacgatgaaaagaagaaaatagctttgttttgttctgtagatccaaacagtgtcatttcaatgcatgatgcagaaacagtttattcaattccattgcttttttattctcaacaagtagataaaattctattaaagaaattaaatttatctaaagtaaaatctccgagattaaatgactggaaaagagtagttgacgcaaaattaaatccgaagaaaaaagtctcaattgcaattgttggaaaatacgtagatttaaaagactcttataaatctctaaatgaagcccttgatcatgccgggatcaagaacctggctaaggttgaaatcaatatgatagatgcaacaaaaattacaaaagtaaatgtatctaagattttaaaaacttatcaggcaatactaatacctggtggatttggtagtagaggtattgaaggcatgatcaccgcttgtaaatatgcaagagaaaataaaattccatattttgggatttgcctaggtatgcaaattgcaattattgaattttcaagaaatattttaaattttaaaaaagccaatagcactgaatttaatcaaaaaacaaaatatcctgttatcggtctggttacagagtggacagattcgacagggaagatagagcataggaatgaaaattctaatttagggggaacaatgagacttggcggtcaaaaatgtttaatcaaaaagtcctctctttcac

SEQ ID NO: 315211 - DNA, 1624 bp, Unknown
  Bacterial polypeptide expressing nucleotide sequence isolated from the Sargasso Sea
atggcgcgatatattttcgtaaccggcggcgtggtttcatctttaggtaaaggattatcttcagcttctctagcttacttattacaatcaagaggttataaggtaagaatcagaaaacttgacccatatttgaatgttgatcctggaacaatgagtccgttccaacatggagaagtttttgtaactgacgatggcgcagaaacagatcttgatttaggacattacgagagattttctggtatttccgccaagaaatctgacaacattaccacaggaaaaatttacaatgatgtcttgaaaagagagagacaaggtaagtatttaggaaaaactgttcaagttattccacacattacaaatagaataaaagaatttatcaaaaatgatgtttcaaaagaagattttgttatttgtgaaataggcggaacagtcggtgatatagaaagtctcccatttttggaggcgataaggcagttttcaaatgaattaggtagacaaaatactttgtttattcatcttactttagtcccatacatgaaagcttccgatgaaataaaaactaaaccaacacagcattcagtaaaagaattacgtagcattggaattcaaccagatattattatttgtcggtcggagagatcaattccattagatcaaagaaagaaaatttcactattctgcaatgtagcaatagaggatgtaatcgaaactgtagatgtaaaaacgatttatgaggctcctataagctttaacaaagaaaaattagacgaaagagtactaaaattttttaatataagatctaaaaagaaagtaaatcttcagccttggagaaaaataactaagttagttttaaatacaaaaaataaagtaaatatagctataattgggaaatatgttgagttaaaagatgcttataaatctttagatgaagcactaacacatggaggaattgcaaataatttaaaagtaaatcttttaagaattgagtcagaccgtttaaaacctagagatattcataatagacttaaaggtgtatcaggaattttaataccaggaggatttggaaaaagaggtacagagggaaaaattgcagcgattaattatgccagaaaaaataaaataccttttctaggcatttgttttggaatgcaaatggcagttattgaatttgctagaaataaattaaatattaaaaaagcaacatcaagcgagtttggttcctcgaaggcttcagttgtaggtttaatgagtgagtgggtaaaagatggtaaattaatgaaagggactgataaggacctaggtggaactatgcgattgggtagttacgaagcgagacttaaaaaagacacaaagataagcaagatttataaaaatttaaaaatagaagaaagacatcgtcatagatatgaagttaatattaattttaaagaggattttgaaaacaaaggtatgattttttcgggattatccccagataacaaacttccagaaataattgaattagagaaccatccttggtttataggagtacaatttcacccagaatttaaatctagacctttatcacctcatcctttattttcgtcttttattaaagctgcaaaaattaattcaaaaaaatgat

SEQ ID NO: 315212 - DNA, 615 bp, Unknown
  Bacterial polypeptide expressing nucleotide sequence isolated from the Sargasso Sea
gatggcatctaatccaaaatatttatttgtaaccggtggggtagtttcctctctgggtaaaggcatattttctgcttcattgggagcaattctagaaagtagaggcttgaaagttacaattcaaaaattagacccttatataaatcttgatccggggacaatgtctccttttcaacatggagaagtatttgtaactgaagatggatctgaaaccgatcttgatcttggtcattacgagagatttttaaattcaaaaatgtctaaattaaacaacttcactgcaggtcaggtttacgagtacgttctaaaaaaagaacgaaaaggagattttcttggatcaacagttcaagtaattcctcacataacggatgaaataaaaaaaagaatagcgaattgtgcaaaaggatatgatttagcaattgtggaagtcggcggcacagtaggtgatattgaatcacaaccgtttttggaagccattaggcaaatgaaattagaacttggggggaatagagcattattcgctcatttaacactaattccttacttagcatcgtcaggcgaaataaaaaccaaaccaacccaacattctattaaaaacttactttcgcatggaat

SEQ ID NO: 315213 - DNA, 1612 bp, Unknown
  Bacterial polypeptide expressing nucleotide sequence isolated from the Sargasso Sea
aatgcaatatgtatttattacgggcggagttgcctcatctcttggtaaaggaattgcttcagcagcggttgcatcattacttcagcaaagaaattttaaggttagaataagaaaacttgacccttatctcaatgttgatccaggtacaatgagtccatatcaacatggtgaagtttttgttacggatgatggtgctgaaactgatcttgatttaggtcactatgagaggtttacaaatagatctgctaaaaaaactgatagtacatcatcaggaaaaatctactctaatgttttaaagaaagaaagaaaaggagattatcttggcgctactattcaagttatccctcatgtgacagatgaaattaaacttttcattaattctaattttgaagatgaagatattataatttacgaaattggtggcactgttggtgatattgaatctctaccttttttagatgctataagacagattagaaatgataaaaaaatatcatcagctttaatacacatgacctatgttccttatttaagttcagctggggaattaaaaacaaaacctacccaacactctgttaaggaattactaaattcaggtattcaacctgatattataatgtgcagatgtgaaaaagaaattaatcaggagtcactggaaaaaatatcacaattttgtaatgtaaaaaaagattcagtcattcctgccttaaatgctaattctatttatgaagttccatcaatttattctaaagctggactcgataaggttttacttgagcatttaggttatgatatttctaaatatcctcttaatttagaagcttgggaaaatttaacaaataaaattaataatttaaaaaaagaagtaacgattggtgttgttggaaaatatacaaacctaaaagatagttataaatctctaatagaagcccttaatcatggaggcattgaaaataatgttaaggttgaaattaattggataaatgcagaaaaaattaaaacatctgaattagtaaaagagcttaaaagtgtagacggcatattaatacctggtggttttggttacagaggtgttgaaggtaaaattttagcaataaagtatgcaagagaaaacaatattcctttttttggaatttgtttagggatgcaattaagtgtaattgagatagcaagaaatgtttttgatttgtcagactctaattcaactgaatttcaatcaactaaaaatccagtagttagtctaatgacagaatggcacaataagaataaaattgagaaaagagaccaggccagtgataaaggaggcacgatgagactcggagcctataaagctatactgaaaaaagactctaaagttagtgagatttataatgcaacggaaatttcagagaggcatcgacacagatatgaagttgatttatctcacactaaagattttgataaaaaaggattccatttttctggtatgtctcctgataaagtacttccagaagtattagaaagcgcaaatcataaatggtttattggtgtccagtttcatcctgaattaaaatctagacctttagcaccacatcctttattttcatcttttataaaacattgcataaaatga
